United States Patent Application Publication US 2008/0276334 A1 - sequence listing, part 10

SEQ ID NO: 64992 - DNA, 298 bp, Glycine max
  Clone ID: 700758775H1
gatggagggaactaatagtagcggtgataacgtgagtgcgggtgtggtgcagagtaggatgaggatgaaggtgatggtggctatagacgagagtgaaggaagcttctatgctcttaagtgggcccttgataacctcttcagcagcatggccactgtgggagaagcatcatcacctgataatgatggcatggtgttcttggttcatgttgagcccaaagttcacaactatgtgtatcgcatcggacccggggtagcagacttttatcctgcaactgtagtagtgggttcggtgaagaaa

SEQ ID NO: 64993 - DNA, 285 bp, Glycine max
  Clone ID: 700758776H1
agccactcaggcttccattgcaggatgtctacaaaattggtggtattggtaccgtgccagtgggacgtgttgagactggtgtcgtgaagcccggtatggtggtgacttttggtcccactgggctgacaactgaggttaagtctgttgagatgcaccatgaggctctcacagaggctcttccaggtgacaatgttggctttaatgtgacaaatgttgcagtcaaggatctcaagcgtggttttgttgcatccaactccaaggatgaccctgccagggaagctgcca

SEQ ID NO: 64994 - DNA, 267 bp, Glycine max
  Clone ID: 700758778H1
agtggaaggaggtctcagcgttatcagccccaagtggcaagaacaacaagatgaagatgaagatggagacgaagatgatgaagatgaacaaattccctctcaccctcctcgccgaccaagccatggaaagcgtgaacaagacgaggtcgatgacgaagatgatgatatacctcgacctagtcgaccaagccaaggaaagcgtgaacaagaccaggaccaggacgaggacgaagatgaggatgaggatcaacctcgcaagagccgcga

SEQ ID NO: 64995 - DNA, 152 bp, Glycine max
  Clone ID: 700758779H1
gaggagaaggggaaatgagataaagggcagaaacacaatagaagttcattcaagtttgaaataccaattcggacttttgaggatctgtggaatctcacaactgtcaccagtcgccagtgtctatgcattcggatcattcccgagatctgatc

SEQ ID NO: 64996 - DNA, 300 bp, Glycine max
  Clone ID: 700758780H1
gctcgaggcgcgttctacacgtgttgccgatctcggatgttgtaagattagtttatgatgtgaagctatggagtggaaaatatgtggatgtaggagatttcgggatgaatggcctcaaaacgctttgtcgtttgtggttattgagtcctgagtgatcttgtcatccgacctttgccatgacaggtgcgcttgcatggcaggtcaaaaaatgttaataaaaaaagttttattggtttggggagagatcgcacgggggttgcccggggtctcttcctcttgtgtggtgtggtgtttgctgtg

SEQ ID NO: 64997 - DNA, 309 bp, Glycine max
  Clone ID: 700758781H1
actggtccttaaacactcatcagtcatcaccatggccaagctagttttttccctttgttttctgcttttcagtggctgctgcttcgctttcagttccagagagcagcctcagcaaaacgagtgccagatccaaaaactcaatgccctcaaaccggataaccgtatagagtcagaaggagggctcattgagacatggaaccctaacaacaagccattccagtgtgccggtgttgccctctctcgctgcaccctcaaccgcaacgcccttcgtagaccttcctacaccaacggtccccaggaaatctacat

SEQ ID NO: 64998 - DNA, 316 bp, Glycine max
  Clone ID: 700758783H1
catagaatcagttccgatttgaagcctggaatggtgtttgttgtccctcccggtcatcccttcgtcaccatagcttccaataaagagaatctcctcatgatttgcttcgaggttaacgctcgagacaacaagaagtttacatttgcagggaaggacaacattgtgagttctctggacaacgttgctaaggagcttgcctttaactatccttctgagatggtgaacggagtattcgaccgaaaggagagtttctttttcccttttgagttgccgagagaggagcgtggtcgtcgcgctgatgcgtgagacgtttaga

SEQ ID NO: 64999 - DNA, 303 bp, Glycine max
  Clone ID: 700758785H1
tgagaagcatgaacatcggagacaggaagaagaagaagagcatccccagcgacgaatgaatgggcaattgcggaagcagagaggaatctgccgtagtttccaaggctcaagttgttcagcagcttcaccatgcgacgtcgttgggcgccagtgccaggaccgacaagaagcacgctcacaggcacaatctcagcgagtgcgcttcggatctcagcgagtcctgttccacaccgcgcggtaacaatagcagcaacacgctgctctacacgcacgtcatcgctttcacgctctaggagttggaga

SEQ ID NO: 65000 - DNA, 309 bp, Glycine max
  Clone ID: 700758786H1
atactatgtggtcaaccctgacaacaacgaaaatctcagattaataacactcgccatacccgttaacaagcctggtagatttgagagtttcttcctatctagcactgaagctcaacaatcctacttgcaaggattcagcaggaacattttagaggcctcctacgataccaaattcgaggagatcaacaaggttctgtttagtagagaggaagggcagcagcaaggggagcagaggctgcaagagagcgtgattgtggaaatctcgaaggaacagattcgggcactgagcaaacgtgccaaatctagttc

SEQ ID NO: 65001 - DNA, 309 bp, Glycine max
  Clone ID: 700758787H1
aaacactcatcagtcatcaccatggccaagctagttttttccctttgtattctgcttttcagtggctgctgcttcgctttcagttccagagagcagcctcagcaaaacgagtgccagatccaaaaactcaatgccctcaaaccggataaccgtatagagtcagaaggagggctcattgagacatggaaccctaacaacaagccattccagtgtgccggtgttgccctctctcgctgcaccctcaaccgcaacgcccttcgtagaccttcctacaccaacggtccccaggaaatctacatccaacaaggt

SEQ ID NO: 65002 - DNA, 283 bp, Glycine max
  Clone ID: 700758788H1
tgccctctctcgctgcacccttaaccgcaatgcccttcgtagaccttcctacaccaacggtccctaggaaatctacatacaacaaggtaatggtatttttggcatgatattcccgggttgtcctagcacttatcaagagccgcaagaatctcagcaacgaggacgaagccagaggccccaagaccgtcaccaaaaggtacatcgcttcagagagggtgatttgatcgcagtgcctactggtgttgcatggtggatgtacaacaatgaagacactcctgttgtt

SEQ ID NO: 65003 - DNA, 252 bp, Glycine max
  Clone ID: 700758789H1
tttctgaaaaggaagatcaagaaaaacccaaaaagattgatgccagattgagacaaagaatagatcctcaatacaatgaggttcaggctcagatggaaacaaatttgtctaaattgtctcttgatgatgttgaaactcctaaaggttccatgttggatcttaaaatttctcaatctaaaattgcacttcccaaaaacacagttggaggaaccattctgcgtagtgacctatgggcaaattttttgacagagg

SEQ ID NO: 65004 - DNA, 278 bp, Glycine max
  Clone ID: 700758790H1
cggctcgacgaaagatgtttggagagttgaatgtggaatcccttctggatttccgctcacagttatttgcaatagcatttttaatgagatgctcattagatatagctatgaaaaattactgcgccaggctaaagctccaagtatgtttttacaatctttcaaaaatttggtttctatgtgtgtgtatggtgatgataacttaattagtgttcatgaatatgtcaagccttactttagtggttctacattgaatagctttctagctggtcataatatca

SEQ ID NO: 65005 - DNA, 297 bp, Glycine max
  Clone ID: 700758791H1
atcaccctttaactttgtgtggacaataaacaaatgtcatgggcgtttctgtctttcaactcagatattagtgtttctttaatatatcgccaatgttgtcatattcttatgttctgtttttaaaaccccttttgttcttagcttaagcgagagtggagtgtgtagcttactagcttgtgtatgtagtctctagatttggtaattgatttgaaatacacaatttcatttgtatcaacgatcttgttcatgtatcttatgtaaactgtgctattcattactttcaaattaataaatcgg

SEQ ID NO: 65006 - DNA, 295 bp, Glycine max
  Clone ID: 700758793H1
ctccattggtccttaaacactcatcagtcatcaccatggccaagctagttttttccctttgttttctgcttttcagtggctgctgcttcgctttcagttccagagagcagcctcagtgaaacgagtgccagatccaaaaactcaatgacctcaaaccggataaccgtatagagtcagaaggagggctcattgagacatggaaccctaacaacaagccattccagtgtgccggtgttgccctctctcgctgcaccctcaatggcaacgcccttcgtagaccttcctacaccaacgg

SEQ ID NO: 65007 - DNA, 285 bp, Glycine max
  Clone ID: 700758795H1
ttcccttaaagggtgtggcagcgtgcaacccttttgcttcacgtcctggaacctcctatacacatcaacgcttcgctttcccaaacatttaccactggattccccttccacttccaggacaaggttggcatttgccccaaaccgcttataacttttgttttaggaggccctggtagtggaaacggtacacagtgtggaaaaattgttgaaacctttggctttaagcatctgagtgctggagatcttttgagaagggagatggtttctgatagtgaatatggctca

SEQ ID NO: 65008 - DNA, 305 bp, Glycine max
  unsure (1)..(305): unsure at all n locations
  Clone ID: 700758796H1
taataagaaatgaagattaactatcttctttggctcctctttctaagttgttgcttcaacatctccatacctgcttcagccancgctcagttcgtgctcgacactgatgatgatcctcttcaaaacggtggcacatactatatgttgccagttatgagaggaaagggcggtggaatagaagtagattcaactgganaagagatatgccctctcactgttgtgcaatcacccaatgagctcgataaggggatggactagtctntacatctccattacatgctgcttttatcgccgaggctatcctt

SEQ ID NO: 65009 - DNA, 288 bp, Glycine max
  Clone ID: 700758801H1
ctcgagccgctcgagccgcttaattattaacacttccttagttcaatatggggaagcccttcactctctactctttcttccctttgcttgctactcttgtcgagtgcatgctttgctattagctccagcaagctcaacgagtgccaactcaacaacctcaacgcgttggaacccgaccaccgcgttgagtccgaaggtcgtttgattcaaacatggaactctcaacaccctgagctgaaatgcgccggtgtcactgtttccaaactcaccctcaaccgcaatggcctc

SEQ ID NO: 65010 - DNA, 97 bp, Glycine max
  Clone ID: 700758802H1
tgaaattttgataaaccgcgatcacaggttgccgcaccttaaaaccggaaacaaaagcaatcgttacttgattacaagaatctctcaattgcttcct

SEQ ID NO: 65011 - DNA, 284 bp, Glycine max
  Clone ID: 700758803H1
tgagaaaacaatttttacttgcagagatttggacatcttggttgtttattatacaatagcaactcgatttagaaaatttctaccgcattacattaggtggcatctgtataccttgttgatctacattctcccatcttttctcactgctgaaattaaatataagcggaatcagagtaatattcagatttccggcttattttacgacggcagatacaaattctggactaaacacgagaaaaatcttgctttgacagaagaggaaaagatggaagtgattagaaata

SEQ ID NO: 65012 - DNA, 280 bp, Glycine max
  Clone ID: 700758804H1
aaattatgttccagtttatgtgatgctcccactcggagttgtcaatgttgacaatgtttttgaagacccagatggccttaaagaacagctcttgcagcttcgagctgcgggtgttgacggggttatggttgatgtgtggtgggggatcatagaactgaaggggcctaagcagtatgattggagagcctacaggagtttgtttcagctggttcaagaatgtggcttgacactgcaagctattatgtcattccatcaatgtggagggaacgtaggagatata

SEQ ID NO: 65013 - DNA, 283 bp, Glycine max
  Clone ID: 700758805H1
attgaaattttcacaagaggaatttcttacagcttggtcaactcaggtgcgtcctgcaacaactctgttggctgatgggtgcccatatgtgtatgctatggtgcatgatagttcagtgtctacaataccaggtgattttgtcattggtgttaagttgacaaccataaacaatatgtgtgcatatgggctcaatcctggtatttcaggttctcgtcttttgggcaccattcctcagtccatttcacagcaaactgtttggaatcaaatggcaacagtgagaaca

SEQ ID NO: 65014 - DNA, 236 bp, Glycine max
  Clone ID: 700758809H1
gtcgatcccttctttttcgagaaaccactctctctctctttcttaattcactttctctctctaaaatggcggctgcttctagaagatcaagcgggccagtcctccgaacactctcgccggcgggaaggtttcgcaattcccggccatcgccggcgaccaccgccttcgcgtcctcaacttcaaccttctccgcacgctccaccgctttcttccagaaccgttccagctcttccaca

SEQ ID NO: 65015 - DNA, 281 bp, Glycine max
  Clone ID: 700758811H1
ctctccttttctctctctagaattctcagatttgcggggcgagatgatgcagcagccacgacccggcatggcacctcccaccatgggccagcagccgcagcaacagtaccagtagcagcctccgccgcagcagcaacaaccctacgtcatgatgtcgccgcagcatcaggcgccgcagcctatgtgggccccatccgcccagcctccgctgccgcagcagcctgctagcgccgacgaggtccgaagcctctggatccgggatctgcagtactggctggacg

SEQ ID NO: 65016 - DNA, 283 bp, Glycine max
  Clone ID: 700758814H1
gcggtttcctttgttggtgttgctgggaactgttttcctggcatcagtttgtgtctcattaaaggtgagagaggatgagaataaccctttctacttgagaagctctaacagcttccaaactctctttgagaaccaaaacggtcgcattcgtctcctccagagattcaacaaacgctccccacaacttgagaaccttcgagactaccggattgtccagtttcagtcaaaacccaacacaatccttctcccccaccatgctgacgccgatttcctcctctttgtc

SEQ ID NO: 65017 - DNA, 270 bp, Glycine max
  Clone ID: 700758195H1
ctcccaaggaatggcaactggatctaccttgtgacaaaattcctagtgtcttgaccacaactgatgagagattggtaggcacagaacatgagggatatgatccttttcttggtggaattcaaaaatatgcactcccatgatgcccctagatgaagaaattctttctaaggttgcacaagatatagttgaggaatggtttgattgtgttgatgaggaggattcctttgaggaagtttctttgagtgcagcactcaatggtgttgagggttt

SEQ ID NO: 65018 - DNA, 268 bp, Glycine max
  Clone ID: 700758196H1
cctagtacaccgtattaaagaatttaagatatactatgatgagagcgcggttcccattactgttgctgggagttgttttcctggcatcagtttctgtctcatttggcattgcgtattgggaaaagcagaccccagtcacaacaagtgcctccgaagttgcaatagcgagaaagactcctacaggaaccaagcatgccacgctcgttgcaacctccttaaggtggaggaagaagaagaatgcgaagaaggtcaaattccacgacgacga

SEQ ID NO: 65019 - DNA, 262 bp, Glycine max
  Clone ID: 700758201H1
cactgttccaactatggaagagtgagcatggacgtgtctaccataaccacgaagaagaggcaaagagacttgagattttcaagaataacttgaactatatcagggacatgaatgcaaacagaaaatcaccccattctcatcgtttaggattgaacaagtttgctgacatcactcctcaagagttcagcaaaaagtacttgcaagctcccaaggatgtgtcgcagcaaatcaaaatggccaacaagagaatgaagaaggaaca

SEQ ID NO: 65020 - DNA, 260 bp, Glycine max
  Clone ID: 700758202H1
cccaactaacaataattccttcacttgcagaacttagttatctgttgcatcatcatcatcttcattagtgttagccctaaacttcaccttcaaccatgaccacagtgccaccacacagtgtccaagtgcacacaacaacacaccgctacgaagccggcgtcgtcccgccggctcgttttgaggcgccgcgttacgaagccggcatcaaggcgccctcttccatttaccattccgagagaggtccgacgacctctcaggtt

SEQ ID NO: 65021 - DNA, 252 bp, Glycine max
  Clone ID: 700758203H1
agcagattcccttgatctagatgggtacacaatggacgaggcacttggtagtcgaaggttacttatgttagattaccatgatatcttcatgccatatgtgaggcagataaatcagctgaattctgccaagacttatgcgacaaggactatcctttttttttgagagaagatggaactttaaagccagtggccatcgaattaagtttgccacattctgctggggatctgtcagatgccgtcagtcaagtcgtc

SEQ ID NO: 65022 - DNA, 251 bp, Glycine max
  Clone ID: 700758204H1
agcgcgggtaaacggcgggagtaactatgactctcttaaggtagccaaatgcctcgtcatctaattagtgacgcgcatgaatggattaacgagattcccactgtccctgtctactatccagcgaaaccacagccaagggaacgggcttggcggaatcagcggggaaagaagaccctgttgagcttgactctagtccgactttgtgaaatgacttgagaggtgtaggataagtgggagctggaaacagcgaa

SEQ ID NO: 65023 - DNA, 248 bp, Glycine max
  Clone ID: 700758206H1
gggtgtttataatggacaattgtgaggagctcattcctgagtaccttggatttgtgaaaggtgttgttgactccgatgacttgccgctcaacatctctcgtgagatgctgcaacaaaacaagatcctgaaggtgatcaggaagaatctcgtgaagaagtgcattgagatgttcaatgaaattgcggagaacaaggaagattacaacaagttctatgatgctttttcgaagaatttgaagttgggtatc

SEQ ID NO: 65024 - DNA, 253 bp, Glycine max
  Clone ID: 700758207H1
cggctcgaggtgcggtttcctttgttggtgttgctgggaactgttttcctggcatcagtttgtgtctcattaaaggtgagagaggatgagaataaccctttctacttgagaagctctaacagcttccaaactctctttgagaaccaaaacggtcgcattcgtctcctccagagattcaacaaacgctccccacaacttgagaaccttcgagactaccggattgtccagtttcagtcaaaacccaacacaatcc

SEQ ID NO: 65025 - DNA, 253 bp, Glycine max
  Clone ID: 700758208H1
ctccattgtctttgaacactcatcaccatggccaagcttgtactttccctttgtttccttcttttcagtggctgcttcgctctgagagagcaggcacagcaaaatgagtgccagatccaaaagctgaatgccctcaaaccggataaccgtatagagtcggaaggtgggttcattgagacctggaaccctaacaacaagccattccagtgtgccggtgttgccctctctcgctgcacccttaaccgcaatgccc

SEQ ID NO: 65026 - DNA, 253 bp, Glycine max
  Clone ID: 700758209H1
cgtccgaaccctctggatcggggatctgcagtactggatggacgagaactatctcaatacctgctttgctcacaccggcgaggttacatcggttaaagtaattcgaaacaagcaaactagtcaatctgaaggttatgggtttattgagtttaatagtcgtgctggagctgagagaattcttcaaacatataatggggcaataatgccaaatggggggcagagtttcaggttgaattgggcaacttttagtgct

SEQ ID NO: 65027 - DNA, 250 bp, Glycine max
  Clone ID: 700758210H1
acttattaacactttccttagttcaatatggggaagcccttcttcactctctctctttcttccctttgcttgctactcttgtcgagtgcatgctttgctattacctccagcaagttcaacgagtgccaactcaacaacctcaacgcgttggaacccgaccaccgcgttgagtccgaaggtggtcttattgaaacatggaactctcaacaccctgagctgcaatgcgccggtgtcactgtttccaaacgca

SEQ ID NO: 65028 - DNA, 254 bp, Glycine max
  Clone ID: 700758211H1
atcctaaacgatgagaatggggtgaacaagtttgctgacatcactcctcaagagttcagcaaaaagtacttgcaagctcccaaggatgtgtcgcagcaaatcaaaatggccaacaagaaaatgaagaaggaacaatattcttgtgaacatccacctgcatcatgggattggaggaaaaaaggtgtcatcacccaagtaaagtaccaagggggctgtggaagcggttgggcgttttctgccacgggagccataga

SEQ ID NO: 65029 - DNA, 250 bp, Glycine max
  Clone ID: 700758212H1
gtagttcaaatacccctaatggcacaggaggaaattctgtcttctagtgcaagtgatttcagaactgcaatggtgagtaaaaatagcaagcctcaagctactgcaatgcatgtgggagctatagaaattatcattgatagtttcgcaagtcctgactgcaacatagttggtgcaatgcttttggttgatacttatcataccaatcctgaaaatgcagttcgtagtatttttgttgcgcctttcagaggcg

SEQ ID NO: 65030 - DNA, 246 bp, Glycine max
  Clone ID: 700758213H1
aatcgatgctcgacggtcacggctcagtttttgttcatcactgaccaagccattgcgatgactaccaaactttctttagctatctttttcttttttcttttagccttattttcaaacctagcctttggcaaatgtaaagaaaccgaggtagaagaagaagaccctgagctcgtaacatgcaaacaccaatgccaacagccacagcaatacactgagggtgacaagcgggtatgcttgcaaagatgt

SEQ ID NO: 65031 - DNA, 249 bp, Glycine max
  Clone ID: 700758214H1
tagtgcaccgtaagggttgtgaagcaggcagagaagagccatggtgcacgtttacttctaccgaaactatgggaaaacgttcaagaagcctcgtcgtccctacgagaaggagcgtttggacgccgagttgaagctggtcggtgagtacgggcttcgctgcaagagggagttatggagggtccagtacgccctgagccgcatccgtaacaacgccagaaacctattgacccttgatgagaagaaccctcg

SEQ ID NO: 65032 - DNA, 255 bp, Glycine max
  Clone ID: 700758215H1
atgcttacctttaccaacatcacccagagatctatgagtactattcactacaactcacatgcaacgaagatagcactggtgatcgatggcagagggcatcttcaaatatcatgtccacacatgtcatcaaggtcgtcacactcgaagcatgataagagtagcccttcataccatagaatcagttccgatttgaagcctggaatggtgtttgttgtccctcccggtcatcccttcgtcaccatagcttccaataaa

SEQ ID NO: 65033 - DNA, 256 bp, Glycine max
  Clone ID: 700758216H1
ttctatatcaattttggttaagagtcttgaaaaagcaagagaaaaaaaaataccaaccatggcaaccatttctgatcaacctagagggtcctactcctatggaacctcatatggagcaccctatggaaccacgtatgagaccaacaccagcattaacaaaccaccttcacgccaaacagtgaagttcataactgctgccactattggcatcacactcttgctcctgtctgggttgaccctcacaggcactgtcata

SEQ ID NO: 65034 - DNA, 256 bp, Glycine max
  Clone ID: 700758217H1
gcaaagaatgctattctcatgaatatgccaaatgctgttctttcaatgtggagatattttgttggagatctcgtctttgaagtttctaagatgacttctccctacattaaatgtacagtctctttcttcatagcatttggaaatttggctgatgacaccatcaattttgaggcttttccccacaagctggtgcagtttggagagattcaggaaaaagttgtattgaaattttcacaagaggaatttcttacagctt

SEQ ID NO: 65035 - DNA, 254 bp, Glycine max
  Clone ID: 700758218H1
tgaattttgattctagcaagcagagcttttgtcaattttctattgaccttctcggtggaggaattttagtggacaaaactggagattggatcacacttatacaaaattctccaattagtaacttgttgagagttgctgcttggaagaaaggctgtttaatggttaagattgtgatgtctgggaatgcagcagtcaaaaggagtgattgggcctcattggtacaagtgtttttaacaaacagcaacagtacagag

SEQ ID NO: 65036 - DNA, 252 bp, Glycine max
  Clone ID: 700758219H1
cattgtctttgaacactcatcaccatggccaagcttgttctttccctttgtttccttcttttcagtggctgcttcgctctgagagagcaggcacagcaaaatgagtgccagatccaaaagctgaatgccctcaaaccggataaccgtatagagtcggaaggtgggttcattgagacctggaaccctaacaacaagccattccagtgtgccggtgttgccctctctcgctgcacccttaaccgcaatgccctt

SEQ ID NO: 65037 - DNA, 248 bp, Glycine max
  Clone ID: 700758221H1
tttgtcctctttgttgaggacaaagcagcagaccacaagaccgtcaccagaagatctataacttcagagagggtgatttgatcgcagtgcctactggtgttgcatggtggatgtacaacaatgaagacactcctgttgttgccgtttctattattgacaccaacagcttggagaaccagctcgaccagatgcctaggagattctatcttgctgggaaccaagagcaagagtttctaaaatatcagcaa

SEQ ID NO: 65038 - DNA, 163 bp, Glycine max
  Clone ID: 700758222H1
cctaatttgtgtaccgtgcctttgctctaatgccacactcgtgactacggtcactgcaggaagagagaaaggcgatggacctcggaacctatgaagtgccagaaggagtggacattctaggaagataagatgcagagtttgcaaaaatcctcacaaaagacgc

SEQ ID NO: 65039 - DNA, 251 bp, Glycine max
  Clone ID: 700758223H1
aatatctacacaaaagtgttccacttgagtgaaaagtagtgtgttaagaactaaacaatttttcaatggcgtccaagaaacaagaggagcgagctgaggcagctgcgaaagttgctgccaaagaactcgaacaagtcaacagagaaagaagagaccgtgatttcggtgttgttgctgaacaacaacaacaacatcatcaggaagatcaacaaaaacgtggtgtaatcgggtccatgtttaaggcggtgcaa

SEQ ID NO: 65040 - DNA, 250 bp, Glycine max
  Clone ID: 700758224H1
atcaccattactgatggtattgacaaaactagtgcaactttgcaatttagaaagttagcagattgtgattttctcaagagaaactttaagcagatgtctaatgttttgtgggtggctcctgaggacaaggcgagtttatggtcacaacttcattatgtttcgtgtaataatctggaaatgcaagaagcttatcttgtcaatctcgtaaatgtgttacgagaattgtatttgcacagtccagaggaagctc

SEQ ID NO: 65041 - DNA, 248 bp, Glycine max
  Clone ID: 700758225H1
ctcgagcgcttgcacaaaagcaatgactatgtcatttaatccaaacccgtgttctgatgcatggagtttggaatttctgaagcgtactggatttcattgcgatatcatttgtgtcactggatggactgccaccccaatgcaggatgttcaggttacaattgattggtttatttcctctcaggaatgtgttcccaggacctattgtgttttaaatccacaaaatccttttgtgttaaataggtggatgg

SEQ ID NO: 65042 - DNA, 251 bp, Glycine max
  Clone ID: 700758226H1
gttcaatatcctagtataccttaataaataatttaagatactatgatgagagcacggttcccattactgttgctgggacttgttttcctggcttcagtttctgtctcatttggcattgcttactgggaaaaagagaaccccaaacacaacaagtgtctccagagttgcaatagcgagagagactcgtacaggaaccaagcatgccacgctcgttgcaacctccttaaggtggagaaagaagaatgtgaaga

SEQ ID NO: 65043 - DNA, 250 bp, Glycine max
  Clone ID: 700758227H1
gaaagatgtcgaagcgtggtcgtggtggttcggcggggaacaagttccgcatgtcgctgggtcttccagtggcggcgacgtagaactgcgccgacaacacgggggcgaagaacctctacatcatttcggtgaaagggatcaaaggccgtttgaaccgtcttccctcggcctgcgttggcgacatggtgatggccaccgtgaagaagggaaaacccgatctgaggaagaaggtcttgccagctgtcatcgt

SEQ ID NO: 65044 - DNA, 249 bp, Glycine max
  Clone ID: 700758228H1
attgaattttgattctagcaagcagagcttttgtcaattttctattgaccttctcggtggaggaattttagtggacaaaactggagattggatcacacttatacaaaattctccaattagtaacttgttgagagatgctgcttggaagaaaggctgtttaatggttaagattgtgatgtctgggaatgcagcagtcaaaaggagtgattgggcctcattggtacaagtgtttttaacaaacagcaacag

SEQ ID NO: 65045 - DNA, 251 bp, Glycine max
  Clone ID: 700758229H1
cacaaaaatggagaaccaacaaccggcacctatctccgtgacactgctacatctgctatccaaaacttcgctcccatcaacaaaatccaccaacatctctgcgcgtttcacttttactcatatgacatgagccggcaagtggaggcacaccatttttgcgcgcaccagaacgaggagatgaggcagtgccttatctacgacagccccgagaagaaagccaggctcatagggctggaatacatcatctccga

SEQ ID NO: 65046 - DNA, 250 bp, Glycine max
  Clone ID: 700758230H1
ttctctccattgtctttgaacactgcatcacgatggccaagcttgttctttccctgtgtgtccttcttttcagtggctgcttcgctctgagagagcaggcacagcaaaatgagtgccagatccaaaagctgaatgccctcaaaccggataaccgtatagagtcggaaggtgggttcattgagacctggaaccctaacaacaagccattccagtgtgccggtgttgccctctctcgctgcacccttaaccg

SEQ ID NO: 65047 - DNA, 256 bp, Glycine max
  Clone ID: 700758232H1
cgtattaaagaatttaagatatactatgatgagagcgcggttcccattactgttgctgggagttgttttcctggcatcagtttctgtctcatttggcattgcgtattgggaaaagcagaaccccagtcacaacaagtgcctccgaagttgcaatagcgagaaagactcctacaggaaccaagcatgccacgctcgttgcaacctccttaaggtggaggaagaagaagaatgcgaagaaggtcaaattccacgacca

SEQ ID NO: 65048 - DNA, 236 bp, Glycine max
  Clone ID: 700758233H1
atatcctagtataccttaataaataatttaagatactatgatgagagcatggttcccattactgttgctgggacttgttttcctggcttcagtttctgtctcatttggctttgcttactgggaaaaagagaaccccaaacacaacaagtgtctccagagttgcaatagcgagagagactcgtacaggaaccaagcatgccacgctcgttgcaactcccttaggggtggagaaagaa

SEQ ID NO: 65049 - DNA, 146 bp, Glycine max
  Clone ID: 700758234H1
ctttttccttaagaaaaggaaaatggggcgatatattggagtacgcatgggcaaataaatgctcagtaaaattatgatacatgcacattcctcagcacactaaaacagattccatgtccaaaaaaaaagaaagagagaaagagaag

SEQ ID NO: 65050 - DNA, 247 bp, Glycine max
  Clone ID: 700758236H1
gcattatcagaagcagaaagaaagaataagaggttgcagcaacaatggcagccatggctgcgcttcagagctcaatggtcggtctctccctctcctccaactctttcttaggccaacgcctttctcccatcaccctcccctctcttcttccgggtaagtcaacagagaagcaatgtcctattgtaatgaggcttaaacgatgggaacggaaggagtgtaaaccaaacagccttcctatcttgcacaa

SEQ ID NO: 65051 - DNA, 247 bp, Glycine max
  Clone ID: 700758239H1
cctcaacaacaacaaacacagcctgggaaggagcatgctatgaatccagtaccccaattcactagccctgactacaagccttcaaataaacttcaaggaaagatagcattagtgactgggggtgactctgggattggacgagcggtgtgtaacttgtttgccttagaaggtgctaccgtgggcttcacatatgtgaaggggcatgaggacaaggacgcgagggacacgttggaaatgatcaagaggg

SEQ ID NO: 65052 - DNA, 250 bp, Glycine max
  Clone ID: 700758240H1
aaacctagccttgggcaaacttaaagaaaccgaggtcgaagaagatcccgagctcgtaacatgcaaacaccagtgccaacagcaacggcaatacactgagagtgacaagcgaacatgcttgcaacaatgtgacagtatgaagcaagagcgagagaaacaagtcgaagaggaaactcgcgagaaggaagaagaacatcaagagcagcatgaggaggaggaagaccaaaatccctacgtttttgaagaagat

SEQ ID NO: 65053 - DNA, 249 bp, Glycine max
  Clone ID: 700758241H1
cgctggcggttggcgcaacctttcgatcttcatccaacggggcaacgttcgatctgctgaactgaacttctttttatatgcactctgtgatttcactctgcttcgccatactatgggggacaacaacagcaacaacgcatgccttcatgcgcaaccaaaacgccgccgttcaggcccgcaccaaagcgcagaaccgctccaacgtccttcagctcaaactgattggacagagtcacccaaccggtctca

SEQ ID NO: 65054 - DNA, 248 bp, Glycine max
  Clone ID: 700758244H1
aatcccttctggatttccgctcacagttatttgcaatagcatttttaatgagatgctcattagatatagctatgaaaaattactgcgccaggctagagctccaagcatgtttttacaatccttcaaaaattttgtttctttgtgtgtgtatggtgatgataacttaattagtgttcatgaatatgtcaagccttactttagtggttctaaattgaaaagctttctagctggtcataatatcaccatta

SEQ ID NO: 65055 - DNA, 107 bp, Glycine max
  Clone ID: 700758247H1
caagaatctctcaatttcttcctacttctttgtgtacgatttcttaagggaaagaagatcactctctgtgctggccacagatttcgtgaatcattttcttttccact

SEQ ID NO: 65056 - DNA, 128 bp, Glycine max
  Clone ID: 700758248H1
ggttggtgctggctttaaacctcgctctcactcgcatccctccttattagctttaatttaaacctctcgtgcggtgttgtcgtctcgcgtccccaaatctctcctcatctcgttcctcattctacttc

SEQ ID NO: 65057 - DNA, 224 bp, Glycine max
  unsure (1)..(224): unsure at all n locations
  Clone ID: 700758249H1
cttggattagtgcttccactctcctatctagtttangacttcgtgggtagacttgtctatctctcccctacgatcacgctcttaggctcatcgatccgcattgccgtacatagtggtcttattgtgaaaacacttgggcgttggtgcacatgtcagcttcattgatgttctctggagacaacaggctcactcagaaaacagtctttacttgcagagatttggac

SEQ ID NO: 65058 - DNA, 248 bp, Glycine max
  Clone ID: 700758250H1
ctcatcgtattaaaggaatgattaaaatggtggccacagttggtattcctgagaatacaggtatatcattggcctgtgctatgagtagttcttttaggtggcgtgtcagttctgatatttacaccatctgctctcatgactgtgaattatggaatcttgcttgcacaaaatctatgactatgtgcttgaatccagacccgtgttctgatgcgtggtgtttggatattctgaagcgtaccggatttcat

SEQ ID NO: 65059 - DNA, 220 bp, Glycine max
  Clone ID: 700758251H1
atttacaccatctgctctcatgactgtgaattgtggaatcttgctgtgacaaaagcaatgacgatgttctttaatccaaacccgtgttctgatgcatggagtttggaattactgaagcgtactggatttcagtgcgatatcatttgtgtcactcgatggactgccaccccaatgcaggatgttcaggttacaattgatgggttgatttcctctcaggaat

SEQ ID NO: 65060 - DNA, 247 bp, Glycine max
  Clone ID: 700758252H1
aatggcttagatggccagggaagtaaaattctggttaggaagttacctgaaagcaagtaccctgtagttcgattatccgaaatacctgctaagcagttggaaaatgataaatctgagcagaaaaaaattgttattagacctaggcctaataaaaacagtttgaatgatgctaacggagttgggatgaaaggaaaccctttaagaagtgtggaagaaaggaaggaggaatatgaccgggcacgggcac

SEQ ID NO: 65061 - DNA, 246 bp, Glycine max
  Clone ID: 700758253H1
aagttattatcaaataattaattaaattcctcgtggaatcttgttgaagccatgtctacagctggtcaggtcatcaagtgcagagctgcggtggcatgggaagcagggaagccactatcgatagataccatagaagtggcaccaccccagaaaggtgaagtgcgtttgaagatcctcttcaactccctttgccgtacagatgtttactggtgggatgctaagggccagactccgctgtttcctcgt

SEQ ID NO: 65062 - DNA, 185 bp, Glycine max
  Clone ID: 700758254H1
tgaaattttgataaacctcgatcacaggttgccgcaccttataacttgaaacaaaagcaatcgttacttgatttcaagaatctctcaatttcttcctacttctttgtgtacgatttcttaaggtaaagaaaatcactctctgtgctggccatagacttcgttaatcattttcttttccacacaac

SEQ ID NO: 65063 - DNA, 243 bp, Glycine max
  Clone ID: 700758255H1
tgatgagcttgattgttaccttcttaatgaagacttggtttgtgatgaacttgaggatgttatggaagaggggggaaacattgtggactaccatggctgtgatttctttcctgagcgttggtttgattgcgtggttgtacttcaaactgataacaccattttgtatgaccgtttgagtaggagggggtacaaagattcaaagctttcgaacaatattgaatgtgaaatcttccaagtgctgct

SEQ ID NO: 65064 - DNA, 245 bp, Glycine max
  Clone ID: 700758256H1
ccattgtgcagattgaaccagacatgaattcaaggtttcagcttttgagtaccactaccaatggtgatttcgttcaaggaaaagatctcgcaatggttaaagttaatgtagcatgtgctgctgttggcttgacatcaagttacactccaactccattgttggaatctcgtttgcaggaagacagagggctaattgtggaatattttggaaggatgtcttacgttgctcataacgttaatcagccc

SEQ ID NO: 65065 - DNA, 243 bp, Glycine max
  Clone ID: 700758257H1
tctccacattggaatctgaatgcaaacagtgtgatctatgtgactcgaggacaaggaaaggttagagttgtgaactgccaagggaatgcagtgttcgacggtgagcttaggaggggacaattgctggtggtaccacagaacttcgtggtggcggacaagccggagaacaaggattcgaatacatagtattcaagacacaccacaacgcagtcactagctacttgaaggatgtgtttagggcaa

SEQ ID NO: 65066 - DNA, 91 bp, Glycine max
  Clone ID: 700758258H1
gttgtacctttgaatcgcctatgttaatatctgagtggcgttgtacctttgaatcgccttaataaaatgtcagtcttcaagttttgtcttt

SEQ ID NO: 65067 - DNA, 246 bp, Glycine max
  Clone ID: 700758260H1
aacttattaacactttccttagttcaatatgggtaagcccttcttcactctctctctttcttccctttacttgctactcttgtcgagtgcatgctttgctattacctccagcaagttcaactattgccaactcaacaacctcaacgcgttggaacccgaccaccgcgttgagtccgaaggtggtcttatctaaacatggaactctcaacatcctgagctgcaatgcgccggtgtcactgtttccat

SEQ ID NO: 65068 - DNA, 250 bp, Glycine max
  unsure (1)..(250): unsure at all n locations
  Clone ID: 700758263H1
caaggatggcaatttgtaagaaagatgtttggagagttgaatgtggaatcccttctggatttccgctcacagttatattttatagcatnnntaatgagatgctcattagatatagctatgaaaaattactgcgccaggctaaagctccaagtatgtttttacaatccttcaaaaattttgtttctttgtgtgtgtatggtgatgataacttaattagtgttcatgaatacgtcaagccttactttagtgg

SEQ ID NO: 65069 - DNA, 244 bp, Glycine max
  Clone ID: 700758269H1
gtggaggttgatagtcaagagggagttgctcacattggtgaattgaaatctggtgtctatgttccactgcctacaaaaactaatttggtggaaactcccaaggaatggcaactggatctaccttgtgataaaattcctagtgtcttgactacaactgatgagagattggtaggcacagaacatgagggatatgatcctattcttggtggaattcaaaaatatgccactcccatgatgcccctag

SEQ ID NO: 65070 - DNA, 82 bp, Glycine max
  Clone ID: 700758270H1
ctcgagccgcacgacgacgctagaccctcccccattcttttaatgccctgtaattccagtgacgccattccgagaaatttcg

SEQ ID NO: 65071 - DNA, 243 bp, Glycine max
  Clone ID: 700758271H1
gtcaagttggaatcaacccatactccatggaatggactggtttggccaatagattactgagtaagggcaacgatattctgtgttgcgattatgctagttttgatggtttgattacgaagcaagttatgagcaaaatggcagaaatgatagacagtctttgtggtggtgatgcaaaattcatgcgtgaaaggacacacctgctgttggcttgttgttcaaggatcgcaatttgtaacagagatg

SEQ ID NO: 65072 - DNA, 244 bp, Glycine max
  Clone ID: 700758272H1
cgcatatccattgtgcgcacccaaatactacaagcatttcatttatttttccattccttataaaacccgaaaacaaaaaccacgcaatggtcacgtccaacaccaacaacaccatcctcaaaatctccaaactcgcgatcctcctcgttttgttcgcttcagtctgcaacgtcgctatgtcggactccaccgccaaacccctcgaccagcacgccaccacgggctctgaccctactgcgccacg

SEQ ID NO: 65073 - DNA, 235 bp, Glycine max
  Clone ID: 700758273H1
ctcgagccgaatcggctcgagagagcatctatgtaacagaagtaacagattggccagtacacactggaaatcatttctggacccattcttgcaacaattttgggaacaaccttctggaaactcttttcctttcttagagatgctggtaatggaggagtttttgttggcaatgttgcttcagcattcacaacttcaagtgtgctttaggcccaaagtagtaagcccaacagatatg

SEQ ID NO: 65074 - DNA, 241 bp, Glycine max
  Clone ID: 700758274H1
cactttccttagttcaatatggtgaagcccttcttcactctctctctttcttccctttgcttgctactcttgtcgagtgcatgctttgctattacctccagcaagttcaacgagtgccaactcaacaacctcaacgcgttggaacccgaccaccgcgttgagtccgaagtggtcttattgaaacatggaactctcaacaccctgagctgcaatgcgccggtgtcactgtttccaaacgcac

SEQ ID NO: 65075 - DNA, 240 bp, Glycine max
  Clone ID: 700758276H1
cttaattattaacacttccttagttcaatatggggaagcccttcactctctctctgtcttccctttgcttgctactcttgtcgagtgcatgctttgctattagctccagcaagctcaacgagtgccaactcaacaacgtcaacgcgttggaacccgaccaccgcgttgagtccgaaggtggtttgattcaaacatggaactctcaacaccctgagctgaaatgcgccggtgtcactgttt

SEQ ID NO: 65076 - DNA, 242 bp, Glycine max
  Clone ID: 700758277H1
ttgtctttgaacactcatcaccatggccaagcttgttctttccctttgtttccttcttttcagtggctgcttcgctctgagagagcaggcacagcaaaatgagtgccagatccaaaagctgaatgccctcaaaccggataaccgtatagagtcggaaggtgggttcattgagacctggaaccctaacaacaagccattccagtgtgccggtgttgccctctctcgctgcacccttaaccgca

SEQ ID NO: 65077 - DNA, 243 bp, Glycine max
  Clone ID: 700758278H1
gcaagacaaagagagccaagaaagtgaaggttctgagtctcaaatagaaccacgaatacataagaataagaacccttttcacttcaactctaaaaagttccaaactctcttcaaaaaacaatatggccacgttcgcgtcctccagaggttcaacaaacgctcccaacagcttcagaatctccgagactaccgcattttggagttcaactccaaacccaacacccttcttctcccccaccatgc

SEQ ID NO: 65078 - DNA, 249 bp, Glycine max
  Clone ID: 700758280H1
ttctagcaagcagagcttttgtcagtttgctattgaccttctcggtggaggaatcttagtggacaaaactggagattggatcacacttatacaaaattctccaattagtaacttgttgagagttgctgcttggaagaaaggctgtttaatgatcaagattgtgatgtctgggaatgcagcagtcaaaaggagtgattgggcctcattggtacaagtgtttttaacaaacagcaacagtacagagcattt

SEQ ID NO: 65079 - DNA, 248 bp, Glycine max
  Clone ID: 700758281H1
tctcgagccgaatcggctcgacggctctagctccaccaagagtgctgatgaaatgacaaggctcaaggattatgtgaccaggatgaaagaacgtcagagtgacatctactacatcacaggtgaaagcaagaaggctgttgagaactctccattcttagagaagttgaagaagaagggatacgaggttctttatatggttgatgccattgatgaatatgctgttggtcagctcaaggaatttgagggca

SEQ ID NO: 65080 - DNA, 241 bp, Glycine max
  Clone ID: 700758284H1
taagctttctagaatcttcacttcagaaccgaagccatggcggatcggttcttccccaacccgatgcccgagttcgtacccgaaacgacgccgtccactcctcaggaagaagaagaagccctcacagtgggcgactcgctcccgaagctcctcgccatgccccacgcgccactcttggagcgtctcaaacgcgccgctctcgacctcaaagaaaccatagtgatagaaacgtgggggctgt

SEQ ID NO: 65081 - DNA, 216 bp, Glycine max
  Clone ID: 700758285H1
ctcttccctcttccaatgctatctactccttcctcaacaaagagcattccctctgttactacgtgtcgagccacagtctattcgttccaggctcgttcttctctattcaccaccactcacacttgcacagcacctgccaaattatgatgagcttcagcaacgagcagaccaccttgtgcaactctctcaggatacttcactgccggtagattcatt

SEQ ID NO: 65082 - DNA, 243 bp, Glycine max
  Clone ID: 700758286H1
tgatgataccatcaattttgaggcttttccccacaagctggtgcaatttggagagattcaggaaaaagttgtattgaaattttcacaagaggaatttcttacagcttggtcaactcaggtgcgtcctgcaacaactctgttggctgatgggtgtccatattgtatgcaatggtgcatgatagttcagtgactacaataccaggtgattttgtcattggtgtcaagttgacaaccataaacaat

SEQ ID NO: 65083 - DNA, 244 bp, Glycine max
  Clone ID: 700758288H1
cttgctctatactacacagtacacacactagaagaataatggcttccatcctccactactttttagccctctctctttcttgctcttttcttttcttcttatccgactcagtcacccctacaaaaccaataaaccttgttgttctacccgttcaaaatgatggttccacagggctccattggtccaacctccaaaatagaacccctctaatgcaagtaccagtcctggtggacctcaatggaaa

SEQ ID NO: 65084 - DNA, 242 bp, Glycine max
  Clone ID: 700758289H1
ctcttcttctaccacactacaattcaaaggcgatagtgatactggtaattaatgaaggagatgcaaacattgaacttgttggcctaaaagaacaacaacaggagcagcaacaggaagagcaacctttggaagtgcggaaatatagagccgaattgtctgaacaagatatatttgtaatcccagcaggttatccagttgtggtcaacgctacctcaaatctgaatttctttgctattggtatt

SEQ ID NO: 65085 - DNA, 243 bp, Glycine max
  Clone ID: 700758290H1
agcatgccacgctcgttgcaacctccttaaggtggaggaagaagaagaatgcgaagaaggtcaaattccacgaccacgaccacaacacccggagagggaacgtcagcaacacggtgagaaggaggaagacgaaggtgagcagccacgtccattcccattcccacgcccacgccaacctcatcaagaggaagagcacgagcagaaggaggaacacgaatggcatcgcaaggaggaaaaacacgg

SEQ ID NO: 65086 - DNA, 243 bp, Glycine max
  Clone ID: 700758291H1
tgcttctcctccacccatccacaaacgaacacacactttgattgagaatggggcgtgttcgcacaaagacagtcaagaagtcctcgcggcaagtgatcgagaggtactactctcgcatgacgctggacttccacacgaacaagaaggttctggaagaggtggccatcattccctccaagaggctccgcaacaagatcgcgggattctccacccacctcatgaagcggatccagaagggtcccg

SEQ ID NO: 65087 - DNA, 201 bp, Glycine max
  Clone ID: 700758293H1
gtacaccgtattaaagaattgaagatagactatgatgagagcgcggttcccagtactgtggctgaaagttgtgttcgtggcatcagtttctggctcatgtggcattgcgtatcgggtatagcagagccccagtcacaacaattgcctccgaaagttgcaatagtgggaaggactcctacaggaaccaagcatgccacgctc

SEQ ID NO: 65088 - DNA, 206 bp, Glycine max
  Clone ID: 700758295H1
gccttactttagtggttctaaattgaaaagctttctagctggtcataatatcaccattactgatggtattgactacactagtgcaactttgcaatttagaaagttagcagattgtgattttctcaagagaaactttaagcagatgtctaatgttttgtgggtagctcctgaggacaaggcgagtttatggtcacaacttcattatg

SEQ ID NO: 65089 - DNA, 245 bp, Glycine max
  Clone ID: 700758296H1
atccttttgtgttaaataggtggatggggaaactgactttcccccagggcacttcccgaagtgtcaaaagaatgcctctttctatagggggaggagctggtgcaaagaatgctattctcatgaatatgccaaatgctgttctttcaatgtggagatattttgttggagatctcgtctttgaagtttctaagatgacttctccctacattaaatgtacagtctctttcttcatagcatttggaaat

SEQ ID NO: 65090 - DNA, 266 bp, Glycine max
  Clone ID: 700758301H1
gtacaccgtattaaagaatttaagatatactatgatgagagcgcggttcccattactgttgctgggagttgttttcctggcatcagtttctgtctcatttggcattgcgtattgggaaaagcagaacccagtcacaacaagtgcctccgaagttgcaatagcgagaaagactcctacaggaaccaagcatgccacgctcgttgcaacctccttaaggtggaggaagaagaagaatgcgaagaaggtcaaattccacgaccacgacc

SEQ ID NO: 65091 - DNA, 260 bp, Glycine max
  Clone ID: 700758302H1
taccttaataaataatttaagatactatgatgagagcacggttcccattactgttgctgggacttgttttcctggcttcagtttctgtctcatttggcattgcttactgggaaaaagagaacccaaacacaacaagtgtctccagagttgcaatagcgagagagactcgtacaggaaccaagcatgccacgctcgttgcaacctccttaaggtggagaaagaagaatgtgaagaaggtgaaattccacgaccacgaccac

SEQ ID NO: 65092 - DNA, 251 bp, Glycine max
  Clone ID: 700758303H1
ttaattattaacacttccttagttcaatatggggaagcccttcactctctctctttcttccctttgcttgctactcttgtcgagtgcatgctttgctattagctccagcaagctcaacgagtgcaactcaacaacctcaacgcgttggaacccgaccaccgcgttgagtccgaagtggtttgattcaaacatggaactctcaacaccctgagctgaaatgcgccggtgtcactgtttccaaactcaccctc

SEQ ID NO: 65093 - DNA, 249 bp, Glycine max
  Clone ID: 700758304H1
gagcgaatcggctcagggaactattctgcgtagtgatctattggcaaattacctgacagagggcaatttaagagcaagtgttgatttgcagcgcactcatcgtattaaaggaatgataaaatggtggccacagttggtattcctgagaatacaggtatatcattggcctgtgctatgaatagttcttttagggggcgtgccagttctgatatttacaccatctgctctcaagactgtgaattatggaat

SEQ ID NO: 65094 - DNA, 257 bp, Glycine max
  Clone ID: 700758305H1
gaagaagaagaatgcgaagaaggtcaaattccacgaccacgaccacagcacccggagagggaacgtcagcaacacggtgagaaggaggaagacgaaggtgagcagccacgtccattcccatcccacgcccacgccaacctcatcaagaggaagagcacgagcagaaggaggaacacgaatggcatcgcaaggaggaaaaacacggaggaaagggaagtgaagaggaacaagatgaacgtgaacacccacgcccacac

SEQ ID NO: 65095 - DNA, 254 bp, Glycine max
  Clone ID: 700758306H1
agggagagagaggggatgcaaattccatgagagcagaagaggtgcctcttactccgttacgagttcgacccctcctctcgctcttctcttctcttctcttctcttcatagcaaagcaatatcctattagaatatggaagagagcttcgttttccagtggagcgttatcagatctctcttgtccatccttcagtggtgggccttcaatgtcactgtcatcatcgtcaacaagtggatctttcagaaattggattt

SEQ ID NO: 65096 - DNA, 251 bp, Glycine max
  Clone ID: 700758307H1
tcgaaaagtttccttgacaatctaattctgcaaaaatggcaagcaataaggagtctaagttcccagcacagagccagaaaactcagccaggaaaagaacatgtaatgaatccactcccaaagccacaaatcctgatcacaaggccgccaataaactccagggaaaggtggcgttggtgacaggaggtgactcaggaattggcagagcggtttgcctgtgtttcgcaaaagagggtgcaacgtggcctttac

SEQ ID NO: 65097 - DNA, 247 bp, Glycine max
  Clone ID: 700758308H1
cttgtcagccattggttaaacactcatgcagttgttgagccattcatcatagcaacaaacaggcatctcagtgttgttcaccctatttataaactccttcaccctcactatcgtgaaccatgaacataaatggccttgctcggttatcactggtcaacgacggtggcgttatagaacaaacatttttgtggggaaggtatacggtggaaatgtctgctgtagtttacaaggattgggtttttacaga

SEQ ID NO: 65098 - DNA, 247 bp, Glycine max
  Clone ID: 700758309H1
tcacaacacatctaaacaaaaaatcaagaacaatggcttatgctaggcttgctcctatggctgtcttcttgcttgccacttccaccataatgttcccaacgaagatagaagcagcaattgtaatggtgcatgttcacctttcgagatgccaccgtgccgctcacgtgattgtcgttgtgtccctataggactagttgctggtttctgcatacatccaactggactttcatctgttgcgaagatgatc

SEQ ID NO: 65099 - DNA, 253 bp, Glycine max
  Clone ID: 700758310H1
tcggctcgagccggtaacgagcatgtggtgggtggcgcagaacataacgacgtcgttacgcccttttcccacagagaagaaccccacaattcccaacccctcaccggccaggtgccagtcccgaaagatatttataggtggtttagcgagagaaacgaccattgcccaatttatcaagcactttggtaagtatggtgagatcacggattcggtcatcatgaaggacaggaaaactgggcagcctcgtggattt

SEQ ID NO: 65100 - DNA, 239 bp, Glycine max
  Clone ID: 700758311H1
aacttattaacactttccttagttcaatatggggaagcccttcttcactctctctctttcttccctttgcttgctactcttgtcgagtgcatgctttgctattacctccagcagttcaacgtgtgccaactcaacaacctcaacgcgttggaacccgaccaccgcgttgagtccgaagtggtcttattgaaacatggaactctcaacaccctgagctgcaatgcgccggtgtcactgtt

SEQ ID NO: 65101 - DNA, 238 bp, Glycine max
  Clone ID: 700758312H1
caaacagcaacagtacagagcatttcgatgcatgtaagtggacaaaatcagaaccacattcctgggaattgatcttcccaatagaggtatgtggtcctaataatggctatgaatgtggagttctgagtgggcaaatcaaacttcatggcatttgagtctccttatagacaatcccagacagtctacagtattcgacattctcttgggaatctctcaagattttgaaattgctggtaat

SEQ ID NO: 65102 - DNA, 242 bp, Glycine max
  Clone ID: 700758315H1
aaggagggcaacttactgagatagttcgccgcagaccatatgctgttattttgtttgatgagattgagaaggcacatgctgatgtcttcaatgtattccttcaaattttggatatggaagagtaaccgactcacaaggtcgcacagtaagttttaccaacactgttatcattatgacctcaaatgttggatcacagtacatcttgaacacagatgatgacaccacgccgaaagagttggctt

SEQ ID NO: 65103 - DNA, 242 bp, Glycine max
  Clone ID: 700758316H1
ctagttcaatatcctagtataccttaataaataatttaagctactatgatgagagcacggttcccattactgttgctgggacttgttttcctggcttcagtttctgtctcatttggattgcttactgggaaaaagagaaccccaaacacaacaagtgtctccagagttgcaatagcgagagagactcgtacaggaaccaagcatgccacgctcgttgcaacctccttaaggtggagaaagaa

SEQ ID NO: 65104 - DNA, 261 bp, Glycine max
  Clone ID: 700758318H1
aagaggaagagcacgagcagaaggaggaacacgaatggcatcgcaaggaggaaaaacacggaggaaagggaagtgaagaggaacaagatgaacgtgaacacccacgcccacaccaacctcataaaaggaagaggaaaagcacgaatggcaacacaagcaggaaaagcaccaaggaaaggaaagtgaagaagaagaagaagaccaagacgaggatgaggagcaagacaaagagagccaagaaagtgaaggttctgagtctca

SEQ ID NO: 65105 - DNA, 250 bp, Glycine max
  Clone ID: 700758321H1
atactatgatgagagtgcggtttcctttgttggtgttgctgggaactgttttcctggcatcagtttgtgtctcattaaaggtgagagaggatgagaataaccctttctacttgagaactctaacagcttccaaactctctttgagaaccaaaacggtcgcattcgtctcctccagagattcaacaaacgctccccacaacttgagaaccttcgagactaccggattgtccagtttcagtcaaaacccaac

SEQ ID NO: 65106 - DNA, 247 bp, Glycine max
  Clone ID: 700758323H1
tgaacactcatcaccatggccaagcttgttctttccctttgtttccttcttttcagtggctgcttcgctctgagagagcaggcacagcaaaatgagtgccagatccaaaagctgaagccctcaaaccggataaccgtatagagtcggaaggtgggttcattgagacctggaaccctaacaacaagccattccagtgtgccggtgttgccctctctcgctgcacccttaaccgcaatgcccttcgtag

SEQ ID NO: 65107 - DNA, 245 bp, Glycine max
  Clone ID: 700758324H1
attgaattttgattctagcaagcagagcttttgtcaattctctattgatcttcttggtggaggaattttagtggacaaaactggagattggatcacacttatacaaaattctccattagtaacttgttgagagttgctgcttggaagaaaggctgtttaatggttaagattgtgatgtctgggaatgcagcagtcaaaaggagtgattgggcctcattggtacaagtgtttttaacaaacagcaa

SEQ ID NO: 65108 - DNA, 77 bp, Glycine max
  Clone ID: 700758325H1
tttctctttctctcttcgcctggtcttggcatctccgcagcaccaccaccttccgggctgcttagaccaggtcctct

SEQ ID NO: 65109 - DNA, 242 bp, Glycine max
  Clone ID: 700758326H1
ccctagggtattttaccttgctgggaacccagatatagagtacccagagaccatgcaacaacaacaacagcagaaaagtcatggtggacgcaagcaggggcaacaccagcagaggaagaggaagaaggtggcagcgtgctcagtggcttcagcaaacacttcttggcacaatccttcaacaccaacgaggacccagctgagaaacttcagtctccagacgacgaaaggaagcagatcgtgac

SEQ ID NO: 65110 - DNA, 237 bp, Glycine max
  Clone ID: 700758329H1
gtaataatctggaaatgcaagaagcttatcttgtcaatctcgtaaatgtgttacgagaattgtatttgcacagtccagaggaagctcgccaattgagaaggaaagctctcctcgtattgaatggctgcaaaaagctgatgtgcctaccatagcacagattgaagagttccattcgatgcagaggatgatgaatgctcctgattcaaatgataatattgatctactgttgagcattga

SEQ ID NO: 65111 - DNA, 217 bp, Glycine max
  Clone ID: 700758330H1
caatatggggaagcccttcactctctctctttcttccccttgcttgctactcttgtcgagtgcatgctttgctattagctccagcaagctaacgggtgccaacgcaacaacctcaacgcgttggaacccgaccaccgcgttgagtccgaagtggtttgattcacacatggaactctcaacaccctgagctgaaatgcgccggtgtcactgtttccaa

SEQ ID NO: 65112 - DNA, 193 bp, Glycine max
  Clone ID: 700758331H1
tcagttccgtccaccgtcgttgcgatggaatcggaatcttcaatctccgattctgaaactcaccctctctcggaccaaatgcgacgacgcggccacgacatgagctccctggaagagctcgcgagtcgcggcgcttggcgttccatcatcgacaaggtctcacgcgcccggctctctctctgctccacaagcc

SEQ ID NO: 65113 - DNA, 249 bp, Glycine max
  Clone ID: 700758332H1
cgaggtttttaggaatatcacgattttcgtttcgccaattcgtgaaatcgaaagattcccacagaattgtacgaattattgttcatttttttgtctctactgtcgtgctccaacttggtaactagaagttcatttattgtgttcattcttcaatgggggatgctgagaatgcccttccacctacaaagaaaaccgctgctggaagggagctcactcgagacactcccattgatgatgaggaagatgccc

SEQ ID NO: 65114 - DNA, 257 bp, Glycine max
  Clone ID: 700758333H1
ctcacattggtgaattgaaatctggtgtctatgttccactgcctacaaaaactaatttggtggaaactcccaaggaatggcaactggatctaccttgtgacaaaattcctagtgtcttgacacaactgatgagagattggtaggcacagaacatgagggatatgatccttttcttggtggaattcaaaaatatgccactcccatgatgcccctagatgaagaaattctttctaaggttgcacaagatatagttgagg

SEQ ID NO: 65115 - DNA, 174 bp, Glycine max
  Clone ID: 700758334H1
accgcgatcacaggttgccgcaccttaaaaccggaaacaaaagcaatcgttacttgatttcaagaatctctcaatttcttcctacttctttgtgtacgatttcttaagggaaagaaaatcctctctgtgctggccacagacttcgtgaatcattttcttgtccacacaacatac

SEQ ID NO: 65116 - DNA, 253 bp, Glycine max
  Clone ID: 700758336H1
ggatgatgccattgccatgacatgaagaccttattgccttagccttcttcttgtgtccaacaatgggttgtttccttcattgctttggttcctccaagagcacaaaacctaggcgcaggcacaccatcaccatcgactcgctagagacaggttagagcaatgctctattcaggattactccgaaacggtggtaattggcactgcatcacaagaagtccaggctaaacctttggagcagataaacgtgagcccc

SEQ ID NO: 65117 - DNA, 248 bp, Glycine max
  Clone ID: 700758338H1
aaccattgtacatgtgtgtggcagtggtatgagaacactttgaaatacctcagccatgtcgttaaggatgctgaatcttttgcaaacgatctaaggagaagtatttatgatcccaggatgaagaatttactcgtgcttgggaggctatgctggagaagtataacctccagcaaaatgaatggctgagatggatttatagagaaagagaaatgggctgttgtctttggtcagaatacattttttgtgga

SEQ ID NO: 65118 - DNA, 249 bp, Glycine max
  Clone ID: 700758339H1
gcacgaatggcaacacaagcaggaaaagcaccaaggaaaggaaagtgaagaagaagaagaagaccaagacgaggatgaggagcaagacaaagagagccaagaaagtgaaggttctagtctcaaagagaaccacgaagacataagaataagaacccttttcacttcaactctaaaaggttccaaactctcttcaaaaaccaatatggccacgttcgcgtcctccagaggttcaacaaacgctcccaacag

SEQ ID NO: 65119 - DNA, 242 bp, Glycine max
  Clone ID: 700758340H1
gctattacctccagcaagttcaacgagtgccaactcaacaacctcaacgcgttggaacccgaccaccgcgttgagtccgaaggtggtcttattgaaacatggaactctcaacacctgagctgcaatgcgccggtgtcactgtttccaaacgcaccctcaactgcagcggcctccacttgccatcttactcaccttatctgcaaatgatcattgtcgttcaagggaagggagcaattggattt

SEQ ID NO: 65120 - DNA, 152 bp, Glycine max
  Clone ID: 700758341H1
cttgtaatagtaattagaaaaaaataaatatgaatgaaagaaatcactcaaagaaactacgctatgctgtttcatttccttgttttatgaaaggtcatgcacttgaatatcactccctctttttcctctctatttggattaaaaataaatga

SEQ ID NO: 65121 - DNA, 238 bp, Glycine max
  Clone ID: 700758343H1
gcactttctgttacatcgttttttcattttgattttggatggataaaggtaaaggtgccaaggcattagcgacctctttgcaaaacctcgatttgaatcctccatccacatcaagtctaagtcttccattacaatcgcccactctcaattccccggattactgcctaagaaggcaaagcctctgagtttagtcagcctttgtgttggagttcttggaagacatttggaggatattatt

SEQ ID NO: 65122 - DNA, 237 bp, Glycine max
  Clone ID: 700758344H1
ctcgagcgctccattggtccttaaacactcatcagtcatcaccatggccaagctagttttttccctttgttttctgcttttcagtggctgctgcttcgctttcagttcagagagcagcctcagcaaaacgagtgccagatccaaaaactcaatgccctcaaaccggataaccgtatagagtcagaaggagggctcattgagacatggaaccctaacaacaagccattccagtgtgcc

SEQ ID NO: 65123 - DNA, 222 bp, Glycine max
  Clone ID: 700758345H1
gctcagatctgtttcactcagcaacagcacttacagcactcacaaacctagagcgaagagagtgaaggcaccggccgccggccatgacattcaacgcaggaacggaggtcgcaacaaacacggccgtggccatgtcaaattcatccgatgctccaactgcggcaaatgctgccccaacgacaaggccatcaagaggtttcttgtgaggaacattgttgaaca

SEQ ID NO: 65124 - DNA, 242 bp, Glycine max
  Clone ID: 700758347H1
gtaacctctgtaactgtggagaacgtgacattccctcccaccgtgaagcctccctgctcccccaacaccttcttcctcgccggcgccggcgtcaggggcctccaaattcatcacgctttcgttaaattcactgccatctgcatttacctccaatacgacgccctttccttcctctccgttaagtggaaaaccaagtctgctcaccagttaacggaatccgaccaattcttctcagatatcgt

SEQ ID NO: 65125 - DNA, 243 bp, Glycine max
  Clone ID: 700758348H1
caactccaaacccaacaccctccttctccccaaccatgctgacgctgattacctcatcgttatccttaacgggactgccattctttccttggtgaacaacgacgacagagactctacagacttcaatctggtgatgccctgagagtcccctcaggaaccacatactatgtggtcaaccctgacaacaacgaaaatctcagattaataacactcgccatacccgttaacaagcctggtagattt

SEQ ID NO: 65126 - DNA, 259 bp, Glycine max
  Clone ID: 700758349H1
cgaggacgaagatgaagataaacctcgtcctagtcgaccaagccaaggaaagcgtgaacaagaccaggaccaggacgaggacgaagatgaagatgaagatcaacctcgcaagagccgcgatggagatcgaaaaagacacaacccagaagacctagacaagaagaaccacgtgaaagaggatgcgagacaagaaacggggttgaggaaaatatctgcaccttgaagcttcacgagaacattgctcgcccttcacgcgctg

SEQ ID NO: 65127 - DNA, 252 bp, Glycine max
  Clone ID: 700758350H1
cttctctagcctgatctcgattaaattgaacatttattattgtttatatgataagatttgaaatgatatgaaatccaatccattacccactctattctatagataattgcttgagcttgcaaaattgattttttgtacagaacgtttacttgaagctgcatcaattgaggagggattcttcatctttggattcgcttttggtgcctcggagtcagagctgcaaggaaagtggagatgctgggatgaaagctg

SEQ ID NO: 65128 - DNA, 243 bp, Glycine max
  Clone ID: 700758354H1
ggactctattcaggcggaattatgctgccaacagatataatcagcaagattagtccactactcgtccttaatgaaatctttagaactgatggtgaacaggcctttaagtttctcctcctaaagtaattcaagtgagtaagtctgcatggatgactgatgaagaatttgcaagagaaatgcttgctggtgtacttccaaacttgattcgttgtcttaaggattaccctccacgaagcaagctag

SEQ ID NO: 65129 - DNA, 244 bp, Glycine max
  Clone ID: 700758355H1
aatagatcctcaatacaatgaggttcaggctcagatggaaacaaatttgtttaaattgtctcttgatgatgttgaaactcctaaaggttccatgttggatcttaaaatttccagtctaaaattgcacttcccaagaacacagttggaggaactattctgcgtagtgatctattggcaaattttctgacagagggcagttttagagcaagtgttgatttgcagcgcactcatcgtattaaaggaa

SEQ ID NO: 65130 - DNA, 239 bp, Glycine max
  Clone ID: 700758357H1
atatcctagtacagcgtattaaagaatttaagatatactatgatgagagcgcggttcccattactgttgctggtagttgttttcctggcatcagtttctgtctcatttgcattgcgtattgggaaaagcagaaccccagtcacaacaagtgcctccgaagttgcaatagcgagaaagactcctacaggaaccaagcatgccacgctcgttgcaacctccttaaggtggaggaagaagaa

SEQ ID NO: 65131 - DNA, 237 bp, Glycine max
  Clone ID: 700758358H1
actcgccatacccgttaacaaacccggtagatttgagagtttcttcctatctagcactcaagctcaacagtcctacttgcaagggttcagcaagaatattctagaggctcatacgacaccaaattcgaggagataaacaaggttctgtttggtagagaggaggggcagcaacaaggggaggagaggctgcaagagagtgtgattgtggaaatctcaaagaaacaaattcgggaactg

SEQ ID NO: 65132 - DNA, 232 bp, Glycine max
  Clone ID: 700758359H1
caatatcctagtacaccgtattaaagaatttaagatatactatgatgagagcgcggttcccattactgttgctggtgtttgttttcctggcatcagtttctgtctctttggcattgcgtattgggaaaagcagaaccccagtcacaacaagtgcctccgaagttgctatagcgagaaagactcctacaggaaccaagcatgccacgctcgttgcaacctccttaaggtggag

SEQ ID NO: 65133 - DNA, 231 bp, Glycine max
  Clone ID: 700758360H1
ctctcaacagaggcaaagggcaaaaaccatcgatgatgtttctctgagtctgaggattcacgcgttactgttactgttactcaactcttattcccttccttgattcaattctccgcacttcatttcatttgaattctgaaaaattagggttagggttttctttctttcagtgaaaaaagaagaagaagaaaaaagtggttttggagaaatggttgagcaatcggtgctggt

SEQ ID NO: 65134 - DNA, 235 bp, Glycine max
  Clone ID: 700758361H1
ctccagcgttgttgcattgtagaaggcgatggccgcgcgagctctgttgaccagaaaaaccctagccaccgtgctccgcaacgacgcgaacccataatcggagttgcataacagcagcggctactcattcacgcgggttgcacgtgtacacgctacccgatctggattacgactatggcgcactggagccagccatcagcggcgacatcatgcagctgcaccaccagaagcacca

SEQ ID NO: 65135 - DNA, 225 bp, Glycine max
  Clone ID: 700758363H1
aaccgaagatccgtcatagttttggcatgtcaaatattggctaatgtggatggggcattcatctatgtacaagcgcactccttcgagagataattaaacatggaggacgtggaagaaaactcagatcttttagacatcggcctggacaagggaacctcaaatccttcattgatgctttctttaccgcatgtacttgtggcgaccatttcttcattcctttttgga

SEQ ID NO: 65136 - DNA, 244 bp, Glycine max
  Clone ID: 700758364H1
gatagctgccgcaagcagctccagggggtgaacctcacgccctgcgagaagcacatcatggagaagatccaaggccgcggcgatgacgatgatgatgatgacgacgacaatcacattctcaggaccatgcggggaagaatcaactacataaggaggaacgaaggaaaagacgaagacgaagaagaagaaggacacatgcagaagtgctgcacagaaatgagcgagctgagaagccccaaatgcc

SEQ ID NO: 65137 - DNA, 254 bp, Glycine max
  Clone ID: 700758365H1
catacacagtgtgtgtctggacaacaagggtagtaaaagcctctccctctagttggccatacacagtgtgtgtctgctgtggtttggccacaacaggagtcaatttattctgcatccgggatcattctattaggaaatgtcatgttgagacaggaaaaaacttgacagatttattttgtgggaaggttctcaactgccttgatattggtggggaaggttctgctctgatagctgctgggggttctgaccctgtc

SEQ ID NO: 65138 - DNA, 253 bp, Glycine max
  Clone ID: 700758366H1
gtcgcagaagcagcagctacaggacagtcaccagaagattcgtcacttcaatgaaggagacgtactcgtgattcctcctggtgttccttactggacctataacactggcgatgaacagttgttgccatcagtcttcttgacacctctaacttcaataaccagcttgatcaaactcctagggtattttaccttgctgggaacccagatatagagtacccagagaccatgcaacaacaacaacagcagaaaagtc

SEQ ID NO: 65139 - DNA, 249 bp, Glycine max
  Clone ID: 700758367H1
caaacagtgaaagtaaaacattgtgcaattaatcatcaactgcaagtagccagtgcataagatcaatggcgtcaagacagcaattcaaggaagacagagccgaggcagctgcaaactcgcagcgaaagacatcggcgacatcaacagaacaaacgagctcgacgaggggtacgacttgcacgacgaagccaacttcacccaagcacgagctgaagcagctgcaaagctggcggccaaggatctggagga

SEQ ID NO: 65140 - DNA, 229 bp, Glycine max
  Clone ID: 700758369H1
gataaacctcgtcctagtcgaccaagccaaggaaagcgtgaacaagaccaggaccaggacgaggacgaagatgaagatgaggatctacctcgcaagaggcgcgaatggagacgaaaaagacaacaaccagaagacctagacaagaagaaccacgtgaaagaggatgcgagacaagaaacggggttgaggaaatatctgcaccttgaagcttcacgagaacattgctcgg

SEQ ID NO: 65141 - DNA, 239 bp, Glycine max
  Clone ID: 700758372H1
attttcgcagcgatctttcgctcgttgttgtacgaggcatgcggtcggatagtgaacccgatttacgggtctgtcgggctattatggtccgggagctggcagctgtgcaagccgccgtggaaaacgtcttgaaaggcgcgccgattacgccgatcacgtctgaagccgcggctagcgggcggtgcccaccgctcaaggcttacgacatacgccacgtgttcaaagacgagaactccgcc

SEQ ID NO: 65142 - DNA, 232 bp, Glycine max
  Clone ID: 700758373H1
cgagcgaatcggctcgacaaaaccctaatcgaggttctaccctcctcactatatacttgcttgtgtcgctggagtccatcgcttagaaaccaaaaggctctctccgcagtcgcagtgagtgaaaaggaaaaccctaattgcggtattctcagtgccttcgagagaaagaaaaaatggcagataatcttgttctccgtggcaccatgcgcgcccacaccgacgttgtgacggc

SEQ ID NO: 65143 - DNA, 235 bp, Glycine max
  Clone ID: 700758374H1
gataccatcaattttgaggctttccccacaagctggtgcagcttggagagattcaggaaaaagttgtattgaaattttcacaagaggaatttcttacagcttggtcactcaggtgcgtcctgcaacaactctgttggctgatgggtgtccatatttgtatgcaatggtgcatgatagttcagtgtctacaataccagggtgatttgtcattggtgtcaagttgacaaccataaac

SEQ ID NO: 65144 - DNA, 244 bp, Glycine max
  Clone ID: 700758375H1
cggctcgagagctcatacgacaccaaattcgaggagataaacaaggttctgtttggtagagaggaggggcagcaacaaggggaggagaggctgcaagagagtgtgattgtggaatctcaaagaaacaaattcgggaactgagcaaacatgccaaatctagttcaaggaaaaccatttcttctgaagataaacctttcaacttgagaagccgcgaccccatctattccaacaagcttggcaagtt

SEQ ID NO: 65145 - DNA, 233 bp, Glycine max
  Clone ID: 700758376H1
tcctagtataccttaataaataatttaagatactatgatgagagcacggttcccattactgttgctgggacttgttttcctggcttcagtttctgtctcatttgcattgcttactgggaaaaagagaaccccaaacacaacaagtgtctccagagttgcaatagcgagagagactcgtacaggaaccaagcatgccacgctcgttgcaacctccttaaggtggagaaagaaga

SEQ ID NO: 65146 - DNA, 234 bp, Glycine max
  Clone ID: 700758377H1
ttcaaaccttgctctatactacacagtacatacactagaagaatattggcttccatcctccactactttttagccctctctctttcttgctctttacttttcttttatccgactcagtcacccctacaaaaccaatataccttgttgttctacccgttcaaaatgatggttccacagggctccatagccccaacctccaaaaaagaacccctctaatgcaagtaccagtcctgg

SEQ ID NO: 65147 - DNA, 236 bp, Glycine max
  unsure (1)..(236): unsure at all n locations
  Clone ID: 700758378H1
agtntcatatcctattacaccgtattaaagaatttaagatatactatgatgagagcgcggttcccattactgttgctgggagttgtgttcctggcatcagtttctgttcatttggcattgcgtattgggaaaagcagaacctcagtcacaacgagtgcgtccgaagttgcgatagcgagaaagactcctacaggaaccaagcatgccacgctcgttgcaacctccttagggtggag

SEQ ID NO: 65148 - DNA, 216 bp, Glycine max
  Clone ID: 700758379H1
acgaaaggacggcgatcgtgacagtggaaggaggtctcagcgttatcagcccgaagtggcaagaacaacaagatggcgatgaagagaagacgaagatgatgaagatggacaaattccctctcaccctcctcgccgaccaagccatggaaagcgtgaacaagacgaggacgaggacgaagatgaagataaacctcgtcctagtcgaccaagccaagg

SEQ ID NO: 65149 - DNA, 239 bp, Glycine max
  Clone ID: 700758380H1
ctcttatctaatattgctttgcaggatctgctgatggatgttagggataagcttcttttcgagccagaatatgctggtaatctgagggaaaagataccccctaaatctcccttcaaattccttggtcttggttgccaggtgctctttgccttcttcaagaggttggagaatcaaagcttgtgctggagattggacagacaagtattcggcatcaaaatgccaagccatatactgatgac

SEQ ID NO: 65150 - DNA, 252 bp, Glycine max
  Clone ID: 700758381H1
cagattcaggttccaactcttctctctctcgccgtctaggtttttctctcaaaatttcgaaaccccgattttctctcaattcgaatctgcgattcatcgtaacctaaattattaatagttatattatctctctgcgtttctttcagcaattttctattttctcctctcatggcttcagattccaaaaaggatttccctgctgatgacaaagctggaacagaagagagtaaaacatccaaagatgagacttca

SEQ ID NO: 65151 - DNA, 248 bp, Glycine max
  Clone ID: 700758383H1
ctctcttctagttccagcatatcaactcatcgttccatattggaccttcacctaaccaagtttaccacacagaaacaggtgtcttcactgttccaactatggaagagtgagatggacgtgtctaccataaccacgaagaagaggcaaagagacttgagattttcaagaataacttgaactatatcagggacatgaatgcaaacagaaaatcaccccattctcatcgtttaggattgaacaagtttgct

SEQ ID NO: 65152 - DNA, 245 bp, Glycine max
  Clone ID: 700758384H1
ctcgagcgaattagttcattctctttgcgcagttccctacctctcctttcaagatgcagatcttcgtcaagaccctcaccggaaagaccatcacccttgaggtggaaagtctgacaccatcgacaacgtcaaggccaagatccaggacaaggaaggaattcccccggatcagcaacgtctcatcttcgccggaaagcagctcgaggacggccgtaccctcgccgactacaacatccagaaggagt

SEQ ID NO: 65153 - DNA, 148 bp, Glycine max
  Clone ID: 700758387H1
tgaaattttgataaaccgcgatcacaggttgccgcaccttacaaccggaaacaaaagcaatcgttacttgatttcaagaatctctcaatttcttcctacttctttgttacggtttcttaagggaaagaaaatcactctctgtgctggc

SEQ ID NO: 65154 - DNA, 238 bp, Glycine max
  Clone ID: 700758388H1
gttcaacgagtgccaactcaacaacctcaacgcgttggaacccgaccaccgcgttgagtccgaaggtggtcttattgaaacatggaactctcaacaccctgagctgaatgcgccggtgtcactgtttccaaacgcaccctcaaccgcaacggcctccacttgccatcttactcaccttatccccaaatgatcattgtcgttcaagggaagggagcaattggatttgcatttccgggat

SEQ ID NO: 65155 - DNA, 232 bp, Glycine max
  Clone ID: 700758390H1
attaaatgtacagtctctttcttcatagcatttggaaatttggctgatgacaccatcaattttgaggcttttccccacaagctggtgcagtttggagagattcggaaaaagttgtattgaaattttcacaagaggaatttcttacagcttggtcaactcaggtgcgtcctgcaacaactctgttggctgatgggtgcccatatttgtatgctatggtgcatgatagttcagt

SEQ ID NO: 65156 - DNA, 230 bp, Glycine max
  Clone ID: 700758391H1
tctgcgtagtgatctattggcaaattttctgacagagggcaattttagagcaagtgttgatttgcagcgcactcatcgtattaaaggaatgattaaaatggtgccacagttggtattcctgagaatacaggtatatcattggcctgtgctatgaatagttcttttagggggcgtgccagttctgatatttacaccatctgctctcaagactgtgaattatggaatcctgc

SEQ ID NO: 65157 - DNA, 229 bp, Glycine max
  Clone ID: 700758392H1
cacagaacatgagggatatgatccttttcttggtggaattcaaaaatatgccactcccatgatgcccctagatgaagaaattctttctaaggttgcacaagtatagttgaggaatggtttgattgtgttgatgaggaggattcctttgaggaagtttctttgagtgcagcactcaatggtgttgagggtttggactatatggaaagaattcctcttgccacatctgagg

SEQ ID NO: 65158 - DNA, 233 bp, Glycine max
  Clone ID: 700758394H1
cttccaccaagttatgggtttccttgtgttgcttcttttctccctcttaggtctctcttctagttccagcatatcaactcatcgttccatattggaccttgaccaaccaagtttaccacacagaaacaggtgtcttcactgttccaactatggaagagtgagcatggacgtgtctaccataaccacgaagaagaggcaaagagacttgagattttcaagaataacttgaacta

SEQ ID NO: 65159 - DNA, 230 bp, Glycine max
  Clone ID: 700758396H1
tgatgccagattgagacaaagaatagatcctcaatacaatgaggttcaggctcagatggaaacaaatttgtttaaattgtctcttgatgatgttgaaactcctaaggttccatgttggatcttaaaatttctcaatctaaaattgcacttcccaaaaacacagttggaggaaccattctgcgtagtgacctattggcaaattttttgacagagggcaattttagagcaag

SEQ ID NO: 65160 - DNA, 265 bp, Glycine max
  Clone ID: 700758402H1
tgctcgagccgattcggctcgagcttaattattaacacttccttagagcaatatggggaagcacttcactctctctctttctgccctttgcttgctactcttgtcgagtgcatgctttgctattagctccagcaagctcaacgagtgccaactcaacaacctcaacgcgttggaacccgaccaccgcgttgagtccgaaggtggtttgattcaaacatggaactctcaacaccctgagctgaaatgcgccggtgtcactgtttcc

SEQ ID NO: 65161 - DNA, 274 bp, Glycine max
  Clone ID: 700758406H1
tgagagtgagagagagagagagagggatttggaactttggatatctatagtcgaaagcgtgacaccaccaaaaaccgaactgttcccagatctctctctcactcttccaacaatcgaaatccaaaaccctaccgacaccacactcaatcgaaattcttcattctcttctcatcgatggggcagaagtctctgatctacgcgttcgtgtcgcggggaacagtgattctcgcggagtacaccgaattcagcggaaacttcaactccatcgccttcc

SEQ ID NO: 65162 - DNA, 257 bp, Glycine max
  Clone ID: 700758407H1
ggctcgagctgctgttgacaagttgtattatactaaggttaataactttgcaaaaattatgaacattagacaaagtgttgttggtgatcttaaacttcttactgatgggaagttgtatgagggtaagcatattcctgtatctaatattagtgcaggggagaatcatgtagttcaaatacccctaatggcacaggaggaaattctgtcttctagtgcaagtgatttcagaactgcaatggtgagtagaaatagcaagc

SEQ ID NO: 65163 - DNA, 274 bp, Glycine max
  Clone ID: 700758409H1
gtttaaccgcacattttgcacttcgtctccaagttctataataagcagcatttccacacatttctttctataaaagcaactcaaagttgaacaaaactcattttccaactacatttcttccaccaactcataaaatatatcatatctgttcccaaaagcttgtttgtgagaatggcttcgggtgaaaagaaattcccacctcaacaacaacaaacacagcctgggaaggagcatgctatgaatccagtaccccaattcactagccctgactaca

SEQ ID NO: 65164 - DNA, 267 bp, Glycine max
  Clone ID: 700758410H1
gggaaagatctcgcaatggttaaagttaatgtagcatgtgctgctgttggcttgacatcaagttacactccaactccattgttggaatctggtttgcaaaaagacagagggttaattgtggagtattttggaaggatgtcttacgttgctcataacgttaatcagccccaagagaaagatttgttggagggaaatttttccttagatattaaatctcgctctagattggaaaaagtttcctctacaaaagcacaatttgttagtgga

SEQ ID NO: 65165 - DNA, 267 bp, Glycine max
  Clone ID: 700758411H1
aacttattaacactttccttagttcaatatggggaagcccttcttcactctctctctttcttccctttgcttgctactcttgtcgagtgcatgctttgctattacctccagcaagttcaacgagtgccaactcaacaacctcaacgcgttggaacccgaccaccgcgttgagtccgaaggtggtcttattgaaacatggaactctcaacaccctgagctgcaatgcgccggtgtcactgtttccaaacgcaccctcaaccgcaacgg

SEQ ID NO: 65166 - DNA, 261 bp, Glycine max
  Clone ID: 700758412H1
tgcacatggtaatctagtgtgtttgagtgctttcatgtgcaggttggatgaagtaattcagattccttcgcatcaagctcagattcaatgccagaatacatagggaagcacagagctctacagatagagagaaggaatctgaatttcttcatccaacctgcacatggtaatctagtgtgtttgagtgctttcatgtttggctttaataaaataaaagcagttgttttgtaaaatgttcagaatcaataaaagcatttactg

SEQ ID NO: 65167 - DNA, 265 bp, Glycine max
  Clone ID: 700758413H1
atccgcattgccgttctaagtggtcttatttgaaaaacacttgggcgttggtgcaaatgtttgcttcgttaattttctctggagacgacaggctcactgagaaaacaatttttacttgcagagatttggacatcttggttgtttattatacaatagcaactcaatttagaaaatttctaccgcattacattaggtggcatctgtataccttgttgatctacattctcccatcttttctcactgctgaaattaaatataagcggaa

SEQ ID NO: 65168 - DNA, 272 bp, Glycine max
  Clone ID: 700758415H1
gcggtttcctttgttggtgttgctgggaactgttttcctggcatcagtttgtgtctcattaaaggtgagagaggatgagaataaccctttctacttgagaagctctaacagcttccaaactctctttgagaaccaaaacggtcgcattcgtctcctccagagattcaacaaacgctccccacaacttgagaaccttcgagactaccggattgtccagtttcagtcaaaaccctacacaatccttctcccccaccatgctgacgccgatttcc

SEQ ID NO: 65169 - DNA, 264 bp, Glycine max
  Clone ID: 700758416H1
cttctctctttcaattccttcccagctctccattgaagaagctatggactttctaaacttcttgcttaacttgttggtccctccaggcagtatgatcaccttggctttctcatggcctgcactttgcttcctcaatttttgtgagtggctttgtaatagtatatatggtgaggatatggataatacagtggtcataatcaccggcgcatcttcaggcattggagagcaaattgcatatgagtatgctttgaggagagcaaatta

SEQ ID NO: 65170 - DNA, 268 bp, Glycine max
  Clone ID: 700758417H1
caaatattggaagtaaaagcagttatacaatgtcttcttggtccttgacaaattgcttggagcaaagaatcgtgccacacagtacagaatctatttttcaaagtgatggtcctttgaaggaaaatagaggacttctgtctcagggtagttcacccactgctggaattgatcactttagtgaattgagtcaggttaggcctcaaaatggctgaacatccatatctcctaaaaatgtgagctctcctctgtccttgtcacctcttggtcg

SEQ ID NO: 65171 - DNA, 206 bp, Glycine max
  Clone ID: 700758418H1
ctcgagccgattcggctcgagaagatttgaaattttgataaaccgcgatcacaggttgccgcaccttaaaaccggaaacaatagcaatcgttacttgatttcaagaatttctcaatttctttctacttctttgtgtacgatttcttaagggaaagaaaatcactctctgtgctggccacagacttcgtgaatcattttcttttcca

SEQ ID NO: 65172 - DNA, 266 bp, Glycine max
  Clone ID: 700758419H1
gaaaagagttggcttcaaagactcaatctcatgcttacctttaccaacatcacccagagatctatgagtactattcactacaactcacatgcaacgaagatagcactggtgatcgatggcagagggcatcttcaaatatcatgcccacacatgtcatcaaggtcgtcacactcgaagcatgataagagtagcccttcataccatagaatcagttccgatttgaagcctggaatggtgtttgttgtccctcccggtcatcccttcgt

SEQ ID NO: 65173 - DNA, 266 bp, Glycine max
  Clone ID: 700758421H1
catggccaagcttgttctttccctttgtttccttcttttcagtggctgcttcgctctgagagagcaggcacagcaaaatgagtgccagatccaaaagctgaatgccctcaaaccggataaccgtatagagtcggaaggtgggttcattgagacctggaaccctaacaacaagccattccagtgtgccggtgttgccctctctcgctgcacccttaaccgcaatgcccttcgtagaccttcctacaccaacggtccccaggaaatct

SEQ ID NO: 65174 - DNA, 262 bp, Glycine max
  unsure (1)..(262): unsure at all n locations
  Clone ID: 700758423H1
tgnattcatacatagtagtgtccgtgggttctaagattctcggggtcttctccataggggtcataagataaaagggacagtggtgttgatccgcaagaatgtgttggacgtgaatagcgtaaccagcgttggggctcttattggtcaaggtctcgacttagttggctcaacactcgatactctccctgccttcttgggccgatccgtgtctctccagcttattagtgctaccatagctgatggttccttctcttctttctta

SEQ ID NO: 65175 - DNA, 270 bp, Glycine max
  Clone ID: 700758424H1
ctaaaatctctgaagcagagggcattgtctactgtcacaggcatgggtgaagaaaagaaagacgaaggaaacaaagaagaagccaaagaggaaaagaaggaagaagagaagaaagaggagccaccaccggaaatagtgctcaaagttgatattgcattgtgaaggctgtgccaaggaaagttgcaaaagcattgaaaggattccaaggattggaaaaggtgattccggttagcaggacaaccaaattggtattgaaaggaaaggcagcag

SEQ ID NO: 65176 - DNA, 267 bp, Glycine max
  Clone ID: 700758426H1
gaggatgagaataaccctttctacttgagaagctctaacagcttccaaactctctttgagaaccaaaacggtcgcattcgtctcctccagagattcaacaaacgctccccacaacttgagaaacatcgagactaccggattgtccagtttcagtcaaaacccaacacaatccttctcccccaccatgctgacgctgatttcctcctctttgtccttagcgggagagccatacttaccttggtgaacaacgacgacagagactcctac

SEQ ID NO: 65177 - DNA, 264 bp, Glycine max
  Clone ID: 700758427H1
tttgaaattgctggtaatactcttatgccagctttttctgttccacaggctactgccagatcttctgaaaatgcggaatcctctgcatgatctggaatttgtgttttctttcgcttgttcgtttgtttaattcaataaaggaaattaggcatgaccctcttgttgagtatgctctgcctatttgaaaatttccacacctcttttaattgtcgtaatgatgtgtgaagtgtgtgttattttaaaaaaaaaaaaaaaaagggcggc

SEQ ID NO: 65178 - DNA, 263 bp, Glycine max
  Clone ID: 700758428H1
gttcaatatcctagtacaccgtattaaagaatttaagatatactatgatgagagcgcggttcccattactgttgctgggagttgttttcctggcatcagtttctgtctcatttggcattgcgtattgggaaaagcagaaccccagtcacaacaagtgcctccgaagttgcaatagcgagaaagactcctacaggaaccaagcatgccactctcgttgcaacctccttaaggtggaggaagaagaagaatgcgaagaaggtcaa

SEQ ID NO: 65179 - DNA, 175 bp, Glycine max
  Clone ID: 700758429H1
attttgataaaccgcgatcacaggttgccgcaccttaaaaccggaaacaaaagcaatcgttacttgatttcaagaatctctcaatttcttcctacttctttgtgtacgatttcttaagggaaagaaaatcactctctgtgctggccacagacttcgtgaatcattttcttttcca

SEQ ID NO: 65180 - DNA, 266 bp, Glycine max
  Clone ID: 700758430H1
gggatgattgtatgccattagatcaatcaacttctaataaagcatggcagtcaaatggtggggttagagaggataggtatcttgatgactgtgcattgcgtaaaactgaaactttgggcagcaatacacagcatggtaaaatgaatcgtattgcattcacacctgatggaccatcaggatttaacaataagcaagaccagtccagtgaacggttagtgaatgctaatgtctcaccagcatctggaatggagcaaagcaatggaagg

SEQ ID NO: 65181 - DNA, 266 bp, Glycine max
  Clone ID: 700758431H1
attcaaaccttgctctatactacacagtacacacactagaagaataatggcttccatcctccactactttttagccctctctctttcttgctcttttcttttcttcttatccgactcagtcacccctacaaaaccaataaaccttgttgttctacccgttcaaaatgatggttccacagggctccattggtccaacctccaaaaaagaacccctctaatgcaagtaccagtcctggtggacctcaatggaaatcacttgtgggtta

SEQ ID NO: 65182 - DNA, 272 bp, Glycine max
  Clone ID: 700758432H1
acttccttagttcaatatggggaagcccttcactctctctctttcttccctttgcttgctactcttgtcgagtgcatgctttgctattagctccagcaagctcaacgagtgccaactcaacaacctcaacgcgttggaacccgaccaccgcgttgagtccgaaggtggtttgattcaaacatggaactctcaacaccctgagctgaaatgcgccggtgtcactgtttccaaactcaccctcaaccgcaatggcctccacttgccatcttact

SEQ ID NO: 65183 - DNA, 279 bp, Glycine max
  Clone ID: 700758433H1
ggaactaatagtagcggtgataacgtgagtgcgggtgtggtgcagagtaggatgaggatgaaggtgatggtggctatagacgagagtgaaggaagcttctatgctcttaagtgggcccttgataacctcttcagcaccatggccactgtgggagaagcatcatcacctgaaaatgatggcatggtgttcttggttcatgttgagcccttagttcacaactatgtgtatcccatcggacccggtggagcagccttttatcctgcaactgtagtagtggat

SEQ ID NO: 65184 - DNA, 277 bp, Glycine max
  Clone ID: 700758434H1
ttcggctcgagagttcaaatacccttaatggcaaaggaggaaattctgtcttctagtgcaagtgattgcagagcagcaagggtgagtaaaaatagcaacagtcatgctactgcaatgcatgtgggagctatagaaattatcaatgatagttacgcaagtcctgaatgcaccatagttggtgcaatgctaatggttgctagttatcataccaatcttgaaaatgcatttcgtagtatcatggttgcgccttgcagatgcggatggcccattcgggtgg

SEQ ID NO: 65185 - DNA, 275 bp, Glycine max
  Clone ID: 700758435H1
ggaatttctgaagcgtaccggatttcattgtgatatcatttgtgtcactggatggactgccactccaatgcaggatgttcaggttacaattgattggtttatttcctctcaggaatgtgttcccaggacctattgtgttttaaatccacaatatccttttgtgttaaataggtggatggggaaactgactttcccccagggcacttcccgaagtgtcaaaagaatgcctctttctatagggggaggagctggtgcaaagaatgctattctcatga

SEQ ID NO: 65186 - DNA, 265 bp, Glycine max
  Clone ID: 700758437H1
tcgacggtgagcttaggaggggacaattgctggtggtaccacagaacttcgtggtggcggacaagccggagaacaaggattcgaatacatagtattcaagacacaccacaacgcagtcactagctacttgaaggatgtgtttagggcaattccctcagaggttcttgcccattcttacaaccttcgacagagtcaagtgtctgagcttaagtatgaaggaaattggggtcctttggtcaaccctgagtctcaacaaggctcaccc

SEQ ID NO: 65187 - DNA, 264 bp, Glycine max
  Clone ID: 700758440H1
gcaatgttcgagccacactacaacctgaacgcgatcagcatagtatacgcattgaatggacgcgcattgatacaagtggtgcattgcaacggtgagagagtgtttcatggagagctgcaagagggacgggtgctgatcgtgccacaaaactctgtggtggctgcaagatcacagagtgacaacttcgagcatgtgtcattcaagaccaatgatacacccatgatcggcactcttgcaggggcagactcattgtcgaacgcatta

SEQ ID NO: 65188 - DNA, 264 bp, Glycine max
  Clone ID: 700758442H1
cttattaacactttccttagttcaatatggggaagcccttcttcactctctctctttcttccctttgcttgctactcttgtcgagtgcatgctttgctattacctccagcaagttcaacgagtgccaactcaacaacctcaacgcgttggaacacgaccaccgcgttgagtccgaaggtggtcttattgaaacatggaactctcaacaccctgagctgcaatgcgccggtgtcactgtttccaaacgcaccctcaaccgcaacg

SEQ ID NO: 65189 - DNA, 263 bp, Glycine max
  Clone ID: 700758443H1
aaataggtctttattctaatcccactttggaagatatcccacattcagcttgggaccttttttgctgggacagtgagaaaactttgccaaataatttttctgcagaattgctctcttgcaaattggatactgttactggccaatattatcctgagtgggctccaattaattgtcgagttcatcgacaaccaattcacatcactgaaggaaattatgtcagaaagcaagatgtcagcattgaatatgacgcatgtacacttcca

SEQ ID NO: 65190 - DNA, 262 bp, Glycine max
  Clone ID: 700758444H1
gaagttcgatacctcatgcaaacacatcagaagaatcaggtgaaagattccatagatgttgatgaaccagaagagatgggagttccattgactgccgaagagttagaagaaaaggagcagttgctagaggagggattttcatcatggagccggaaggattttaatgctttcattagggcctgtgaaaagtatggccgaaatgatataataggtattgcttctgagatggaaggaaaaacacaagaggaagttgaaagatatg

SEQ ID NO: 65191 - DNA, 264 bp, Glycine max
  Clone ID: 700758445H1
attgtctttgaacactcatcaccatggccaagcttgttctttccctttgtttccttcttttcagtggctgcttcgctctgagagagcaggcacagcaaaatgagtgccagatccaaaagctgaatgccctcaaaccggataaccgtatagagccggaaggtgggttcattgagacctggaaccctaacaacaagccattccagtgtgccggtgttgccctctctcgctgcacccttaaccgcaatgcccttcgtagaccttcct

SEQ ID NO: 65192 - DNA, 268 bp, Glycine max
  Clone ID: 700758446H1
gcacgagcagagagaggaacaggaatggcctcgcaaggaggaaaaacgcggagaaaagggaagtgaagaggaagatgaggatgaggatgaggaacaagatgaacgtcaattcccattcccacgcccacctcatcagaaggaagagcgaaagcaagaggaagatgaggatgaggagcagcagcgagagagcgaagaaagtgaagattctgagttacgaagacataagaataagaacccttttctcttcggctctaacaggttcgaaact

SEQ ID NO: 65193 - DNA, 268 bp, Glycine max
  Clone ID: 700758447H1
agacactcctgttgttgccgtttctattattgacaccaacagcttggagaaccagctcgaccagatgcctaggagattctatcttgctgggaaccaagagcaagagtttctaaaatatcagcagcagcagcaaggaggttcccaaagccagaaaggaaagcaacaagaagaagaaaacgaaggaagcaacatattgagtggcttcgcccctgaattcttgaaagaagcgttcggcgtgaacatgcagatagtgagaaacctacaaggt

SEQ ID NO: 65194 - DNA, 266 bp, Glycine max
  Clone ID: 700758448H1
ctcgagcgaatcggctcgagattaacacttccttagttcaatctggggaagcccttcactctctctctttcttccctacgcttgctactcttgtcgagtgcatgctttgctattagctccagcaagctcaacgagtgccaactcaacaacctcaacgcgttggaacccgaccaccgcgttgagtccgaaggtggtttgattcaaacatggaactctcaacaccctgagctgaaatgcgccggtgtcactgtttccaaactcaccct

SEQ ID NO: 65195 - DNA, 92 bp, Glycine max
  Clone ID: 700758449H1
ctcgagccgattcggctcgagttttcaaacaagattgtttttgactgataaacttgtgcaggctaacacacaagaattcactgctggaaatt

SEQ ID NO: 65196 - DNA, 275 bp, Glycine max
  Clone ID: 700758450H1
aatattagtgcaggggagaatcatgtagttcaaatacccctaatggcacaggaggaaattctgtcttctagtgcaagtgctttcagaactgcaatggtgagtagaaatagcaagcctcaagctactgcaatgcatgtgggagctatagaaattatcattgatagtttcgcaagtcctgactgcaacatagttggtgcaatgcttttggttgatacttatcataccaatcctgaaaatgcagtccgtagtattttggtcgcgccttccagaggcgg

SEQ ID NO: 65197 - DNA, 264 bp, Glycine max
  Clone ID: 700758452H1
gaaaaacccaaaaagattgatgccagattgagacaaagaatagatcctcaatacaatgaggttcaggctcagatggaaacaaatttgtttaaattgtctcttgatgatgttgaaactcctaaaggttccatgttggatcttaaaatttctcaatctaaaattgcacttcccaaaaacacagttggaggaaccattctgcgtagtgacctattggcaaattttttgacagagggcaattttagagcaagtgttgatttgcagcgc

SEQ ID NO: 65198 - DNA, 260 bp, Glycine max
  Clone ID: 700758453H1
ataccttaataaataatttaagatactatgatgagagcacggttcccattactgttgctgggacttgttttcctgacttcagtttctgtctcatttggcattgcttactgggaaaaagagaaccccaaacacaacaagtgtctccagagttgcaatagcgagagagactcgtacaggaaccaagcatgccacgctcgttgcaacctccttaaggtggagaaagaagaatgtgaagaaggtgaaattccacgcccaatacg

SEQ ID NO: 65199 - DNA, 264 bp, Glycine max
  Clone ID: 700758454H1
cttaattattgttcatgaatacgtcaagccttactttagtggttctaaattgaaaagctttctagctggtcataatatcaccattactgatggttttgacaagactagtgcaactttgcaatttagaaagttagcagattgtgattttctcaagagaaactttaagcagatgtctaatgttttgtgggtagctcctgaggacaaggcgagtttatggtcacaacttcattatgtttcgtgtaataatctggaaatgcaagaagc

SEQ ID NO: 65200 - DNA, 263 bp, Glycine max
  Clone ID: 700758455H1
cacagattgaagagttccattcgatgcagaggatgatgaatgctcctgattcaaatgataatattgatctactgttgagcattgatttgttgggtttacaaggagcaggtaaagcttttccaaacaagattgtttttgatgataaacttgtgctggctaacacacaagaattctttgctggaaattttccagtggattcttggttaccaatttttgtgaattgtctttatcctgtaagtcaattaccttcagaagctgtcgtt

SEQ ID NO: 65201 - DNA, 261 bp, Glycine max
  Clone ID: 700758456H1
caaaactttagtcagtggccgggctataattgtattaagttatgaatacctctcgaggttggcaacatttttgagacaaaacttgtctttgttcttggtgtacattacctgtttgaatttgttgaggcatgtgagtatagtgtatacacacggcaaaaacttagattctctagtgagttttgtttacatttgtagtcatactttgcagcatgtatatattaagaaatagtgtcggtgattttaattagaacttgagaaaag

SEQ ID NO: 65202 - DNA, 260 bp, Glycine max
  Clone ID: 700758458H1
ctttcatacttgttatgcaggcacaggattacttgttcgttcgggcgtttgtcccatttgtggctagtgtgctgataaaagcgtggaaggaatcagattgcagtggtgacatggaagtcatattggggggcatggcttctctggaggatgagatttcatggttcaagacagaagccaacaagtggggtatttcactttctgacgttgttcctcagcaggctaacaaaaactattgtgggttgctggaaagtttaatgagt

SEQ ID NO: 65203 - DNA, 261 bp, Glycine max
  Clone ID: 700758460H1
agtggacaaaactggagattggatcacacttatacaaaattctccaattagtaacttgttgagagttgctgcttggaagaaaggctgtttaatggtcaagattgtgatgtctgggaatgcagcagtcaaaaggagtgattgggcctcattggtacaagtgtttttaacaaacagcaacagtacagagcattttgatgcatgtaagtggacaaaatcagaaccacattcctgggaattgatcttcccaatagaggtatgtgg

SEQ ID NO: 65204 - DNA, 262 bp, Glycine max
  Clone ID: 700758462H1
gcaggagcagttgaagaagctggtggggagggagcaatggggtccaataatcatggcaactcgaaggagtttctagaactcataaagcccatcggcgactcccgatccaaggccgaggaggactgcatcgtcctccgcgagatcgaaaccctaaaacgccgcatcaacgacgctgacactccgaaacgcaagatcaaggagtacatcatccgcctcctctatgtcgcgatgctcggccacgacgcctccttcggatacatcc

SEQ ID NO: 65205 - DNA, 263 bp, Glycine max
  Clone ID: 700758463H1
ctcgagccgcttgagttcaaacactctcatcttcttattcttctgctttcactctctgaatcaatcgttctaatccacaaaaaatgaccttaaattacaacattgccctcgccttctctgcggtgctcacgctgctcctctttcccctactgaccgtagggagctcgtggaggagcagccactagtcctcaagtaccacaacggccagctcctgaagggccgcatcaccgtcaatctcatctggtacggcaccttcaccccga

SEQ ID NO: 65206 - DNA, 254 bp, Glycine max
  Clone ID: 700758467H1
ggctcgacggctcgagctccattggtccttaaacactcatcagtactcaccatggccaagctagttttttccctatgttttctgcttttcagtggctgctgcttcgcttttagttccagagagcagcctcagtaaaacgagtgccagatccaaaaactcaatgccctcaaaccggataaccgtatagagtcagaaggagggctcattgagacatggaaccctaacaacaagccattccagtgtgccggtgttgc

SEQ ID NO: 65207 - DNA, 87 bp, Glycine max
  Clone ID: 700758468H1
cgatgatgccattgccatgacatgaagaccttattgccttagccttcttctgtgtgctcaacaatgggttgtgttcttcatggcttt

SEQ ID NO: 65208 - DNA, 178 bp, Glycine max
  Clone ID: 700758470H1
gagccctttttgcatgtgctaccacacttttgtccttttgggctctagctagtgctggtagcagtaaataagaatgaataaaagaaacaaaggcttagatgccctttgttaagtgtagaataacgggtatagtaactatgtacccttgtgtaatgagtcactcaagtacctatgcggg

SEQ ID NO: 65209 - DNA, 258 bp, Glycine max
  Clone ID: 700758472H1
catatttgtatgctatggtgcatgatagttcagtgtctacaataccaggtgattttgtcattggtgttaagttgacaaccataaacaatatgtgtgcatatgggctcaatcctggtatttcaggttctcgtcttttgggcaccattcctcagtccatgtcacagcaaactgtatggactcaaatggcaacagtgagaacaccattgaattttgactctagcaagcagagcttgtgtcaatactatatcgaccttctcg

SEQ ID NO: 65210 - DNA, 257 bp, Glycine max
  Clone ID: 700758473H1
attaacactttccttagttcaatatggggaagcccttcttcactctctctctttcttccctttgcttgctactcttgtcgagtgcatgctttgctattacctccagcaagttcaacgagtgccaactcaacaacctcaacgcgttggaacccgaccaccgcgttgagtccgaagtggtcttattgaaacatggaactctcaacaccctgagctgcaatgcgccggtgtcactgtttccaaacgcaccctcaaccgca

SEQ ID NO: 65211 - DNA, 259 bp, Glycine max
  Clone ID: 700758474H1
ccggaaacaaaagcaatcgttacttgatttcaagaatttctcaatttctttctacttctttgtgtacgatttcttaagggaaagaaaatcactctctgtgctggccacagacttcgtgaatcattttcttttccacacatcatataacataagaacactctcctatttgatataggacttcgtgtcagatttaaacttcttctgtttctttctcagttctctgttcaatttcaagttcaagtgggtgaaatcttggatt

SEQ ID NO: 65212 - DNA, 260 bp, Glycine max
  Clone ID: 700758475H1
cctcgagccgaatcggctcgagccatggccaagcttgttctttccaattgtttccttctttacagtggctgcttcgatctgagagagcaggcacagcaaaatgagtgccagatccaaaagctgaatgccctcaaaccggataaccgtatagagtcggaaggtgggttcattgagacctggaaccctaacaacaagccattccagtgtgccggtgttgccctctctcgctgcacccttaaccgcaatgcccttcgtagacc

SEQ ID NO: 65213 - DNA, 257 bp, Glycine max
  Clone ID: 700758476H1
tgatgagagtgcggtttcctttgttggtgttgctgggaactgttttcctggcatcagtttgtgtctcattaaaggtgagagaggatgagaataaccctttctacttgagaagctctaacagcttccaaactctctttgagaaccaaaacggtcgcattcgtctcctccagagattcaacaaacgctccccacaacttgagaaccagcgagactaccggattgtccagtttcagtcaaaacccaacacaatccttctc

SEQ ID NO: 65214 - DNA, 253 bp, Glycine max
  Clone ID: 700758477H1
aattattaacacttccttagttcaatatggggaagcccttcactctctctctttcttccctttgcttgctactcttgtcgagtgcatgctttgctattagctccagcaagctcaacgagtgccaactcaacaacctcaacgcgttggaacccgaccaccgcgttgagtccgaaggtggtttgtttcaaatatggaactctcaacaccctgagctgaaatgcgccggtgtcactgtttccaaactcaccctcaa

SEQ ID NO: 65215 - DNA, 261 bp, Glycine max
  Clone ID: 700758478H1
catggatgttgcaaatcagggccaggctatgcttccccactggaagccatttctggtcccagagagtctctcatttatgtaacctctgtctacacagggaccggaatagagaagccagactatttggcgacagtggatgtggatccaaactctccaacttattccaaagtcatccataggcttcctgttccttatttaggtgacgaattgcatcacacaggctggaattcatgcagctcttgccatggagacccctcagca

SEQ ID NO: 65216 - DNA, 261 bp, Glycine max
  Clone ID: 700758480H1
tacaagtacttccttacaatcaaaaccaacaacaactatggcaagttatcaaaagcactacgatgatcagggtcgcaaggttgacgagtatggcaacgttgagaagcaaaccgacgaatacggcaaccctgttcatgctgctagtgtcacctatgtagccaccagaactgctgctggtggttacagtgatgacattaataagcaacatgataccaccaatgcctacggcgtagacactggtagacagcattctagtggtgg

SEQ ID NO: 65217 - DNA, 270 bp, Glycine max
  Clone ID: 700758481H1
gacaaaactagtgcaactttgcaatttagaaagttagcagattgtgattttctcaagagaaactttaggcagatgtctaatgttttgtgggtggctcctgaggacaaggcgagtttatggtcacaacttcattatgtttcatgtaataatctggaaatgcaagaagcttatcttgtcaatctcgtaaatgtgttacgagaattgtatttgcacagtccagaggaagctcgccaattgagaaggaaagctctctctcgtattgaatggctg

SEQ ID NO: 65218 - DNA, 268 bp, Glycine max; identical to SEQ ID NO: 57359
  Clone ID: 700758483H1

SEQ ID NO: 65219 - DNA, 260 bp, Glycine max
  Clone ID: 700758486H1
attggaactgataagtgataaaacagagtttcgttgaatctgcactaaaaccctacgcacacatcttggtgtaagtccaatcgatatagcagcaatgtctacgcttgaaattgaagctcgagatgtcatcaaaattgtgcttcagttttgcaaagagaattcgttgcatcagacttttcagatgctgcagaacgaatgccaggtttctctgaacactgttgacagcattgaaacctttgttgctgatattaatagtggaa

SEQ ID NO: 65220 - DNA, 260 bp, Glycine max
  Clone ID: 700758487H1
ctccaaacccaacacccctcttctcccccaccatgctgacgacgattacctcatcgttatccttaacgggactgccattcttaccttggtgaacaacgacgaccgagactcttacaaccttcaatctggcgatgccctaagagtccctgcaggaaccacatactatgtggttaaccctgacaacgacgagaatctcagaatgataacactcgccatacccgttaacaaacccggtagatttgagagtttcttcctatcta

SEQ ID NO: 65221 - DNA, 259 bp, Glycine max
  unsure (1)..(259): unsure at all n locations
  Clone ID: 700758488H1
ggaacaatcatctcgtccccatatcgaatccgttttatcgccgaaggcantcctttgagccttaagttcgattcatttgcagttataatgctgtgtgttggaattcctaccgagtggtctgttgtggaggatctaccagaaggacctgctgttaaaattggtgagaacaaagatgcaatggatggttggtttagacttgagagagtttctgatgatgaattcaataactataagcttgtgttctgtccacagcaagctg

SEQ ID NO: 65222 - DNA, 259 bp, Glycine max
  Clone ID: 700758489H1
ataaaccgcgatcacaggttgccgcaccttaaaaccggaaacaaaagcaatcgttacttgatttcaagaatctctcaatttcttcctacttctttgtgtacgatttcttaagggaaagaaaatcactctctgtgctggccacagacttcgtgaatcattttcttttccactcttagtttattccatgaacactctcctatttgatataggacttcgtgtcagatttaaacttcttctgtatctttctcagttctctgct

SEQ ID NO: 65223 - DNA, 259 bp, Glycine max
  Clone ID: 700758490H1
gaaattaccgttaaacgaaagtaagaactaacatctcgttcaccgcttgtactttggatgatgatgaggtgagtgtgtaacgagaaggtagggtagggtgcagattgcagaggattgggaattttgaatttgaacaacaatccgagcttgcttgtttcctcgttctgttctgagctctaatggaagcactatcccttcccataaacactctcaccaattcctctgccaaacaacacatttatctgagtgcttcttccaa

SEQ ID NO: 65224 - DNA, 257 bp, Glycine max
  Clone ID: 700758491H1
tctcgagccgattcggctcgagggatttcactgtgatatcatttgattcactggatggactgccaccccaatgcaggatgttcaggttacaattgattggtttatttcctctcaggaatgtgttcccaggacttattgtgttttaaatccacaaaatccttttgtgttaaataggtggatggggaaactgactttcccccagggcacttcccgaaatgttaagagaatgcctctttctatagggggaggagctggtg

SEQ ID NO: 65225 - DNA, 253 bp, Glycine max
  unsure (1)..(253): unsure at all n locations
  Clone ID: 700758492H1
aaacactggagctaatatcccttcactagggctgggaacttggctggctgatcctggtgttgttggtgatgttatagctcatgccgtcgaggttggttatcgccatattgattgtgctcaaatttacggcaatcaggaggagattggtttagcattanagaagttatttgaagagggtgtagtcaagcgagaagatttatggatcacctctaaactctggtgtacagatcatgctccagaagatgtaccagaa

SEQ ID NO: 65226 - DNA, 261 bp, Glycine max
  Clone ID: 700758494H1
aagcccttcactctctctctttcttccctttgcttgctactcttgtcgagtgcatgctttgctattagctccagcaagctcaacgagtgccaacccaacaacctcaacgcgttggaacccgaccaccgcgttgagtccgaaggtggtttgattcaaacatggaactctcaacaccctgagctgaaatgcgccggtgtcactgtttccaaactcaccctcaaacacaatggcctccacttgccatcttactcaccttatccc

SEQ ID NO: 65227 - DNA, 254 bp, Glycine max
  Clone ID: 700758495H1
ctagtacaccgtattaaagaatttaagatatactatgatgagagcgcggttcccattactgttgctgggagttgttttcctggcatcagtttctgtctcatttggcattgcgtattgggaaaagcagaaccccagtcacaacaagtgcctccgaagttgcaatagcgagaaagactcctacaggaaccaagcatgccacgctcgttgcaacctccttaaggtggaggaagaagaagaatgcgaagaaggtcaaa

SEQ ID NO: 65228 - DNA, 245 bp, Glycine max
  Clone ID: 700758496H1
gtagttcagtgtcagtctctcttcatttaagacatccaatgagaatggaggcgttactgtttgcgcttgtggcgattctgtcgagaggttgtgatgctgctacagagtgcacaaacattcctacactatctcatacattcaggtatgagctattgaagtccactagtgctacgtggaaagcagaggcgatggatcactatcatttgacgccatcggctgacacggcctgggcggcattgctgccg

SEQ ID NO: 65229 - DNA, 87 bp, Glycine max
  Clone ID: 700758501H1
atgggagtggaattcctggagcattttatatcaagaattttatgcaaactgagtttttccttgtgagtttgactcttgaagacattc

SEQ ID NO: 65230 - DNA, 256 bp, Glycine max
  Clone ID: 700758502H1
cttatcttatccctctaatcactctagctgttgcaaatttctactatttttcaatggcttctgcagatgttgagttccgttgctttgttggtgggcttgcttgggtcaccggcaacgatgccctcgagaaagccttttcaatctacggcgacatcgttgaatcgaaggttatcaacgaccgtgagactggaaggtccagaggattcggatttgtgaccttcgcctcagagcagtcaatgaaagatgcgatcgcagg

SEQ ID NO: 65231 - DNA, 247 bp, Glycine max
  Clone ID: 700758503H1
gttcctcactgaccaagccactgcgatgagaaccaaactttctttagctatctttttcttttatcttttagccttattttcaaacctagcctttggcaaatgtaaagaaaccgaggtagaagaagaagaccctgagctcgtaacatgcaaacaccaatgccaacagccacagcaatacactgagggtgacaagcgggtatgcttgcaaagatgtgacaggtatcatcgtatgaagcaagagcgagag

SEQ ID NO: 65232 - DNA, 253 bp, Glycine max
  Clone ID: 700758504H1
aagcacaatgcatcatctcaaagaaattaagagagttttttttgttcctcactgaccaagccatggcgatgagaaccaaactttctttagctatctttttcttttttcttttagccttattttcaaacctagcctttggcaaatgtaaagaaaccgaggtagaagaagaagaccctgagctcgtaacatgcaaacaccaatgccaacagccacagcaatacactgagggtgacaagcgggtatgcttgcaaag

SEQ ID NO: 65233 - DNA, 251 bp, Glycine max
  Clone ID: 700758505H1
cgacacagcttttccatcacacatggctccccaagctccaacaggacagctgtcacagggcaccaacttcccccatcatggaggatctactgctcacactgctccgcatttgtcttcttattctccaactcatcaagcatcacagtttaacagccagagctttattggacaacaagggaatgcagccccctatagctcaccaattaccaatcaatcatttgcttctaatgcttcacaatccaattctttag

SEQ ID NO: 65234 - DNA, 249 bp, Glycine max
  Clone ID: 700758506H1
cttaattattaacacttccttagttcaatatggggaagcccttcactctctctctttcttccctttgcttgctactcttgtcgagtgcatgctttgctattagctccagcaagctcaacgagtgccaactcaacaacctcaacgcgttggaacccgaccaccgcgttgagtccgaaggtggtttgattcaaacatggaactctcaacaccctgagctgaaatgcgccggtgtcactgtttccaaactca

SEQ ID NO: 65235 - DNA, 252 bp, Glycine max
  Clone ID: 700758507H1
ctcatatactactaacaccctcagaaccgttccccacttgcttttcaattttctttttttgcccttttcgccgccctcaaagagttcaaggatttatacaattaatagttttttaatatggaatggctggaatttgctgtggagttgttggagaatccggagagacttcttcctcttcaatcgaacccacctcgcgcccctccgctcgccggagtttggaccttttgcctttgagatacatagctgctgacg

SEQ ID NO: 65236 - DNA, 251 bp, Glycine max
  Clone ID: 700758508H1
atagtcttccatagccccccaaaaatgaagagcaccatcttctttgctctctttctcttttgtgccttcaccacctcatacctaccttcagccatcgctgatttcgtgctcgataatgaaggtaaccctcttgaaaatggtggcacatattatatcttgtcagacataacagcatttggtggaataagagcagccccaacgggaaatgaaagatgccctctcactgtggtgcaatctcgcaatgagctcga

SEQ ID NO: 65237 - DNA, 251 bp, Glycine max
  Clone ID: 700758511H1
ggatatggttacaaaggaagctccttccatcgtataatcaaagatttcatgattcagggaggagactttacagaaggaaatggaactggtggaattagtatctatggtcctagttttaaagatgagagttttgccttaaagcatgtcggtcctggagttctgagcatggcaaatgctggtcctaatactaatgggagtcaatttttcatttgcactgtaaagactccatggctagacaatcgtcacgttgt

SEQ ID NO: 65238 - DNA, 277 bp, Glycine max
  Clone ID: 700757863H1
actagttcaatatcctagtataccttaataaataatttaagatactatgatgagagcacggttcccattactgttgctgggacttgttttcctggcttcagtttctgtctcatttggcattgcttactgggaaaaagagaaccccaaacacaacaagtgtctccagagttgcaatagcgagagagactcgtacaggaaccaagcatgccacgctcgttgcaacctccttaaggtggagaaagaagaatgtgaagaaggtgaaattccacgaccacga

SEQ ID NO: 65239 - DNA, 278 bp, Glycine max
  Clone ID: 700757864H1
tgaaaggacacacctgctgttggcttgttgttcaaggatggcaatttgtaagaaagatgtttggagagttgaatgtggaatcccttctggatttccgctcacagttatttgcaatagcatttttaatgagatgctcattagatatagctatgaaaaattactgcgccaggctaaagctccaagtatgtttttacaatctttcaaaaattttgtttctttgtgtgtgtatggtgatgataacttaattagtgttcatgaatatgtcaagccttacttta

SEQ ID NO: 65240 - DNA, 263 bp, Glycine max
  Clone ID: 700757867H1
gttatatttgattcttactcgcagtttgaggagagcatgcttggttacaagatggaggagatggggttgagtgatgaagagggtgatgaggaggagggtgaagagagtggcgttgaggaaggggatgaagaggatattcgtttcaaaggaagattggtggaggaggattttgagaggaagattttacatgggttttggttgaatgacaagaaagacatagacttgaggttggctcggtttgattaccttatggaaaggaggcc

SEQ ID NO: 65241 - DNA, 266 bp, Glycine max
  Clone ID: 700757868H1
agaggttcttgcccattcttacaaccttcgacagagtcaagtgtctgagcttaagtatgaaggaaattggggtcctttggtcaaccctgagtctcaacaaggctcaccccgtgttaaagtcgcataaatgacaagcatgatggtgtgaggatgaggccatcttatgaaataataacaaataaataaattttgtatgataataaaaagtatggcccatgtaccatcccagcgagcctatgtttatatctgagtggcgttgtaccttt

SEQ ID NO: 65242 - DNA, 270 bp, Glycine max
  Clone ID: 700757869H1
tctcgagccgaatcggctcgagccattttccatgacccaagtagtactataataccattcttacaattgcttaccagaacaagcatggaagctacgggggaaaaagcatggcattctctgcatgtggttcggaatatggaagcaaattctatgctatttatggcataacaaccaccttgggtcttcattaatccctatgcaaatccaatctagaagattaaccatgtccctatgtaagtaccctgaggctgaaacagtacccctttatat

SEQ ID NO: 65243 - DNA, 250 bp, Glycine max
  Clone ID: 700757870H1
cggctcgagcggctcgaggcatgctctagtcacagacaccgacacagatctgtcttccgaagcaggaactaaatatggctgacttgttggaatggtcaaagcaagataagaaacgaatgcttcatgtcgtctaccgtgttggtgaccttgatcgcaccatcaaattttacacagaatgtttaggaatgaagcttttgaggcaaagagatatcccagaggagaaatatgctaatgcttttcttggatttgg

SEQ ID NO: 65244 - DNA, 268 bp, Glycine max
  Clone ID: 700757871H1
ttccgcacttccaaaggttgctcttcctgttgctgcctctgttgttgttctttaatgccaacaagttcaatgtttgcttctccttcattaatcactagtaccactatggcctttgaattgaagtgtggcagaaacctagtcaagtgcaggagcttgcgttccctgggtctgcaaaagatattgagaacctaataaagagccaaagtgagtcctactttgtggatgctcagcctcagcagaaagaggaggggaacaagggaagaaaggg

SEQ ID NO: 65245 - DNA, 271 bp, Glycine max
  Clone ID: 700757872H1
attgtctttgaacactcatcaccatggccaagcttgttctttccctttgtttccttcttttcagtggctgcttcgctctgagagagcaggcacagcaaaatgagtgccagatccaaaagctgaatgccctcaaaccggataaccgtatagagtcggaaggtgggttcattgagacctggaaccctaacaacaagccattccagtgtgccggtgttgccctctctcgctgcacccttaaccgcaatgcccttcgtagaccttcctacaccaa

SEQ ID NO: 65246 - DNA, 271 bp, Glycine max
  Clone ID: 700757873H1
ctcgagccgattcggctcgagaactcctaaaggttccatgttggaccttaaaatttctcaatctaaaattgcacttcccaagaacacagttggaggaactattctgcgtagtgatctattggcaaatactctgacagagggcaattttagagcaagtgttgatttgcagcgcactcatcgtattaaaggaatgattaaaatggtggccacagttggtattcctgagaatacaggtatatcattggcctgtgctatgaatagttcttttagg

SEQ ID NO: 65247 - DNA, 271 bp, Glycine max
  Clone ID: 700757874H1
gctagaatggaatttcgatgctcagtcatctcttttaccattctcttctctcttgctcttgcaggagagagccatgtccatgcatcgctacctgaggaagattattgggaagctgtttggccaaacactcccattcccactgcactgcgagagcttctaaagcctctccctgcacgtgttgaaatcgatgaactccctaagcaaattgatgatacacagtacccaaaaacattcttctataaagaagaccttcatccaggcaaaacaatga

SEQ ID NO: 65248 - DNA, 272 bp, Glycine max
  Clone ID: 700757876H1
agaatagcattctttgcaccagctcctccccctatagaaagaggcattctcttaacacttcgggaagtgccctgggggaaagtcaattttcccatccacctatttaacacaagctggtgcagtttggagagattcaggaaaaagttgtattgaaattttcacaagaggaatttcttacagcttggtcaactcaggtgcgtcctgcaacaactctgttggctgatgggtgtccatatttgtatgcaatggtgcatgatagttcagtgtctaca

SEQ ID NO: 65249 - DNA, 272 bp, Glycine max
  Clone ID: 700757877H1
aacttgagaagccgcaaccccatctattccaacaactttggaaagttctttgagatcacccctgagaaaaacccacagcttcgggacttggatatcttcctcagttctgtggatatcaacgaaggagctcttcttctaccacacttcaattcaaaggccatagtgatactagtgattaatgaaggagatgcaaacattgaacttgttggcattaaagaacaacaacagaagcagaaacaggtagaggaacctttggaagtgcaaaggtacag

SEQ ID NO: 65250 - DNA, 277 bp, Glycine max
  unsure (1)..(277): unsure at all n locations
  Clone ID: 700757878H1
cgaacnttggaggagcaccgtttgtcatggcggttccaccatcggaaactgaatccgttgagaaaagaacattcctttcacaattttactctcactatctcggaaaccgaatccacgctctctatccctacttctccacaaatttcttgtccaccttcgttctccgcttcagatcaacgcagcgtcgggaatgtctccctcttccgctaccttcctcttcactcgacgctcccttgttcatgaccaagagatctagagtgcatgatgttttggagga

SEQ ID NO: 65251 - DNA, 263 bp, Glycine max
  Clone ID: 700757879H1
cactcttcttctcttgcggctagggttttagcgcagttcttctagatttaaggaagatgggtaaggaaaaggttcacatcagtattgtggtcattggccatgtcgactctgggaaatccactaccactggtcacctgatttacaagcttggaggcattgacaagcgtgttattgagaggtttgagaaggaagctgctgagatgaacaagaggtctttcaagtatgcctgggtgctggacaaacttaaggctgagcgtgaaaga

SEQ ID NO: 65252 - DNA, 276 bp, Glycine max
  Clone ID: 700757880H1
tggatcttaaaatttctcagtctaaaattgcacttcccaagaacacagttggaggaactattctgcgtagtgatctattggcaaattttctgacagagggcaattttagagcaagtgttgatttgcagcgcactcatcgtattaaaggaatgattaaaatggtggccacagttggtattcctgagaatacaggtatatcattggcctgtgctatgaatagttcttttagggggcgtgccagttctgatatttacaccatctgctctcaagactgtg

SEQ ID NO: 65253 - DNA, 265 bp, Glycine max
  Clone ID: 700757881H1
agacgataatggcgggttctggcgggaaaaaggtgcaccaaatgatcgtcggtttcggcggcagtggcctcggccaggttgtcatcgccgtcgccgtctctttcctcgtccgcgtcttctccgctcccggcccggccctctcgccggagagcgaagctgacgacgtgccggagaacgattccgacgacgcagaagctccaacttccggcaaggtcacgccggtcacaatccagtggagaaacatcaattgctccctttctgataa

SEQ ID NO: 65254 - DNA, 264 bp, Glycine max
  Clone ID: 700757882H1
agacaatgtgtgagtttaaggcacacacattgttccattattctctttctcttttttctgtctaagacccacaatggctctttcaaactccgaaggagtctttcacttcatcctctcttctttcagctaccctttgcaacacaaaaggtaggaagtagatattgactgcttcctgggttcacatacaatgaaatcaggtttaaaaaatggttggccctctgttgtgcgtcttcgtctccgagacaaatcagtgacacccttttg

SEQ ID NO: 65255 - DNA, 265 bp, Glycine max
  Clone ID: 700757883H1
aaaagcttgtttgtaagaatggcttccggtgaacagaaattccctcctcaacaacaacaaacacagcctgggaaggagcatgctatgactccagtaccccaattcactagccctgactacaagccttcaaataaacttcaagggaagattgcattagtcactgggggtgattctgggattggacgagcggtgtgtaacttgtttgccttagaaggtgctaccgtggccttcacgtatgtgaaggggcatgaggacaaggacgcga

SEQ ID NO: 65256 - DNA, 258 bp, Glycine max
  unsure (1)..(258): unsure at all n locations
  Clone ID: 700757884H1
attttgataaaccgcgatcacaggttgccgcaccttaaaaccggaaacaaaagcaatcgttacttgatttcaagaatttctcaatttctttctacttctttgtgtacgatttcttaagggaaagaaaatcactctctgtgctggccacagacttcgtgaatcattttcttttccacttttagtttatttactgtgcnatctcctatttgatataggacttcgtgtcagatttaaacttcttctgtttctttctcagtt

SEQ ID NO: 65257 - DNA, 85 bp, Glycine max
  Clone ID: 700757885H1
ctcgctcgcactgtccagatcttaatcaagaggagtgagttttgtttttccagccatgacgccgtacatcctgcatgctgggaaa

SEQ ID NO: 65258 - DNA, 267 bp, Glycine max
  Clone ID: 700757886H1
aaaagcattgcaccaactatgttgcagttcgtagtatttttgttgcgcctttcagaggcggaaggcccattcgggtggttacatttccgaataccattgtgcagattgaaccagacatgaattcaaggtttcagcttttgagtaccactaccaatggtgattttgttcaaggaaaagatctcgcaatggttaaagttaatgtagcatgtgctgctgttggcttgacatcaagttacactccaactccattgttggaatctggtttgc

SEQ ID NO: 65259 - DNA, 266 bp, Glycine max
  Clone ID: 700757887H1
atcataataggtgagcagccgagatctgttgccggtggcatcaaggaaagtaagagtttagagtttgaactctgtttatccaatgcacaaagcgtagatctctgtgttataatggaatacaggaaaatcaaagacgaggatgaagttagggatgcgggcgttgaggacgttggaaaatcatttttgctgtcagtcccagataacgatttgacttccgagggagaaaccaaaattgacagccacagggagaaagtaaagtggaagcg

SEQ ID NO: 65260 - DNA, 269 bp, Glycine max
  Clone ID: 700757888H1
attttgataaaccgcgatcacaggttgccgcaccttaaaaccggaaacaaaagcaatcgttacttgatttcaagaatctctcaatttcttcctacttctttgtgtacgatttcttaagggaaagaaaatcactctctgtgctggccactgacttcgtgaatcattttcttttccactcttagtataaattatgaacactctcctatttgatataggacttcgtgtcagatttaaacttcttctgtttctttctcagttctctgcttaat

SEQ ID NO: 65261 - DNA, 270 bp, Glycine max
  Clone ID: 700757889H1
ctttgagaaatcagacggcggagagaatgggtttatcactcttacggtgggttctgccgctgactctgttgctcacctgcgccctaggtttccaatcggacgagcttctcctcgacgacgaagagttcggcatcgaaggaggacgaacctcctttgattccgattcgcatccaccttccaccgcctccacctcgaggaagaggctttccgactcctcctccgattccaagatccagttccctctccaacacgctttcggcgactccgatt

SEQ ID NO: 65262 - DNA, 269 bp, Glycine max
  Clone ID: 700757890H1
aattgggttttcactgatcaagcactacctgcagatcttatcaagagaggagtggcaattaaggatccatcaaccccacatggagttcgtcttctgatagaggactatccttatgccgctgatggactggagatatgggctgcaattaagacatgggttcaagaatatgtgcccttgtactatgcaagagatgatgatgtcaaaaatgattctgaactccaacattggtggaaagaagctgtagagaaaggccatggtgatttgaaaga

SEQ ID NO: 65263 - DNA, 266 bp, Glycine max
  Clone ID: 700757891H1
caaacagcaacagtacagagcattttgatgcatgtaagtggacaaaatcagaaccacattcctgggaattgatcttcccaatagaggtatgtggtcctaataatggttttgaaatgtggagttctgagtgggcaaatcaaacttcatggcatttgagtttccttattgacaatcccaaacagtctacagtttttgatattctcttgggaatcactcaagattttgaaattgctggtaatactcttatgccagctttttctgttcca

SEQ ID NO: 65264 - DNA, 269 bp, Glycine max
  Clone ID: 700757892H1
cacagattgaagagttccattcgatgcagaggatgatgaatgctcctgattcaaatgataatattgatctactgttgagcattgatttgttgggtttacaaggagcaggtaaagcttttccaaacaagattgtttttgatgataaacttgtgctggctaacacacaagaattctttgctggaaattttccagtggattcttggttaccaatttttgtgaattgtctttatcctgtaagtcaattaccttcagaagctgtcgttgtaaat

SEQ ID NO: 65265 - DNA, 265 bp, Glycine max
  Clone ID: 700757893H1
aaatggtggccacagttggtattcctgagaatacaggtatatcattggcctgtgctatgaatagttcttttagggggcgcgccagttctgatatttacaccatctgctctcaagactgtgaattgtggaatcctgcttgcacaaaagcaatgactatgtcatttaatccaaacccgtgttctgatgcatggagtttggaatttctgaagcgtactggatttcattgcgatatcatttgtgtcactggatggactgccaccccaat

SEQ ID NO: 65266 - DNA, 272 bp, Glycine max
  Clone ID: 700757895H1
accgcaatgcccttcgtagaccttcctacaccaacggtccctaggaaatctacatacaacaaggtaatggtatttttggcatgatattcccgggttgtcctagcacttatcaagagccgcaagaatctcagcaacgaggacgaagccagaggccccaagaccgtcaccaaaaggtacatcgcttcagagagggtgatttgatcgcagtgcctactggtgttgcatggtggatgtacaacaatgaagacactcctgttgttgccgtttctatt

SEQ ID NO: 65267 - DNA, 275 bp, Glycine max
  Clone ID: 700757896H1
gtgcattcttctctcgctctctgccttccatcacactcggcattcactttcccaagatagtagaagatggcagacactgaggatattcaacctcttgtttgtgccaatggaacaggaatggttaacgctggatttactggagctgatgccccatgttctgtgttttccagcattgtaggttcttctcgtcacactggtgtgatggttggcatgggccaaaaagatgcatatgttggtgatgaggcacaatctaagaggggtattttgactctcaa

SEQ ID NO: 65268 - DNA, 285 bp, Glycine max
  Clone ID: 700757901H1
taatggttaagattgtgatgtctgggaatgcagcagtcaaaaggagtgattgggcctcattggtacaagtgtttttaacaaacagcaacagtacagagcattttgatgcatgtaagtggacaaaatcggaaccacattcctgggaattgatcttccaatagaggtatgtggtcctaataatggttttgaaatgtggagttctgagtgggcaaatcaaacttcatggcatttgagtgtccttattgacaatcccaaacagtctacagtttttgatattctcttggg

SEQ ID NO: 65269 - DNA, 151 bp, Glycine max
  Clone ID: 700757902H1
gctctctctctctctctgccttttaccctaaaaagggtgttcgtttccttcataaggccctcttctgcggcactcttttcagcccagcattgaaacagagagagagagagagagagagacaaaacgattgcgtggggctctatagtggttt

SEQ ID NO: 65270 - DNA, 253 bp, Glycine max
  Clone ID: 700757903H1
tgaaactcctaaaggttccatgttggatcttaaaatttctcaatctaaaattgcacttcccaaaaacacagttggaggaaccattctgcgtagtgacctattggcaaattatttgacagaggcaattttagagcaagtgttgatttgcagcgcactcatcgtatcaaaggaatgattaaaatggtggccacagttggtattcctgatgatacaggtatagcattggcctgtgctatgaatagttcttttaggg

SEQ ID NO: 65271 - DNA, 284 bp, Glycine max
  Clone ID: 700757904H1
ctgtgatgacaatagcatttgaatttgcatttgaaagccatatgcaagagcatgtaacatctatggcacgccaatatgttcggagcattatatcatcagtccaaagggtagcattagcactttctccttctcatttgagttcacatgcagggttaggtcaccattgggtactcctgaagcacaaacccttgctcattggatctgcaacagttataggtttgtcaaatttactgtctttgcatactgaggttgaggatcatgcaatgcattttaccctgtgcgat

SEQ ID NO: 65272 - DNA, 284 bp, Glycine max
  Clone ID: 700757905H1
aatttttatccctatttggattttattttatactgttatgttatccatggcttctgcatatgttgagtaccgttgctttgttggtgggctcgcttgggccacagacgatcatgccttggagaaagccttctctcactacggcaacatcgttgatcgaaggtccgtttgttgcagccatcgcacacgatcccgttctgatctctgatctttttccgttacttgatctatgatacttcttcttcttcttcttatataattctcttttattactcacgccaataggt

SEQ ID NO: 65273 - DNA, 285 bp, Glycine max
  Clone ID: 700757906H1
gtcacgaagatgatcgaggtggtgttgaacgatcgattggggaagaaggtgcgcgtgaagtgcaacgacgatgacaccatcggcgacctgaagaagctggtggcggctcagacgggcacaagagccgacaagatccgcatccagaagtggtaaccatatacaaggatcacatcactctcaaggattacgagatccacgacggcatgggtctcgaactctactacaactaaacacaaggtgtgttttatgcatgatatattactatgatctgggaatgggatgagg

SEQ ID NO: 65274 - DNA, 281 bp, Glycine max
  Clone ID: 700757907H1
cttgttgttcaaggatggcaatttgtaagaaagatgtttggagagttgaatgtggaatcccttctggatttccgctcacagttatttgcaatagcatttttaatgagatgctcattagatatagctatgaaaaattactgcgccaggctagactccaagcatgtttttacaatccttcaaaaattttgtttctttgtgtgtgtatggtgatgataacttaattagtgttcatgaatatgtcaagccttactttagtggttctaaattgaaaagctttctag

SEQ ID NO: 65275 - DNA, 247 bp, Glycine max
  Clone ID: 700757910H1
gtgttgcttcttttctccctcttaggtctctcttctagttccagcatatcaactcatcgttccatattggaccttgacctaaccaagtttaccacacagaaacaggtgtcttcactttccaactatggaagagtgagcatggacgtgtctaccataaccacgaagaagaggcaaagagacttgagattttcaagaataacttgaactatatcagggacatgaatgcaaacagaaaatcaccccattc

SEQ ID NO: 65276 - DNA, 280 bp, Glycine max
  Clone ID: 700757912H1
cttctcttgcggctagggttttagcgcagttcttctagatttaaggaagatgggtaaggaaaaggttcacatcagtattgtggtcattggccatgtcgactctgggaaatccactaccactggtcacctgatttacaagcttggaggcatgacaagcgtgttattgagaggtttgagaaggaagctgctgagatgaacaagaggtctttcaagtatgcctgggtgctggacaaacttaaggctgagcgtgaaagaggaatcaccattgatattgctttgt

SEQ ID NO: 65277 - DNA, 285 bp, Glycine max
  Clone ID: 700757914H1
aaaagtttccttgacaatctaattctgcaaaaatggcaagcaataaggagtctaagttcccagcacagagccagaaaactcagccaggaaaagaacatgtaatgaatccactcccacaagccacaaatcctgatcacaaggccgccaataaactcagggaaaggtggcgttggtgacaggaggtgactcaggaattggcagagcggtttgcctgtgtttcgcaaaagagggtgcaaccgtggcctttacatacgtaaagggccatgaggacagggataaagatga

SEQ ID NO: 65278 - DNA, 285 bp, Glycine max
  Clone ID: 700757915H1
gaaaaagcttagccgaatgacatccttctctcaacccgatggcccgctgatgggaaatggttcctttaagtcctcatcactagttccaggtataaaagaaggaatatatctcggtccaccaccaaaagaatagcttcccaagaattctccacaagatctgttttgctaggggcaatttcatatgggaagctgtcctttgttggtcatggagagaataaaagtcctgaaaagcaccctgcatcatatcagatttctatatatagttcccccaaataagattgatga

SEQ ID NO: 65279 - DNA, 285 bp, Glycine max
  Clone ID: 700757917H1
aaaatgaccaagttcacaatcctcctcatctctcttctcttctgcatcgcccacacttgcagcgcctccaaatggcagcaccagcaagatagctgccgcaagcagctccagggggtgaacctcacgccctgcgagaagcacatcatggagaaatccaaggccgcggcgatgacgatgatgatgatgacgacgacaatcacattctcaggaccatgcggggaagaatcaactacataaggaggaacgaaggaaaagacgaagacgaagaagaagaaggacacatgc

SEQ ID NO: 65280 - DNA, 280 bp, Glycine max
  Clone ID: 700757923H1
actagttcaatatcctagtataccttaataaataatttaagatactatgatgagagcacggttcccattactgttgctgggacttgttttcctggcttcagtttctgtctcatttggcattgcttactgggaaaaagagaaccccaaacaaacaagtgtctccagagttgcaatagcgagagagactcgtacaggaaccaagcatgccacgctcgttgcaacctccttaaggtggagaaagaagaatgtgaagaaggtgaaattccacgaccacgaccac

SEQ ID NO: 65281 - DNA, 281 bp, Glycine max
  Clone ID: 700757924H1
tggtggtaccacagaacttcgtggtggcggacaagccggagaacaaggattcgaatacatagtattcaagacacaccacaacgcagtcactagctacttgaaggatgtgtttagggcaattccctcagaggttcttgcccattcttacaacttcgacagagtcaagtgtctgagcttaagtatgaaggaaattggggtcctttggtcaaccctgagtctcaacaaggctcaccccgtgttaaagtcgcataaatgacaagcatgatggtgtgaggatgagg

SEQ ID NO: 65282 - DNA, 282 bp, Glycine max
  Clone ID: 700757925H1
cggctcgaggcatgaagaaattcagaatgaaaaacatgaggaagaagaagatgaacatattgaagaggatgaagaaactaagcatgatcatgaagaacaacaagatggaaacaagaatgaaactgaagaacgtgaagagaacaagcatgaggcagactacaaaggggagaagaaaataagcatggagcagaagaccaggaggaagatgtggaagatgtaggaagaggaggaggagacgatgatatcgatgaaaatgatcaagagaaatcagagatggatact

SEQ ID NO: 65283 - DNA, 280 bp, Glycine max
  Clone ID: 700757926H1
caactaacaataattccttcacttgcagaacttagttctctgttgcatcatcatcatcttcattagtgttagccctaaacttcaccttcaaccatgaccacagtgccaccacacagtgtccaagtgcacacaacaacacacctatacgatccggcgtcgtcccgccggctcgttttgaggcgccgcgttacgaagccggcatcaaggcgccctcttccatttaccattccgagagaggtccgacgacctctcaggttctcgcagttgtcgccggccttcc

SEQ ID NO: 65284 - DNA, 277 bp, Glycine max
  Clone ID: 700757927H1
gcaagagtctctaaaatatcagcaagagcaaggaggtcatcaaagccagaaaggaaagcatcagcaagaagaagaaaacgaaggatgcagcatattgagtggcttcaccctggaattcttggaacatgcattcagcgtggacaagcagaagcgaaaaacctacaaggagagaacgaaggggaagacaagggagccattgtgacagtgaaaggaggtctgagcgtgataaaaccacccacggacgagcatcaacaaagaccccaggaagaggaagaag

SEQ ID NO: 65285 - DNA, 260 bp, Glycine max
  Clone ID: 700757929H1
agggagtctgcattcaatattcagtttgaatgggacgaaagcatgggaatccccggtgcgttttacataaagaactacatgcaagttgagttttacctcaagagtttgactcttgaagacgttccaaaccaaggaaccattcgctttgttgcaactcatgggtttataacactaaactttacaaaagcgtgcgcattttctttgccaaccatacatatgttccaagtgagacaccagcagcacttgttggggtacagaga

SEQ ID NO: 65286 - DNA, 282 bp, Glycine max
  Clone ID: 700757930H1
tacacacacacacacacactaagaataatggcttctatcctccactactttttagccctctctctttctttctctttccttttcttcttatccgactccgtccccattccccaacaccacactaaccctacaaaacctataaaccttctggtctacccgttcaaaatgatgcttccacagggctccattgggccaacctccaaaaaaggacccctctaatgcaagtaccagtcctggtggacctcaatggaaaccacttgtgggttaactgtgagcaacact

SEQ ID NO: 65287 - DNA, 286 bp, Glycine max
  Clone ID: 700757931H1
gtgaagacaaagcacttcaagcaagccggcatttattgcaatctggcttccacgtgactgcaatcagaccacctactgtgcctcctaactcatgcaggctgcgagtggccctaagtgcagtccatacaagggaagatctggaaaaccttgcagctgcactctcacgttgcatcaatttccaagatacccgcatatatgattccaatgcctatgcaagactgtagctagctcttgatttttcaggatgaattgcgtcatcaacgattttgtgactatacaggtaata

SEQ ID NO: 65288 - DNA, 287 bp, Glycine max
  Clone ID: 700757932H1
caaaaccaaaacactcaagttaacttcaacacctttaattttctgaacgaaattcagccacagaatatcaaagggagcgaagatgagtcaggagcagccaaggcgcccccaaggccaagaccccatcaaatacggcgacgtttttgacgtctacgtgaccttgcacagatgcccattgcaccggaagatgctgccatgatgcaaagcgcggaagctcgagtactcggaaaaacccaacccggcggacttcttccgtcatgcaatccgccgccacaaggaatgaacag

SEQ ID NO: 65289 - DNA, 277 bp, Glycine max
  Clone ID: 700757933H1
aggaaatagtatcttcgtttgttcaatatgtttggttcatcaggcatggcacaggaatctggtatgttcatggttagccagacaattggcagtgttttgtgctgcaaatgtggaattccaatgcaacccaatgctgctaatatgtgtgcaagtgtctgcgatcggaagttgatattacagaaggactgctgaagcgtcttgtgctggtgcattgccctgagtgtgagagttacttgcagccaccaagaagttgggtcaagctgcagctggaatcaaa

SEQ ID NO: 65290 - DNA, 281 bp, Glycine max
  Clone ID: 700757938H1
ctcgagccgggcactgctttttgaagtccagtcctcaccattctgtgtgcatcaaaaagagacatcaaaaggaatgtttggtgttcctaaacctgggcagaaaaggaaatttatggaagtaagcaagcattacgtggcccatgaaaacataagatcggtgatagaaatgattcagttagacttacaaatttcttgatgcctccaagttccggacccagaggatggaaaaatagttccaaaaatgatgccaaagagaaacatggagccgactccaagcccaa

SEQ ID NO: 65291 - DNA, 280 bp, Glycine max
  Clone ID: 700757939H1
agctagttgaagcttgcgctatcatcatatggactgcttcagcacttcatgcagctgttaattttggacagtatccctatggaggtttaatcttaaaccgtccaactcttagtaggcgattcatgcctgagaaaggttctgctgagtatgaggagctgaggaagaatccccagaaggcttacttgaagactattacaccaaagtttcagacccttattgacctttctgttatagaaatcttgtcaaggcatgcatctgatgaggtgtaccttggggagag

SEQ ID NO: 65292 - DNA, 276 bp, Glycine max
  Clone ID: 700757940H1
ctcgagccgatttgagtttccttattgacaatcccaaacagtctacagtttttgacattctcttgggaatttctcaagattttgaaattgctggtaatactcttatgccagctttttctgttccacaggctactgccagatcttctgaaatgcggaatcctctgcatgatctggaatttgtgttttctttcatttgtccgtttgtttaattcaataaaggaaattaggcatgaccctcttgttgagtatgctctgcctatttgaaaatttccacac

SEQ ID NO: 65293 - DNA, 277 bp, Glycine max
  Clone ID: 700757941H1
tagcatttggaaatttggctgatgacaccatcaattttgaggcttttccccacaagctggtgcatattggagagattcaggaaaaagttgtattgaaattttcacaagaggaatttcttacagcttggtcaactcaggtgcgtcctgaacaactctgttggctgatgggtgcccatatttgtatgctatggtgcatgatagttcagtgtctacaataccaggtgattttgtcattggtgttaagttgacaaccataaacaatatgtgtgcatatggg

SEQ ID NO: 65294 - DNA, 94 bp, Glycine max
  Clone ID: 700757943H1
caaagaaggcgtcttcataaacgcctttcttctccgtttccgtttcctcgttcgaattcgctttttgatctgcgaaaatgagagagtgcatctc

SEQ ID NO: 65295 - DNA, 279 bp, Glycine max
  Clone ID: 700757946H1
taaaattcttccaccaagttatgggttcccttgtgttgcttcttttctccctcttaggtctctcttctagttccagcatatcaactcatcgttccatattggaccttgacctaaccaagtttaccacacagaaacaggtgtcttcactttccaactatggaagagtgagcatggacgtgtctaccataaccacgaagaagaggcaaagagacttgagattttcaagaataacttgaactatatcagggacatgaatgcaaacagaaaatcaccccattc

SEQ ID NO: 65296 - DNA, 109 bp, Glycine max
  Clone ID: 700757947H1
gtcactagctctgtgcattcttctctcgctctctgccttccatcacactcggcattgcctttcccaagatagtagaagatggcagacactgaggatattcaacctcttg

SEQ ID NO: 65297 - DNA, 250 bp, Glycine max
  Clone ID: 700757948H1
tagtatacctttataaataatttaatatactatgatgagagcacggttcccattactgttgctggtacttgttttcctggcttcagtttctgtctcatttggcattgcttactgggaaaaagagaaccccaaacacaacaagtgtctccagattgcaatagcgagagagactcgtacaggaaccaagcatgccacgctcgttgcaacctccttaaggtggagaaagaagaatgtgaagaaggtgaaattc

SEQ ID NO: 65298 - DNA, 90 bp, Glycine max
  Clone ID: 700757949H1
aaatggttcgaggaagtaagctaagctagccctaacctaactctaaacatacatagcatcaccaacctatttcttcttccttccaacaag

SEQ ID NO: 65299 - DNA, 118 bp, Glycine max
  Clone ID: 700757951H1
cagagtgccgacggtgaaatcgagatatacatccggaagtgttgttgggaaagtacaagatagatatgattgaggagatacaccccataagtggtttcttcagctccaattcaatctg

SEQ ID NO: 65300 - DNA, 275 bp, Glycine max
  Clone ID: 700757952H1
cttaattattaacacttccttagttcaatatgggtaagcccttcactctctctctttcttccctttgcttgctactcttgtcgagtgcatgctttgctattagctccagcaagctcaacgagtgccaactcaacaacctcaacgcgtggaacccgaccaccgcgttgagtccgaaggtggtttgattcaaacatggaactctcaacaccctgagctgaaatgcgccggtgtcactgtttccaaactcaccctcaactgcaatggcctccacttgc

SEQ ID NO: 65301 - DNA, 275 bp, Glycine max
  Clone ID: 700757954H1
caatggtggcggtaacttttgagaaagctctgtcttttggctcttggagctcaaaagcaagagcaccttagattataagatcggtttcgctttcattctgtcccttttctcagagagagcaacgaggtcttatagttaaatctgagctgaagattgaggaacttaaagtttgaagtttgaggagtgtttgtgattacaaagaatatggatcaaaatagggatgagagctggaggaaattagtgaagaagatgcttcctcctggtgcttccatacc

SEQ ID NO: 65302 - DNA, 275 bp, Glycine max
  Clone ID: 700757955H1
ctatgtcatttaatccaaacccgtgttctgatgcatggagtttggaatttttgaagcgtaccggatttcactgtgatatcatttgtgtcactggatggactgccaccccaatgcaggatgttcaggttacaattgattggtttattcctctcaggaatgtgttcccaggacttattgtgttttaaatccacaaaatccttttgtgttaaataggtggatggggaaactgactttcccccagggcacttcccgaaatgttaagagaatgcctcttt

SEQ ID NO: 65303 - DNA, 273 bp, Glycine max
  Clone ID: 700757958H1
gtttaattcatcaatgggtgttttcctttgagattcaatctcaccatggtggacgttttcaaactttgcatcttccttcttgcactcttctgtgctttcctagtcttttctaatccagtgctgtgtagtgataaggtggacagttattcaagggaatcaacagctacaggcagacacggaacctggcacccctgaaccaagtttcaaaggcaacatgtttggctgatgaggttgcagaagaaatagataacatgccctgtgaaaacgtgaatc

SEQ ID NO: 65304 - DNA, 181 bp, Glycine max
  Clone ID: 700757959H1
attttgataaaccgcgatcacaggttgccgcaccttaaaaccggaaacaagagcaatcgtgacttgatttcaagaatcgctcaatttcttcctacttctttgtgtacggtttcttaagggaaagaaaatcactctctgtgctggcacagacttcgtgaatcatgttctgttccacacaaca

SEQ ID NO: 65305 - DNA, 277 bp, Glycine max
  Clone ID: 700757962H1
ccttgctctatactacacagtacacacactagaagaataatggcttccatcctccactactttttagccctctctctttcttgctcttttcttttcttcttatccgactcagtcacccctacaaaaccaataaaccttgttgttctacccgttcaaaatgatggttccacagggctccattgggccaacctccaaaaaagaacccctctaatgcaagtaccagtcctggtggacctcaatggaaatcacttgtgggttaactgtgagcagcagtact

SEQ ID NO: 65306 - DNA, 282 bp, Glycine max
  Clone ID: 700757963H1
gccagaaaggaaagcaacaagaagaagaaaacgaaggaagcaacatattgagtggcttcgcccctgaattcttgaaagaagcgttcggcgtgaacatgcagatagtgagaaacctacaaggtgagaacgaagaggaggatagtggagccattgtgacagtgaaaggaggtctaagagtcacagctccagccatgaggaagccacagcaagaagaagatgatgatgatgaggaagagcagccacagtgcgtggagacagacaaaggttgccaacgccaaagca

SEQ ID NO: 65307 - DNA, 277 bp, Glycine max
  Clone ID: 700757965H1
caacaatgaagacactcctgttgttgccgtttctattattgacaccaacagcttggagaaccagctcgaccagatgcctaggagattctatcttgctgggaaccaagagcaagagtttctaaaatatcagcaagagcaaggaggtatcaaagccagaaaggaaagcatcagcaagaagaagaaaacgaaggaggcagcatattgagtggcttcaccctggaattcttggaacatgcattcagcgtggacaagcagatagcgaaaaacctacaaggag

SEQ ID NO: 65308 - DNA, 271 bp, Glycine max
  Clone ID: 700757966H1
cggttttggtggtagttctggtggtggtggttttggtggtggcggcggttttggtggtggtggtggtgggggcggatttggaggcgcgtctagggctgatgatgtggacaattgggcggttggtaagaagcctgctcctgttgatcttccaatttcggttccagttttcgcgattccggcgtggagccggatcgttggacgagaggggatccgccgcgtgaggttgagcagcggacggagaggccaaggctggtgttggatccgcctcgag

SEQ ID NO: 65309 - DNA, 272 bp, Glycine max
  Clone ID: 700757967H1
caaaaccaaaacactcaagtgaacttcaacacctttaattttctgaacgaaattcagccacagaatatcaaagggagcgaagatgagtcaggagcagccaaggcgcccccaaggccaagaccccatcaaatacggcgacgttttgacgtctacggtgaccttgcacagatgcccattgcaccggaagatgctgccatgatgcaaagcgcggaagctcgagtactcggaaaaacccaacccggcggacttcttccgtcatgcaatccgccgcc

SEQ ID NO: 65310 - DNA, 275 bp, Glycine max
  Clone ID: 700757969H1
ataaagcaaagcgtgtttgggtacgggggaaagcaagggatgatttgaagagaagagtctagaaacaacacaacacaacgcgaatggctacggcgctggagaagaaagcgaaggaggcattcttcgacgacgaattcggtctggccgtcgatctctactctgaagccatacgattggatccgaacgacgccaatctcttcgcggacagagcccaagcccatatcaaactcaacgctttcactgaagccgtttccgatgccaacaaatccatccaa

SEQ ID NO: 65311 - DNA, 270 bp, Glycine max
  Clone ID: 700757973H1
gacaaagtgttgttggtgatcttaaacttcttactgatgggaagttgtatgagggtaagcatattcctgtatctaatattagtgcaggggaaaatcatgtagttcaaatacccttaatggcacaggaggaaattctgtcttcagtgcaagtgatttcagagctgcaatggtgagtaaaaatagcaaacctcaagctactgcaatgcatgtgggagctatagaaattatcattgatagtttcgcaagtcctgattgcaacatagttggtgc

SEQ ID NO: 65312 - DNA, 271 bp, Glycine max
  Clone ID: 700757974H1
taagaaatgaagagtactatcttctttgctctctttctagtttgtgccttcaccatctcatacctgccttcagccaccgctcagttcgtgctcgacactgatgatgatcctcttcaaaacggtggcacatactatatgttgcagttatgagaggaaagggcggtggaatagaagtagattcaactggaaaagaaatatgccctctcactgttgtgcaatcacccaatgagctcgataaggggattggactagtctttacatctccattaca

SEQ ID NO: 65313 - DNA, 270 bp, Glycine max
  Clone ID: 700757975H1
tggggaacaactatatgatcctgttagaaatactgtgactgttgtttatgaggaatatagaaatcaatgtgcagccaattctttgagctcgaaaggaatgtttcaactgatccaaagaaaaggttcttcaaggaatctgatgctcttgttaatgatgatggatctgtggcaaaggcttggcctgttaatttagttgactgtaatgggaagcctgtatggtgccatggacctgagaatggagttggacatccaatgtatggtcccttaaga

SEQ ID NO: 65314 - DNA, 273 bp, Glycine max
  Clone ID: 700757977H1
gagtgagagcactaatccatttctctcctttctttcactctcttcttctcactgatccgcattgccgttcaaagtggtcttatttgaaaaacacttgggcgttggtgcaaatgtttgcttcgttaattttctctggagacgacggctcactgagaaaacaatttttacttgcagagatttggacatcttggttgtttattatacaatagcaactcaatttagaaaatttctaccgcattacattaggtggcatctgtataccttgttgatcta

SEQ ID NO: 65315 - DNA, 274 bp, Glycine max
  Clone ID: 700757978H1
caaacttattaacactttccttagttcaatatggggaagcccttcttcactctctctctttcttccctttgcttgctactcttgtcgagtgcatgctttgctattacctccagcaagttcaacgagtgccaactcaacaacctcacgcgttggaacccgaccaccgcgttgagtccgaaggtggtcttattgaaacatggaactctcaacaccctgagctgcaatgcgccggtgtcactgtttccaaacgcaccctcaaccgcaacggcctcca

SEQ ID NO: 65316 - DNA, 274 bp, Glycine max
  Clone ID: 700757979H1
ctcgagccgcctaaactctcccactcccatttctctctcccattcaacaggttcccccattccctcaacttccaccccttactcaaaccccgcgcagttaacgccgccgtcccccctaacggcctcgccgcctgctacctcaccctcaccgacggaaaccgttaaccgtcgctttcacagcttctccccaagactccgaacacggagagattgaagtggagaaggagcgtgacgtccacgcgggctctgaagaatctcaggaagcatggaagca

SEQ ID NO: 65317 - DNA, 274 bp, Glycine max
  Clone ID: 700757981H1
ggagaggaaggtttttggttcacggggtcagggccttaaggatgaaataatgggtcagaatccccttccatcatctacaagtaatgggaagagttctaatcctatcaagatagtgaagagggatgcccactctgtgagattaaatcggctgttgggtgtttgcccgaaaaattgctaacatcattgcattctgttcatgatgaacatcttaatgaggaatttgccttaaacaagtgcaatgctgttgtacaccaagtgggtaaacttgtagaag

SEQ ID NO: 65318 - DNA, 271 bp, Glycine max
  Clone ID: 700757982H1
acatagtagtgttggtgggttgcaaagatgcttgggggtcttctccataggggtcataagataaaagggacagtggtgttgatgcgcaagaatgtgttggacgtgaatagcgtaaccagcgttgggggaattattggtcaaggtctcgacttagttggctcaacactcgatactcttactgccttcttgggccgatccgtgtctctccagcttattagtgctaccaaagctgatgccaacggaaaagggaaacttggaaaggctacctttt

SEQ ID NO: 65319 - DNA, 271 bp, Glycine max
  Clone ID: 700757983H1
tgctcgagccgctcgagccgctcgagcggtcgacttaattattaaagcttccttagttcaaagcggggaagcccttcactctctctcttactaccctttgattgctactcttgtcgagtgcatgctttgctattagctccacaagctcaacgagtgccaactcaacaacgtcaacgcgttggaacccgaccaccgcgttgagtccgaaggtggtttgattcaaacatggaactctcaacaccctgagctgaaatgcgccggtgtcactgtt

SEQ ID NO: 65320 - DNA, 272 bp, Glycine max
  Clone ID: 700757984H1
ttcttcatagcatttggaaatttggctgatgacaccatcaattttgaggcttttccccacaagctggtgcagtttggagagattcaggaaaaagttgtattgaaattttcacaagaggaatttcttacagcttggtcaactaggtgcgtcctgcaacaactctgttggctgatgggtgcccatatttgtatgctatggtgcatgatagttcagtgtctacaataccaggtgattttgtcattggtgttaagttgacaaccataaacaatatg

SEQ ID NO: 65321 - DNA, 276 bp, Glycine max
  Clone ID: 700757985H1
aagttctctccattgtcgatgaacactcatcaccatggccacagcctgtacattccctttgcaatccttctgattacagtggctgcttcgctctgagactgcaggcacagcatgatgagtgccagatccagaagctgaatgccctcaaacggataaccgtatacagtcggaaggtgggttcattgagacctggaaccctaacaacaagccagtccagtctgccggtgttgcactctctcgctgcacccttaaccgcaatgcccttcgtagaccttc

SEQ ID NO: 65322 - DNA, 270 bp, Glycine max
  Clone ID: 700757986H1
ggttaagattgtgatgtctgggaatgcagcagtcaaaaggagtgattgggcctcattggtacaagtgtttttaacaaacagcaacagtacagagcattttgatgcatgtaagtggacaaaatcggaaccacattcctgggattgatcttcccaatagaggtatgcggtcctaataatggttttgaaatgtggagttctgagtgggcaaatcaaacttcatggcatttgagtttccttattgacaatcgcaaacagtctacagtttttgac

SEQ ID NO: 65323 - DNA, 267 bp, Glycine max
  Clone ID: 700757987H1
cacacaactactacaagtacttccttacaatcaaaaccaacaacaactatggcaagttatcaaaagcactacgatgatcagggtcgcaaggttgacgagtatggcaacgttgagaagcaaaccgacgaatacggcaaccctttcatgctgctagtgtcacctatgtagccaccagaactgctgctggtggttacagtgatgacattaataagcaacatgataccaccaatgcctacggcgtagacactggtagacagcattctagtg

SEQ ID NO: 65324 - DNA, 270 bp, Glycine max
  Clone ID: 700757989H1
caagcacaatgcatcatctcaaagaaattaagagagttttttttgttcctcactgaccaagccatggcgatgagaaccaaactttctttagctatctttttcttttttcttttagccttattttcaaacctagcctttggaaatgtaaagaaaccgaggtagaagaagaagaccctgagctcgtaacatgcaaacaccaatgccaacagccacagcaatacactgagggtgacaagcgggtatgcttgcaaagatgtgacaggtatcatc

SEQ ID NO: 65325 - DNA, 270 bp, Glycine max
  Clone ID: 700757990H1
cacagattgaagagttccattcgatgcagaggatgatgaatgctcctgattcaaatgataatattgatctactgttgagcattgatttgttgggtttacaaggagcaggtaaagcttttccaaacaagattgtttttgatgataaacttgtgctggctaacacacaagaattctttgctggaaattttccagtggattcttggttaccaatttttgtgaattgtctttatcctgtaagtcaattaccttcagaagctgtcgttgtaaatg

SEQ ID NO: 65326 - DNA, 287 bp, Glycine max
  unsure (1)..(287): unsure at all n locations
  Clone ID: 700757991H1
ctcgagccgctcgagcggctcgagcggnctcgagagattaagttatcagtcaatacgtcaagccatcactttagtcggttctaaattgatcaagctttagtcgctnggtcataatatgcaccatgtactgatggtattgnacaagactagtgcaacttgtgcaatgttagaaagttgagcagatgtgtgattttagtcaagagaaactttagagcagatgtctaatgttttgtgggtagctcctgaggacaaggcgagtttatggtcacaacttcattatgtttcgt

SEQ ID NO: 65327 - DNA, 267 bp, Glycine max
  Clone ID: 700757992H1
gtcggtaactctttcttttcttttctttctttctccgatcgcatcgctcgcaaccacaatcatgccttcccgaagaagaactctcttgaaggtcatcattctcggtgacagcggggtggggaagacgtctttgatgaaccgtatgtgaataagaagtttagtaatcagtacaaggcaaccattggagcggattttttaaccaaagaagtgcaatttgaagataggcttttcaccttacagatttgggatacagctggccaagaaaga

SEQ ID NO: 65328 - DNA, 271 bp, Glycine max
  Clone ID: 700757993H1
gtcaaaaagaaaatcgttttccttgagaaaatacggacacagagacagagagagggagagagagaaggaaatgggaagcacaaagtttctattgttggtgatggtgtttctcgcagtgtgcgtggggacatgcaggccttgggtgatgatgtagttgaagatggagaggaggccaaacattttgcagcaaaagccgtgcatgatgtcgaggaagagacccgctcttgggctgattgggctcaagacaagttctccaaaagtttcggggccg

SEQ ID NO: 65329 - DNA, 274 bp, Glycine max
  Clone ID: 700757995H1
agctggtgcagtttggagagattcaggacaaagttgtattgaaattttcacaagaggaatttcttacagcttggtcaactcaggtgcgtcctgcaacaactctgttggctgatgggtggccatatttgtatgcaatggtgcatatagttcagtgtctacaataccaggtgattttgtcattggtgtcaagttgacaaccataaacaatatgtgtgcatatgggctcaatcctggtatttcaggttctcgtcttttgggcaccattcctcagtcc

SEQ ID NO: 65330 - DNA, 252 bp, Glycine max
  Clone ID: 700758001H1
gttcctcactgaccaagccaaggcgatgagaaccaaactttctttagctatctttttcttttttcttttagccttattttcaaacctagcctttggcaaatgtaaagaaaccgaggtagaagaagaagaccctgagctcgtaacatgcaaacaccaatgccaacagccacagcaatacactgagggtgacaagcgggtatgcttgcaaagatgtgacaggtatcatcgtatgaagcaagagcgagagaaaca

SEQ ID NO: 65331 - DNA, 260 bp, Glycine max
  Clone ID: 700758003H1
tttgaaattttgataaaccgcgatcacaggttgccgaaccttaaaaccggaaacaaaagcaatcgttacttgatttcaagaatctctcaatttcttcctacttctttgtgtacgatttcttaagggaaagataatcactctctgtgctggacacagacttcgtgaatcattttcttttccactcttagtttatttgctgaacactctcctatttgatataggacttcgtgtcagatttaaacttcttctgtttctttctc

SEQ ID NO: 65332 - DNA, 261 bp, Glycine max
  Clone ID: 700758004H1
gcgacgtcgtatttaaccgtctccgggagccataagcgaagaacgtttcttcctcttcccagttccctgcaacattaacaagagcacaacagaacagagggagcacacaatctttcttcattcttttcgtgaaacaaaagaaaactgaaattaggttttcatgtcgggcatggagaggcttcagaggatgttcgctggtgcaggtggagcgctgggtcatcccccaccggattctcccaccctcgattcctccgagcaggt

SEQ ID NO: 65333 - DNA, 119 bp, Glycine max
  Clone ID: 700758005H1
ctcgagccggtaagagtctcaaatatctggttgatgagtgtccttttgcatttgtgaactagtatgtaatattttattcacttaaataaagcgcattactatgtgcaatgagtgtgttt

SEQ ID NO: 65334 - DNA, 262 bp, Glycine max
  Clone ID: 700758006H1
gttcaatatcctagtataccttaataaataatttaagatactatgatgagagcacggttcccattactgttgctgggacttgttttcctggcttcagtttctgtctcatttggcattgcttactgggaaaaagagaaccccaaacacaacaagtgtctccagagttacaatagcgagagagactcgtacaacaacaaggcatgccacgctcgttgcaacctccttaaggtggagaaagaagaatgtgaagaaggtgaaattc

SEQ ID NO: 65335 - DNA, 254 bp, Glycine max
  Clone ID: 700758007H1
ttgcatttgacatgatatgcaatcatcatctgtcgcctgtccaagttgtccaaagagctaccattcgaaccatccttgtaaaagtcagcagcattacccaatatagctactttaatatgtctgtctattggacttatatgagcattttccagtctcaactctgtatgggcaagaccgtggctgtgcaggtaattaaccccaataagttctcgcattaccattttagccatcataaagcccacgcatctcatgtc

SEQ ID NO: 65336 - DNA, 262 bp, Glycine max
  Clone ID: 700758008H1
cttagacaaagtgttgttggtgatcttaaacttcttactgatgggaagttgtatgagggtaagcatattcctgtatctaatattagtgcaggggaaaatcatgtagttcaaatacccttaatggcacaggaggaaattctgtcttctagtgcaagtgatttcagagctgcaatggtgagtaaaaatagcaagcatcaagctactgcaatgcatgtgggagctatagaaattatcattgatagtttcgcaagtcctgattgca

SEQ ID NO: 65337 - DNA, 246 bp, Glycine max
  Clone ID: 700758010H1
aaatggagagggagtccttgataactgaagctcctaatgcaccggttactgcacagagaagggtcagaagtgacttggaaaattctctaccaaaaccatcaaagccataatttttttcatgtgacacgttcagagcattgaaagctcctgataagggtcacccaaatggaacaacaggcccaaaggcaccacaacttatctgctctccagcaacattgtgctttttttgatcaagatgacaatgga

SEQ ID NO: 65338 - DNA, 245 bp, Glycine max
  Clone ID: 700758011H1
agtataccttagtagataatttaagatactatgatgagagcacggttcccattactgttgctgggacttgttttcctggcttcagtttctgtctcatttggcattgcttactgggaaaaagagaaccccaaacacaacaagtgtctccagagttgcaatagcgagagagactcgtacaggagacaagcatgccacgctcgttgcaacctccttaaggtggagaaagaagaatgtgaagaaggtga

SEQ ID NO: 65339 - DNA, 246 bp, Glycine max
  Clone ID: 700758013H1
ttcaaaccttgctctatactacacagtacacacactagaagaataatggcttccatcctccactactttttagccctctctctttcttgctcttttcttttcttcttatccgactcagtcacccctacaaaaccaataaaccttgttgttctacccgttcaaaatgatggttccacagggctccattgggccaacctccaaaaaagaacccctctaatgcaagtaccagtcctggtggacctcaat

SEQ ID NO: 65340 - DNA, 247 bp, Glycine max
  Clone ID: 700758014H1
cttaattattagcacttccttagttcaatatggggaagcccttcactctctctctttcttcgctttgcttgctactcgtgtcgagtgcatgctttgctattagctccagcaagctcaacgagtgccaactcaacaacctcaacgcgttggaacccgaccaccgcgttgagtccgaaggtggtttgattcagacatggagctctcaacaccctgagctgaaatgcgccggtgtcactgtttccaaact

SEQ ID NO: 65341 - DNA, 244 bp, Glycine max
  Clone ID: 700758015H1
gtcgcttgccaagtgcatttcttctcatttcttgctgcttccgcgaatggccagaaacatagcaggattactggcgctgcttctcgctgtttcgatctgcggaccgtcacgattcctggtcccgtctccgatgctcaccgttccgccgcgctagagctcttcgatggatcctttacaagtttagaagaggcctatgaggccctaagagtttttgagattcttgggattgggaatgagcctgatg

SEQ ID NO: 65342 - DNA, 246 bp, Glycine max
  Clone ID: 700758016H1
agctggtgcagtttggagagattcaggaaaaagttgtattgaaattttcacaagaggaatttcttacagcttggtcaactcaggtgcgtcctgcaacaactctgttggctgatgggtgtccatatttgtatgcaatggtgcatgatagttcagtgtctacaataccaggtgattttgtcattggtgtcaagttgacaaccatagacaatatgtgtgcatatgggctcaatcctggtatttcaggtt

SEQ ID NO: 65343 - DNA, 261 bp, Glycine max
  unsure (1)..(261): unsure at all n locations
  Clone ID: 700758018H1
actcgagccgaatcggctcgagcggnctcgagtctaatcccacttacgaagatatcccacaaccagcttgggacctttttagctgggacagtgagaaaactttgccaaataatttaactgcagaattgctctcttgcaaattggatactgacactggccaatattatcctgagtgggctccaattaattgtcgagttcatcgacaaccacttcacatcactgaaggaaattatgtcagaaagcaagatgtcagcattgaat

SEQ ID NO: 65344 - DNA, 257 bp, Glycine max
  Clone ID: 700758019H1
ttcattgatggtgatctttttcctagccggtattgtctttgtcattttcttgagaactgtaagaagggacttgactcggtatgaggagttggacaaagaggcacaagctcagatgaatgaggagctttctggatggaagcttgttgtgggtgatgtatttagagagcctgatggttcgaagcttctctgtgtgatggttggggatggggttcagattcttggaatggctgctgtgactattgtttttgcagccctgg

SEQ ID NO: 65345 - DNA, 257 bp, Glycine max
  Clone ID: 700758021H1
ggtcaatttcatcctctctctacaccgtgaagagaagcataatccctctctatccctacaccacaaacattaactttcaatgccttttcacttcatcaatctccatctccctcaacaacaaccacaaccacaacatcatgttaacccgtaaccctaatcaaataccagaaataccatccgtgccaaaaaccgaacctcctcctccggttccaaaagagcaacctgtgcttccaaccccggaaatagacccttttatg

SEQ ID NO: 65346 - DNA, 259 bp, Glycine max
  Clone ID: 700758022H1
cccatatgcacacatattgtttatgggcaccattcctcagtccatttcacagcaaactgtttggaatcaaatggcaacagtgagaacaccattgaattttgattctagcaagcagagcttttgtcaattctctattgatcttcttggtggaggaattttagtggacaaaactggagattggatcacacttatacaaaattctccaattagtaacttgttgagagttgctgcttggaagaaaggctgtctaatggttaag

SEQ ID NO: 65347 - DNA, 116 bp, Glycine max
  Clone ID: 700758023H1
ctttttccttaaaaaaaggaaaatggggcgatatattggagtcagcatgggcaaataaatgctcagtaaaattatgatacatgtacattcctcagcacactaaaacagattccatg

SEQ ID NO: 65348 - DNA, 257 bp, Glycine max
  Clone ID: 700758024H1
atatcctagtacaccgtattaaagaatttaagatatactatgatgagagcgcggttcccattactgttgctgggagttgttttcctggcatcagtttctgtctcatttggcattgcgtattggtaaaagcagaaccccagtcacaacaagtgcctccgaagttgcaatagcgagaaagactcctacaggaaccaagcatgccacgctcgttgcaacctccttaaggtggaggaagaagaagaatgcgaagaaggtca

SEQ ID NO: 65349 - DNA, 249 bp, Glycine max
  Clone ID: 700758026H1
ccagcgaaacgctcttcgttatcttttctcagactccgcggcgtagatccgaggagttcgggaaatcctaactcatcatctcaactcaagtcatggctggacttgcacctgagggatcacagttcgatgctcgtcaatatgattctaaaatgagtgacttactttcatctgatggacaggacttcttcacatcctatgacgaggtttatgatagttttgacgctatgggtttgcaggaaaatcttctca

SEQ ID NO: 65350 - DNA, 245 bp, Glycine max
  Clone ID: 700758029H1
tattaacactttccttagttcaatatggggaagcccttcttcactctctctctttcttccctttgcttgctagtcttgtcgagtgcatgctttgctgttacctccagcaagttcaacgagtgccagctcaacagcctcaacgcgttggaacccgaccaccgcgttgagtccgaaggtggtcttattgagacgtggaactctcaacaccctgagctgcagtgcgccggtgtcactgtttccaaacg

SEQ ID NO: 65351 - DNA, 249 bp, Glycine max
  Clone ID: 700758031H1
tgacaccatcaattttgaggcttttccccacaagctggtacagtttggagagattcaggaaaaagttgtattggaattttcacaagaggaatttcttacagcttggtcaacccaggtgcgtcctgcaacaactctgttggctgatgggtgtccatatttgtatgctatggtgcatgatagttcagtgtctacaataccaggtgattttgtcattggtgttaagttgacaaccatgaacaatatgtgtgc

SEQ ID NO: 65352 - DNA, 255 bp, Glycine max
  Clone ID: 700758033H1
gaagcttctgtttctctctctctctctttctctttctcttagggttttcactttcaccaatttctccttctcttccgatctacgcccaaagttatcacctcgcgtgcattcgttcctaatcctttcaaactctccgttctcccatctttaacttgtttaagctgctacgtttaattgaattcgccgtttccaaattgtcttttcatttctttcttttgttctgcaattagacattgctagggttctggagtactg

SEQ ID NO: 65353 - DNA, 256 bp, Glycine max
  Clone ID: 700758034H1
atcaccatggccaagcttgttctttccctttgtttccttcttttcagtggctgcttcgctctgagagagcaggcacagcaaaatgagtgccagatccaaaagctgaatgccctcaaaccggataaccgtatagagtcggaaggtgggttcattgagacctggaaccctaacaacaagccattccagtgtgccggtgttgccctcactcgctgcacccttaaccgcaatgcccttcgtagaccttcctacaccaacg

SEQ ID NO: 65354 - DNA, 252 bp, Glycine max
  Clone ID: 700758035H1
gcgactctctcttcctacgataaccgtttcctctcgccggaaaaccgacattgatctctctctccggcgatccccgcccatccctccgccatgagttccggcgagctcctccacatacagccccttgcgctgcagtttccctttgaattgaggaagcagatctcgtgctctttgcagttgtctaacaagactgacaactatgtggctttcaaggtcaagacaacaaatcctaagagatattgtgttagacct

SEQ ID NO: 65355 - DNA, 254 bp, Glycine max
  Clone ID: 700758036H1
aagcacttgatcaagactcaagagtgaacaaaaaaaaatgatgggtacccttaaggtgtccaacagtagtttatacatattttcgaagttcctagtaatttgtatggtgatgatgatatctttggttgattcaagttattccttgtgtgattttgaggcaatcttcaattttggtgattcgaattcagaaacgggtgggtttcatacaagctttcctgcacagcctgctccatatggaatgacttacttcaaaa

SEQ ID NO: 65356 - DNA, 255 bp, Glycine max
  Clone ID: 700758039H1
tacaaggagcaggtaaagcttttccaaacaagattgtttttgatgataaacttgtgctggctaacacacaagaattctttgctggaaattttccagtggattcttggttaccaatttttgtgaattgtctttatcctgtaagtcaattaccttcagaagctgtcgttgtaaatgttacatgtggtagtggacgtggtggtttacctaccactgcttggattagttctgcagttaacaatcgctcctcagatatca

SEQ ID NO: 65357 - DNA, 86 bp, Glycine max
  Clone ID: 700758040H1
gttattttaaaaaaaaaacacacttcacacatcattacgacaattaaaagaggtgtggaaatgatgtgtgaagtgtgtgttatttt

SEQ ID NO: 65358 - DNA, 258 bp, Glycine max
  Clone ID: 700758041H1
atcgagccgcttgtgtcacgatctcaacggagcacctctcttcaggtcgccatctagactgcaatcatggctgatggaccacagcatccatcagttgttcagaagctagctggacagtcttacctggtgtccaggctaagccccaactttaactctgggaattattcctcgactggttcttacttcaatggaggactgcactcttctgggttggctgttgtgtcgcctggatctccagttactgtgcatgctccagca

SEQ ID NO: 65359 - DNA, 258 bp, Glycine max
  Clone ID: 700758042H1
ctcgagccgctgatgttcttgcaaagcgagctcatgaatttgagaaacatgttgctcatgatagcctcaaggatcagattcctgctgttgacaagttgtattctactaatgttaataaatttgcaaaaattatgaaccttagacaaagtgttgttggtgatcttaaacttcttactgatgggaagttgtatgagggtaagcatattcctgtatctaatattagtgcaggggaaaatcatgtagttcagatacccttaa

SEQ ID NO: 65360 - DNA, 258 bp, Glycine max
  unsure (1)..(258): unsure at all n locations
  Clone ID: 700758043H1
gaaattttgataaaccgcgatcacaggttgccgcaccttaaaaccggaaacaaaagcaatcgttacttgatttcaagaatctctcaatttcttcctacttctttgtgtacgatttcttaagggaaagaaaatcactctctgtgctggccacagacttcgtgaatcattttcttttccactcttagtacgatgggtnaacactctcctatttgatataggacttcgtgtcagatttaaacttcttctgtatctttctca

SEQ ID NO: 65361 - DNA, 254 bp, Glycine max
  Clone ID: 700758044H1
aaagacctttcctttacctaactttgtctctttctacttcagccatctcttctctgcctcaaccagcgatggtggaattttgagcctttcccttgaaatcaatgcatgtaaagactaaagctttgatgatgcatattggtttttcgttagcacattcatgtgggtcattgcgtgcttctattagtttcagcaaagtggcaaaagggtctgtgtttgtttgacttgaggagggttcttctttttattaagtgcaa

SEQ ID NO: 65362 - DNA, 254 bp, Glycine max
  Clone ID: 700758051H1
gttgttcctcactgacctcaccatggcgaccagagccaagctttctttagctatcttccttttctttctttgagccttgatttcaaacctagccttgggcaaacttaaagagaccgaggtcgaagaagatcccgagctcgtaacatgcaaacaccagtgccaacagcaacggcaatacactgagagtgacaagcgaacatgcttgcaacaatgtgacagtatgaagcaagagcgagagaaacaagtcgaagagg

SEQ ID NO: 65363 - DNA, 245 bp, Glycine max
  Clone ID: 700758052H1
atcctagtacaccgtattaaagaatttaagatatactatgatgatagcgcggttcccattgctgtcgctgggagttgtgttcctggcatctgtttctgtctcatctggcattgcgtattgaggcaagcagaaccccagtcacaacaagtgcctccgaagttgcaatagcgagaaagactcctacaggagccaagcatggcacgctcgttgcaacctccataaggtggaggaagaagaataatgcg

SEQ ID NO: 65364 - DNA, 247 bp, Glycine max
  Clone ID: 700758055H1
aagggttgttgttctttatctgcctggcctgctggctttttaggttcctggttccacctcaggagtctcagaagagagctgtggcttagagccctttttgtatgtgctaccccacttttgtctttttggcaatagtgctagcaaccaataaataataataataataatgaataagaaaacaaaggctttagcttgccttttgttcactgtaaaataataatgtaagtactctctataatgagtcacg

SEQ ID NO: 65365 - DNA, 256 bp, Glycine max
  Clone ID: 700758056H1
aattccttcacttgcagcactgttgcatcatcatcttcattgcaaaaccctaaacttcaccttcaaccatgaccacacaagtaccaccacacagtgtccaagtccacacaacaacacaccactacgaagctggcgtcgtcccccccggagcccgtttcgaaccgccgcgttatgaagccggcgtcaaagcgccctccatttaccattccgagagaggtccaacgacttcccaggtcctcgccgtcctcgccggcct

SEQ ID NO: 65366 - DNA, 257 bp, Glycine max
  Clone ID: 700758057H1
aaaacccccagcttcgggacttggatatcttcctcagtattgtggatatgaacgagggagctcttcttctaccacacttcaattcaaaggcgatagtgatactggtaattaatgaaggagatgcaaacattgaacttgttggcctaaaagaacaacaacaggagcagcaacaggaagagcaacctttggaagtgcggaaatatagagccgaattgtctgaacaagatatatttgtaatcccagcaggttatccagtt

SEQ ID NO: 65367 - DNA, 252 bp, Glycine max
  Clone ID: 700758059H1
gggacagcgtccggtggaaggcgtccaggtgcagttcagcagtcccagcagccagttcctatgatgccacagcagatgcttcctaggggacgtgtctatcgttatcctcctggtaggggtattcctgatgttcctgtacctggggttgctggaggtatgttttctgttccatatgatgtgggtgggatgccgctgcgtgatgcatgaatctcccagcaaatacctgttggggctctggcaacggctctggct

SEQ ID NO: 65368 - DNA, 251 bp, Glycine max
  Clone ID: 700758061H1
ctctgtctctctctctctatattcttatctcttcccccactttctctcttgtttctgtttcttcttctcagggtgccctctctcactttgtgactgtagcaggcagctcaggtgttccttgttgagatctgtggtttggttttcgggaggaaacaaaaagagggagaatgagtagctacagctactatgggtaccaagagaagaacaccttgacaaactgtgaggagacgaacgtggaatcagtgatttgc

SEQ ID NO: 65369 - DNA, 241 bp, Glycine max
  Clone ID: 700758064H1
aaagaaccaaagagaatcctactttgtggatgctcagcctaagaagaaagaggaggggaataagggaagaaagggtcctttgtcatcaattttgagggctttttactgaataagtatgtactaaaatgtatgctgtaatagctcatagtgagcgaggaaagtatcgggctatgtaactatgactagagcttcaactatgaataaataaatcgacagcatatgatgcttttgttttgtgttc

SEQ ID NO: 65370 - DNA, 251 bp, Glycine max
  Clone ID: 700758065H1
cttgctctatactacacagtacacacactagaagaaacatggcttccatcctacactactttttagccctctatctttcttgctcttttcttttcttcttatccgactcagtcacccctacaaaaccaataaaccttgttgttctacccgttcaaaatgatggttccacagggctccattggtccaacctccaaaaaagaacccctctaatgcaagtaccagtcctggtggacctcaatggaaatcacttg

SEQ ID NO: 65371 - DNA, 200 bp, Glycine max
  Clone ID: 700758066H1
cgagtaagatttgaaattttgataaaccgcgatcacaggttgtcgcaccttaaaaccggaaacaaaagcattcgttacttgatttctagaatttctcaatttctttctacttctttgtgtacgatttcttaagggatagaatatcattctctgtgctggtcacagacttcgtgaatcattttcttgtctacttgacatac

SEQ ID NO: 65372 - DNA, 250 bp, Glycine max
  Clone ID: 700758067H1
cctagatgaagaaattctttctgaagttgcacaagatatggttgaggaatggtttgattgtgttgatgaggaggattcctttgaggaagtttctttaagtgcagcacttaatggtgttgagggtttggactatatggaaagaattcctcttgccacatctgagggttttcctcatgtgctttcacgcaaaaatggtgaaaaaggcaagagaagatttgtttctggggatggtgaggagatgacattgatt

SEQ ID NO: 65373 - DNA, 251 bp, Glycine max
  Clone ID: 700758069H1
taattaattaaattcctcgtggaatcttgttgaagccatgtctacagctgctcaggtcatcaagtgcagagctgcggtggcatgggaagcagggaagccactatcgatagaaaccatagaagtggcaccaccccagaaaggtgaagtgcgtttgaagatcctcttcaactccctttgccgtacagatgtttactggtgggatgctaagggccagactccgctgtttcctcgtatcttaggccacgaagctt

SEQ ID NO: 65374 - DNA, 252 bp, Glycine max
  Clone ID: 700758070H1
aacacttccttagttcaatatggggaagcccttcactctctctctttcttccctttgcttgctactcttgtcgagtgcatgctttgctattagctccagcaagctcaacgagtgccaactcaacaacctcaacgcgttggaacccgaccaccgcgttgagtccgaaggtggtttgattcaaacatggcaatctcaacaccctgagctgaaatgcgccggtgtcactgtttccaaactcaccctcaaccgcaa

SEQ ID NO: 65375 - DNA, 261 bp, Glycine max
  Clone ID: 700758071H1
tcgagaattccttcacttgcagaacttagttctctgttgcatcatcatcatcttcattagtgttagccctaaacttcaccttcaaccatgaccacagtgccaccacacagtgtccaagtgcacacaacaacacaccgctacgaagccggcgtcgtcccgccggctcgttttgaggcgccgcgttacgaagccggcatcaaggcgccctcttccatttaccattccgagagaggtccgacgacctctcaggttctcgcagtt

SEQ ID NO: 65376 - DNA, 233 bp, Glycine max
  Clone ID: 700758072H1
tctatactagttaggacttcgtgggtagacttttctatttctctccttctttcactctcttcttctcactgatccgcattgccgttcaaagtggtcttatttgataaacacttgggcgttggtgcaaatgtttgcttcattaattttctctggatacaacaggctcactgagaaaacagtctttacttgcagagatttggacatcttggttgtttatgatacaatagcggctc

SEQ ID NO: 65377 - DNA, 254 bp, Glycine max
  Clone ID: 700758073H1
ctatacacacacacacacacactaagaataatggcttctatcctccactactttttagccctctatctttctttctctttccttttcttcatatccgactccgtccccattccccaacaccacactaaccctacaaaacctataaaccttctggttctacccgttcaaaatgatgcttccacagggctccattgggccaacctccaaaaaaggacccctctaatgcaagtaccagtcctggtggacctcaatgg

SEQ ID NO: 65378 - DNA, 253 bp, Glycine max
  Clone ID: 700758075H1
tggcaacagtgagaacaccattgaattttgattctagcaagcagagcttttgtcaattctctattgatcttcttggtggaggaattttagtggacaaaactggagattggatcacacttatacaaaattctcctgttagtaacttgttgagagttgctgcttggaagaaaggctgtttaatggttaagattgtgatgtctgggtatgcagcagtcaaaaggagtgattgggcctcattggtacaagtgttttt

SEQ ID NO: 65379 - DNA, 254 bp, Glycine max
  Clone ID: 700758078H1
ggccaggcaagccccactcaaccaccacacctctcctcgttcacgctaccccttactgctcttcttctacctttcaagttttaaaagtataaagatggcagagacattcctatttacctcagagtcggtgaacgagggacaccctgacaagctctgcgaccaaatctccgatgctgtcctcgacgcttgcctcgagcaggacccagacagcaaagttgcctgcgaaacatgcaccataaccaacttggtcatgg

SEQ ID NO: 65380 - DNA, 249 bp, Glycine max
  Clone ID: 700758081H1
cagagatctatgagtactattcactacaactcacatgcaacgaagatagcactggtgatcgatggcagagggcatcttcaaatatcatgtccacacatgtcatcaaggtcgtcacactcgaagcatgataagagtagcccttcataccatagaatcagttccgatttgaagcctggaatggtgtttgttgtccctcccggtcatcccttcgtcaccatagcttccaataaagagaatctcctcatgatt

SEQ ID NO: 65381 - DNA, 251 bp, Glycine max
  Clone ID: 700758083H1
tgaggctcccctcacctctctctccgaaatccccaaattgcctgtgaatgctagaaaccctaggcacgttcgatttgatgctctcccatttgcaatcaagggcgagcgcattcggttcttgcacgcaaggctggtactaccgctgcatcggcctcgatccctgaattcatcattctttctcgcaccatctttttctattccgattcgatttgttgttgttgttgttgttgttgtgtttttgtttccttcct

SEQ ID NO: 65382 - DNA, 248 bp, Glycine max
  Clone ID: 700758085H1
ctcgctcgcactgtccagatcttaatcaataggagtgagtattgtatttccagccatgacgccgctgatcctgtatgctgggaaaaccaacaaaaattcttacaagacactcattgcatccgagtttgctggcgtccaagttgattttgcccctaattttgagatgggtgtctccaataaaactccagaatttctcaagatcaatcctattggcaaggttcctgtgctggaaacccccgatggtccaa

SEQ ID NO: 65383 - DNA, 248 bp, Glycine max
  Clone ID: 700758086H1
gccagcaccaacagcatcggcggcgacagtcactctccgacaacaacacttccgcggcgaaaaatgtctctggtggcgaacgaggatttccagcacattctgcgtgtgctgaacaccaacgtggatgggaagcagaagataatgttcgctatgacctccatcaagggtattggaaggagattcgccaacatcgcttgcaagaaggccgatgttgacatgaacaaaagggctggtgagttgagtgctgc

SEQ ID NO: 65384 - DNA, 251 bp, Glycine max
  Clone ID: 700758087H1
tctgaacaagatatatttgtaatcccagcaggttatccagttgtggtcaacgctacctcagatctgaatttctttgcttttggtatcaatgccgagaacaaccagaggaacttccttgcaggttcgaaagacaatgtgataagccagatacctagtcaagtgcaggagcttgcgttccctgggtctgcaaaagatattgagaacctaataaagagccaaagtgagtcctactttgtggatgctcagcctca

SEQ ID NO: 65385 - DNA, 236 bp, Glycine max
  Clone ID: 700758088H1
gaccaagccccactcaaccaccacaccactctctctgctcttcttctacctttcaagtttttaaagtattaagatggcagagacattcctatttacctcagagtcagtgaacgagtgacaccctgacaagctctgcgaccaaatctccgatgctgtcctcgacgtttgcttgaacaggacccagacagcaaggttgcctgcgaaacatgcaccaagaccaacttggtcatggtctg

SEQ ID NO: 65386 - DNA, 87 bp, Glycine max
  Clone ID: 700758089H1
cattggtccttaaacactcatcagtcatcaccatggccaagctagtttgttgcctttgttttctgcttttcagtggctgctgcttcg

SEQ ID NO: 65387 - DNA, 118 bp, Glycine max
  Clone ID: 700758090H1
gtcatttaatccaaacccgtgttctgatgcgtggagtttggaatttctgaagcgtaccggatttcattgtgatatcatttgtgtcactggatggactgccactccaatgcaggatgtt

SEQ ID NO: 65388 - DNA, 251 bp, Glycine max
  Clone ID: 700758094H1
aaataaccaaagaacacctagagcccaacttagaagggctcactgtagatgaggcaattcaaaacaagagattgttcctactagatcatcatgacccaatcatgccatatttgaggcgaataaatgcaacctccacaaaggcttatgctaccagaaccatccttttcctgaaaaatgaaggaactttaaggccacttgccatagagttgagtttgccacatcctcagggagatcaatctggtgcttttagt

SEQ ID NO: 65389 - DNA, 165 bp, Glycine max
  Clone ID: 700758096H1
aaaccatgctcattcccgccacctaactactccctctcccccttaatcagaaacataaaccccaatttccgaattctcgcggtggccttagagcaccaacatcaacaagacttccccagcgggaacagtcctcagcgactcctcaaggaactcgccgaacgcaag

SEQ ID NO: 65390 - DNA, 281 bp, Glycine max
  Clone ID: 700758101H1
ctactgttgcacattaatggatatgttgaacgtgttgccaattgtaaatgggaagtaaaagagctcggcatggagcataacggatatgttgatttgttgctgggggagtttaagcactataaaacacgacttgctcatggagaattcgtaaagaggttcaagacctattattggatgggcttgaaattgtggctgaaactcttgttgaaggactttcacgggtgaagagatgtagtgatgaaggacgagcccttatgtcattagatctgcatgttttgatc

SEQ ID NO: 65391 - DNA, 282 bp, Glycine max
  Clone ID: 700758102H1
agtacaccgtattaaagaatttaagatgtactatgatgagagcgcggttcccattactgttgctgggagttgttttcctggcatcagtttctgtctcatttggcattgcgtattgggaaaagcagaaccccagtcacaacagtgcctccgaagttgcaatagcgagaaagactcctacaggaaccaagcatgccacgctcgttgcaacctccttaaggtggaggaagaagaagaatgcgaagaaggtcaaattccacgaccacgaccacatcacccggagag

SEQ ID NO: 65392 - DNA, 280 bp, Glycine max
  Clone ID: 700758103H1
ctgcttttgatttgaatttcacaccccgtgagttctatagctttgatgaagttcatggactctattcaggcggaattaagctgccaacagatataatcagcaagattagtccactacccgtgcttaaggaaatcttccgactgatggtgaacaggcccttaagtttcctcctcctaaagtaattcaagtgacaaagtctgcatggatgactgatgaagaatttgcaagagaaatgcttgctggtgtaaatccaaacttgattcgttgtcttaaggatttc

SEQ ID NO: 65393 - DNA, 278 bp, Glycine max
  Clone ID: 700758104H1
ggcttatagtgcttcttattatccttgcatggaaattctgtatgagtgctatgaggatgtagccagtggtagtgagattcgcagtgttgttctggctgggcgtcgcttttatgagaaagagggtctacctgcttttccatgggtaacattgatcaaacccgcatgtggaaggttggtgagcgtgtccgatctacaagagcagccggtgatcaaggcccattatatcctttcactgctggtgtctttgtggcattgatgatggcccagattgagatcct

SEQ ID NO: 65394 - DNA, 228 bp, Glycine max
  Clone ID: 700758105H1
ctcgagccgccctctctatcttccaatcccatttttcattccctgtcgtctttctttgctttctcatccgtatcctttgcccaagcaattgtactctttaggggcataatactcgtaaagcaagttagtttctggagagttagagctacatgtgctatacaggcacatggcaatatatgaactggatcccgatgatgtacgctggggtctccacctcctagaggattg

SEQ ID NO: 65395 - DNA, 277 bp, Glycine max
  Clone ID: 700758106H1
agaaactttaagcagatgtctaatgttttgttggtagctcctgaggacaaggcgagtttatggtcacaacttcattatgtttcgtgtaataatctggaaatgcaagaagcttatcttgtcaatctcgtaaatgtgttcgagaattgtatttgcacagtccagaggaagctcgccaattgagaaggaaagctctctctcgtattgaatggctgcaaaaagctgatgtgcctaccatagcacagattgaagagttccattcgatgcagaggatgatgaa

SEQ ID NO: 65396 - DNA, 276 bp, Glycine max
  Clone ID: 700758107H1
ctttccttagttcaatatggggaagcccttcttcactctctctctttcttccctttgcttgctactcttgtcgagtgcatgctttgctattacctccagcaagttcaacgagtgccaactcaacaacctcaacgcgtggaacccgaccaccgcgttgagtccgaaggtggtcttattgaaacatggaactctcaacaccctgagctgcaatgcgccgctgtcactgtttccaaacgcaccctcaactgcaacggcctccacttgccatcttactca

SEQ ID NO: 65397 - DNA, 277 bp, Glycine max
  Clone ID: 700758108H1
ggagcggccaagctgccaaatctttagctgcaatatacaagaatgtgatagccacagatgctagtgacaaacaacttgaatttgcagccaagctcccaaatgtgagataccaacacaccccttcaaccatgtcgacggcgagcttgaacaaatggtggcatctgagggaaccatagaccttgtgaccactccacaagccctgcattggtttgaccgcccaaccttctacgaacaagtgaagtgggttctcaggaaacctcatggaatcattgctgct

SEQ ID NO: 65398 - DNA, 277 bp, Glycine max
  Clone ID: 700758111H1
attctctccattggtccttaaacactcatcagtcatcaccatggccaagctagttttttccctttgttttctgcttttcagtggctgctgcttcgctttcagttccagagagcagcctcagaaaaacgagtgccagatcaaaaactcaatgccctcaaaccggataaccgtatagagtcagaaggagggctcattgagacatggaaccctaacaacaagccattccagtgtgccggtgttgccctctctcgctgcaccctcaaccgcaacgcccttc

SEQ ID NO: 65399 - DNA, 257 bp, Glycine max
  Clone ID: 700758112H1
taccaagcaagttatgagcaagatggcagaaatgatcaacagtctttgtggtggtgatgaaaaactgatgcgtgaaaggacacacctgctgttggcttgttgttcaaggatggcaatttgtaagaaagatgtttggaagttgaatgtggaatcccttctggatttccgctcacagttatttgcaatagcatttttaatgagatgctcattagatatagctatgaaaaattactgcgcaaggttaagcccaagtatgt

SEQ ID NO: 65400 - DNA, 84 bp, Glycine max
  Clone ID: 700758113H1
tctcaagccgaatcggctcgagtcaatatcctagtataccttactcaataatttaagatactatgatgagagcacggttcccat

SEQ ID NO: 65401 - DNA, 285 bp, Glycine max
  Clone ID: 700758114H1
agcaacacggtgagaaggaggaagacgaaggtgagcagccacgtccattcccattcccacgcccacgccaacctcatcaagaggaagagcacgagcagaaggaggaacacgaatggcatcgcaaggaggaaaaacacggaggaaagggaagtgaagaggaacaagatgaacgtgaacacgcacgccgacaccaacctcatcaaaaggaagaggaaaagcacgaatggcaacacaagcaggaaaagcaccaaggaaaggaaagtgaagaagaagaagaagaccaag

SEQ ID NO: 65402 - DNA, 282 bp, Glycine max
  Clone ID: 700758115H1
caccaagttatgggtttccttgtgttgcttcttttctccctcttaggtctctcttctagttccagcatatcaactcatcgttccatattggaccttgacctaaccaagtttaccacacagaaacaggtgtcttcactgttcaactatggaagagtgagcatggacgtgtctaccataaccacgaagaagaggcaaagagacttgagattttcaagaataacttgaactatatcagggacatgaatgcaaacagaaaatcaccccattctcatcgtttaggat

SEQ ID NO: 65403 - DNA, 186 bp, Glycine max
  Clone ID: 700758116H1
attttgataaaccgcgatcacaggttgccgcaccttaaaaccggaaacaaaagcaatcgttacttgatttcaagaatctctcaatttcttcctacttctttgtgtacgatttcttaagggcaagaaaatcactctctgtgctggccacagacttcgtgaatcattttcttttccacacaacatacg

SEQ ID NO: 65404 - DNA, 199 bp, Glycine max
  Clone ID: 700758117H1
aggcaaaagggcgatttgtttgctcggggatggtgaagagatgacatggattcggggagccagtgtgtgaagaggcttagcaacaagctaagagtcgagcttgagaaaagtgttactacattggtgggcattgaatgtcccaaggatgaaaaacttcgtcgtgggcaaagtttttgataaacctaagacgcactgcttc

SEQ ID NO: 65405 - DNA, 249 bp, Glycine max
  Clone ID: 700758119H1
tatgttcaatatcgtaggatagcttaatgaacaatgtaaggtactatgatgtgagcacggttcccattactggtgctgggacttgttttcctggcttcagtttctgtctcatgtggcattgcttactgggaaaaagagaccccaaacacaacaagtgtctccagatttgcaatagcgagagatactcgtacaggaactaagcatgccacgctcgttgcaacctcgttaaggtgtgtgaagaagtgtgtg

SEQ ID NO: 65406 - DNA, 182 bp, Glycine max
  Clone ID: 700758121H1
cactacttgtgtcgtggattgtgatgattctactacctatgccagtgcatcatctaataaggactccattttctccacagggttctcagtcatgctattcagatcaccagatgcctcgacaacacctacggttcgccaataggcggtttgtccagtgttgatgacgggcatgaactgaagca

SEQ ID NO: 65407 - DNA, 275 bp, Glycine max
  Clone ID: 700758122H1
tggagaaagtttcctctacaaaagcacaatttgttagtggaaaaaccttcaaatatgatataattggtgctggttcacattcttcagatgattttcctgaaaaggaagatcaagaaaaacccaaaaagattgatgcagattgagacaaagaatagatcgtcaatacaatgaggttcaggctcagatggaaacaaatttgtttaaattgtctcttgatgatgttgaaactcctaaaggttccatgttggatcttaaaatttctcagtctaaaattg

SEQ ID NO: 65408 - DNA, 76 bp, Glycine max
  Clone ID: 700758123H1
cttcttaattagcgtctctcattgcgtgcaccacgccaagaaaacatatacatgatacatatatacataaaaagaa

SEQ ID NO: 65409 - DNA, 131 bp, Glycine max
  Clone ID: 700758124H1
ggagaggccttttgccttcgtgagaggtagaacggggcatgttcttttctgtgctctctctctctctctctctgatcagagagacagacacgcgcatattacagatagatgcagcagagaaactctctatc

SEQ ID NO: 65410 - DNA, 262 bp, Glycine max
  Clone ID: 700758125H1
caaaaccctcttttttctctctcttgcaaaacctaattttcatttcttccctcaaatttcaaaatgcgtgagatccttcacatccagggtggccaatgcggcaaccagatcggcgccaagttctgggaggtggttgcgcggagacgggatcgaccctaccggaaggtacggtggggactcggagttgcagctcgagaggatcaatgtctactacaacgaggctagttgcggtcggttcgtgcggcgcgcggttctcatggga

SEQ ID NO: 65411 - DNA, 274 bp, Glycine max
  Clone ID: 700758126H1
ttatcgagccggatcggctcgagttgattacctacacttccttaactcgatatggggaagcccttcactctctctctttattccctttgcttgctactcttgtcgagtgcatgctttgctattaggtcgtggtagtcaacgagtgccaactcaacaacctcaacgcgttggaacccgaccaccgcgttgagtccgaaggtggtttgattcaaacatggaactctcaacaccctgagctgaaatgcgccggtgtcactgtttccaaactcaccct

SEQ ID NO: 65412 - DNA, 252 bp, Glycine max
  Clone ID: 700758127H1
ctccattgtctttggacactcatcaccatggccaagcttgttctttccctttggttccgtcttttcagtggctgcttcgctctgagagatcaggcagagcaaaatggagggccagatccagctgctgaatgccctcaaccggataaccgtatagagtcggaaggtggggtcattgagacctggaaccctaacaacaagccatgccagtgtgccggtgttgccctctctcgctgcacccttaaccgcaatgcc

SEQ ID NO: 65413 - DNA, 275 bp, Glycine max
  Clone ID: 700758128H1
cggctcgagagatgatagtggaagagtgcattgctactcaaatggagttactgcaggacctgtctatcaaaccagagattctgaccaccggcttccttttgcaaattctggaaatcctgttatggctttggttgctttttagcctctgcggttggaccaagagtagctgcttcttgtgcccatgcagcgttagcagtattgtcagaggataattctggcagcacgtcacagttggaagcaccaggacatgataataggacaaattcagaaagcat

SEQ ID NO: 65414 - DNA, 238 bp, Glycine max
  Clone ID: 700758129H1
cttcaaacttaattattaacacttccttagttcaatatgtgtaagccttatcatctctctctttcttccctttgcttgctactcttgtcgagtgcatgctttgctattagctccagcaagctcaacgagtgcgaaccaacaactctctacgcgttggaacccgaccaccgcgttgagtccgaagtggtttgattcaaacatggaactctcaacacctgagctgaaatgcgccggggtc

SEQ ID NO: 65415 - DNA, 277 bp, Glycine max
  Clone ID: 700758130H1
tctctccattgtctttgaacactcatcaccatggccaagcttgttctttccctttgtttccttcttttcagtggctgcttcgctctgagagagctggcacagcaaaatgagtgccagatccaaaagctgaatgccctcaaccggataaccgtatagagtcggaaggtgggttcattggagacctggaaccctaacaacaagccattccagtgtgccggtgttgccctctctcgctgcacccttaaccgcaatgcccttcgtagaccttcctacacca

SEQ ID NO: 65416 - DNA, 276 bp, Glycine max
  Clone ID: 700758131H1
cagcttttgagtaccactaccaatggtgattttgttcaaggaaaagatctcgcaatggttaaagttaatgtagcatgtgctgctgttggcttgacatcaagttacactccaactccattgttggaatctggtttgcaaaagacagagggttaattgtggaatattttggaaggatgtcttacgttgctcataacgttaatcagccccaagagaaagatttgttggagggaaatttttcctttgatattaaatctcgctctagattggaaaaagttt

SEQ ID NO: 65417 - DNA, 284 bp, Glycine max
  Clone ID: 700758132H1
tattcctgtatctaatattagtgcaggggagaatcatgtagttcaaatacccctaatggcacaggaggaaattctgtcttctagtgcaagtgatttcagaactgcaatggtgagtagaaatagcaagcctcaagctactgaatgcatgtgggagctatagaaattatcattgatagtttcgcaagtcctgactgcaacatagttggtgcaatgcttttggttgatacttatcataccaatcctgaaaatgcagttcgtagtatttttgtcgcgcctttcagagg

SEQ ID NO: 65418 - DNA, 259 bp, Glycine max
  Clone ID: 700758133H1
ataaaattcttccaccaagttatgggcctccttgtgttgcttctgggctccctcttaggtctctctgctagttccaggatatcaactcatcgttccagattagaccttgacctaaccaagtcgaccacacagtgacagggtcgtcactgtgccaactatggaagagtgagcatggacgtgtctacgataaccacgatgatgagggaaagagactggagatgtccaagaataacttgagctatacccgggacatgattgg

SEQ ID NO: 65419 - DNA, 75 bp, Glycine max
  Clone ID: 700758134H1
tactcgagccgagtcggctcgagctgtaattattaagcacctcggtaactcaatatggggaagcgcgtcactctc

SEQ ID NO: 65420 - DNA, 271 bp, Glycine max
  Clone ID: 700758139H1
cataaaaatgcatgttgctgagaaaggtgaaggtcccgtggtcttgttcctccacggcttcccggagctctggtactcctggcgccaccagattctggctctcagcaacctcggctaccgcgccgtggctccaatctccgcggctacggagacaccgaggcaccagcttcaatcagcagctacaccatcctccacttagtttctgacatcgtcgcgctcattcactcacttgctgtggatcaagtcttcctcgtagcccatgattgggggg

SEQ ID NO: 65421 - DNA, 263 bp, Glycine max
  Clone ID: 700758141H1
ggctacttcaaagttgaaaacccagaatgtggttgtatctctctccctaaccttaaccttggtactggtgctactgaccagcaaggcaaactcagcggaaactgtttctttcagctggaacaagttcgtgccgagcaaccaaacatgatcctccaaggagacgctattgtgacctcctcgggaaagttacaactcaataaggttgacgaaaacggcaccccaaaaccctcgtctcttggtcgcgccctctactcgacccccat

SEQ ID NO: 65422 - DNA, 270 bp, Glycine max
  Clone ID: 700758142H1
gaaggcccattcgggtggttacatttcctaataccattgtgcagattgaaccagacatgaattcaaggtttcagcttttgagtaccactaccaatggtgattttgttcaagggaaagatctcgcaatggttaagttaatgtagcatgtgctgctgttggcttgacatcaagttacactccaactccattgttggaatctggtttgcaaaaagacagagggttaattgtggagtattttggaaggatgtcttacgttgctcataacgttaa

SEQ ID NO: 65423 - DNA, 245 bp, Glycine max
  Clone ID: 700758143H1
gtaaagctaacttcaacacctttaattttctaaaagtaattcagcggctgaataccaagcggagaagatgagtcaggagcagccacggcgtcccaaaggccaaaaccccatcaaatacgtcgacgtttttgtctctccggcgaccttgcacagaagcccgtcgcaccggaagatgctgccatgatgcaaagcgcggtaactcgagtgctcggacaaacccaacccggcggagagcttccgtcatg

SEQ ID NO: 65424 - DNA, 273 bp, Glycine max
  Clone ID: 700758144H1
cagcatatcaactcatcgttccatattggaccttgacttaaccaagtttaccacacagaaacaggcctcctcactgttccaactatggaagagtgagcatggacgtgtctaccataaccacgaagaagaggcatgagacttgagatttccaagaataacttgaactatatcagggacatgaatgcaaacagaaaatcaccccattctcatcgtttaggattgaacaagtttgctgacatcactcctcaagagttcagcaaaaagtacttgcag

SEQ ID NO: 65425 - DNA, 167 bp, Glycine max
  Clone ID: 700758145H1
attcataacaaccaacctcttcagtgatctttgattagtactaagctaaaccaattcttattccctcaaaatcaaaacctctgtctgtcgagctagttcccttgtcaaatcatgctacctaacatcagcaccgctgttggcgatgtcaacaccgcgcaattacccaa

SEQ ID NO: 65426 - DNA, 191 bp, Glycine max
  Clone ID: 700758146H1
gagaattggataaatttggcatgtaattcggttattggattcatgctacatgagtgtgtaaagaggtaatgggggtgatgactttcttggtcattgtcgtggctttgtgatttctattgcaaatgttgtcttgtactttgttgtattttcagcaatatatgatatatgatatctatcttaatttctatctt

SEQ ID NO: 65427 - DNA, 280 bp, Glycine max
  Clone ID: 700758147H1
caaacttattaacactgtccttagttcgatatcggtgagcccttcttcactctctctctttcttccctttgcttgctactcttgtcgagtgcatgctttgctattacctccagcaagttcaacgagtgccaactcaacaacctcaacgcgttggaacccgagcaccgcgttgagtccgaaggtggtcttattgatacatggaactctcaacaccctgagctgcaatgcgccggtgtcactggttccatacgcaccctcaactgcaacggcctccacttgg

SEQ ID NO: 65428 - DNA, 283 bp, Glycine max
  Clone ID: 700758148H1
attctctccattggtccttaaacactcatcagtcatcaccatggccaagctagttttttccctttgttttctgcttttcagtggctgctgcttcgctttcagttccagagagcagcctcagcaaaacgagtgccagatccaaaaactcaatgccctcaaaccggataaccgtatagagtcagactgagggctcattgagacatggaaccctaacaacaagccattccagtgtgccggtgttgccctctctcggtgcaccctcaaccgcaacgcccttcgtaga

SEQ ID NO: 65429 - DNA, 275 bp, Glycine max
  Clone ID: 700758149H1
cttgttacaaagaccgagaatccagatgaagtgatggagattgtaaaagttataactgcaaaaatacttcagcagccaaacgaaaagcctgccgtgcgattgaagattatgatcagtctgtacaatcttttggaactccatactgccagttttatgtctacatgaagttactgaatttagctgttgatgggaaagtcacagaacacattataccttcattcaagaagattgataacttcttaaaagactggaaaattgggataccagaacagaga

SEQ ID NO: 65430 - DNA, 266 bp, Glycine max
  Clone ID: 700758153H1
gcaatctatggtgatcaaagcagtaagataacagcagattcccttgatctagatgggtacacaatctacgaggtacttggtagtcgaaggttatttatgttagattaccatgatatcttcatgccatatgtgaagcagataaatcagctgaattctgccaagacttatgcgacaaggactatcctttttttgagagaagatggaactttaaagccagtggccatcgtattaagtttgccacattctgctggggatctatcagctgc

SEQ ID NO: 65431 - DNA, 270 bp, Glycine max
  Clone ID: 700758154H1
gtcaccagaagatctataacttcagagagggtgatttgatcgcagtgcctactggtgttgcatggtggatgtacaacaatgaagacactcctgttgttgccgtttctattattgacaccaacagcttggataaccagctcgaccagatgcctaggagattctatcttgctgggaaccaagagcaagagtttctaaaatatcagcaagagcgcggaggtcatcaaagccagaaaggaaagcatcagcaagaagaagaaaacgaaggaggca

SEQ ID NO: 65432 - DNA, 272 bp, Glycine max
  Clone ID: 700758155H1
ttctcgagccgaatcggctcgagccaatccaatttccctatctctcactgtctctatatctgtatttctgaattttgggattcgaaaaaccctaagcaaagcaaagcggtaaggatggggaacacggagaagctgatgaaccagatcatggaattgaaattcacttcgaaatcgctgcagcgtcaatcgcgtaagtgcgagaaggaggagaaatcggagaagctgaaggtgaagaaggcgatcgagaaaggcaacatggacggcgctcgaat

SEQ ID NO: 65433 - DNA, 272 bp, Glycine max
  Clone ID: 700758156H1
gcacgatcagcacccgtccctcttgcagctctccatcaaactttgtggtggctgcaagatcacagagtgacaacttcgagtatgtgtcattcaagacgcaatgatacacccatgatcggcactcttgcaggggaaaatcattgttgaacccattaccagaggaagtgattcagcacactttcaacctaaaaagccagcaggccaggcagataaagaacaacaaccctttcaagttcctggttccacctcaggagtctcagaagagagctgtg

SEQ ID NO: 65434 - DNA, 264 bp, Glycine max
  Clone ID: 700758157H1
taggaagcagcagctgcggcaacagggagagaagatgaagttcaatccacgtgtgtcgagcagccgccgcaagagccgaaaggtcatttcacggcgccatcgagcgtgcggcgggtgcttatgagcgccctctgtcggcggactgcggtctaagtacaacgtgaggtcgatcccagtacggaaggaggacgaggtgcaggtgatgcgaggaacatacaagggtcgcgatgggaaggtgactcaggtctaccgtcgaaagtgggt

SEQ ID NO: 65435 - DNA, 76 bp, Glycine max
  Clone ID: 700758158H1
agagatgaggcttttggacacttgaagtcatctgactgtctgacttatgggactacaatccgtatctcaaaatgtt

SEQ ID NO: 65436 - DNA, 135 bp, Glycine max
  Clone ID: 700758161H1
tcttcatcaagctccgctccaacacaggggtatatgagggccttccttcacgtgcatggagggcaatgcgggaaccagatcggctcctagctctgggaagtggtgtgcgacgagcactgcatagatccgacggga

SEQ ID NO: 65437 - DNA, 273 bp, Glycine max
  Clone ID: 700758162H1
ctccatttgtccttgaatctaatactcagcatggctaagcttgttctttcccttcgttttctgcttttcagtggctgctgcttcgccccaagtttcagagagcaagcacagcacaacgagtgccagatccaacgctcaatgccctcaaaccggataacagcacagagtcagaaggtggcttcattgagacatggaaccctaacaacaagccatgtcagtgtgccggtgttgccctctctcgctgcaccctcaaccgcaacgcccttcgcagac

SEQ ID NO: 65438 - DNA, 274 bp, Glycine max
  Clone ID: 700758165H1
cttaaacactcatcagtcatcatcatggccaagctagttttttcactttgttttctgcttttcagtggctgctgcttcgctttcagttccagagagcagcctcagcaaaacgagtgccagatccaaaaactcatgccctcaaaccggataaccgtatagagtcagaaggagggctcattgagacatggaaccctaacaacaagccattccagtgtgccggtgttgccctctctcgctgcaccctcaaccgcaacgcccttcgtagaccttccta

SEQ ID NO: 65439 - DNA, 267 bp, Glycine max
  Clone ID: 700758167H1
catttgtccttgaatataatactcagcatggctaagcttgttctttccctttgttttctgcttttcagtagctgctgcttcgctttcagtttcagagagcagccacagcaaaacgagtgccagatccaagcctcaatgccctcaaaccggataaccgtatagagtcagaaggtggcttgatcgtcacatggaagcctaacaacaagccattccagtgtgccggtgttgccctctctcgctgcacgctcaaccgcaacgcccttcgca

SEQ ID NO: 65440 - DNA, 269 bp, Glycine max
  Clone ID: 700758168H1
ttgctagaatggaatttcgatgctcagtcatctcttttaccattctcttctctcttgctcttgcaggagagagccatgtccatgcatcgctacctgaggaagattattgggaagctgtttggccaaacatcccattcccctcgcactgcgagagcttctaaagcctctccctgcaggtgttgaaatcgatgaactccctaagcaaattgatgatacacagtacccaaaaacattcttctataaagaagaccttcatccaggcaaaacaa

SEQ ID NO: 65441 - DNA, 266 bp, Glycine max
  Clone ID: 700758169H1
ctcgtgtttcttcggagcgagcagaaggacttcagcatcggagaccgaatcgttagggtgaggggagtaaataaacagggtgaaccgactcaagcccccatgttgaacggataattagttgcaattgcaaagattgtgattgttgggattgcagagagaagggtggttagtgttagaatagattgagtgtggatggggaaagaggaggaggagatgaggggtgagattgaggaacgactgataaacgaagagtacaagatatggaa

SEQ ID NO: 65442 - DNA, 265 bp, Glycine max
  Clone ID: 700758170H1
ctccattgtctttgaacacttgtcaccatggccaagcttgttctgtccctttgtttccgtcttttcagtggctgcttcgctctgagagagtaggcacagcataatgagtgccagatccagaagctgtatccctcaaaccggataaccgtatagactcggaaggtgggttcattgagacctggaaccctaacaacaagccattccagtatgccggtgttgtcctctctcgctgcagccttaaccgcaatgcccttcgtagaccttc

SEQ ID NO: 65443 - DNA, 268 bp, Glycine max
  Clone ID: 700758172H1
aagagagcaaaagcatagcgaatatggtgcactgtgtggtcttagcatatccagctcaaggccacattaaccctatgcatcatttctccaagctcttgcaacaacaaggggtgaaagtaacactagtcacaccttttcctactgcaagagcttgcaaaacataccttcttctattgcacctaaatccatttctgatgggtttgacaacagtgggcttgctgaagcagggaactggaaggtctacttggaacgtttctggcaagtaggg

SEQ ID NO: 65444 - DNA, 215 bp, Glycine max
  Clone ID: 700758173H1
attcaatatcctagtacaccgtattaaagaatttaagatatactatgatgagagcgcggttcccattactgttgctgggagttgttttcctggcatcagtttctgtctcatttggcattgcgtattggaaaagcagaaccccagtcacaacaagtgcctcctaagttgcaatagcgagaaagactcctacaggaaccaagcttgcaacgctcgtt

SEQ ID NO: 65445 - DNA, 76 bp, Glycine max
  Clone ID: 700758175H1
accaaatgactttctttttggtcagtctgtgtccgtaaagttcgttgctttgacattagagggtgtccaaccaaag

SEQ ID NO: 65446 - DNA, 267 bp, Glycine max
  Clone ID: 700758176H1
caattttatatgatttctgactcaaataagcgcgtatattcaagtggagatgtctatccaagtgcttctaatcttgccagtggagaatatattttacagttatatttgaggcatgacaatgtgcagatttggaaaagatgaggcatttggtgttattcattgagcgaaatttgggtgagaaggatgtcattcggctaagctttttctctcaacccgatggcccgctgatgggaaatggttcctttaagtcctcatcactagttccag

SEQ ID NO: 65447 - DNA, 271 bp, Glycine max
  Clone ID: 700758177H1
ctcggacctgaacttcaaaattgcaatgggagtggaagatacagatatttgtatcatcaagcgagccagatcatgttgtagtctattcagatggcatttctcatgattcgggtcatgaagctggaagtggtcatcacaatattacagattcgtatgaacaaatcaatgagactactgaacatcatagttcagaggatagtgcaaaggaatatgaggtgaaggaatgcacaacagaagtttctgttaaggtctctgatgtctctaatgttaa

SEQ ID NO: 65448 - DNA, 272 bp, Glycine max
  Clone ID: 700758178H1
caaaacttgagccttaaaaagagatagtaactccaactccaagtcacattggtgacaaagttagaaacaaggagaaagaaagaagatggcaggaaagaaaatcccagatgtgttgctgaattcaggacacaaatgccagttataggcatgggaacttcagtggagaatcgtccatcaaatgagacccttgcttctatctatgttgaagccattgaggtgggttaccgtcattttgacactgctgcagtgtatggaacagaggaagccatagg

SEQ ID NO: 65449 - DNA, 271 bp, Glycine max
  Clone ID: 700758179H1
cacacacacacacacactaagaataatggcttctatcctccactactttttagccctctctctttctttctctttccttttcttcttatccgactccgtccccattccccaacaccacactaatcctacaaacctataaaccttctggttctacccgttcaaaatgatgcttccacagggctccatctctacaacctccaaaaaaggacccctctaatgcaagtaccagtcctggtggacctcaatggaaaccacttgtgggttaactgtg

SEQ ID NO: 65450 - DNA, 270 bp, Glycine max
  Clone ID: 700758181H1
agcaaaatgaccaagttcacaatcctcctcatgtctcttctcttctgcatcgcccacacttgcagcgcctccaaatggcagcaccagcaagatagctgccgcaagcagctccagggggtgaacctcacgcctgcgagaagcacatcatggagaagatccaaggccgcggcgatgacgatgatgatgatgacgacgacaatcacattctcaggaccatgcggggaagaatcaactacataaggaggaacgaaggataagacgaagacgaag

SEQ ID NO: 65451 - DNA, 263 bp, Glycine max
  Clone ID: 700758182H1
tgttccactgcctacaaaaactaatttggtggaaactcccaaggaatggcaactagatctaccttgtgacgaaattcctagtgtcttgaccacaactgatgagagattggtaggcagagaacatgaggatatgatcgttttcttggtggaattcaaaaatatgccagtcccatgatgcccctagatgaagaaattctttgctaaggttgcacaagatatagttgaggaatggtttgattgtgatgatgaggaggattcctttg

SEQ ID NO: 65452 - DNA, 264 bp, Glycine max
  Clone ID: 700758185H1
ctcttccctcgtccagtgctaactactccttcgtcaacagagagcttttcgtctgatgctaggtgtcgagcgagaatctttggggccatcctcgttcttctctattcaacaccactcacacttgcacgcagctggcaaatgatgatgagcttgagcaacaagaagaccaccttgtgcaactctttcaggatacttcactgtcggttgcttcatgtaaagaccttgaattggctaaagttcccaagtctgctgctaagggtgtca

SEQ ID NO: 65453 - DNA, 264 bp, Glycine max
  Clone ID: 700758189H1
ctccattggtccttaaacactcatcagtcatgaccatggccaagctagttttttccctttgttttctgcttttcagtggctgctgcttcgctttcagttccagagagcagcctcagcaaaacgagtggagatccaaaaactcaatgccctcaaaccggataaccgtatagagtcagaaggagggctcattgagacatggaaccctaacaacaagccattccagtgtgccggtgttgccctctctcgctgcaccctcaaccgcaa

SEQ ID NO: 65454 - DNA, 261 bp, Glycine max
  Clone ID: 700758190H1
cttgatgatgttgaaactcctagaggttccatgttggatcttaaaatttctcaatctaaaattgcacttcccaaaaacacagttggaggaaccattctgcgtagtgatctattggcaaattttttcgcagagggcaattttagagcaagtgttgatttgcagcgcactcatcgtattaaaggaatgattaaaatggtggccacagttggtattcctgagaatacaggtatagcattggcctgtgctatgaatagttctttt

SEQ ID NO: 65455 - DNA, 199 bp, Glycine max
  Clone ID: 700758191H1
tcaatatcctagtacaccgtattagagaatttaagatgtactatgatgagagcgcggttcccattactgttgctgggagttgttttcctggcatcagtttctgtctcatttggcattgcgtattgggaaagcagaaccccagtcacaacaagtgcctccgaagttgcaatagcggagaaaggactcctacaggaaccaa

SEQ ID NO: 65456 - DNA, 263 bp, Glycine max
  Clone ID: 700758192H1
atcgcgagaaagttgaaactcggggacaacgagcttctgcgcacggagaagaagttcaaggttttcatggagaattacgggaggagctactccacagaggaggagtatttgcgccgtttggggatttcgcccagaacatggtcagagcggcggacatcaggcgctggaccccaccgccgtccacggcgtcacgcagttctccgatctcaccgaggacgagtttaagaagctctacactggcgtcaatggcggcttcccgtcat

SEQ ID NO: 65457 - DNA, 264 bp, Glycine max
  Clone ID: 700758193H1
aagacagtcatggcgtcgtttcttcaatggtttctggatccgaagaagaactggttcgccgctcagcacatgagatccctctccagacggcttcgcaaatacgggctccgatatgacgatttgtacgtccttactacgatctagatgtgaaggatgcgctgaatcggcttccgaaagatgtggtggacgctcgccacgcgcgtcttaaacgcgccatcgatctttccatgaagcacgagtacctccctgacaatcttcaggcaa

SEQ ID NO: 65458 - DNA, 270 bp, Glycine max
  Clone ID: 700758194H1
ggcaaaaggagatttgtttctggggatggtgaagagatgacattgattccgggaaccagtgttgaagaggcttacaacaagctaatagttgaacttgagaaaagtgttcctacattggttggcattgaatgtcccaaggatgagaaacttcctcgtcgcaaaatttttgacaaacctaagacgcgctgcttcactattctccctatggagtttaatcttgtggttcgtcagaagtttttaaattttgtgaggttcattatgaagaaaagg

SEQ ID NO: 65459 - DNA, 255 bp, Glycine max
  Clone ID: 700757566H1
gtgtcttccaaataatactttgccttgctaggtttctgggcactctactagaacttctttgcaaccagcttctcattaaggttctttttaatgtgtagagtgcaaacacacacacacacaatttggctacaatgtagtactatttttctatactatactgggatatctatcttgtgttagatttcgtgatctattttattttctggctgacttgccttcatttattgatatcccaactatgttgcaactatcaat

SEQ ID NO: 65460 - DNA, 255 bp, Glycine max
  Clone ID: 700757567H1
ttcaagttcaagctggtgaaatcttggattagtgctcccactctcctatctggtataggacttcgtgggtagacttttctatttctctcctttctttcactctcttcttctcactgatccgcattgccgttcaaagtggtcttatttgaaaaacacttgggcgttggtgcaaatgtttgcttcgttaattttctctggggacaacaggctcactgagaaaacaatttttacttgcagagatttggacatcttggt

SEQ ID NO: 65461 - DNA, 251 bp, Glycine max
  unsure (1)..(251): unsure at all n locations
  Clone ID: 700757568H1
ctcgaccgctcgagccgctcgaccggctcgagcggcaaccgtcgacgacgacacgccgttccncgcttcacattctcccaaagcgctcggacaccgcccgtgatggataaagtcttcaacaagctccgcaatttggacgcttacccaaaagtcaatgaagatttttacaaccgcacgctcgccggcggcgttgtcaccgtcgtttccgccgccgtcatgctctttctcttcttttccgagctaagtttata

SEQ ID NO: 65462 - DNA, 248 bp, Glycine max
  Clone ID: 700757569H1
cttcttcttcttcgcataatagcagcaacaatggtgaagcactacagacccccggggaagaaaaaggagggaaatgctgccaaatttgtcattaggtcacaagcaatcaagcagcttcaaatcagtctaccccttttcaggaaactatgtattttgaaaggtgtaactccaagggagcctaagaaaaagttcaagggaactcatcagacttattaccatgtcaaggatgtttccttccttcatcacga

SEQ ID NO: 65463 - DNA, 250 bp, Glycine max
  Clone ID: 700757570H1
gaaattttgataaaccgcgatcacaggttgccgcaccttaaaaccggaaacaaaagcaatcgttacttgatttcaagaatttctcaatttctttctacttctttgtgtacgatttcttaagggaaagaaaatcactctctgtgctggccacagacttcgtgaatcattttcttttccacttttagtttattctctgaacactctcctatttgatataggacttcgtgtcagatttaaacttcttctgttt

SEQ ID NO: 65464 - DNA, 250 bp, Glycine max
  Clone ID: 700757572H1
ttccttagttcaatatggggaagcccttcactctctctctttcttccctttgcttgctactcttgtcgagtgcatgctttgctattagctccagcaagctcaacgagtgccaactcaacaacctcaacgcgttggaacccgaccaccgcgttgagtccgaaggtggtttgattcaaacatggaactctcaacaccctgagctgaaatgcgccggtgtcactgtttccaaactcaccctcaaccgcaatgg

SEQ ID NO: 65465 - DNA, 248 bp, Glycine max
  Clone ID: 700757574H1
aaatgccgaactgctcatagaagaagactggagtctcttattgaagatggtagaagaatatattgaggagctatgcatgcagatattgaagtttaaaccggacttggtaatcacagagaagggtctgagtgatttggcaacccattatctcagcaagcatggagttagtgcaatcaggaggctgaggaaaactgataataatagaattgcaaaggcttgtggtgctgtaattgcgaacagaccagatg

SEQ ID NO: 65466 - DNA, 243 bp, Glycine max
  Clone ID: 700757575H1
ataaaattcttccaccaagttatgggtttccttgtgttgcttcttttctccctcttaggtctctcttctagttccagcatatcaactcatcgttccatattggaccttgacctaaccaagtttaccacacagaaacaggtgtcttcactgttccaactatggaagagtgagcatggacgtgtctaccataaccacgaggacgaggcaatgagacttgagattttcaagattaacttgaactat

SEQ ID NO: 65467 - DNA, 251 bp, Glycine max
  Clone ID: 700757576H1
ctccattggtccttaaacactcatcagtcatcaccatggccaagctagttttttccctttgttttctgcttttcagtggctgctgcttcgctttcagttccagagagcagcctcagcaaaacgagtgccagatccaaaaactcaatgccctcaaaccggataaccgtatagagtcagaaggagggctcattgagacatggaaccctaacgacaagccattccagtgtgccggtgctgccctctctcgctgc

SEQ ID NO: 65468 - DNA, 253 bp, Glycine max
  unsure (1)..(253): unsure at all n locations
  Clone ID: 700757577H1
cagtgagaaaactttgccaaataatttttctgcagaattgctctcttgcaaattggatactgttactcgacaattaatttcaagnccactcaggataatattggccagtaacagtatcctgagtgggctccaattaattgtcgagttcatcgacaaccaattcacatcactgaaggaaattatgtcagaaagcaagatgtcagcattgaatatgatgcatgtacaattccaaatgattctggttcattggttg

SEQ ID NO: 65469 - DNA, 245 bp, Glycine max
  Clone ID: 700757578H1
tcaatattctagtataccttaataaataatttaagatactatgatgagagcacggttcccattactgttgctgggacttgttttcctggcttcagtttctgtctcatttggcattgcttactgggaaaaagagaaccccaaacacaacaagtgtctccagagttgcaatagcgagagagactcgtacaggaaccaagcatgccacgctcgttgcaacctccttaaggtggagaaagtagatgtga

SEQ ID NO: 65470 - DNA, 254 bp, Glycine max
  Clone ID: 700757579H1
tgatattctcttgggaatctcaaaaactgtagactgtttgggattgtcaataaggaaactcaaatgccatgaagtttgatttgaccactcagtctacagtttttgatattctcttgggaatctctcaagattttgaaattgctggtaatactcttatgccagctttttctgttccacaggctactgccatatcttctgaaaatgcggaatcctctgcatgatctggaatttgtgttgtctttcgcttgtgcgtt

SEQ ID NO: 65471 - DNA, 259 bp, Glycine max
  unsure (1)..(259): unsure at all n locations
  Clone ID: 700757580H1
tcctcgaccgaattcggctcgactttanacactcatcagtcatcaacatggccaagctagtactttccctttgttttctgctactcagtggctgctgcttcgctttcagttccagagagcagcctcagcgaaacgagtgccagatccaaaaactcaatgccctcaaaccggataaccgtatagagtcagaaggagggctcattgagacatggaagcctaacaacaagccattccagtgtgccggtgttgccctctctcg

SEQ ID NO: 65472 - DNA, 182 bp, Glycine max
  Clone ID: 700757581H1
aggttattagcatccagagcaatgaattgattcttgaagctttcaagcagatgaaggataatcgaattggtggtcttcctgtaatagaggggccaaagaagagaattgttggaaacttgagcatacgagacatcagacacttgcttctaaggccagagcttttcaccaattttaggtaagac

SEQ ID NO: 65473 - DNA, 252 bp, Glycine max
  Clone ID: 700757583H1
ccgagactaccgcattttggagttcaactccaaacccaacacccttcttctcccccaccatgctgacgctgattacctcatcgttatccttaacgggactgccattcttaccttggtgaacaacgacgaccgagactcttacaaccttcaatctggcgatgccctaagagtccctgcaggaaccacatactatgtggttaaccctgacaacgacgagaatctcagaatgataacactcgccatacccgttaa

SEQ ID NO: 65474 - DNA, 250 bp, Glycine max
  Clone ID: 700757584H1
aaattgaaaagctttctagctggtcataatatcaccattactgatggtattgacaagactagtgcaactttgcaatttagaaagttagcagattgtgattttctcaagagaaactttaagcagatgtctaatgttttgtgggtagctcctgaggacaaggcgagtttatggtcacaacttcattatgtttcgtgtaataatctggaaatgcaagaagcttatcttgtcaatctcgtaaatgtgttacgag

SEQ ID NO: 65475 - DNA, 246 bp, Glycine max
  Clone ID: 700757586H1
ctcgagccgtgctattgtataataaacaactcaatttagaaaatttcagcagtgagaaaagatgggagaatgtagatcaacaaggtatacagatgccacctaatgtaatgcggtagaaattaaatataagcggaatctgagtaatattcatatttccggcttattttacgacggcagatacaaattctggactaaacacgagaaaaatcttgctttgacagaagaggtaaagatggaagtgattag

SEQ ID NO: 65476 - DNA, 246 bp, Glycine max
  Clone ID: 700757587H1
gccaaatgtaggatgtgaaggattcatgtgctcaagtcatctgtcaatcactcaaagaaattcaagattgatccattctactagcaagattgttccaaattctgaaattcagaatataactactgagatggtgaagacaccagaggtctcaagatggatggatcaagtcatccctacaatagccccttgtgatgcagcagaaccatggcaactagggtttcaagatgcagcaacacctataatgca

SEQ ID NO: 65477 - DNA, 246 bp, Glycine max
  Clone ID: 700757589H1
taattattaacacttccttagttcaatatggggaagcccttcactctctctctttcttccctttgcttgctactcttgtcgagtgcatgctttgctattagctccagcaagctcaacgagtgccaactcaacaacctcaacgcgttggaacccgaccaccgcgttgagtccgaagtggtttgattcaaacatggaactctcaacaccctgagctgaaatgcgccggtgtcactgtttccaaactca

SEQ ID NO: 65478 - DNA, 210 bp, Glycine max
  Clone ID: 700757590H1
gttatgaaataatgttacctccctctctctaacctcactttaactccttcatttcttctttcttttctaaaacctcaaaccgcaacacaacacaacacaacacaatacaagtttcgtattcgtaacgtaacttgtttctcccttcttcctctcctctctccgtttcccgaattctgccctcacttcacccaattccaattccccacaccc

SEQ ID NO: 65479 - DNA, 248 bp, Glycine max
  Clone ID: 700757591H1
agaaaaaagaaaaaatgtttgcagggaaaggggctgtttggttctccagagcggtggcgttggcagcaatcgcggtggtagcttgcgttgggcttacacaggcccaacccgaggccaggttcaagtgcaacagcgcgaacatccccacgtgtcgcgcgctcataagctactctcacccgaacaccaccaccctcggcgacatccaaaagctcttcaacgtgaaacacatcctcgacatcgtgggagcg

SEQ ID NO: 65480 - DNA, 250 bp, Glycine max
  Clone ID: 700757592H1
cttccaccaagttatgggtttccttgtgttgcttcttttctccctcttaggtctctcttctagttccagcatatcaactcatcgttccatattggaccttgacctaaccaagtttaccacacagaaacaggtgtcttcactgttccaactatggaagagtgagcatggacgtgtctaccataaccacgaagaagaggcaaagagacttgagattttcaagaataacttgaactatatcagggacatgaat

SEQ ID NO: 65481 - DNA, 248 bp, Glycine max
  Clone ID: 700757593H1
ttcagaactgcaatggtgagtagaaatagcaagcctcaagctactgcaatgcatgtgggagctatagaaattatcattgatagtttcgcaagtactgactgcaacatagttggtgcaatgcttttggttgatacttatcataccaatcctgaaaatgcagttcgtagtatttttgtcgcgcctttcagaggcggaaggcctattcgggtggttacatttccgaataccattgtgcagattgaaccaga

SEQ ID NO: 65482 - DNA, 250 bp, Glycine max
  Clone ID: 700757595H1
tgcgagtcaacgggcgagtaaacccgtaaggcgcaaggaagctgattggtgggatccccctgtgggttgcaccgccgaccgaccctgatcttctgtgaagggttcgagtgagagcatacctgtcgggacccgaaagatggtgaactatgcctgagcggggcgaagcagaggaaactctggtggaggcccgcagcgatactgacgtgcaaatcgttcgtctgacttgggtatagggtcgaaagactaatcg

SEQ ID NO: 65483 - DNA, 259 bp, Glycine max
  Clone ID: 700757596H1
caataaataaatgggagataattcgagggtccaaaggagggtgctggggttggttcatcgcgttcgtcattctggctctcgtcgtcggtgccattgtttttaccgttaagaagaaatttagtcactctcggttccgataagcctgctcctgttcccggtccccctggcgccgttgaccaaaaatactccactgcactcaaaatcgcaatgcaattcttcgatgttcagaaatctgggaggctagttgacaataaaatat

SEQ ID NO: 65484 - DNA, 278 bp, Glycine max
  Clone ID: 700757601H1
cggctcgagcggctcgagcggctcgagacattttcgacgtgcagggcctcggcaaaaggtatactttaaatcggatgaagtgcatgcatgcattgtcacgtgtggtggactctgccctggcctcaacactgtcataagggaaattgtctgtggtctttcctacatgtacggtgttaacaaagtccttggcatagatggtggttatagaggcttttattccaaaaacaccattactttaacacctaaggtggtcaatgacatccataagcgtgggggta

SEQ ID NO: 65485 - DNA, 277 bp, Glycine max
  Clone ID: 700757602H1
caaggggcaattttttcaaaacctttttctctctcgcaacctcacctcttcctccttcaatctctttcggaatttcccaaaatccttagtgggaggaagagatggttctgactcagaagcttcacgaagccttcaaaggcaccgtcgagaggattactggcccccgaaccgtttccgccttcaaagaaaaaggagttctcagtgtctctgagttcgtcaccgctggcgataatctcgttgccaaatgccccacctggtcctgggaatcgggtgatcc

SEQ ID NO: 65486 - DNA, 274 bp, Glycine max
  Clone ID: 700757603H1
agacgacaggctcactgagaaaacaatttttacttgcagagatttggacatcttggttgtttattatacaatagcaactcaatttagaaaatttctaccgcattacattaggtggcatctgtataccttgttgatctacattctcccatcttttctcactgctgaaattaaatataagcggaatctgagtaatattcatatttccggcttattttacgacggcagatacaaattctggactaatcacgagaaaaatcttgctttgacagaagag

SEQ ID NO: 65487 - DNA, 271 bp, Glycine max
  Clone ID: 700757604H1
gatcatacatagtagtgttggtgggttgcaaagatgcttgggggtcttctccataggggtcataagataaaagggacagtggtgttgatgcgcaagaatgtgttggacgtgaatagcgtaaccagcgttgggggaattattggtcaaggtctcgacttagttggctcaacactcgatactcttactgccttcttgggccgatccgtgtctctccagcttattagtgctaccaaagctgatgccaacggaaaagggaaacttggaaaggcta

SEQ ID NO: 65488 - DNA, 272 bp, Glycine max
  Clone ID: 700757607H1
aattttctgacagagggcaattttagagcaagtgttgatttgcagcgcactcatcgtattaaaggaatgattaaaatggtggccacagttggtattcctgagaatacaggtatatcattggcctgtgctatgaatagttcttttagggggcgtgccagttctgatatttacaccatctgctctcaagactgtgaattatggaatcctgcttgcacaaaagcaatgactatgtcatttaatccaaacccgtgttctgatgcgtggagtttgga

SEQ ID NO: 65489 - DNA, 275 bp, Glycine max
  Clone ID: 700757608H1
ctctccattgtctttgaacactcatcaccatggccaagcttgttctttccctttgtttccttcttttcagtggctgcttcgctctgagagagcaggcacagcaaaatgagtgccagatccaaaagctgaatgccctcaaaccggataaccgtatagagtcggaaggtgggttcattgagacctggaaccctaacaacaagccattccagtgtgccggtgttgccctctctcgctgcacccttaaccgcaatgcccttcgtagaccttcctacacc

SEQ ID NO: 65490 - DNA, 278 bp, Glycine max
  Clone ID: 700757610H1
caccctcctcgccgaccaagccatggaaagcgtgaacaagacgaggacgaggacgaagatgaagataaacctcgtcctagtcgaccaagccaaggaaagcgtgaacaagaccaggaccaggacgaggacgaagatgaagatgaagatcaacctcgcaagagccgcgaatggagatcgaaaaagacacaacccagaagacctagacaagaagaaccacgtgaaagaggatgcgagacaagaaacggggttgaggaaaatatctgcaccttgaagcttca

SEQ ID NO: 65491 - DNA, 272 bp, Glycine max
  Clone ID: 700757612H1
cggctcgagtatcaattttggttaagagtcttgaaaaagcaagagaaaaaaaaataccaaccatggcaaccatttctgatcaacctagagggtcctactcctatggaacctcatatggagcaccctatggaaccacgtatgagaccaacaccagcattaacaacccaccttcacgccaaacagtgaagttcataactgctgccactattggcatcacactcttgctcctgtctgggttgaccctcacaggcactgtcataggtttgatcatt

SEQ ID NO: 65492 - DNA, 273 bp, Glycine max
  Clone ID: 700757613H1
gcaagagggaggggtgctgatcgttccacaaaactttgcggtggctgcaaaatcccagagcgataactttgagtatgtgtcattcaagaccaatgatagaccctcgatcggaaaccttgcaggggcaaactcattgttgaacgcattgccagaggaagtgattcagcacacttttaacctaaagagccagcaggccaggcaggtgaagaacaacaaccctttcagcttcctggttccacctcaggagtctcagaggagagctgtggcttagag

SEQ ID NO: 65493 - DNA, 278 bp, Glycine max
  Clone ID: 700757614H1
agaacattgtgatgatcaaaatacacaacaaattatcatggaggaaatcatgcaatctgtcagcactttagcacaggatcaatatggaaattatgttattcagcatattgtggaacatggtaaaccacatgaacggactaccattatcagcaagcttgctggtcagattgttaagatgagccagcaaaagtttgcttcaaatgttattgagaaatgtttggcttttggtagtcctgaagaacgtcagattttggtgaatgaaatgcttggcacttctg

SEQ ID NO: 65494 - DNA, 278 bp, Glycine max
  Clone ID: 700757615H1
attcaggaaaaagttgtattgaaattttcacaagaggaatttcttacagcttggtcaactcaggtgcgtcctgcaacaactctgttggctgatgggtgcccatatttgtatgctatggtgcatgatagttcagtgtctacaataccaggtgattttgtcattggtgttaagttgacaaccataaacaatatgtgtgcatatgggctcaatcctggtatttcaggttctcgtcttttgggcacattcctcagtccatttcacagcaaactgtttggaat

SEQ ID NO: 65495 - DNA, 275 bp, Glycine max
  Clone ID: 700757617H1
cttcttctcttgcggctagggttttagcgcagttcttctagatttaaggaagatgggtaaggaaaaggttcacatcagtattgtggtcattggccatgtcgactctgggaaatccactaccactggtcacctgatttacaagcttggaggcattgatccccgtgttattgagaggtttgagaaggaagctgctgagatgaacaagaggtctttcaagtatgcctgggtgctggacaaacttaaggctgagcgtgaaagaggaatcaccattgata

SEQ ID NO: 65496 - DNA, 273 bp, Glycine max
  Clone ID: 700757618H1
attccttgagaagtgtcatgctttgaatgggattaaaagaatatggtgtgaatggttaggcaaagaaagtaatggtgaacgagatggtgttgaggttctagagcatgattttgcagttgtgatttttgcttataattatgatctgggtcggtctggtttgcttgatgatgtcaagacattgctccctgtttctgctggccaaaagggaaagacttcattgtctgactctgatgatgttagcgattttttatgcaatcagtatgattcatctgc

SEQ ID NO: 65497 - DNA, 259 bp, Glycine max
  Clone ID: 700757619H1
cacagcacttgggaaaggtaagaaaattgtttttcttactagagttgatctttttccagtagctttactggctgttctttttggcgttaagaatgaaattctgagttctaacgccactaatcctatgctgacgcgacttcttgagaactgtaagagtctcaaatatctggttgatgagtgtccttttgcatttgtgaactagtatgtagtattttattcacttaaataaagcgcattactatgtgcaatgagtgtgttt

SEQ ID NO: 65498 - DNA, 271 bp, Glycine max
  Clone ID: 700757620H1
tgaaaaattgatgcgtgaaaggacacacctgctgttggcttgttgttcaaggatggcaatttgtaagaaagatgtttggagagttgaatgtggaatcccttctggatttccgctcacagttatttgcaatagcatttttaatgagatgctcattagatatagctatgaaaaattactgcgccaggctaaagctccaagtatgtttttacaatctttcaaaattttgtttctttgtgtgtgtatggtgatgataacttaattagtgttcatg

SEQ ID NO: 65499 - DNA, 257 bp, Glycine max
  Clone ID: 700757621H1
ggctcgagctagttcaatatcctagtataacttaataaataatttacgatactatgatgagagcacggttcccattactgttgctgggacttgttttcctggcttcagtttctgtctcatttggcattgcttactgggaaaaagagaaccccaaacacaacaagtgtctccagagttgcaatagcgagagagactcgtacaggaaccaagcatgccacgctcgttgcaacctccttaaggtggagaaagaagaatgt

SEQ ID NO: 65500 - DNA, 271 bp, Glycine max
  Clone ID: 700757622H1
gcgcactcatcgtattaaaggaatgattaaaatggtggccacagttggtattcctgagaatacaggtatatcattggcctgtgctatgaatagttcttttagggggcgtgccagttctgatatttacaccatctgctctcaagactgtgaattatggaatcctgcttgcacaaaagcaatgactatgtcatttaatccaaacccgtgttctgatgcgtggagtttggtatttctgaagcgtaccggatttcattgtgatatcatttgtgtc

SEQ ID NO: 65501 - DNA, 249 bp, Glycine max
  Clone ID: 700757623H1
ctcgagccgcattatttcaatcaaacacttatcatattactaacaaaaatggaactaacattccctcatcaagacgaagatgattccgttgtttctgattgcgagagcggtgtttcgggcagtggagtcgtggtggcaccaccaccaccaccaccacaacaacaacaacgtggttttttcgttaggcttggagaaggtgacgtggttcacgatcttatcaagacaaggtttattcgtggcctcggcatg

SEQ ID NO: 65502 - DNA, 274 bp, Glycine max
  Clone ID: 700757624H1
aatttgataaaccgcgatcacaggttgccgcaccttaaaaccggaaacaaaagcaatcgttacttgatttcaagaatctctcaatttcttcctacttctttgtgtacgatttcttaagggaaagaaaatcactctctgtgctggccacagacttcgtgaatcattttcttttccactcttagtttattctctgaacactctcctatttgatataggacttcgtgtcagatttaaacttcttctgtttctttctcagttctctgtttaatttcaa

SEQ ID NO: 65503 - DNA, 272 bp, Glycine max
  Clone ID: 700757625H1
taagaaaattgtttttcttactagagttgatccttttccagtagctttactggctgttctttttggcgttaagaatgaaattctgagttctaacgccactaatcctatgctgacgcgacttcttgagaactgtaagagtctcaaatatctggttgatgagtgtccttttgcatttgtgaactagtatgtaatattttattcacttaaataaagcgcattactatgtgcaatgagtgtgtttaaatataaaaaaaaaaaaaaaagggcggccg

SEQ ID NO: 65504 - DNA, 275 bp, Glycine max
  Clone ID: 700757626H1
taagaaagtcttccatagccccccaaaaatgaagagcaccatcttctttgctctctttctcttttgtgccttcaccacctcatacctaccttcagccatcgctgatttcgtgctcgataatgaaggtaaccctcttgaaaatggtggcacatattatatcttgtcagacataacagcatttggtggaataagagcagccccaacgggaaatgaaagatgccctctcactgtggtgcaatctcgcaatgagctcgacaaagggattggaacaatca

SEQ ID NO: 65505 - DNA, 276 bp, Glycine max
  Clone ID: 700757627H1
ccgtattaaagaatttaagatatactatgatgagagcgcggttcccattactgttgctgggagttgttttcctggcatcagtttctgtctcatttggcattgcgtattgggaaaagcagaaccccagtcacaacaagtgcctccgaagttgcaatagcgagaaagactcctacaggaaccaagcatgccacgctcgttgcaacctccttaaggtggaggaagaagaagaatgcgaagaaggtcaaattccacgaccacgaccacaaaacccggaga

SEQ ID NO: 65506 - DNA, 183 bp, Glycine max
  Clone ID: 700757628H1
gaaattttaataaaccgcgatcacaggttgccgcaccttaaaaccggaaacaaaagcaatcgttacttgatttcaagaatctctcaatttcttcctacttctttgtgtacgatttcttaagggatagaaaatcactctctgtgctggccacagacttcgtgaatcattttcttttccacacaa

SEQ ID NO: 65507 - DNA, 271 bp, Glycine max
  Clone ID: 700757629H1
caaaaccaaaacactcaagttaacttcaacacctttaattttctgaacgaaattcagccacagaatatcaaagggagcgaagatgagtcaggagcagccaaggcgcccccaaggccaagaccccatcaaatacggcgacgtttttgacgtctacggtgaccttgcacagatgcccattgcaccggaagatgctgccatgatgcaaagcgcggaagctcgagtactcggaaaaacccaacccggcggagttcttccgtcatgcaatccgccg

SEQ ID NO: 65508 - DNA, 277 bp, Glycine max; identical to SEQ ID NO: 56871
  Clone ID: 700757630H1

SEQ ID NO: 65509 - DNA, 277 bp, Glycine max
  Clone ID: 700757631H1
ggtggacgcaagcaggggcaacaccagcaggaggaagaggaagaaggtggcagcgtgctcagtggcttcagcaaacacttctatggcaaatccttcaacaccaacgaggacatagctgagaaacttcagtctccagacgacgaaaggaagcagatcgtgacagtggaaggaggtctcagcgttatcagccccaagtggcaagaacaacaagatgaagatgaagatgaagacgaagatgatgaagatgaacaaattccctctcaccctcctcgccgac

SEQ ID NO: 65510 - DNA, 255 bp, Glycine max
  Clone ID: 700757633H1
ggctcgagaaactatttttgagccactagagtacgtgttcgataatactgtggtttctgttcttccagactaaggtaaacgaaagtgcgcaatgcatgcaagcagcaaaatgggtgaaaaatataaaccttggatcatctttcttcatctactagtaatcacgtgttcctgcaatagaagctgcagagccaggggattgattgaaacagaagacaaattcttcaaagcaacctcaaatgatcatcatgaaacaga

SEQ ID NO: 65511 - DNA, 271 bp, Glycine max
  unsure (1)..(271): unsure at all n locations
  Clone ID: 700757634H1
ctctcttcttcagtggtggaagctactagaacactagtttgttgagcactgcgatgaggaagtggacggttgcttccgctctccttcttctctctctcctctttctctttgcagatcaaggtcgaaagtttcaggctaatgccgagggagattccgacgagcttgtagatccacccaaggtggaggataagatcggtgctgtgcctcatggcctttcaaccgattcagatgtcgtcaagagggagtcgngatcgatctcgaagagatctct

SEQ ID NO: 65512 - DNA, 262 bp, Glycine max
  Clone ID: 700757635H1
gtgcggtttcctttgttggtgttgctgggaactgttttcctggcatcagtttgtgtctcattaaaggtgagagaggatgagaataaccctttctacttgagaagctctaacagcttccaaactctctttgagaaccaaaacggtcgcattcgtctcctccagagattcaacaaacgctccccacaacttgagattcttcgagactaccggattgtccagtttcagtcaaaacccaacacaatcgttctctcccaccatgctg

SEQ ID NO: 65513 - DNA, 269 bp, Glycine max
  Clone ID: 700757636H1
tttgcttgctactcttgtcgagtgcatgctttgctattacctccagcaagttcaacgagtgccaactcaacaacctcaacgcgttggaacccgaccaccgcgttgagtccgaaggtggtcttattgaaacatggaactctcaacaccctgagctgcaatgcgccggtgtcactgtttccaaacgcaccctcaaccgcaacggcctccacttgccatcttactcaccttatccacaaatgatcattgtcgttcaagggaagggagcaatt

SEQ ID NO: 65514 - DNA, 205 bp, Glycine max
  Clone ID: 700757637H1
tgctagacacagtagcaacaagttgccactaacccaataacagtgtgtctagcgaattgaagtctataccaatagaatatcgtgggaaatttttccttgagtttctgaaggaagaacactgatttcgtgggtttttttttatgtccattagattttgtttgtcaaatgtgtcataaactttcctaaatatattttgcatgttttc

SEQ ID NO: 65515 - DNA, 270 bp, Glycine max
  Clone ID: 700757638H1
gaattgaacaagaagagagaagaatgatgatgaatgttttagggttgagtctggtgttaacttcactggcagcagcaggaatattctctcccaatcccagaacagagaagcatggagccagcaccattgtcaaagaagggcatcgagttgtggtggttgaatacgaccaaggtggccatcagaaaaccaaaatctcaatatccccagagcaacccacgcatcaccatgatcatgatgatgatttgatcaaagaagctgcctcggttctcc

SEQ ID NO: 65516 - DNA, 268 bp, Glycine max
  Clone ID: 700757639H1
ctttccttagttcaatatggggaagcccttcttcactctctctctttcttccctttgcttgctactcttgtcgagtgcatgctttgctattacctccagcaagttcaacgagtgccaactcaacaacctcaacgcgttggaacccgaccaccgcgttgagtccgaaggtggtcttattgaaacatggaactctcaacaccctgagctgcaatgcgccggtgtcactgtttccaaacgcaccctcaaccgcaacggcctccacttgcca

SEQ ID NO: 65517 - DNA, 270 bp, Glycine max
  Clone ID: 700757641H1
gggcatcactcgttgtttctctcttccatgcccaaaatgcgtttcgtctttgtttttctgtttttccattttcatttccctgaaaccctttctgccccaatctcagagtaccgcgcccttctctctctccgttcagtcattaccgacgccacaccacccgttctctcttcttggaacgcctccatcccttactgttcctggctcggcgtcacctgcgacaaccgccgccacgtcaccgccctcaacctcaccggcctcgacctctccggc

SEQ ID NO: 65518 - DNA, 269 bp, Glycine max
  Clone ID: 700757644H1
gagaatggctcccaagggtttaacctttctggctgtgttaatatgcgtttcagcactgtcactgagtccttctgttgcgggggaagggcaaaataatggccttgttatgaacttctacaaggaatcatgccctcaggctgaagacatcatcacagaacaagtcaagcttctctacaagcgccacaagaacactgctttctcctggctcaggaacatcttccatgactgtgctgttcagagttgtgatgcttcactgttgctggactcca

SEQ ID NO: 65519 - DNA, 272 bp, Glycine max
  Clone ID: 700757645H1
ccagattagtaccacaaaaatggagaaatagaataactgaatatcgtatagctcaaaataaagatttaaccaaatgcaattcatatgaaaaaagccaattaattctttacaaagaacaacaagtaaacgcattaaaaaaaaaaattagaaaacaatatagatacgatcttttatcctataattttatcaattatgcagataagaaagactcatatatttatggatatagatccctatttcaagtaaaaaaaaaccaagtgatttcttctaat

SEQ ID NO: 65520 - DNA, 226 bp, Glycine max
  Clone ID: 700757646H1
cttaattattaacacttccttagctcaatatggggaagcccttcactctctctctttcttccctttgcttgctactcttgtcgagtgcatgctttgctattagctccagcaagctcaacgagagccaactcaacaacctcaacgcgttggaacccgaccaccgcgttgagtccgaaggtggtttgattcaaacatggaactctcaacaccctgagctgaaatgcgc

SEQ ID NO: 65521 - DNA, 271 bp, Glycine max
  Clone ID: 700757648H1
ctttacaggggagatagaatttagatagtgcaagagaagcgtaatctccaagttctcatcttttttgttcccttttgttttcagagacatacataggccccagaagaacaaattgctacaacctattttgatttgagatctgtctgtctctttggtttcacttcagggctcaaagtgaggaatgcgaagaaaatggggaggaaaggaaatagttggttttctactgtgaagaaagctctaagccctgagccaaaggagaagaacgatcaga

SEQ ID NO: 65522 - DNA, 268 bp, Glycine max
  Clone ID: 700757650H1
taaagatgagtttgaagaacaacatggtggtgctaaaggtgtgtttgttgcttcttttccttgtgggggttacagctgcacgcatggaactgagcttcttcaaaagtgatcagtcatcaagttatgatgatgatgagtattcaaaaccatgctgtgatctctgcatgtgcacacgctcaatgcctcctcaatgcagctgtgaagatattacgctgaattcatgccactcagattgtaagagctgtatgtgcacacgctcacagccagg

SEQ ID NO: 65523 - DNA, 268 bp, Glycine max
  Clone ID: 700757651H1
ggtccttaaacactcatcagtcatcaccatggccaagctagttttttccctttgttttctgcttttcagtggctgctgcttcgctttcagttccagagagcagcctcagaaaaacgagtgccagatccaaaaactcaatgccctcaaaccggataaccgtatagagtcagaaggagggctcattgagacatggaaccctaacaacaagccattccagtgtgccggtgttgccctctctcgctgcaccctcaaccgcaacgcccttcgt

SEQ ID NO: 65524 - DNA, 265 bp, Glycine max
  Clone ID: 700757652H1
cgacgtgagatagattgtgaagtagaaatcggtgcaagaaattctccactttatctaaaaaaattcggtgagtttgtgaagacaaaaaatcactagctactcaaaaatggccacagtaggaaggaacgttgcagctcctttgctgtttcttaacttgatcatgtattttattgttcttggctttgctagttggtgcctcaacaggttcatcaatggccaaacttaccaccctagttttggtggaaatggtgcaaccatgtttttc

SEQ ID NO: 65525 - DNA, 229 bp, Glycine max
  Clone ID: 700757653H1
actgatgagagattggtaggcacagaacatgagggatatgatccttttcttggtggaattcaaaaatatgccactcccatgatgcccctagatgaagaaattctttctaaggttgcacaagatatggttgaggaatggtttgattgtgttgatgaggaggattcctttgaggaagtttctttaagtgcagcactcaatggtgttgagggtttagactatatggaaagaa

SEQ ID NO: 65526 - DNA, 260 bp, Glycine max
  Clone ID: 700757655H1
cgcaatggttaaagttaatgtagcatgtgctgctgttggcttgacatcaagttacactccaactccattgttggaatctggtttgcaaaaagacagagggttaattgtggagtattttggaaggatgtcttacgttgctcataacgttaatcagccccaagagaaagatttgttggagggaaatttttcctttgatattaaatctcgctctagattggaaaaagtttcctctacaaaagcacaatttgttagtggaaaaa

SEQ ID NO: 65527 - DNA, 267 bp, Glycine max
  Clone ID: 700757656H1
aagaatagatcctcaatacaatgaggttcaggctcagatggaaacaaatttgtttaaattgtctcttgatgatgttgaaactcctaaaggttccatgttggatctgaaaatttctcaatctaaaattgcacttcccaagaacacagttggaggaaccattctgcgtagtgatctattggcaaattttttgacagagggcaattttagagcaagtgttgatttgcagcgcactcatcgtattagaggaatgattaaaatggtggccac

SEQ ID NO: 65528 - DNA, 268 bp, Glycine max
  Clone ID: 700757657H1
aacttaattagtgttcatgaatacgtcaagccttactttagtggttctaaattgaaaagctttctagctggtcataatatcaccattactgatggtattgacaagactagtgcaactttgcaatttagaaagttagcagattgtgattttctcaagagaaactttaagcagatgtctaatgttttgtgggtagctcctgaggacaaggcgagtttatggtcacaacttcattatgtttcgtgtaataatctggaaatgcaagaagctt

SEQ ID NO: 65529 - DNA, 270 bp, Glycine max
  Clone ID: 700757658H1
ccattggtccttaaacactcatcagtcatcaccatggccaagctagttttttccctttgttttctgcttttcagtggctgctgcttcgctttcagttccagagagcagcctcagcaaaacgagtgccagatccaaaaactcaatgccctcaaaccggataaccgtatagagtcagaaggagggctcattgagacatggaaccctaacaacaagccattccagtgtgccggtgttgccctctctcgctgcaccctcaaccgcaacgccctt

SEQ ID NO: 65530 - DNA, 269 bp, Glycine max
  Clone ID: 700757659H1
gcaactttgcaatttagaaagttagcagattgtgattttctcaagagaaactttaagcagatgtctaatgttttgtgggtggctcctgaggacaaggcgagtttatggtcacaacttcattatgtttcgtgtaataatctggaaatgcaagaagcttatcttgtcaatctcgtaaatgtgttacgagaattgtatttgcacagtccagaggaagctcgccaattgagaaggaaagctctctctcgtattgaatggctgcaaaaagctga

SEQ ID NO: 65531 - DNA, 267 bp, Glycine max
  Clone ID: 700757660H1
agaaaatatgattaggaaagaataagtcatcatattttcttgtattgatagccccgctgtcccttttaaactcccgagagagtataaaactgcatcgaatattacaagatgcactcttgtcaaatgaagggggggaaatgatactacaagccactaggcatgggtctagcaaaggaaacaataatgggaggtggaggccgtgtggccaaagttgaaattcagcagaagaagcctctctcaagggttccaaacacaaagccaccattc

SEQ ID NO: 65532 - DNA, 271 bp, Glycine max
  Clone ID: 700757661H1
ggtgaattgcaatggtgagagagtgtttgatggagagctgcaagagggaggggtgctgatcgttccacaaaactttgcggtggctgcaaaatcccagagcgataactttgagtatgtgtcattcaagaccaatgatagaccctcgatcggaaaccttgcaggggcaaactcattgttgaacgcattgccagaggaagtgattcagcacacttttaacctaaagagccagcaggccaggcaggtgaagaacaacaaccctttcagcttcctg

SEQ ID NO: 65533 - DNA, 272 bp, Glycine max
  Clone ID: 700757663H1
ctaaacttcaccttcaaccatgaccacacaagtaccaccacacagtgtccaagtccacacaacaacacaccgactacgaagctggcgtcgtcccccccggagcccgtttcgaaccgccgcgttatgaagccggcgtcaaagcgccctccatttaccattccgagagaggtccaacgacttcccaggtcctcgccgtcctcgccggcctcccggtcggtggcatcctgctcctcctggcgggattgaccctggcaggaaccctcaccggactg

SEQ ID NO: 65534 - DNA, 274 bp, Glycine max
  Clone ID: 700757664H1
ctcgagccgcactttccttagttcaatatggggaagcccttcttcactctctctctttcttccctttgcttgctactcttgtcgagtgcatgctttgctattacctccagcaagttcaacgagtgccaactcaacaacctcaacgcgttggaacccgaccaccgcgttgagtccgaaggtggtcttattgaaacatggaactctcaacaccctgagctgcaatgcgccggtgtcactgtttccaaacgcaccctcaaccgcaacggcctccact

SEQ ID NO: 65535 - DNA, 141 bp, Glycine max
  Clone ID: 700757665H1
gactagttctagatcgcgagcggccacccttttttttttttttaattggaattccttctttaatttatgcttttcccgcataggtacttgagtgactcattacacaagggtacatagttacaatacccgttattccacaca

SEQ ID NO: 65536 - DNA, 264 bp, Glycine max
  Clone ID: 700757666H1
caaagtggtcttatttgaaaaacacttgggcgttggtgcaaatgtttgcttcattaattttctctggagacaacaggctcactgagaaaacaatctttacttgcagagatttggacatcttggttgtttattatacaatagcaactcaatttagaaaatttctaccgcattacattaggtggcatctgtataccttgttgatctacattctcccatcttttctcactgctgaaattaaatataagcggaatctgagtaatattc

SEQ ID NO: 65537 - DNA, 259 bp, Glycine max
  Clone ID: 700757667H1
gatcaagctgaacaatctgctaaaaggcaaaagctgaaaatctgggagaattttgttgaaggagaggaagtatctaatggtgcagcagttgagaacaaacagcaagaagtacttaaggtaattgttacggaagtcttgggtggtggtaaattctatgttcagacagttggagatcaaaagattgcatccattcagcaacagcttgcttctttgaacctaaaggatgctcctgtgcttggtgctttcaatcctaagaagg

SEQ ID NO: 65538 - DNA, 262 bp, Glycine max
  Clone ID: 700757668H1
ttctctttcggctttttccatcccttcctttctgcatgcagtgatgctgtgataaactgtgttagagcaacatcatggaacttttcaacatgtaatgattaagaaggaagatcattcatttaactgattaatggcactgatttctgatctactggctaacacaatactcttggtgatgaggcatttttctctacttagactggcatgcttgtttggtatcagaatcgcattaactgtcatatatacttggacggagttgatc

SEQ ID NO: 65539 - DNA, 259 bp, Glycine max
  Clone ID: 700757669H1
cgcacagcacttgggaaaggtaagaaaattgtttttcttactagagttgatccttttccagtagctctactggctgttctttttggcgttaagaatgaaattctgagttccaacgccaataaccctatgctgacgcgacttcttgagaactgtaagagtctcaaatatctggttgatgagtgtccttttgcatttgtgaactagtatgtaatattttattcacttaaataaagcgcattactatgtgcaatgagtgtgt

SEQ ID NO: 65540 - DNA, 264 bp, Glycine max
  Clone ID: 700757670H1
gcaaatcctaaaaagttcactgagatatatagaactatcttcaatttcacaaaatgaagaaagtgtttgtcacatttgtagctctgctagttgtatttgttcttacagtgacagcttcagagtcaaagccaccagtcacaacaaattcagcaccaaatgactacaattgttcacaagtgatgaataacttgtttgtttcgtgcgtagattacctcattggtggagatgctgttccttcaggtgtttgttgccaaagtgttaatg

SEQ ID NO: 65541 - DNA, 266 bp, Glycine max
  Clone ID: 700757674H1
atacatagtagtgttggtgggttgcaaagatgcttgggggtcttctccataggggtcataagataaaagggacagtggtgttgatgcgcaagaatgtgttggacgtgaatagcgtaaccagcgttgggggaattattggtcaaggtctcgacttagttggctcaacactcgatactcttactgccttcttgggccgatccgtgtctctccagcttattagtgctaccaaagctgatgccaacggaaaagggaaacttggaaaggct

SEQ ID NO: 65542 - DNA, 265 bp, Glycine max
  Clone ID: 700757676H1
cataaagctacggattttattttccggtaagctaggtgccaagtttctccgaaggtgtcccaataggggtccaatgtttttgtattacattagtttcaatttacttatgtttcttgacatggtagttgtttaactggtcagctcataaatatcattatcgttatatgctcaaaaaaaaaaaaaaaaaaaaaaaaaaaaaaaaaggggggcccccctattagggacctctccccccgggaattttttccgggcggggaccttgggg

SEQ ID NO: 65543 - DNA, 265 bp, Glycine max
  Clone ID: 700757677H1
tcctctacaaaagcacaatttgttagtggaaaaaccttcaaatatgatataattggtgctggttcacattcttcagaagattttcctgaaaaggaagatcaagaaaaacccaaaaagattgatgccagattgagacaaagaatagatcctcaatacaatgaggttcaggctcagatggaaacaaatttgtttaaattgtctcttgatgatgttgaaactcctaaaggttccatgttggatctgaaaatttctcaatctaaaattg

SEQ ID NO: 65544 - DNA, 267 bp, Glycine max
  Clone ID: 700757678H1
tttgaaattttgataaaccgcgatcacaggttgccgcaccttaaaaccggaaacaaaagcaatcgttacttgatttcaagaatctctcaatttcttcctacttctttgtgtacgatttcttaagggaaagaaaatcactctctgtgctggccacagacttcgtgaatcattttcttttccactcttagtttattttctgaacactctcctatttgatataggacttcgtgtcagatttaaacttcttctgtttctttctcagttctc

SEQ ID NO: 65545 - DNA, 259 bp, Glycine max
  Clone ID: 700757680H1
acgatactgataagagagataccaacaagaaaagaaaaaaagaagagttgagattccctttgaagaaaagatggcatcccataggcaaagctatgaagctggtcaaactaagggccgaactgaggaaaagacgaaccagacgatgggcaatattggagagaaggctcaagctgcaaaggagaagacccaggaaatggcccaagctgcaaaggagaagacccaacaaacagcccaagctgccaaggacaagacttgcgac

SEQ ID NO: 65546 - DNA, 205 bp, Glycine max
  Clone ID: 700757681H1
tcgcaatgcggaactagttcaataccgataaaccgcgatcacaggttgccgcaccttaaaaccggaaacaaaagcaatcgttacttgatttcaagaatctctcaatttcttcctacttctgtgtgtacgatttcttaagggaaagaaaatcactctctgtgctggccacagacttcgagaatcattttcttatccacacaacata

SEQ ID NO: 65547 - DNA, 249 bp, Glycine max
  Clone ID: 700757683H1
ggctcgagcagtgccttttccaatttcaatgaccaagcaaaaagaagactagaatcagaattgatgcaacggaagcttgtgccttccaccaataaagggcatttaaattttgattgtgacaaatattcaagttatcccaccatccatgggggtgtcacagaacaagtttttgagggaaaccccagcaaagctcaacttatggaagcattgtgtcatttccaaacacgtgcgaggaaagcaggggaggca

SEQ ID NO: 65548 - DNA, 258 bp, Glycine max
  Clone ID: 700757684H1
tcacattggtgaattgaaatctggtgtctatgttccactgcctacaaaaactaatttggtggaaactcccaaggaatggcaactggatctaccttgtgacaaaattcctagtgtcttgaccacaactgatgagagattggtaggcacagaacatgagggatatgatccttttcttggtggaattcaaaaatatgccactcccatgatgcccctagatgaagaaattctttctaaggttgcacaagatatagttgagga

SEQ ID NO: 65549 - DNA, 265 bp, Glycine max
  Clone ID: 700757686H1
gctgactaccttcatcattaagaaccctccagaagttaagaaaggatccaaagacaagaaggccatgaggagagctgagaaggagagacagaaggaaggtgaattagctgatgaggaacagaagaaagtgaagaaagaggttaagaagaaaggctcttcatcttctaaggatggcactgctaaatcaacctcttctaagaaaaaagcaagtggctctgcatgaagaccacacttcacctactcacagtcaaattgacgagaaaga

SEQ ID NO: 65550 - DNA, 261 bp, Glycine max
  Clone ID: 700757687H1
cttgaaaatggtggcacatgttatgtctgataagatataatatgtaccaccattttcaagagggttaccttcattatcgagcacatattatatcttgtcagacataacagcatttggtggaacaagagcagccccaacgggaaatgaaagatgccctctcactgtggtgcaatctcgcaatgagctcgacaaatggattggaacaatcatctcgtccccatatcgaatccgttttatcgccgaagccatcctttgagcctt

SEQ ID NO: 65551 - DNA, 264 bp, Glycine max
  Clone ID: 700757688H1
gagaaggagtaaaatattttccagtgttctttttttttttgaatttttcttctgccaacaggggagtcaaatctgctagatgccggtttacatcatgggagattatgtcactgtctcgaccactcaagaacacattgcaatccccattgagaaattgaatgcattatcacttgaagttgcaaaggaagaaaaacatgtaaccgatgatgcatatgtggacaatgtccaaaaacctgaagagaaagatgaagaaactcaagaaaa

SEQ ID NO: 65552 - DNA, 265 bp, Glycine max
  Clone ID: 700757691H1
ttcaatatcctagtataccttaataaataatttaagatactatgatgagagcacggttcccattactgttgctgggacttgttttcctggcttcagtttctgtctcatttggcattgcttactgggaaaaagagaaccccaaacacaacaagtgtctccagagttgcaatagcgagagagactcgtacaggaaccaagcatgccacgctcgttgcaacctccttaaggtggagaaagaagaatgtgaagaaggtgaaattccacg

SEQ ID NO: 65553 - DNA, 260 bp, Glycine max
  Clone ID: 700757692H1
ctcgagccgcttttttgttttgtttttttttctggatttgttttcttttcttgtttgaagttccttccttttagatctaagaccagcacagattcctgaaatcccagttagtttgactcaccctcgaccctagaactagttgcgtcagaagggtatcactcaaagctcaactttgccatagttctacctttttaatgccccacttgtttggaaagttggaacaatcatgccgcttcattctgcttcgctgtcatttggct

SEQ ID NO: 65554 - DNA, 269 bp, Glycine max
  Clone ID: 700757693H1
ggaagacgaaggtgagcagccacgtccattcccattcccacgcccacgccaacctcatcaagaggaagagcacgagcagaaggaggaacacgaatggcatcgcaaggaggaaaaacacggaggaaagggaagtgaagaggaacaagatgaacgtgaacacccacgcccacaccaacctcatcaaaaggaagaggaaaagcacgaatggcaacacaagcaggaaaagcaccaaggaaaggaaagtgaagaagaagaagaagaccaagacg

SEQ ID NO: 65555 - DNA, 266 bp, Glycine max
  Clone ID: 700757694H1
gttccactgcctacaaaaacaaatttggtggaaactcctaaggaatggcaactggatctaccttgtgacaaaattcctagtgtcttgactacaactgatgagagattggtaggcacagaacatgagggatatgatccttttcttggtggaattcaaaaatatgccactcccatgatgcccctagatgaagaaattctttctaaggttgcacaagatatggttgaggaatggttcgattgtgttgatgaggaggattcctttgagga

SEQ ID NO: 65556 - DNA, 268 bp, Glycine max
  Clone ID: 700757695H1
caagccccactcaaccaccacacctctcctcgttcacgctacccctttctgctcttcttctacctttcaagttttaaaagtataaagatggcagagacattcctatttacctcagagtcggtgaacgagggacaccctgacaagctctgcgaccaaatctccgatgctgtcctcgacgcttgcctcgagcaggacccagacagcaaagttgcctgcgaaacatgcaccaaaaccaacttggtcatggtcttcggagaaatcacgacca

SEQ ID NO: 65557 - DNA, 280 bp, Glycine max
  Clone ID: 700757701H1
ggttacaattgattggtttatttcctctcaggaatgtgttcccaggacctattgtgttttaaatccacaaaatccttttgtgttaaataggtggatggggaaactgactttcccccagggcacttcccgaagtgtcaaaagaatgcctctttctatagggggaggagctggtgcaaagaatgctattctcatgaatatgccaaatgctgttctttcaatgtggagatattttgttggagatctcgtctttgaagtttctaagatgacttctccctacatt

SEQ ID NO: 65558 - DNA, 290 bp, Glycine max
  Clone ID: 700757702H1
ttcggctcgagtaaaattcttccaccaagttatgggttcaccttgtgttgcttcttttctccctcttaggtctctcttctagttccagcatatcaactcatcgttccatattggaccttgacctaaccaagtttaccacacagaaacaggtgtcttcactgttccaactatggaagagtgagcatggacgtgtctaccataaccacgaagaagaggcaaagagacttgagattttcaagaataacttgaactatatcagggacatgaatgcaaacagaaaatcaccccat

SEQ ID NO: 65559 - DNA, 277 bp, Glycine max
  Clone ID: 700757705H1
gttgttttatggcatgaggaagcatgctgattgggttatttaattatttccaattcttggtgcgtgtgattgaaaatttgaaggttcgaaagacaatgtgataagacagatacaaaaacaggtgaaggagcttgcgttccctgctgggtctgcacaagatatcgagaatctaataaagaaccagagggaatcctattttgctgacgaacagcctttgcaaaaggaggaagggaagaaagggtcctttgtcttttgaatatgtatgcttaggagacta

SEQ ID NO: 65560 - DNA, 139 bp, Glycine max
  Clone ID: 700757708H1
caagctgagaattttgacctgcaaggccaacttgatctggtgtaggcgatcaagttggccttgcaggtcaaaattctcagctctgttcatcagggttcgctgaactatattggtttgcaggtgcaaccacaacatctgg

SEQ ID NO: 65561 - DNA, 283 bp, Glycine max
  Clone ID: 700757709H1
cacacaactactacaagtacttccttacaatcaaaaccaacaacaactatggcaagttatcaaaagcactacgatgatcagggtcgcaaggttgacgagtatggcaacgttgagaagcaaaccgacgaatacggcaaccctgttcatgctgctagtgtcacctatgtagccaccagaactgctgctggtggttacagtgatgacattaataagcaacatgataccaccaatgcctacggcgtagacactggtagacagcattctagtggtggctacgatggtg

SEQ ID NO: 65562 - DNA, 287 bp, Glycine max
  Clone ID: 700757710H1
ggggaagcccttcactctctctctttcttccctttgcttgctactcttgtcgagtgcatgctttgctattagctccagcaagctcaacgagtgccaactcaacaacctcaacgcgttggaacccgaccaccgcgttgagtccgaaggtggtttgattcaaacatggaactctcaacaccctgagctgaaatgcgccggtgtcactgtttccaaactcaccctcaaccgcaatggcctccacttgccatcttactcaccttatccccggatgatcatcatcgcccaag

SEQ ID NO: 65563 - DNA, 284 bp, Glycine max
  Clone ID: 700757711H1
aaataatttaagatactatgatgagagcacggttcccattactgttgctgggacttgttttcctggcttcagtttctgtctcatttggcattgcttactgggaaaaagagaaccccaaacacaacaagtgtctccagagttgcaatagcgagagagactcgtacaggaaccaagcatgccacgctcgttgcaacctccttaaggtggagaaagaagaatgtgaagaaggtgaaattccacgaccacgaccacgaacacaacacccggagagggaacctcagcaa

SEQ ID NO: 65564 - DNA, 269 bp, Glycine max
  Clone ID: 700757712H1
ctcgagccgttttccaaacaagattgtttttgatgataaacttgtgctggctaacacacaagaattctttgctggaaattttccagtggattcttggttaccaatttttgtgaattgtctttatcctgtaagtcaattaccttcagaagctgtcgttgtaaatgttacatgtggtagtggacgtggtggtttacctaccactgcttggattagttctgcagttaacaatcgctcctcagatatcaacaaaaagattcgcacagcacttg

SEQ ID NO: 65565 - DNA, 287 bp, Glycine max
  unsure (1)..(287): unsure at all n locations
  Clone ID: 700757713H1
gaaaagtgttcctacattggttggcattgaatgtcccaaggatgaaaaacttcctcgtcgcaaagtttttgataaacctaagacgcgctgcttcactattctccctatggagtttaatcttgtggttcgtcagaagtttttaaattttgtgaggttcattatgaagaaaagggacaagcttagttgtcaagttggaatcaacgcatattctatggaatggactnggtttggcaatagattactgagtaagggaacgatattctgtgttgcgattatgctagttttga

SEQ ID NO: 65566 - DNA, 257 bp, Glycine max
  Clone ID: 700757714H1
ttgatagtttcgcaagtcctgactgcaacatagttggtgcaatgcttttggttgatacttatcataccaatcctgaaaatgcagttcgtagtatttttgttgcgcctttcagaggcggaaggcccattcgggtggttacatttccgaataccattgtgcagattgaaccagacatgaattcaaagtttcagcttttgagtacactacccatgggtgatttgttcaaggaaaagatctcgcaatgggtaaagttaatg

SEQ ID NO: 65567 - DNA, 241 bp, Glycine max
  Clone ID: 700757715H1
gaaattttgataaaccgcgatcacaggttgccgcaccttaaaaccggaaacaaaagcaatcgttacttgatttcaagaatctctcaatttcttcctacttctttgtgtacgatttcttaagggaaagaaaatcactctctgtgctggccacagacttcgtgaatcattttcctttccactcttagtttattccctgaacactctcctatatgatataggactcgtgtcagattaaacttct

SEQ ID NO: 65568 - DNA, 288 bp, Glycine max
  unsure (1)..(288): unsure at all n locations
  Clone ID: 700757716H1
aagaaagtcttccatagccccccaaaaatgaagagcaccatcttctttgctctctttctcttttgtgccttcaccacctcatacctaccttcagccatcgctgatttcgtgctcgataatgaaggtaaccctcttgaaaatggtggcacatattatatcttgtcagacataacagcatttggtggaataagagcagccccaacgggaaatganagatgccctctcactgtggtgcaatctcgcaatgagctcgacaaaagggattggaacaatcatctcgtccccata

SEQ ID NO: 65569 - DNA, 277 bp, Glycine max
  Clone ID: 700757717H1
cagccatcatggagcgtgaggactgctttagttgcattgattgcattcatgcctaccaacccaaatggtgcattgggatcgttagactacaagaaagaagagaggcgtacactggcagttaaatctcgtgaagctcctcctaaattcgggactcctgaacgtcaaaagctgatcgatgagatacacgagtacatggtaagcaaggcacctcctgttcctcaacctagcgccagtgaggcttctgaagagaaccccagaaatgaagaggctgagacac

SEQ ID NO: 65570 - DNA, 277 bp, Glycine max
  Clone ID: 700757718H1
ctaagttctctctcacttacaaccctgatgagactctctctacaagaattatcaatggaggtggcaaaaacccaacattcaatgaaaaattgaggatgaagatcacccaaatagatgctgttctgaaatgtgaagtttggatgtttagtaggtcaaggattcacatggaagaccagcttttggggtttgctttagtcccaattgcacaagttgttggcaaaggaaaggtgactgaagattacagcctttcctccactgatcttttccactctcctgc

SEQ ID NO: 65571 - DNA, 273 bp, Glycine max
  Clone ID: 700757720H1
tttccttattgacaatcccaaacagtctacagtttttgatattctcttgggaatttctcaagattttgaaattgctggtaatactcttatgccagctttttctgttccacaggctactgccagatcttctgaaaatgcggaatcctctgcatgatctggaatatgtgttttctttcgtttgttcgtttgtttaattcaataaaggaaattagacatgaccctcttgttgagtatgctctgtctatttgaaaatttccacacctcttttaattg

SEQ ID NO: 65572 - DNA, 274 bp, Glycine max
  Clone ID: 700757721H1
gcagtcaaaaggagtgattgggcctcattggtacaagtgtttttaacaaacagcaacagtacagagcattttgatgcatgtaagtggacaaaatcggaaccacattcctgggaattgatcttcccaatagaggtatgcggtcctaataatggttttgaaatgtggagttctgagtgggcaaatcaaactacatggcatttgagtttccttattgacaatcccaaacagtctacagtttttgacattctcttgggaatttctcaagattttgaaa

SEQ ID NO: 65573 - DNA, 273 bp, Glycine max
  Clone ID: 700757722H1
tctcagtgttgttcaccctatttataaactccttcaccctcactatcgtgacaccatgaacataaatggccttgctcggttatcactggtcaacgacggtggcgttatagaacaaacatttttgtggggaaggtattctgtggaaatgtctgctgtagtttacaaggattgggtttttacagatcaagcattgcctgctgatcttataaaaagaggaatggcaattgaggatccatcgtgccctcatggcattcgccttgtgatagaggacta

SEQ ID NO: 65574 - DNA, 276 bp, Glycine max
  Clone ID: 700757723H1
aatttttgaagcgtaccggatttcactgtgatatcatttgtgtcactggatggactgccaccccaatgcaggatgttcaggttacaattgattggtttatttcctctcaggaatgtgttcccaggacttattgtgttttaaatccacaaaatccttttgtgttaaataggtggatggggaaactgactttcccccagggcacttcccgaaatgttaagagaatgcctctttctatagggggaggagctggtgcaaagaatgctattctcatgaata

SEQ ID NO: 65575 - DNA, 280 bp, Glycine max
  unsure (1)..(280): unsure at all n locations
  Clone ID: 700757725H1
caattcaattcaatctgcctcgatcatggagaggaaaacatttgggtttttgttcttgctcctccttgtcttagcttctgatgtgacggtgaagagagcagaggcgaaagattgcttgacaaggaggcacgggttccagggtagatgcttattcgacaggcaatgtgcacatgtgtgcaggagcgatggtttcatcggtggtcagtgccgaggccctcttcgcaaatgcttttgcagcaggccatgttgatcgaaattactactgccnaagaggccatga

SEQ ID NO: 65576 - DNA, 168 bp, Glycine max
  Clone ID: 700757727H1
agagaatgtcgtcgacggtgctggaggtgacgcgggcggcacacgaggaagtggagcggttggagcggctgatagtgaaggagctccagaatgaccctgcctccaacaaagagcgcttgtatcagagtcaccgtgtgcgaaacatgatcgacaccattacttccacac

SEQ ID NO: 65577 - DNA, 182 bp, Glycine max
  unsure (1)..(182): unsure at all n locations
  Clone ID: 700757729H1
gcggtttcctttgttggtgttgctgggaactgttttcctggcatcagtttgtgactcattaaaggtgagagaggatgagaataaccctttctacttgagaagctctaacagcttccaaactctctttgagaaccaaaacggtcgcattcgtctcctccagagnagccacaaacgctccccac

SEQ ID NO: 65578 - DNA, 180 bp, Glycine max
  Clone ID: 700757730H1
gtgcggtttcctttgttggtgttgctgggaactgttttcctggcatcagtttgtgtctcattaaaggtgagagaggatgagaataaccctttctacttgagaagctctaacagcttccaaactctctttgagaaccaaaacggtcgcattcgtctcctccagagattcaacaaacgctcc

SEQ ID NO: 65579 - DNA, 253 bp, Glycine max
  Clone ID: 700757731H1
gcaggttatcttggtcttttcaacgaaaacgagtctggtgatcaagtcgtcgctgttgagtttgacactttccggaactcttgggatccaccaaatccacacatcggaattaacgtcaattctatcagatccatcaaaacgacgtcttgatggatctgatagaattgacgttaattctatcagatccatcaaaacgacgtcttgggatttcggccaacaataaagtagcccaggttctccatacctatgatgc

SEQ ID NO: 65580 - DNA, 273 bp, Glycine max
  Clone ID: 700757733H1
gcaaaatgaccaagttcacaatcctcctcatctctcttctcttctgcatcgcccacacttgcagcgcctccaaatggcagcaccagcaagatagctgccgcaagcagctccagggggtgaacctcacgccctgcgagaagcacatcatggagaagatccaaggccgcggcgatgacgatgatgatgatgacgacgacaatcacattctcaggaccatgcggggaagaatcaactacataaggaggaacgaaggaaaagacgaagacgaagaag

SEQ ID NO: 65581 - DNA, 120 bp, Glycine max
  Clone ID: 700757734H1
cttaattattaacacttccttagttcaatatggggaagcccttcactctctctctttcttccctttgcttgctactcgtgtcgagtgcatgctttgctattagctccagcaagctcaacg

SEQ ID NO: 65582 - DNA, 272 bp, Glycine max
  Clone ID: 700757735H1
ctcagtcatcaggtgggaagtttgataataattataactcaagctcttgggatgattgggaccaggaagatacaaggaagaaagaaccagctaaagggtcagctgcccatagcagtgatggttggactggatgggataatgccaaagatgatggatttgatgatatctatgggagtgcatctaataataaaggtggcgctcataatgacaagtcaggtgctgcctggacaggaggaggctttctctaaggttttgacctgatctctatcagc

SEQ ID NO: 65583 - DNA, 131 bp, Glycine max
  Clone ID: 700757736H1
gagaaaatggattgagaattctctctcttttctctttctcttcccaactttccttccttgggatcattctgcttctttgctatggaagactcagattcagttgctacgctgatagattccacacaacatag

SEQ ID NO: 65584 - DNA, 272 bp, Glycine max
  Clone ID: 700757737H1
aatggtgttctcactgttgccatttgattctagcaagcagagcttttgtcaattttctattgaccttctcggtggaggaattttagtggacaaaactggagattggatcacacttatacaaaattctccaattagtaacttgttgagagttgctgcttggaagaaaggctgtttaatggttaaaattgtgatgtctgggaatgcagcagtcaaaaggagtgattgggcctcattggtacaagtgtttttaacaaacagcaacagtacagagc

SEQ ID NO: 65585 - DNA, 255 bp, Glycine max
  Clone ID: 700757738H1
ggaatggaatagacacagtagtgaactgccaagggaatgcagtgttcgacggtgagctacggaggggacaattgctaatagtgccgcagagctttgtggtggctgagcaaggcggagaactaggattggaatacgtagtgttcaagacacaccacaacgccgtgagtagctacattaaggatgtgtgtagggcaatcccttcggacgttctttacaattcttacaagcttggccagagtcaagtgcgtcactcaa

SEQ ID NO: 65586 - DNA, 277 bp, Glycine max
  Clone ID: 700757739H1
ctctccattggtccttaaacactcatcagtcatcaccatggccaagctagttttttccctttgttttctgcttttcagtggctgctgcttcgctttcagttccagagagcagcctcagcaaaacgagtgccagatccaaaaactcaatgccctcaaaccggataaccgtatagagtcagaaggagggcacattgagacatggaaccctaacaacaagccattccagtgtgccggtgttgccctctctcgctgcaccctcaaccgcaacgcccttcgt

SEQ ID NO: 65587 - DNA, 143 bp, Glycine max
  Clone ID: 700757742H1
gcaagttgagcagaggaaaaacaagcgaaaagagaaagaaaagaagaaaaaatggtgggagaagaagtagtaccaatggacgacaaagcgaagaggatgcgagatctgctatcgagtttctactcccctgacccttccatata

SEQ ID NO: 65588 - DNA, 280 bp, Glycine max
  unsure (1)..(280): unsure at all n locations
  Clone ID: 700757743H1
gaagttggcgagatacgcactatcatggtggacaatattgagaaaatattggagagaggtgaccggattgagcttcttgttgataagacagcaacaatgcaagacagtgcatttcactttagaaaacagtcaaagcgccttcgaagagctctttggatgaaaaactttaaactcctggccttattgacatgcttcattgttattgttctttatttaataatcgctgcttgttgtggaggcactctctaccgtcctgcagatcctanattgtcactccggc

SEQ ID NO: 65589 - DNA, 253 bp, Glycine max
  Clone ID: 700757744H1
agtataccttaataaataatttaagatactatgatgagagcacggttcccattactgttgctgggacttgttttcctggcttcagtttctgtctcatttggcattgcttactgggaaaaagagaaccccaaacacaacaagtgtctccagagttgcaatagcgagagagactcgtacaggaaccaagcatgccacgctcgttgcaacctccttaaggtggagaaagaagaatgtgaagaaggtgaaattccac

SEQ ID NO: 65590 - DNA, 261 bp, Glycine max
  Clone ID: 700757745H1
gaaattttgataaaccgcgatcacaggttgccgcaccttaaaaccggaaacaaaagcaatcgttacttgttctcaagaatcttcaaactttcttctgttttctctgcactcggttcttcaggaaaagaaaatcactctctgtattgattacagacttcgtgaatcattttcttttcaactttcagttcacttgctgaacactctcctataaatatataggactacgtgtcagatttgaactttccctgctctttctcggtt

SEQ ID NO: 65591 - DNA, 276 bp, Glycine max
  Clone ID: 700757746H1
cggctcgagctttgttcactcttcttctcttgcggctagggttttagcgcacttcttctagatataaggaagatgggtaaggaaaaggttcacatcagtattgtggtcattggccatgtcgactctgggaaatccactaccactggtcacctgatttacaagcttggaggcattgacaagcgtgttattgagaggtttgagaaggaagctgctgagatgaacaagaggtctttcaagtatgcctgggtgctggacaaacttaaggctgagcgtgaa

SEQ ID NO: 65592 - DNA, 276 bp, Glycine max
  Clone ID: 700757747H1
gtgtgcagcagggagctctgccgcctccaacaaaacagagttcagaacacaaaccctcgaaccgaacgtttttgagggtcagtctctccttcttcattcacataatcgcttcttattttctctcagctttcaattgggatctcaaattatgtagctccacggaatgtatcctgttttactcttatagtccctttatctaaatttctgtggcaacaaggttgatagagcacgatggttcagtacatttttagaagattacgtggtgccaatgggaag

SEQ ID NO: 65593 - DNA, 275 bp, Glycine max
  Clone ID: 700757748H1
ctgcattggagtggcagtccatccagtgacacaaatgatatcacaatgaaatccggtacgcttcagaaattccaaactccacgcatcataacacgtgtttggattaaatgacatagtcattgcttttgtgcaagcaggattccataattcacagtcttgagagcagatggtgtaaatatcagaactggcacgccccctaaaagaactattcatagcacaggccaatgatatacctgtattctcaggaataccaactgtgagcaccattttaatca

SEQ ID NO: 65594 - DNA, 270 bp, Glycine max
  Clone ID: 700757749H1
ctcgagccgctcgagccgattcggctcgaggatagttcagtgtctacaataccaggtgattatgtcattgaggttaagttgacaaccataaacaatatgtgtgcatatgggctcaatcctggtatttcaggttctcgtcttttgggcaccattcctcagtccatttcacagcaaactgtttggaatcaaatggcaacagtgagaacaccattgaattttgattctagcaagcagagcttttgtcaattctctattgatcttcttggtgga

SEQ ID NO: 65595 - DNA, 270 bp, Glycine max
  unsure (1)..(270): unsure at all n locations
  Clone ID: 700757750H1
gcagctgaagacgctggtggggagggagctgacaatgggctctcaccatggccactcgaaggagtttctggacctcatcaagtccatcggcgaggcccgctccaaggccgaggaggaccgcatcgtcctccgtgagatcgaaaccctaaaacgcctcctcaacgacgccgacactccanaacgcaagatcacggagtacatcatccgcctcctctacgtcgagatgctcggccacgacgcgtcgttcggctacatccacgccgtgaagat

SEQ ID NO: 65596 - DNA, 265 bp, Glycine max
  Clone ID: 700757751H1
cttattaacactttccttagttcaatatggggaagcccttcttcactctctctctttcttccctttgcttgctactcttgtcgagtgcatgctttgctattacctccagcaagttcaacgagtctccaactcaacaacctcaacgcgttggaacccgaccaccgcgttgagtccgaaggtggtcttattgaaacatggaactctcaacaccctgagctgcactgcgccggtgtcactgtttccaaacgcaccctgattcgcaacg

SEQ ID NO: 65597 - DNA, 152 bp, Glycine max
  unsure (1)..(152): unsure at all n locations
  Clone ID: 700757752H1
atactagtcaaataaccaaataacacctaaaacgaanttagaagggatnantgtagatgaggaaattaaaaataagatattattcctantagatcatcatgacncaatcatgccatctttgacgcgaataaatgcaacctccacactacata

SEQ ID NO: 65598 - DNA, 90 bp, Glycine max
  Clone ID: 700757753H1
aaaacaaaaacataaaaagaaaataccgccagtttaaaaaccccaaaaaattttcccaaaggggaaccaagggggccaaatttttaaagg

SEQ ID NO: 65599 - DNA, 271 bp, Glycine max
  Clone ID: 700757754H1
ggatatgcttcattgataccatatgttgagccagttgtgcaagctcaaagtgctgaagtttactttgacttcttccctgtggaggttgatagtcaagagggagttgctcacattggtgaattgaaatctggtgtctatgttccactgcctacaaaaactaatttggtggaaactcccaaggaatggcaactggatctaccttgtgacaaaattcctagtgtcttgaccacaactgatgagagattggtaggcacagaacatgagggatatg

SEQ ID NO: 65600 - DNA, 274 bp, Glycine max
  Clone ID: 700757755H1
ctatttataaactccttcaccctcactatcgtgacaccatgaacatgtatggccttgctcggttatcactggtcaacgacggtggcgttatagaacaaacatttttgtggggaaggtattctgtggaaatgtctgctgtagtttacaaggattgggtttttacagatcaagcattgcctgctgatcttataaaaagaggaatggcaattgaggatccatcgtgccctcatggcattcgccttgtgatagaggactacccttatgctgttgatgg

SEQ ID NO: 65601 - DNA, 291 bp, Glycine max
  Clone ID: 700757756H1
aagctcggttttcggctctaggcaaatgtttgcttcattaattttctctggagacaacaggctcactgagaaaacaatctttacttgtagagatttggacatcttggttgtctattatacaatagcaactcaatttagaaaatttctaccacattacattaggtgatttctgtatacctttttgatctacattctcccatcttttctcactgctgaaattaaatataagcgttatctgagtaatattcatatttccggcttatgttacgacggcagatacaaattctggac

SEQ ID NO: 65602 - DNA, 276 bp, Glycine max
  unsure (1)..(276): unsure at all n locations
  Clone ID: 700757757H1
gttagattaccatgatatcttcatgccatatgtgaggcagataaatcagctgaattctgccaagacttatgcgacaaggactatcctttttttgagagaagatggaactttaaagccagtggccatcgaattaagtttgccacattctgctggggatctgtcagctgccgtcagtcaagtcgtcttacctgctaaggaaggtgttgagagcacaatttggctactagccanagcttatgtcatcgtaaatgactcttgctaccatcaactcatgag

SEQ ID NO: 65603 - DNA, 188 bp, Glycine max
  Clone ID: 700757758H1
taagatttgaaattttgatataccgcgatcacaggttgccgctccttaaaaccggaaacaaaagcaatcgttacttgatttcaagaatttctcaatttctttctacttctttgtgtacgatttcttaagggaaagaaaatcactctctgtgctggccacagacttcgtgaatcattttcttttccaca

SEQ ID NO: 65604 - DNA, 267 bp, Glycine max
  unsure (1)..(267): unsure at all n locations
  Clone ID: 700757759H1
caatatcctagtataccttaataaataatttaagatactatgatgagagcacggttcccattactgttgctggtacttgtnttcctggcttcagtttctgtctcatttggcattgcttactgggaaaaagagaaccccaaacacaacaagtgtcttcagagttgcaatagcgtaagagactcgtacaggaaccaagcatgccacgctcgttgcaacctccttaaggtggagaaagaagaatgtgaagaaggtgaaattccacgcaac

SEQ ID NO: 65605 - DNA, 263 bp, Glycine max
  Clone ID: 700757760H1
tcttgactcacaaaggaagggaaagtgtgttgtgctaaagacttctactcgacagacaatctttctacctgttgttgggcttgttgaccctgacaagttaaaacccggtgatctggttggtgttaacaaggatagttacttaatcttggataccctgccttccgagtatgattctagagttaaggccatggaagttgatgaaaagccaacagaggattacaatgacattggcggattagagaagcagattcaagaattagttg

SEQ ID NO: 65606 - DNA, 251 bp, Glycine max
  Clone ID: 700757762H1
gttctggctagtggttacaatggtggacaggggagagcacactttggtgatcggttacagaaccgtggttcagctcgggcatttcctgtttggcttgaaactggtgatgcagttgcaaatatgtattcagagttgcgggaagaggctcgtgatcatgcatgcttacgtaatgcatattttgagcaggtttacagcctatcttattggtataaagccctagcaaaggactaagtgctaaagggcactgcaca

SEQ ID NO: 65607 - DNA, 276 bp, Glycine max
  Clone ID: 700757763H1
gtctttaccaagtggaatatgcaatggaggctattggtaacgctggtaccgcaatagggatcttatcaaaagatggggttgtgctggttggtgaaaagaaagtcacatccaagctgctccaaacttcaacttccaccgagaaaatgtacaagattgacgatcatgttgcatgtgctgtggctgggataatgtctgatgcgaacatcctaatcaataccgctagggtccaagcacaacgctacacatacgcctatcaagagcccatgccagttgagc

SEQ ID NO: 65608 - DNA, 67 bp, Glycine max
  Clone ID: 700757764H1
agactatatggaaaggattcctccttgcaaatctcaagggtttcctcaagtgcttttaatgcaaaat

SEQ ID NO: 65609 - DNA, 269 bp, Glycine max
  Clone ID: 700757765H1
acgctttccatggcttggtcggcgaggacgaggacgaagatgaagataaacctcgtcctagtcgaccaagccaaggaaagcgtgaacaagaccaggaccaggacgaggacgaagatgaagatgaagatcaacctcgcaagagacgcgaatggagatcgaaaaagacacaacccagaagacctagacaagaagaaccacgtgaaagaggatgcgagacaagaaacggggttgaggaaaatatctgcaccttgaagcttcacgagaacatt

SEQ ID NO: 65610 - DNA, 267 bp, Glycine max
  Clone ID: 700757766H1
attttgagtaccactaccaatggtgattttgttcaaggaaaagatctcgaaatggttaaagttaatgtagcatgtgctgctgttggcttgacatcaagttacaatccaactccatagttggaatctggtttgcaaaaagacagagggttaattgtggaatattttggaaggatgtcttacgttgctcataacgttaatcagccccaagagaaagatttgttggagggaaattttcctttgatataaaatctagctctagattggaaa

SEQ ID NO: 65611 - DNA, 263 bp, Glycine max
  Clone ID: 700757767H1
tttccttagttcaatatggggaagcccttcttctctctctctctttcttccctttgcttgctactcttgtcgagtgcatgctttgctattacctccagcaagttcaacgagtgccaactcaacaacctcaacgcgttggaacccgaccaccgcgttgagtccgaagtggtcttattgaaacatggaactctcaacaccctgagctgcaatgcgcgggtgtcactgtttccaaacgcaccctcaaccccaacggcctccacttg

SEQ ID NO: 65612 - DNA, 269 bp, Glycine max
  Clone ID: 700757768H1
aaccacctctccgttctcctctcccccaaaattcaaattccaaatatctaagattctctaaaatcccttccccgtcgccacatcgcatgaacccttgaattccgattcggataggcatgtccggagcggccttgtcgccgccgacgaattcgaagtcgctgacgcagacggtgagcgggtcgcacaagttcgtgatcgagggctattcgctggcgaaggggatgggagtggggaagcacattgcaagcgacgtgttcattgtcggaggt

SEQ ID NO: 65613 - DNA, 267 bp, Glycine max
  Clone ID: 700757769H1
gttcaatatcctagtacaccgtattaaagaatttaagatatactatgatgcgagcgcggttcccattactgttgctgggagttgttttcctggcatctgtttctgtctcatttggcattgcgtattgggaaaagcagaaccccagtcacaacaagtgcatccgaagttgccctagcgagaaagactcctacaggaaccaagcatgccacgctcgttgcaacctccttaaggtggaggaagaagaagaatgcgaagaaggtcaaattc

SEQ ID NO: 65614 - DNA, 270 bp, Glycine max
  Clone ID: 700757770H1
tctcgagccgattcggctcgagggatggactgccactccaatgcaggctgttcaggttacaaatgattggtttatttcctctcaggaatgtgttcccaggacctattgtgttttaaatccacaaaatccttttgtgttaaataggtggatggggaaactgactttcccccagggcacttcccgaagtgtcaaaagaatgcctctttctatagggggaggagctggtgcaaagaatgctattctcatgaatatgccaaatgctgttctttc

SEQ ID NO: 65615 - DNA, 259 bp, Glycine max
  Clone ID: 700757771H1
cttgggaatttctcaagattttgagattgctggtaatactcttatgccagctttttctgttccacaggctactgccagatcttctgaaaatgcggaatcctctgcatgatctggaatttgtgttttcttttgcttgttcgtttgtttaattcaataaaggaaattaggcatgaccctcttgttgagtatgctctgcctatttgaaaatttccacacctcttttaattatcgtaatgatgtgtgaagtgtgtgttatttt

SEQ ID NO: 65616 - DNA, 271 bp, Glycine max
  Clone ID: 700757772H1
tgctgttctttcaatgtggagatattttgttggagatctcgtctttgaagtttctaagatgacttctccctacattaaatgtacagtctctttcttcatagcatttggaaatttggctgatgacaccatcaattttgaggcttttccccacaagctggtacagtttggagagattcaggaaaaagttgtattgaaattttcacaagaggaatttcttacagcttggtcaacccaggtgcgtcctgcaacaactctgttggctgatgggtgt

SEQ ID NO: 65617 - DNA, 276 bp, Glycine max
  Clone ID: 700757773H1
cttaattattaacacttccttagttcaatatggggaagcccttcactctctctctttcttccctttgcttgctactcttgtcgagtgcatgctttgctattagctccagcaagctcaacgagtgccaactcaacaacctcaacgcgttggaacccgaccaccgcgttgagtccgaaggtggtttgattcaaacatggaactctcaacaccctgagctgaaatgcgccggtgtcactgtttccaaactcaccctcaaccgcaatggcctccacttgc

SEQ ID NO: 65618 - DNA, 277 bp, Glycine max
  Clone ID: 700757774H1
aatttgttagtggaaaaaccttcaaatatgatataattggtagctggttcacattcttcagatgattttcctgaaaaggaagatcaagaaaaacccaaaaagattgatgccagattgagacaaagaatagatcctcaatacaatgaggttcaggctcagatggaaacaaatttgtttaaattgtctcttgatgatgttgaaactcctaaaggttccatgttggatcttaaaatttctcagtctaaaattgcacttcccaagaacacagttggaggaa

SEQ ID NO: 65619 - DNA, 274 bp, Glycine max
  Clone ID: 700757775H1
cttcttccctgtggaggttgatagtcaagagggagttgctcacattaggtgaattgaaatctggtgtctatgttccactgcctacaaaaactaatttggtggaaactcccaaggaatggcaactggatctaccttgtgacaaaattcctagtgtcttgaccacaactgatgagagattggtaggcacagaacatgagggatatgatccttttcttggtggaattcaaaaatatgccactcccatgatgcccctagatgaagaaattctttctaa

SEQ ID NO: 65620 - DNA, 273 bp, Glycine max
  Clone ID: 700757776H1
gtgaaaatcatgcccgtcctgttcttggaggaaatgacacctttccttatcctcgtagggggagaactggtagaaaaccaacaaggaaagatcctaatagtgagagtaggagcaatgatgtttatcttccaagagatgaggcttttggacacttgaagtcatctgactttcttacttatggactaaaatccgtatctcaaaatgttcttccattattgcaatctgcttttgatttgaatttcacaccccgtgagtttgatagctttgatgaag

SEQ ID NO: 65621 - DNA, 272 bp, Glycine max
  Clone ID: 700757777H1
cagtatggatcactccgcaagaatgctatgttcgtgccacactacaccctgaacgcgaacagcataatatacgcattgaatgggcgggcattggtacaagtggtgaattgcaatggtgagagagtgtttgatggagagctgcaagagggaggggtgctgatcgttccacaaaactttgcggtggctccaaaatcccagagcgataactttgagtatgtgtcattcaagaccatgatagaccccgatcggaaacttgcaggggcaactcatgt

SEQ ID NO: 65622 - DNA, 272 bp, Glycine max
  Clone ID: 700757778H1
aatggcttcaaccgacaagtcaccggacccaacgccggcgaagggtccggatccaactccggggaagccgatgagtgttggtcagcacgtgatcgacaagagtgcaatgatggtgcagtcgctggaccccattgagcagatgagtcagcacgtgtgctccttcgctatctacagccatgacatgtctcgccagatagagacacatcactactgctccagactccaccagaacttcatacaatgtgctgtctatgattccgatgaatccaaag

SEQ ID NO: 65623 - DNA, 132 bp, Glycine max
  Clone ID: 700757779H1
gagaactgtaagagtctcaaatatctggttgatgagtgcccttttttttttttttaaaattaaaacaacctattggccaatagaaaggcgcttattttaggggagaaaatttttacatacaagttcaaaatt

SEQ ID NO: 65624 - DNA, 277 bp, Glycine max
  Clone ID: 700757780H1
gtttgttgttcctcactgacctcaccatggcgaccagagccaagctttctttagctatcttccttttctttcttttagccttgatttcaaacctagccttgggcaaacttaaagaaaccgaggtcgaagaagatcccgagctcgtaacatgcaaacaccagtgccaacagcaacggcaatacactgagagtgacaagcgaacatgcttgcaacaatgtgacagtatgaagcaagagcgagagaaacaagtcggagaggaaactcgcgagaaggaaga

SEQ ID NO: 65625 - DNA, 264 bp, Glycine max
  Clone ID: 700757782H1
caaaccttgctctatactacacagtacacacactagaagaataatggcttccatcctccactactttttagccctctctctttcttgctcttttcttttcttcttatccgactcagtcacccctacaaaaccaataaaccttgttgttctacccgttcaaaatgatggttccacagggctccattgggccaacctccaaaaaagaacccctctaatgcaagtaccagtcctggtggacctcaatggaaatcacttgtgggttaa

SEQ ID NO: 65626 - DNA, 264 bp, Glycine max
  Clone ID: 700757783H1
ccttgcttatgagtacttgtctaatggctccttggataaatggatattcaagaaaaacaaaggtgagtttctgttggattgggatactaggttcaatatagctctgggaacagcataaggacttgcttaccttcatgaagattgcgactctaagattgttcattgtgacatcaagccggaaaacgtgcttctggatgaccacttcatggccaaggtttcggatttcggactggctaagctcatgaaccgagaacaaagccatgt

SEQ ID NO: 65627 - DNA, 265 bp, Glycine max
  Clone ID: 700757785H1
gaaaagggacaagcttagttgtcaagttggaatcaacccatattctatggaatggactggtttggccaatagattactgagtaagggcaacgatattctgtgttgcgattatgctagttttgatggtttgattaccaagcaagttatgagcaagatggcagaaatgatcaacagtctttgtggtggtgatgaaaaactgatgcgtgaaaggacacacctgctgttggcttgttgttcaaggatggcaatttgtaagaaagatgtt

SEQ ID NO: 65628 - DNA, 265 bp, Glycine max
  Clone ID: 700757787H1
atgaaattgaaaggaagacaaaacacaagacagagtcattcagcaaggcttgaaacgagaagcgaggatgcccatcagatgtattctgcattggcaaccgaaccaaggaagcgttgtgaacagccaagtcctgaatgagatctcgcagtgcgtcgaaagccttaacggcgtcaaagaaggaagatgcaaagcctccctcactttctacagacccaatttacgagaccaatcggtgaccatcgattttcctcgcgattttctgggg

SEQ ID NO: 65629 - DNA, 273 bp, Glycine max
  Clone ID: 700757789H1
gtcctagtcgaccaagccaaggaaagcgtgaacaagaccaggaccaggacgaggacgaagatgaagatgaagatcaacctcgcaagagccgcgaatggagatcgaaaaagacacaacccagaagacctagacaagaagaaccacgtgaaagaggatgcgagacaagaaacggggttgaggaaaatatctgcaccttgaagcttcacgagaacattgctcgcccttcacgcgctgacttctacaaccctaaagctggtcgcattagtaccctca

SEQ ID NO: 65630 - DNA, 274 bp, Glycine max
  Clone ID: 700757790H1
ggagcaagtcattgccgtgtttgacctcaaaaatcaaaaacacgacacaaaattctcggcaacgcaactcacgctgccctcaacaacacaaaaaaactcagatttcattctcctttatgctcctctctcaccatttttccgttaaaaagattattattctgatcgctcaaagagatgcgaggaactaatgtaaatgatggaagagctgataacaacaacactttagatactataaacgctgctgcttttgccatagcctctgcccagaaccgcg

SEQ ID NO: 65631 - DNA, 272 bp, Glycine max
  Clone ID: 700757791H1
ctccattgtctttgaacactcatcaccatggccaagcttgttctttccctttgtttccttcttttcagtggctgcttcgctctgagagagcaggcacagcaaaatgagtgccagatccaaaagctgaatgccctcaaaccggataaccgtatagagtcggaaggtgggttcattgagacctggaaccctaacaacaagccattccagtgtgccggtgttgccctctctcgctgcacccttaaccgcaatgcccttcgtagaccttcctacac

SEQ ID NO: 65632 - DNA, 274 bp, Glycine max
  Clone ID: 700757792H1
cccaactaacaataattccttcacttgcagaacttagttctctgttgcatcatcatcatcttcattagtgttagccctaaacttcaccttcaaccatgaccacagtgccaccacacagtgtccaagtgcacacaacaacacaccgctacgaagccggcgtcgtcccgccggctcgttttgaggcgccgcgttacgaagccggcatcaaggcgccctcttccatttaccattccgagagaggtccgacgacctctcaggttctcgcagttgtcgc

SEQ ID NO: 65633 - DNA, 235 bp, Glycine max
  Clone ID: 700757793H1
ggggatagggatagggatagggatggagaaagtgaaggtagcttcggcgactcctcgagacaccaggggttcaccaggggccagcctgtttcgacgctctgggtgcgaactcatagaatccgctggcttcccctactgcatcaccagtggcttctccatcgccgcttccaggttggctcctgccgacaccgggttcatctcctacggcgaaatgctggagcaggccaactcatca

SEQ ID NO: 65634 - DNA, 267 bp, Glycine max
  Clone ID: 700757794H1
cacgaattaacgatggcgtcttcaatcgaaaagctcctagaaagtggtcgtcccttccttcgcggtgatctggagtccatcgacaagaacttacctcggctggttggcgtcctgcagagtgtgggtgccggggagtgctggcacaaacacggcagcttccttccacacctcgtcgacatatttcgaatctccagctctggaaagccctcactctgtctgcctctgtgggctcttccatcagctactcaaatcctacgttaactcgcc

SEQ ID NO: 65635 - DNA, 265 bp, Glycine max
  Clone ID: 700757795H1
gaatatcgttcctcaattcgggtcgctccgaacacccattcgggtcggaaacccttccgggttgagcttccttcggaagaggaataacggctttgtttgcttcgccgtcgatgacgagctcagacagaagcagcaggacttgaggtactaccgcaactgggctgggctccgcacttgaagaaagggccggaaacacagatcttttgagagtaaactgaagaaacgcaggggaatttaggcaagatggtgaaccaggtctatctac

SEQ ID NO: 65636 - DNA, 271 bp, Glycine max
  Clone ID: 700757796H1
ccttcaaacttaattattaacacttccttagttcaatatggggaagcccttcactctctctctttcttccctttgcttgctactcttgtcgagtgcatgctttgctattagctccagcaagctcaacgagtgccaactcaacaacctcaacgcgttggaacccgaccaccgcgttgagtccgaagtggtttgattcaaacatggaactctcaacacactgagctgaaatgcgccggtgtcactgtttccaaactcaccctcaaccgcaatg

SEQ ID NO: 65637 - DNA, 225 bp, Glycine max
  Clone ID: 700757801H1
gagatggtgaacggagtcttcgacagataggagagtctcttattccccttcgagttgccgagcgaggagcgtggtcgtcgcgctgttgcgtgagaagcagtgtggaggtggctgataacggggaatgtatttagctttgagagtctttaaattttctgtatttgttgtaatgttagtagttccttaaattggccatatggagtctatgtgcttgtaaatgcaggg

SEQ ID NO: 65638 - DNA, 248 bp, Glycine max
  Clone ID: 700757802H1
ctgatgtgcctaccatagcacagattgaagagttccattcgatgcagaggatgatgaatgctcctgattcaaatgataatattgatctactgttgagcattgatttgttgggtttacaaggagcaggtaaagcttttccaaacaagattgtttttgatgataagcttgtgttggctaacacacaagaattctttgatggaaattttccagtggattcttggttaccaatttttgtgaattgtctttat

SEQ ID NO: 65639 - DNA, 261 bp, Glycine max
  unsure (1)..(261): unsure at all n locations
  Clone ID: 700757803H1
aaacatgacagnaactttctcttctgcttctcctacttcgtgcatttgatctcctcagtctccttcttctcctctgagtctcgttctttcgttttcgtttcttctcgcgggtttttgtgaagccaaagcgtgcaagatactcagaatccgagagaccgattttgtattatttgctgtgaattgcttcgtggggagtgtggaaataaaaggaggaaaaaaaattcattaatattcatattcattcgaattaattgcattaat

SEQ ID NO: 65640 - DNA, 276 bp, Glycine max
  Clone ID: 700757804H1
atgggatgaagcatgggatgtgacatcaaagactattgcgtacactaatcatactgtcctccctgaagcactggagaaatggtctcaacctgtaatgtggaaactacttccacgccatatggaaattctacaagaaatagacaagagattcactgcaatgataaatacaacccgattggaccttgagaatgagctttccgccatgcgcatcttggatgataatccccagaagccggtagttcggatggcaaatttgtgtgtggtttctgctcatgc

SEQ ID NO: 65641 - DNA, 272 bp, Glycine max
  Clone ID: 700757805H1
caagccttactttagtggttctaaattgaaaagctttctagctggtcataatatcaccattactgatggtattgacaagactagtgcaactttgcaatttagaaagttagcagattgtgattttctcaagagaaactttaagcagatgtctaatgttttgtgggtagctcctgaggacaaggcgagtttatggtcacaacttcattatgtttcgtgtaataatctggaaatgcaagaagcttatcttgtcaatctcgtaaatgtgttacgag

SEQ ID NO: 65642 - DNA, 279 bp, Glycine max
  Clone ID: 700757806H1
atgaagatgaagacgaagatgatgaagatgaacaaattccctctcaccctcctcgccgaccaagccatggaaagcgtgaacaagacgaggacgaggacgaagatgaagataaacctcgtcctagtcgaccaagtcaaggaaagcgtgaacaagaccaggaccaggacgaggacgaagatgaagatgaagatcaacctcgcaagagccgcgaatggagatcgaaaaagacacaacccagaagacctagacaagaagaacctcgtgaaagaggatgcgaga

SEQ ID NO: 65643 - DNA, 271 bp, Glycine max
  Clone ID: 700757809H1
tcaatatcctagtataccttaataaataatttaagatactatgatgagagcacggttcccattactgttgctgggacttgttttcctggcttcagtttctgtctcatttggcattgcttactgggaaaaagagaaccccaaacacaacaagtgtctccagagttgcaatagcgagagagactcgtacaggaaccaagcatgccacgctcgttgcaacctccttaaggtggagaaagaagaatgtgaagaaggtgaaattccacgaccacga

SEQ ID NO: 65644 - DNA, 280 bp, Glycine max
  Clone ID: 700757810H1
aattttgataaaccgcgatcacaggttgccgcaccttaaaaccggaaacaaaagcaatcgttacttgatttcaagaatttctcaatttctttctacttctttgtgtacgatttcttaagggaaagaaaatcactctctgtgctggccacagacttcgtgaatcattttcttttccacttttagtttaaatcctgaacactctcctatttgatataggacttcgtgtcagatttaaacttcttctgtttctttctcagttctctgttcaatttcaagttca

SEQ ID NO: 65645 - DNA, 282 bp, Glycine max
  Clone ID: 700757811H1
caatgggcctctcagcaacccggtttcacccacacgcccttcatcttccactcactcctcaagacactctcacacaccaaccacttcactgccattcactcactcctcaaacaggccaaggccctgaactttcccatcctcccttccttgttgagctccattatagcgtcccacattgctcgcaactctgcccgcgaagctttttgctcttcagtggtgttggctctctctgtagtgaaattggaggggctacatgtaacttcctcctggctgcccttgcct

SEQ ID NO: 65646 - DNA, 281 bp, Glycine max
  Clone ID: 700757812H1
taaaattcttccaccaagttatgggtttccttgtgttgcttcttttctccctcttaggtctctcttctagttccagcatatcaactcatcgttccatattggaccttgacctaaccaagtttaccacacagaaacaggtgtcttcactgttccaactatggaagagtgagcatggacgtgtctaccataaccacgaagaagaggcaaagagacttgagattttcaagaataacttgaactatatcagggacatgaatgcaaacagaaaatcaccccattct

SEQ ID NO: 65647 - DNA, 279 bp, Glycine max
  Clone ID: 700757813H1
gtacttccttacaatcaaaaccaacaacaactatggcaagttatcaaaagcactacgatgatcagggtcgcaaggttgacgagtatggcaacgttgagaagcaaaccgacgaatacggcaaccctgttcatgctgctagtgtcacctatgtagccaccagaactgctgctggtggttacagtgatgacattaataagcaacatgataccaccaatgcctacggcgtagacactggtagacagcattctagtggtggctacgatggtgacactaataaac

SEQ ID NO: 65648 - DNA, 283 bp, Glycine max
  Clone ID: 700757814H1
gttccactgcctacaaaaactaatttggtggaaactcccaaggaatggcaactggatctaccttgtgacaaaacttctcatgttctgtgcctaccaatctctcatcagttgtggtcaagacactagggatatgatccttttcttggtggaattcaaaaatatgccactcccatgatgcccctagatgaagaaattctttctaaggttgcacaagatatagttgaggaatggtttgattgtgttgatgaggaggattcctttgaggaagtttctttgagtgcag

SEQ ID NO: 65649 - DNA, 198 bp, Glycine max
  Clone ID: 700757816H1
cgaagatgcccaagattcttctttctccaacagcaggcggtgaatcggaatcccctcggtgtcatgcatcgccggttttacttgaggaactgatctcgaatatcctccacagggttccggtgagatcccttctgcaattcaagtgtgtctgcaagtcatggaattccctcatctccgatcccctatccgcgaaggacc

SEQ ID NO: 65650 - DNA, 275 bp, Glycine max
  Clone ID: 700757817H1
gttcaatatcctagtataccttaataaataatttaagatactatgatgagagcacggttcccattactgttgctgggacttgttttcctggcttcagtttctgtctcatttggcattgcttactgggaaaaagagaaccccaaacacaacaagtgtctccagagttgcaatagcgagagagactcgtacaggaaccaagcatgccacgctcgttgcaacctccttaaggtggagaaagaagaatgtgaagaaggtgaaattccacgaccacgacc

SEQ ID NO: 65651 - DNA, 274 bp, Glycine max
  Clone ID: 700757818H1
tctggaaatgcaagaagcttatcttgtcaatctcgtaaatgtgttacgagaattgtatttgcacagtccagaggaagctcgccaattgagaaggaaagctctctctcgtattgaatggctgcaaaaagctgatgtgactaccatagcacagattgaagagttccattcgatgcagaggatgatgaatgctcctgattcaaatgataatattgatctactgttgagcattgatttgttgggtttacaaggagcaggtaaagcttttccaaacaag

SEQ ID NO: 65652 - DNA, 276 bp, Glycine max
  Clone ID: 700757819H1
cttttccatttcccttttaatctgaagaagagacacgctgaggcctaagatctccgaattccaagcgcctcttgatatggtctcccaccctaaccaagccagatcccgttttcaattccttctcagtttccttttctctgaaaaaacatgttgagggttgcagctagaaggctctcttcttctctctcatcttcttctccgttgcggcccaatcacgccgcttccgcttttctctctcgaaacgacgtcgtcgtcgatgaccgcagatctgctcct

SEQ ID NO: 65653 - DNA, 278 bp, Glycine max
  Clone ID: 700757821H1
catggctctattattcttctactttttggttcttatttcctttgccttcacaaccattatagtacaaaaaataagaaagaaacccaagaaaactgatgacacaacttgtaaaataccccatggtcctagaaagctacctattataggaaatatatacaatctgctatgctctcaaccccatagaaaattaagagacctggccataaaatatggacccgtgatgcatcttcaacttggacaggtttcaactattgtcatttcatcccctgagtgtgcta

SEQ ID NO: 65654 - DNA, 277 bp, Glycine max
  Clone ID: 700757822H1
gagctgaattgtctgaacaagatatatttgtaatcccagcaggttatccagttgtggtcaacgctacctcagatctgaatttctttgcttttggtatcaatgccgagaacaaccagaggaacttccttgcaggttcgaaagacaatgtgataagccagatacctagtcaagtgcaggagcttgcgttccctgggtctgcaaaagatattgagaacctaataaagagccaaagtgagtcctactttgtggatgctcagcctcagcagaaagaggaggg

SEQ ID NO: 65655 - DNA, 277 bp, Glycine max
  Clone ID: 700757823H1
atatggggaagcccttcactctctctctttcttccctttgcttgctactcttgtcgagtgcatgctttgctattagctccagcaagctcaacgagtgccaactcaacaacctcaacgcgttggaacccgaccaccgcgttgagtccgaaggtggtttgattcaaacatggaactctcaacaccctgagctgaaatgcgccggtgtcactgtttccaaactcaccctcaaccgcaatggcctccacttgccatcttactcaccttatccccggatgat

SEQ ID NO: 65656 - DNA, 280 bp, Glycine max
  Clone ID: 700757825H1
gaacaagagaacgtacgacaaggttttgttctttattttatcgtcaagaaggttgaagaaaagcgagggtaagaggagaaagatagtctctctccatacatattgatttcaaatgttatcaataaataaaaatggatgacagaaaaagagtaggttgcagagaagagaaaattgtatgtatagggatgaatccgagagcttatgttattatggctgcaaaggcagtggcagtagcagttccactttctgccgcagcggctgctggttatttttattgtta

SEQ ID NO: 65657 - DNA, 270 bp, Glycine max
  Clone ID: 700757826H1
atcagtcatcaccatggccaagctagttttttccctttgttttctgcttttcagtggctgctgcttcgcttttagttccagagagcagcctcagataaaacgagtgccagatccaaaaactcaatgccctcaaaccggataaccgtatagagtcagaaggagggctcattgagacatggaaccctaacaacaagccattccagtgtgccggtgttgccctctctcgctgcaccctcaaccgcaacgcccttcgtagaccttccacacaac

SEQ ID NO: 65658 - DNA, 282 bp, Glycine max
  Clone ID: 700757829H1
accagttcaatatcctagtacaccgtattaaagaatttaagatatactatgatgagagcgcggttcccattactgttgctgggagttgttttcctggcatcagtttctgtctcatttggcattgcgtattgggaaaagcagaaccccagtcacaacaagtgcctccgaagttgcaatagcgagaaagactcctacaggaaccaagcatgccacgctcgttgcaacctaccttaaggtggaggaagaagaagaatgcgaagaaggtcaaattccacgaccacg

SEQ ID NO: 65659 - DNA, 281 bp, Glycine max
  Clone ID: 700757830H1
caagttcacaatcctcctcatctctcttctcttctgcatcgcccacacttgcagcgcctccaaatggcagcaccagcaagatagctgccgcaagcagctccagggggtgaacctcacgccctgcgagaagcacatcatggagaagatccaaggccgcggcgatgacgatgatgatgatgacgacgacaatcacattctcaggaccatgcggggaagaatcaactacataaggaggaacgaaggaaaagacgaagacgaagaagaagaaggacacatgcaga

SEQ ID NO: 65660 - DNA, 250 bp, Glycine max
  Clone ID: 700757831H1
ctttattattccttccttccttcttcgcatcaacaaaccctaacatagcatcctaagatacagagactatcaccatcgtcctgctcatttggcacatgcttctccccctgaatactttgtccgcctggagaacacaacttacaaagacgatctatatttaaggaagaggacaaggatgcgtcggtggctttgttgtacttgtcaggtggaagagtcttacccatcaaatgaaaatgaacacctgaaaagc

SEQ ID NO: 65661 - DNA, 285 bp, Glycine max
  Clone ID: 700757832H1
aacttattaacactttccttagttcaatatggggaagcccttcttcactctctctctttcttccctttgcttgctactcttgtcgagtgcatgctttgctattacctccagcaagttcaacgagtgccaactcaacaacctcaacgcgttggaacccgaccaccgcgttgagtccgaaggtggtcttattgaaacatggaactctcaacaccctgagctgcaatgcgccggtgtcactgtttccaaacgcaccctcaaccgcaacgggctcaacttgccatctta

SEQ ID NO: 65662 - DNA, 270 bp, Glycine max
  Clone ID: 700757833H1
tctttgagtgcagcactcaatggtgttgagggtttggactatatggaaagaattcctcttgccacatctgagggttttcctcatgtgctttcacgcaaaaatggtgaaaaaggcaaaaggagatttgtttctggggatggtgaagagatgacattgattccgggaaccagtgttgaagaggcttacaacaagctaacagttgaacttgagaaaagtgttcctacattggttggcattgaatgtcccaaggatgaaaaacttcctcgtcgc

SEQ ID NO: 65663 - DNA, 271 bp, Glycine max
  Clone ID: 700757835H1
ctcgagccgcgattttgcaaccggttccctaatattgatttgtcatatgaggtgctggacagtgacaatgttcgggctggggaggttgtcactgtgctggtcactcttgagcgggatcttgagggaaggacagaagtaggacctgttgatgctcccaggtatccaaaagccaaggaagaagggtggtggctcattgttggtgataccaaaaccaatctgttgcttgccattaaacgggtttccctgcagcggaggttaaaagccaaactgg

SEQ ID NO: 65664 - DNA, 267 bp, Glycine max
  Clone ID: 700757838H1
ataaaattcttccaccaagttatgggtttccttgtgttgcttcttttctccctcttaggtctctcttctagttccagcatatcaactcatcgttccatattggaccttgacctaaccaagtttaccacacagaaacaggtgtcttcactgttccaactatggaagagtgagcatggacgtgtctaccataaccacgaagaagaggcaaagagacttgagattttcaagaataacttgaactatatcagggacatgaatgcaaacaga

SEQ ID NO: 65665 - DNA, 274 bp, Glycine max
  Clone ID: 700757839H1
cattccaagaatagattctattcttttgactcatgaacatgctgatgcagtccttggattggatgatatacgagctgtgcagccgtttagtcccactaatgatattgatcccacccccatttacttaactcggcattcaatggatagcatggaaaaggtgtttccttatttggttcagaaaaaacacaaagaagggcaagaaatacgaagggtagctcagtgttgctggaacataattgctgatgattgtaatctgccattttctgcatcaggc

SEQ ID NO: 65666 - DNA, 277 bp, Glycine max
  Clone ID: 700757840H1
gcaaaatgaccaagttcacaatcctcctcatctctcttctcttctgcatcgcccacacttgcagcgcctccaaatggcagcaccagcaagatagctgccgcaagcagctccagggggtgaacctcacgccctgcgagaagcacatcatggagaagatccaaggccgcggcgatgacgatgatgatgatgacgacgacaatcacattctcaggaccatgcggggaagaatcaactacataaggaggaacgaaggaaaagacgaagacgaagaagaaga

SEQ ID NO: 65667 - DNA, 268 bp, Glycine max
  Clone ID: 700757845H1
aacagtgataacaccattgaattttgattctagcaagcagagcttttgtcaattctctattgatcttcttggtggaggaattttagtggacaaaactggagattggatcacacttatacaaaattctccaattagtaacttgttgagagttgctgcttggaagaaaggctgtttaatggttaagattgtgatgtctgggaatgcagcagtcaaaaggagtgattgggcctcattggtacaagtgtttttaacaaacagcaacagtaca

SEQ ID NO: 65668 - DNA, 280 bp, Glycine max
  unsure (1)..(280): unsure at all n locations
  Clone ID: 700757846H1
atagttggtgcttattcacattctttagnatatttttctgaaaaggaagatcaagaaaaacccaaaaagattgatgccagattgagacaaagaatagatcctcaatacaatgaggttcaggctcagatggaaacaaatttgtttaaattgtctcttgatgatgttgaaactcctaaaggttccatgttggatcttaaaatttctcaatctaaaattgcacttcccaaaaacacagttggcggaaccattctgcgtagtgacctattggcaaattttttga

SEQ ID NO: 65669 - DNA, 280 bp, Glycine max
  Clone ID: 700757847H1
gaccaagccatggcgatgagaaccaaactttctttagctatctttttcttttttcttttagccttattttcaaacctagcctttggcaaatgtaaagaaaccgaggtagaagaagaagaccctgagctcgtaacatgcaaacaccaatgccaacagccacagcaatacactgagggtgacaagcgggtatgcttgcaaagatgtgacaggtatcatcgtatgaagcaagagcgagagaaacaaatccaagaggaaactcgtgagaagaaagaggaggaaa

SEQ ID NO: 65670 - DNA, 280 bp, Glycine max
  Clone ID: 700757848H1
gatcaacctcgcaagagccgcgaatggagatcgaaaaagacacaacccagaagacctagacaagaagaaccacgtgaaagaggatgcgagacaagaaacggggttgaggaaaatatctgcaccttgaagcttcacgagaacattgctcgcccttcacgcgctgacttctacaaccctaaagctggtcgcattagtaccctcaacagcctcaccctcccagccctccgccaattccaactcagtgcccaatatgttgtcctctacaagaatggaatttact

SEQ ID NO: 65671 - DNA, 269 bp, Glycine max
  Clone ID: 700757849H1
attctgtgtactctcccggatcctccgccaggaactcttgttttgctgcgctcctgcttccgcttcggatccatcccgaaaacctcacacagaattattcactttctgtgttcggttcaactcttttggattttgctagatccgaagcgccaaccatttccaagatcgttgaagaatggcatcagcggcgagtggggccaccggatggtacaggggaagagtgaaggcggttccttccggggaatgtttggtcattgtggcgatctcca

SEQ ID NO: 65672 - DNA, 271 bp, Glycine max
  Clone ID: 700757850H1
gcgtgaacaagaccaggaccaggacgaggacgaagatgaagatgaagatcaacctcgcaagagccgcgaatggagatcgaaaaagacacaacccagaagacctagacaagaagaaccacgtgaaagaggatgcgagacaagaaacggggttgaggaaaatatctgcaccttgaagcttcacgagaacattgctcgcccttcacgcgctgacttctacaaccctaaagctggtcgcattagtaccctcaacagcctcaccctcccagccctc

SEQ ID NO: 65673 - DNA, 270 bp, Glycine max
  Clone ID: 700757851H1
cttgaatataatactcagcatggctaagcttgttctttccctttgttttctgcttttcagtggctgctgcttcgctttcagtttcagagagcagccacagcaaaacgagtgccagatccaacgcctcaatgccctcaaaccggataaccgtatagagtcagaaggtggcttcattgagacatggaaccctaacaacaagccattccagtgtgccggtgttgccctctctcgctgcaccctcaaccgcaacgcccttcgcagaccttccac

SEQ ID NO: 65674 - DNA, 270 bp, Glycine max
  Clone ID: 700757854H1
gttcaatatcctagtataccttattaaagaatttaagatatactatgatgagagcgcggttcccattactgttgctggtagttgttttcctggcatcagtttctgtctcatttggcattgcgtattgggaaaagcagaaccccagtcacaacaagtgcctccgaagttgcactagcgagaaagactcctacaggaaccaagcatgccacgctcgttgcaacctccttaaggtggaggaagaagaagaatgcgaagaaggtcaaattccac

SEQ ID NO: 65675 - DNA, 271 bp, Glycine max
  unsure (1)..(271): unsure at all n locations
  Clone ID: 700757855H1
gttaaatcaggaatcaaacgttgatatctgatgagcccgctttcaattttgctgaagagttgttctgtcctgttttgctcctcttccttgtcttctccaaacattcacacattaacgtttgtantctctgatctgagacttcgcccattttcctaaacctctaattaagccaccaattagaagcggcaattttctcacgtgcgagagagatcatctttgtatcagtgctgcatccactctcagatgggtatagtgaggggggtgttattgg

SEQ ID NO: 65676 - DNA, 275 bp, Glycine max
  Clone ID: 700757856H1
gcactgtttcacagcagtgacagcatgcgcagttctagatgtgcttggtcctccatattctgatgctgaaggcagacactgcacatactaccacgatttccccttttccaacttttcagtggatggattatccataccagaagaggaaaagattgcttatgaatggctacaagagagggatgaacttgaagacctagaagtaaatggaaaaatgtacaacggtccaaagattgttgagagctaataatcttatttatcctctcacatcacgtaca

SEQ ID NO: 65677 - DNA, 276 bp, Glycine max
  Clone ID: 700757858H1
tgcagatagctttaaatttgagcttcaatcatcttcatggatcactgccccctgaattaggaaagctggacaaacttgtttctctggatgtttcaaacaatcggctatctggtaatatcccacctgagcttaagggaatgttgagcttgatagaggtgaacttctcaaataatctgttcggaggtcctgtgccaacatttgtaccatttcagaagagtcctagttcaagttatttgggcaataaagggctttgtggagagcctttgaactcttcat

SEQ ID NO: 65678 - DNA, 274 bp, Glycine max
  Clone ID: 700757859H1
tatcgagccgattcggctcgagcttgtactacaaatcagatgacacgcttagagaagatccggaactccaagcctgctggacagaactcgtagaggtgggtcatggagacaagaaaaatgagccatggtggcctaagatgcaaactcgtgaagagctagttgaagcttgcgctatcatcatatggactgcttcagcacttcatgcagctgttaattttggacagtatccctatggaggtttaatcttaaaccgtccaactcttagtaggcgatt

SEQ ID NO: 65679 - DNA, 276 bp, Glycine max
  Clone ID: 700757860H1
cctcaaaccggataaccgtatagagtcagaaggagggctcattgagacatggaaccctaacaacaagccattccagtgtgccggtgttgctctctctcgctgcaccctcaaccgcaacgcccttcgtagaccttcctacaccaacggtccccaggaaatctacatccaacaaggtaagggtatttttggcatgatatacccgggttgtcctagcacatttgaagagcctcaacaacctcaacaaagaggacaaagcagcagaccacaagaccgtca

SEQ ID NO: 65680 - DNA, 238 bp, Glycine max
  Clone ID: 700757290H1
tggggaacaactatatgatcctgttagaaatactgtgactgttgtttatgaggaatatagaaatcaatgtgcagccaattctttgagctcgaaaggaatgtttcaactgatccaaagaaaaggttcttcaaggaatctgatggctcttgttaatgatgatggatctgtggcaaaggcttggcctgttaatttagttgactgtaatgggaagcctgtatggtgccatggacctgagaat

SEQ ID NO: 65681 - DNA, 241 bp, Glycine max
  Clone ID: 700757291H1
gcagaaccccagtcacaacaagtgcctccgaagttgcaatagcgagaaagactcctacaggaaccaagcatgccacgctcgttgcaacctccttaaggtggaggaagaagaagaatgcgaagaaggtcaaattccacgaccacgaccacaacacccggagagggaacgtcagcaacacggtgagatggaggaagacgaaggtgagcagccacgtccattcccattcccacgcccacgccaa

SEQ ID NO: 65682 - DNA, 240 bp, Glycine max
  Clone ID: 700757292H1
agtataccttaataaataatttaagatactatgatgagagcacggttcccattactgttgctgggacttgttttcctggcttcagtttctgtctcatttggcattgcttactgggaaaaagagaaccccaaacacaacaagtgtctccagagttgcaatagcgagagagactcgtacaggaaccaagcatgccacgctcgttgcaacctccttaaggtggagaaagaagaatgtgaagaa

SEQ ID NO: 65683 - DNA, 239 bp, Glycine max
  Clone ID: 700757293H1
tggggaagcccttcactctctctctttcttccctttgcttgctactcttgtcgagtgcatgctttgctattagctccagcaagctcaacgagtgccaactcaacaacctcaacgcgttggaacccgaccaccgcgttgagtccgaaggtggtttgattcaaacatggaactctcaacaccctgagctgaaatgcgccggtgtcactgtttccaaactcaccctcaaccgcaatggcctc

SEQ ID NO: 65684 - DNA, 240 bp, Glycine max
  Clone ID: 700757296H1
tgattttcctgaaaaggaagatcaagaaaaacccaaaaagattgatgccagattgagacaaagaatagatcctcaatacaatgaggttcaggctcagatggaaacaaatttgtttaaattgtctcttgatgatgttgaaactcctaaaggttccatgttggatcttaaaatttctcagtctaaaattgcacttcccaagaacacagttggaggaactattctgcgtagtgatctattggc

SEQ ID NO: 65685 - DNA, 262 bp, Glycine max
  Clone ID: 700757301H1
gagccgctcgaccgattcggctcgagactagttcaatatcctagtataccttaataaataatttaagatactatgatgagagcacggttcccattactgttgctggaacttgttttcctggcttcagtttctgtctcatttggcattgcttactgggaaaaagagaaccccaaacacaacaagtgtctccagagttgcaataggagagagactcgtacaggaaccaagcatgccacgctcgttgcaacctccttaaggtgga

SEQ ID NO: 65686 - DNA, 287 bp, Glycine max
  Clone ID: 700757302H1
tcgcatgcacgcttcggctcgaggaatcttcaagctccaataaaattatatggctgcattttggggttaacagtggtgcaacaaggtttgctatagagcgtcaagctgtcaatgaggctaccttccgctgccctgatgaaatgggatggaagccccagaaagtccctattgttccttcagatgttgcaattacacgaatacggaagactactcttcctgtggaagagtcaccaagtccttggcaaataagggctatgatgtaatgacatctgatgatgcaggaaggt

SEQ ID NO: 65687 - DNA, 261 bp, Glycine max
  Clone ID: 700757303H1
tgctgaacactctcctatttgatataggacttcgtgtcagatttaaacttcttctgtttctttctcagttctctgcttaatttcaagttcaagctggtgaaatcttggattagtgctctcactcttctatctggtataggacttcgtgggtagacttttccatttctctcctttccttcactctcttcttctcactgatccgattgccgttcaaagtggtcttatttgaaaaacacttgggcgttggtgcaaatgtttgct

SEQ ID NO: 65688 - DNA, 258 bp, Glycine max
  Clone ID: 700757304H1
gggaaccagtgttgaagaggcttacaacaagctaagagttgaacttgagaaaagtgttcctacattggttggcattgaatgtcccaaggatgagaaacttcctcgtcgcaaaatttttgacaaacctaagacgcgctgcttcactattctccctatggagtttaatcttgtggttcgtcagaagtttttaaattttgtgggttcattatgaagaaaagggacaagcttagttgtcaagttggaatcaacccatactcc

SEQ ID NO: 65689 - DNA, 254 bp, Glycine max
  Clone ID: 700757306H1
aaactcaccctcaaccgcaatggcctccacttgccatcttactcaccttatccccggatgatcatcatcgcccaagggaaaggagcacttggagttgcaattccaggatgtcctaagacgtttgaggagccacaagaacaatcaaacagaagaggctcaaggtcgcagaagcagcagctacaggacagtcaccagagattcgtcacttcaatgaaggagacgtactcgtgattcctcctggtgttccttactgg

SEQ ID NO: 65690 - DNA, 251 bp, Glycine max
  Clone ID: 700757307H1
atgttccactgcctacaaaaactaatttggtggaaactcccaaggaatggcaactggatctaccttgtgacaaaattcctagtgtcttgaccacaactgatgagagattggtaggcacagaacatgagggatatgatccttttcttggtggaattcaaaaatatgccactcccatgatgcccctagatgaagaattctttctaaggttgcacaagatatagttgaggaatggtttgattgtgttgatgagg

SEQ ID NO: 65691 - DNA, 248 bp, Glycine max
  Clone ID: 700757308H1
atccactgaagggttccagtcacttccttatgttgttgcactgttcagtgcaatgctttggatttactatgctttcgtcaaaagggaagctgccctccttctcattaccattaacacatttggaattgttgtggagtcaatttaccttgcaatcttcctactttatgccccaaggaagcctaggcttacaacctcaagcttcttctcttactgaatgtgtttgggtttggagccatgcttctatcaac

SEQ ID NO: 65692 - DNA, 249 bp, Glycine max
  Clone ID: 700757309H1
aacgccgctgatcctgcatgctgggaaaaccaacaaaattcttacaagacactcattgcagccgagtatgctggcgtccaagttgattttgcccctaattttgagatgggtgtctccaataaaactcctgaatttctcaagatcaatcctattggcaaggttcctgtgctggaaacccccgatggtccaatatcgagagcaatgccattgctcgctatgttacccggctgaaaggtgataacactttgt

SEQ ID NO: 65693 - DNA, 247 bp, Glycine max
  Clone ID: 700757310H1
aagtgaagcaattgataaatttattgcgattgagaatcggagaagagaagcaaaataaaagggatgcgagtggcgcgagaagaagcaatgggtggtggaaagcggaacacggtggagacattcttcttagccactctaattctctggttcgcttccctttgtttccagattttgttgaacaagcgctgggacttctctctgtcatcgcgggttctatcttctaccagacatctaactgcctcatccg

SEQ ID NO: 65694 - DNA, 246 bp, Glycine max
  Clone ID: 700757311H1
cgaccacgaccacaacacccggagagggaacctcagcaacccggtgagaaggaggaagacgaagatgagcaaccacgtccaatcccattcccacgcccacaacctcgtcaagaagaagagcacgagcagagagaggaacaggaatggcctcgcaaggaggaaaaacgcggagaaaagggaagtgaagaggagatgaggatgaggatgagggacaagatgaacgtcaattcccattcccacgcccac

SEQ ID NO: 65695 - DNA, 242 bp, Glycine max
  Clone ID: 700757312H1
gaagattttcctgaaaaggaagatcaagaaaaacccaaaaagattgataccagattgagacaaagaatagatcctcaatacaatgaggttcaggctcagatggaaacaaatttgtttaaattgtctcttgatgatgttgaaactcctaaaggttccatgttggatcttaaaatttctcaatctaaaattcacttcccaaaaacacagttggaggaaccattctgcgtagtgatctattggca

SEQ ID NO: 65696 - DNA, 244 bp, Glycine max
  Clone ID: 700757313H1
gttcaatatcctagtataccttaataaataatttaagatactatgatgagagcacggttcccattactgttgctgggacttgttttcctggcttcagtttctgtctcatttggcattgcttactgggaaaaagagaaccccaaacacaacaagtgtctccagagttgcaatagcgagagagactcgtaaggaaccaagcatgccacgctcgttgcaacctccttaaggtggagaaagaagaatg

SEQ ID NO: 65697 - DNA, 246 bp, Glycine max
  Clone ID: 700757314H1
cggctcgagatatatactatgatgagagtgcggtttcctttgatggtgttgctgggaactgctatactggcatcagtttgtgtctcattagaggtgagagaggatgagaataagcctatctaacttgagaagctctaacagcttccaaactctctatgagaaccaaaacggtcgcattcgtctcctccaggattcaacaaacgctccccacaacttgagaaccttcgagactaccggattgtccag

SEQ ID NO: 65698 - DNA, 250 bp, Glycine max
  Clone ID: 700757316H1
ttgtggagtattttggaaggatgtcttacgttgctcataacgttaatcagccccaagagaaagatttgttggagggaaatttttcctttgatattaaatctcgctctagattggaaaaagtttcctctacaaaagcacaatttgttagtggaaaaaccttcaaatatgatataattggtgctggttcacattctcagaagattttcctgaaaaggaagatcaagaaaaacccaaaaagattgatgccaga

SEQ ID NO: 65699 - DNA, 284 bp, Glycine max
  Clone ID: 700757317H1
cacgcgtccgtattctgctcgtgatatgacttcgtgtcagatttaaacttcttctgtttctttctcagttctctgcttaatttcaagttctagctggtgaaatcttggattagtgctctcactcttctatctggtataggacttcgtgggtagacttttccatttctctcctttctttcactctcttcttctcattgatccgcatcgccgttcaaagtggtacttttgaaaaacacttgggcgttggtgcaaatgtatgcttcgttaattttctctggagacga

SEQ ID NO: 65700 - DNA, 257 bp, Glycine max
  Clone ID: 700757318H1
tatactatgatgagagtgcggtttcctttgttggtgttgctgggaactgttttcctggcatcagtttgtgtctcattaaaggtgagagaggatgagaataaccctttctacttgagaagctctaacagcttccaaactctctttgagaaccaaaacggtcgcattcgtctcctccagagattcaacaaacgctccccacacttgagatttttcgagactaccggattgtccagtttcagtcaaaacccaacacaatc

SEQ ID NO: 65701 - DNA, 257 bp, Glycine max
  Clone ID: 700757319H1
aataaagatgagtttgaagaacaacatggtggtgctaaaggtgtgtttgttgcttcttttccttgtgggggttacagctgcacgcatggaactgagcttcttcaaaagtgatcagtcatcaagttatgatgatgatgagtattcaaaaccatgctgtgatctctgcatgtgcacacgctcaatgcctcctcaatgcagtgtgaagatattaggctgaattcatgccactcagattgtaagagctgtatgtgcacacg

SEQ ID NO: 65702 - DNA, 251 bp, Glycine max
  Clone ID: 700757321H1
cttcacttcagaaccgaagccatggcggatcggttcttccccaacccgatgcccgagttcgtacccgaaacgacgccgtccactcctcaggaagaagaagaaaccctcacagtgggcgactcgctcccgaagctcctcgccatgccccacgcgccactcttggagcgtctcaaacgcgccgctctcgacctcaagaaaccatagtgatagaaacgtgggggctgtccgggcagcaggtgcgcgacttcact

SEQ ID NO: 65703 - DNA, 249 bp, Glycine max
  Clone ID: 700757322H1
acaagatctccatatctgttcccaaaagcttgtttgtaagaatggcttccggtgaacagaaattccctcctcaacaacaacaaacacagcctgggaaggagcatgctatgactccagtaccccaattcactagccctgactacaagccttcaaataaacttcaagggaagattgcattagtcactgggggtgatctgggattggacgagcggtgtgtaacttgtttgccttagaaggtgctaccgtggc

SEQ ID NO: 65704 - DNA, 248 bp, Glycine max
  Clone ID: 700757323H1
caaacttattaacactttccttagttcaatatggggaagcccttcttcactctctctctttcttccctttgcttgctactcttgtcgagtgcatgctttgctattacctccagcaagttcaacgagtgccaactcaacaacctcaacgcgttggaacccgaccaccgcgttgagtccgaaggtggtcttatgaaacatggaactctcaacaccctgagctgcaatgcgccggtgtcactgtttccaaa

SEQ ID NO: 65705 - DNA, 247 bp, Glycine max
  Clone ID: 700757324H1
ctaacaataattccttcacttgcagaacttagttctctgttgcatcatcatcatcttcattagtgttagccctaaacttcaccttcaaccatgaccacagtgccaccacacagtgtccaagtgcacacaacaacacaccgctacgaagccggcgtcgtcccgccggctcgttttgaggcgccgcgttacgagccggcatcaaggcgccctcttccatttaccattccgagagaggtccgacgacctc

SEQ ID NO: 65706 - DNA, 244 bp, Glycine max
  Clone ID: 700757326H1
atcacacacaactactacaagtacttccttacaatcaaaaccaacaacaactatggcaagttatcaaaagcactacgatgatcagggtcgcaaggttgacgagtatggcaacgttgagaagcaaaccgacgaatacggcaaccctgttcatcttgctagtgtcacctatgtagccaccagaactgctgtggtggttacagtgatgacattaataagcaacatgataccaccaatgcctacggcg

SEQ ID NO: 65707 - DNA, 237 bp, Glycine max
  Clone ID: 700757328H1
attgtctttgaacactcatcaccatggccaagcttgttctttccctttgtttccttcttttcagtggctgcttcgctctgagagagcaggcacagcaaaatgagtgccagatccaaaagctgaatgccctcaaaccggataaccgtatagagtcggaaggtgggttcattgagacctggaaccctacaacaagctattccagtgtgccggtgttgccctctctcgctgcacccttaa

SEQ ID NO: 65708 - DNA, 243 bp, Glycine max
  Clone ID: 700757329H1
ccggtcgaagcccgtaactgataagggtctatccgctttggagttggagaagcttccaaaaatcaccggcaaagaactcgtcttgggcaccgaatgcgccgtctgcctcgacgagatcgagagcgagcaaccggctagagtggtccccggttgcaaccatggatttcatgtccaatgcgctgacacctgctctctaagcaccctatttgccccgtttgtaggaccaagctggacccgcaaatc

SEQ ID NO: 65709 - DNA, 243 bp, Glycine max
  Clone ID: 700757330H1
ctcgagcgatcctagtataccttaataaataatttaagatactatgatgagagcacggatcccattactgttgctgggacttgttttcctggcttcagtttctgtctcatttggcattgcttactgggaaaaagagaaccccaaacacaacaagtgtctccagagttgcaatagcgccacctactcgtcaggaaccaagcatgccacgctcgttgcaacctaccttaaggtggagaaagaaga

SEQ ID NO: 65710 - DNA, 247 bp, Glycine max
  Clone ID: 700757331H1
gctgtgttgtgttgcaaacaaagaggagaaaaatatgagttacttgaaccgtgtttggatggcggcgacggtggcggtggcgcagggccacaccgatcccggccacaagtgcaagacggcgctcacctccatccaccacaaccggagccgcctcttctccggcggagccctgtcagatctccggcctcttccggcgtcgtgggatctgacgtggccggctcggtggcggggagctccgacgtggaga

SEQ ID NO: 65711 - DNA, 244 bp, Glycine max
  Clone ID: 700757332H1
cgcagggctacatcacgccgacgatccgcattctgtcgcagaatcgcggtggcggtggttccagaaggtttcgaggaaggagcgtgttgttgttgagagaattgaattcgaattcgccgaattgaacaagggtttgtcaatcgatgaaattgaggttgtgggaacaaccaacgaaggggggatttgttgcgtgaaattggtgacgtggcatcgaaggttttggagccgtgtttatgtgatgaag

SEQ ID NO: 65712 - DNA, 250 bp, Glycine max
  Clone ID: 700757333H1
cctggaaccctaacaacaagccattccagtgtgccggtgttgccctctctcgctgcacccttaaccgcaatgcccttcgtagaccttcctacaccaacggtccctaggaaatctacatacaacaaggtattggtaattttgggcatgatattcccgggttgtcctagcacttatcaagaggcgcaagaatctcagcaacgaggcgaagccagaggccccaagacggcaaccaaaaggtacatggcttcag

SEQ ID NO: 65713 - DNA, 256 bp, Glycine max
  Clone ID: 700757335H1
ctttccttgaaagttaatgcatgctttttagctagacagaagataagaaggcaaagcaatggctacttcaaagttgaaaacccagaatgtggttgtatctctctccctaaccttaaccttggtactggtgctactgaccagcaaggcaaactcagcggaaactgtttctttcagctggaacaagttcgtgccgaagaaccaaacatgatcctccaaggagacgctattgtgacctcctcgggaaagttacaactca

SEQ ID NO: 65714 - DNA, 248 bp, Glycine max
  Clone ID: 700757338H1
ctctgcacccaccattactcagcactgccattcttcaatcacactaatggctgtcaccttctcagatcttcacaccgaagagggcatcaaatccctcgatcaattcctttgtgggaaaacctatatctctggggatcaattgacaaaggatgatatcaaagtgtatgcagctgttgtggaaaagccaggagctcttttcctaatgctgctaagtggtacgatgccgtctcttctcaacttgctccaag

SEQ ID NO: 65715 - DNA, 243 bp, Glycine max
  Clone ID: 700757340H1
actccttgctcttagccctcctcctcttcgccgccgtgtccaccgccgcgatggcggtgccgcgtccgacgccgacgacatcctgatccgtcaggtggtgccagatgttggcgaaccgaagaggaggacaacctgctgaacgccgagcactacttcgcgagcttcaaggccaagttcgccaagacctcgccaccaaggaggagcacgatcatcgcttcggcgtcttcaagtccaacctccgca

SEQ ID NO: 65716 - DNA, 240 bp, Glycine max
  Clone ID: 700757341H1
caggctactgccagatcttctgagctccccaagagaatatcaaaaactggagattggatcacacttatacaaaattctccaattagtaacttgttgagagttgctgcttggaagaaaggctgtttaatggtcaagattgtgatgtctgggaatgcagcagtcaaaaggagtgattgggcctcattggacaagtgtttttaacaaacagcaacagtacagagcatttgatgcatgtaagtg

SEQ ID NO: 65717 - DNA, 240 bp, Glycine max
  Clone ID: 700757342H1
cattattctatatcaattttggttaagagtcttgaaaaagcaagagaaaaaaaaataccaaccatggcaaccatttctgatcaacctagagggtcctactcctatggaacctcatatggagcaccctatggaaccacgtatgagaccaacaccagcattaacaacccaccttcacgccaaacagtgagttcataactgctgccactattggcatcacactcttgctcctgtctgggttga

SEQ ID NO: 65718 - DNA, 239 bp, Glycine max
  Clone ID: 700757343H1
aagaacgttgagaagaaggatcctaccggagccaaggtcaccaaggctgcccagaagaagaagtgaatcgtgcgggctggttcatcaggggatgttggttacaataaatgttggtttcttttctgtactcttgtgtcttcttttctaggtagcttgtttttcggacaaagtttgaagtctccaccacatctcgcaactgtcggtttcagaactgggttcttgatcgacggtggcaaaat

SEQ ID NO: 65719 - DNA, 239 bp, Glycine max
  Clone ID: 700757344H1
gaatttgctagagagatgattgctggtgtaaatccctgcgtaattcgtggtcttgaagagttccctccaaaaagtaatctggatcctgcaatctatggtgatcaaagcagtaagataacagcagattcccttgatctagatgggtacacaatggacgaggtacttggtagtcgaaggttatttagttagattaccatgatatcttcatgccatatgtgaggcagataaatcagctgaat

SEQ ID NO: 65720 - DNA, 244 bp, Glycine max
  Clone ID: 700757347H1
tcaagacatgggtccatgaatacgttttcttgtactacaaatcagatgacacacttagagaagatcgtgaactccaagcctgctggaaagaactcgtagaggtgggtcatggagacaagaaaaatgagccatggtggcctaagatgcaaactcgtgaagagctagttgaagcttgcgctatcatcataggactgcttcagcacttcatgcagctgttaattttggacagtatccctatggaggt

SEQ ID NO: 65721 - DNA, 242 bp, Glycine max
  Clone ID: 700757348H1
caaagtttcttcctttctctgctctttgcgttctctgacacatttggtgccttgtagagcgtgttttggcaggaaggtggtatggcgaaggacgttgaggttgctgagcgtggctccttctctgggaaggactaccaggaccctccaccagcaccactcattgatgctgaggagctcacaaagtggtcttttacagggctctcattgctgaattcattgccactttgctcttcctctacatt

SEQ ID NO: 65722 - DNA, 253 bp, Glycine max
  Clone ID: 700757350H1
gctgaggtgttggatcctctcaatgggagttggcgccctattgccaacatgggaacaaatatggcatcttatgatgctgcagttctcaatgggaaacttctggtgactgaagggtggttgtggcctttttatgtctctccaagaggccaggtctatgatccaagaactaataactgggaaaatatggctgttggctcagagaacggtggacaggttcgagtgtggttgtttacgggcacttatttgttgtttc

SEQ ID NO: 65723 - DNA, 252 bp, Glycine max
  Clone ID: 700757351H1
cggctcgagcttttctctctcgttttttctcaaaaagttgcaagagttaaagcaaaaaccaaagtgagagagaaaatgatgaagccatcgatgctcagatctcttcactctgccgccacccgcggcgcctcccacctctcccgccgtggctacgcctccgagccggtgccggagcgcaaggtggccgttctagggccgccggcgggatcgggcaacccctctcccttctcatgaagctcaaccccctcgttt

SEQ ID NO: 65724 - DNA, 246 bp, Glycine max
  Clone ID: 700757353H1
atatgctagtacaccgtattaaagaatttaagatatactatgatgagagcgcggttcccattactgttgctgggagttgttttcctggcatcagtttctgtctcattgggcattgcgtattgggaaaagcagaaccccagtcacaacaagtgcctccgaagttgcaatagcgagaaagactcctacagaaccaagcatgccacgctcgttgcaacctccttaaggtggaggaagaagaagaatgcg

SEQ ID NO: 65725 - DNA, 244 bp, Glycine max
  Clone ID: 700757354H1
gctggtgcaaagaatgctattctcatgaatatgccaaatgctgttctttcaatgtggagatattttgttggagatctcgtctttgaagtttctaagatgacttctccctacattaaatgtacagtctctttcttcatagcatttggaaatttggctgatgacaccatcaattttgaggcttttcccccaagctggtgcagtttggagagattcaggaaaaagttgtattgaaattttcacaaga

SEQ ID NO: 65726 - DNA, 241 bp, Glycine max
  Clone ID: 700757355H1
ctcgagccgtttttaatgagatgctcattagatatagctatgaaaaattactgcgccaggctaaagctccaagtatgtttttacaatccttcaaaaattttgtttctttgtgtgtgtatggtgatgataacttaattagtgttcatgaatacgtcaagccttactttagtggttctaaattgaaaactttctagctggtcataatatcaccattactgatggtattgacaagactagtgca

SEQ ID NO: 65727 - DNA, 243 bp, Glycine max
  Clone ID: 700757356H1
acttattaacactttccttagttcaatatggggaagcccttcttcactctctctctttcttccctttgcttgctactcttgtcgagtgcatgctttgctattacctccagcaagttcaacgagtgccaactcaacaacctcaacgcgttggaacccgaccaccgcgttgagtccgaaggtggtcttatgaaacatggaactctcaacaccctgagctgcaatgcgccggtgtcactgtttcca

SEQ ID NO: 65728 - DNA, 241 bp, Glycine max
  Clone ID: 700757357H1
agttcaatatcctagtacaccgtattatagaatttaagatatactatgatgagagcgcggttcccattactgttgctgggagttgttttcctggcatcagtttctgtctcatttggcattgcgtattgggataagcagaaccccagtcacaacaagtgcctccgaagttgcaatagcgagaaagatcctacaggaaccaagcatgccacgctcgttgcaacctccttaaggtggaggaaga

SEQ ID NO: 65729 - DNA, 238 bp, Glycine max
  Clone ID: 700757358H1
aagaaaatgaagaaggaacaatattcttgtgaccatccacctgcatcatgggattggaggaaaaaaggtgtcatcacccaagtaaagtaccaagggggctgtggaagcggttgggcgttttctgccacgggagccatagaagcagcacatgcaatagcaacaggagaccttgttagcctttctgacaagaactcgtagactgtgtggaagaaagcgaaggttgttacaatggatggca

SEQ ID NO: 65730 - DNA, 239 bp, Glycine max
  Clone ID: 700757359H1
tacccccaactaacaataattccttcacttgcagaacttagttctctgttgcatcatcatcatcttcattagtgttagccctaaacttcaccttcaaccatgaccacagtgccaccacacagtgtccaagtgcacacaacaacacaccgctacgaagccggcgtcgtcccgccggctcgttttaggcgccgcgttacgaagccggcatcaaggcgccctcttccatttaccattccgag

SEQ ID NO: 65731 - DNA, 236 bp, Glycine max
  Clone ID: 700757360H1
gtgtgatctatgtgactcgaggacaaggaaaggttagagttgtgaactgccaagggaatgcagtgttcgacggtgagcttaggaggggacaattgctggtggtaccacagaacttcgtggtggcggagcaagccggagaacaaggattcgaatacatagtattcaagacacaccacaacggatgactagctacttgaaggatgtgtctagggcaattccctcagaggttcttggcc

SEQ ID NO: 65732 - DNA, 240 bp, Glycine max
  Clone ID: 700757362H1
atacacacacacacacacactaagaataatggcttctatcctccactactttttagccctctctctttctttctctttccttttcttcttatccgactccgtccccattccccaacaccacactaaccctacaatacctataaaccttctggttctacccgttcaaaatgatgcttccacagggtcccttggtccaacctccaaaaaaggacccctctaatgcaagtagcagtcctggtg

SEQ ID NO: 65733 - DNA, 266 bp, Glycine max
  Clone ID: 700757364H1
acgcaggctcgggatccagctcaagtatagatgagtttgaagaacaacatggtggtgctaaaggtgtgtttgttgcttcttttccttgtgggggttacagctgcacgcatggaactgagcttcttcaaaagtgatcagtcatcaagttatgatgatgatgagtattcaaaaccatgctgtgatctctgcatgtgcacacgctcaatgcctctcaatgcagctgtgaagatattaggctgaattcatgccactcagattgtaagagc

SEQ ID NO: 65734 - DNA, 256 bp, Glycine max
  Clone ID: 700757365H1
ccaaaaatgaagagcaccatcttctttgctctctttctcttttgtgccttcaccacctcatacctaccttcagccatcgctgatttcgtgctcgataatgaaggtaaccctcttgaaaatggtggcacatattatatcttgtcagacataacagcatttggtggaataagagcagccccaacgggaaatgaaagatgcctctcactgtggtgcaatctcgcaatgagctcgacaaagggattggaacaatcatctc

SEQ ID NO: 65735 - DNA, 247 bp, Glycine max
  Clone ID: 700757367H1
aagaaatgaagagtactatcttctttgctctctttctagtttgtgccttcaccatctcatacctgccttcagccaccgctcagttcgtgctcgacactgatgatgatcctcttcaaaacggtggcacatactatatgttgccagttatgagaggaaagggcggtggaatagaagtagattcaactggaaaagaatatgccctctcactgttgtgcaatcacccaatgagctcgataaggggattgga

SEQ ID NO: 65736 - DNA, 244 bp, Glycine max
  Clone ID: 700757368H1
gcttctaccaagccgggtactgaggttatgtatgatgagaggctgtttaaccaggataagggaattgcgtctgggtttgccactgatgatcagtacaatgtgtatgagcatgggttgtttactgcgcagccacactttccacattgtataggccgaagaagaatattgatgatgagacttatggaggtcggatgagcagttggagaagattatgaagactgataggtttaagcccgataaaggg

SEQ ID NO: 65737 - DNA, 242 bp, Glycine max
  Clone ID: 700757369H1
gagaaccagagcgaggaactggaggagaagcagaagaagaaaatggagaaggagctcattaacttggctactatgtgcaggtttggacccatcatccagtgcgacttgtcctccgatgactaagaagttaaaagcaatgttgtcacttgtacgtactaacacatgatgtgatagtttatgctagctactataacataagctgtctctgagtgtgttgtatattaataaagatcatcactggt

SEQ ID NO: 65738 - DNA, 243 bp, Glycine max
  Clone ID: 700757370H1
gtgagaacaccattgaattttgattctagcaagcagagcttttgtcaattctctattgatcttcttggtggaggaattttagtggacaaaactggagattggatcacacttatacaaaattctccaattagtaacttgttgagagttgctgcttggaagaaaggctgtttaatggttaagattgtgtgtctgggaatgcagcagtcaaaaggagtgattgggcctcattggtacaagtgtttt

SEQ ID NO: 65739 - DNA, 241 bp, Glycine max
  Clone ID: 700757371H1
cgtaattgaacagataagtaaggaacaagtggtgaagatgaaggttgccaagcctgctactgcaaggacttattcaagtgtttttgactactgtgctgggagatgttgtcatagttctgagagcgtggtccatgaaaatgcttatattagtgacttccaccactgcttttctctgccttcaagtcttctgggaaaaatagtactctcacagaagcacgactgagtggcatcaatgttgttg

SEQ ID NO: 65740 - DNA, 241 bp, Glycine max
  Clone ID: 700757372H1
agaagaaccttgactcatttgcatgccaagcaatgtttggaattcttcagttgcaagcagagatgcttgaagttgtggactctatgatccaaaaactacaaagttggagccagaactcaaatgggaagttcattgcagtggacttgagaactgagatggtgggaagggagtgtcacaaaaaagattctcaggaagaaaactttgttaccagccacatgagataggtgaattcctcaagaag

SEQ ID NO: 65741 - DNA, 238 bp, Glycine max
  Clone ID: 700757373H1
attctgccgtcgacgacgctgaaacttgtttcttcttttccttgcgcgaaccttttctactaaccccaatcgcttctctcccactccaattccccattcctcatctacataaccctaaccccacactctcacacaccaccaccaacatcatatattacatcgattctcaatcaaatcccaaagttttgaaaccaccgtcacgatgatgctcagaattcgtagccgcgacggcctggag

SEQ ID NO: 65742 - DNA, 236 bp, Glycine max
  Clone ID: 700757374H1
gcaagagagaagttgaatggaaacggtggtctctcgcgctgtcctcgttctctgcactccgcacccaaccacaactcaccctttcactaaacctaacaaactcctccgttcctccctcagccgcggcgccgcttccttatccgccaccagcaaatgggcggacgcctcattgccgatttccattcctcggcgacgcgccgcctccacttccacctccactctcagctgctcctccg

SEQ ID NO: 65743 - DNA, 75 bp, Glycine max
  Clone ID: 700757375H1
aagatttgtaattgtgataaaccgcgatcacaggttgccgcaccttaaaaccggaaacaaaagcaatcgttactt

SEQ ID NO: 65744 - DNA, 235 bp, Glycine max
  Clone ID: 700757376H1
gagaagccacaacagcaatcaagcagaagaggctcaaggtcgcagcagcaactacaagacagtcaccagaagattcgtcacttcaatgaaggagacgtactagtgattcctcctggtgttccttactggacctataacactggcgatgaaccagttgttgccatcagtcttcttgacaccccaacttcaacaatcagcttgatcaaaaccccagagtattttaccttgctgggaa

SEQ ID NO: 65745 - DNA, 234 bp, Glycine max
  Clone ID: 700757377H1
caaaaaagaaaatgatgctcggagacaccatcgcgcgaatccaacggttcacgtgccaccgtggccaacccacgacgatccaacggccgagatgtactccgcgtttttaacaaacgacgtcaatgctggtgagtactctccgtactatcttcaagaagcactaacggctctgcagcgtttctgccgtctaacgaaacggacgctgactcggacacggaggctcaacccgacgcg

SEQ ID NO: 65746 - DNA, 237 bp, Glycine max
  Clone ID: 700757378H1
cggctcgagcggctcgagctcgagccgaatcggctcgagtagcaaaatgaccaagttcacaaagctcctccagtctccactcttcagcatcgcccacacttgcagcgcctccaaatggcagcaccagcaagatagctgccgcaagcagctccagggggtgaacctcacgccctgctagaagccatcatggagaagatccaaggccgcggcgatgacgatgatgatgatgacgacgac

SEQ ID NO: 65747 - DNA, 253 bp, Glycine max
  Clone ID: 700757381H1
atctccatatctgttcccaaaagcttgtttgtaagaatggcttccggtgaacagaaattccctcctcaacaacaacaaacacagcctgggaaggagcatgctatgactccagtaccccaattcactagccctgactacaagccttcaaataaacttcaagggaagattgcacaagtcactgggggtgattctggattggacgagcggcgtgtaacttgtttgccttagaaggtgctaccgtggccttcacgta

SEQ ID NO: 65748 - DNA, 250 bp, Glycine max
  Clone ID: 700757382H1
cactcgagccgaatcggctcgagaaaaagatcatacatagtagtgcaggtgggttgcaaagaagcttgggggtcttctccataggggtcataagataaaagggacagtggtgttgatgcgcaagaatgtgttggacgtgaatagcgtaaccagcgttgggggaattattggtcaaggtctcgacttagttgctcaacactcgatactcttactgccttcttgggccgatccgtgtctctccagcttatta

SEQ ID NO: 65749 - DNA, 244 bp, Glycine max
  Clone ID: 700757384H1
agcaaaatgaccaagttcacaatcctcctcatctctcttctcttctgcatcgcccacacttgcagcgcctccaaatggcagcaccagcaagatagctgccgcaagcagctccagggggtgaacctcacgccctgcgagaagcacatcatggagaagatccaaggccgcggcgatgacgatgatgatatgacgacgacaatcacattctcaggaccatgcggggaagaatcaactacataaggag

SEQ ID NO: 65750 - DNA, 74 bp, Glycine max
  Clone ID: 700757385H1
tgggagtcgaattcctggagcattttatatcaagaattttatgcaaactgagtttttccttgtgagtttgactc

SEQ ID NO: 65751 - DNA, 239 bp, Glycine max
  Clone ID: 700757386H1
cggctcgagcctgggtctgcacaagctgttgagaagctattaaagaaccaaagagaatcctacattgtggatgctcagcctaagaagaaagaggaggggaataagggaagaaagggtcctttgtcttcaattttgagggctttttactgaataagtatgtactaaaatgtatgctgtaatagccatagtgagcgaggaaagtatcgggctatgtaactatgactagagcttcaactatg

SEQ ID NO: 65752 - DNA, 237 bp, Glycine max
  Clone ID: 700757387H1
aacttattaacactttccttagttcaatatggggaagcccttcttcactctctctctttcttccctttgcttgctactcttgtcgagtgcatgctttgctattacctccagcaagttcaacgagtgccaactcaacaacctcaacgcgttggaacccgaccaccgcgttgagtccgcaagtgtcttattgaaacatggaactctcaacaccctgagctgcaatgcgccggtgtcact

SEQ ID NO: 65753 - DNA, 233 bp, Glycine max
  Clone ID: 700757388H1
ctgaaattttgataaaccgcgatcacaggttgccgcaccttaaaaccggaaacaaaagcaatcgttacttgatttcaagaatctctcaatttcttcctacttctttgtgtacgatttcttaagggaaagaaaatcactctctgtgctggccacagacttcgtgaatcattttcttttccactcttgtccatcctctgaacactctcctatttgatataggacttcgtgtcaga

SEQ ID NO: 65754 - DNA, 233 bp, Glycine max
  Clone ID: 700757392H1
cttaattattaacacttccttagttcaatatggggaagcccttcactctctctctttcttccctttgcttgctactcttgtcgagtgcatgctttgctattagctccagcaagctcaacgagtgccaactcaacaacctcaacgcgttggaacccgaccaccgcgttgagtccgacagggtttgattcaaacatggaactctcaacaccctgagctgaaatgcgccggtgtca

SEQ ID NO: 65755 - DNA, 229 bp, Glycine max
  Clone ID: 700757394H1
ataagcttgtgttggctaacacacaagaattctttgatggaaattttccagtggattcttggttaccaatttttgtgaattgtctttatcctgtaagtcaattaccttcagaagctgtcgttgtaaatgttacatgtggtagtggacgtggtggtttacccaccactgcttggattagtctgcagttaataatcgctcctcagatatcaaacaaaagattcgcacagca

SEQ ID NO: 65756 - DNA, 238 bp, Glycine max
  Clone ID: 700757395H1
ctcttcctcaccgattgctagaatggaatttcgatgctcagtcaactcttttaccattctcttctctcttgctcttgcaggagagagccatgtccatgcatcgctacctgaggaagattattgggaagctgtttggccaaacactcccattcccactgcactgcgagagcttctaaagcctcccctgcaggtgttgaaatcgatgaactccctaagcaaattgatgatacacagtacc

SEQ ID NO: 65757 - DNA, 239 bp, Glycine max
  Clone ID: 700757396H1
gtttaatttcaagttcaagctggtgaaatcttgctttctgcgctcccactttcctatctggtataggacttcgtgggtagacttttctatttctctcctttctttcactctcttcttctcactaatccgcattgccgttcacagtggtcttatttgaacaacacttgggcgttggtgcccttcctgcttcgttaattttctctggagtcaacaggtttactgagaaaacaatttttact

SEQ ID NO: 65758 - DNA, 227 bp, Glycine max
  Clone ID: 700757401H1
ctatgatgagagcgcggttcccattactgttgctgggagttgttttcctggcatcagtttctgtctcatttggcattgcgtattgggaaaagcagaaccccagtcacaacaagtgcctccgaagttgcaatagcgagaaagactcctacaggaaccaagcatgccacgctcgttgcaacctccttaaggtggaggaagaagaagaatgcgaagaaggtcaaattcca

SEQ ID NO: 65759 - DNA, 276 bp, Glycine max
  Clone ID: 700757402H1
ctacttattaacactttccttagttcaatatggggaagcccttcttcactctctctctttcttccctttgcttgctactcttgtcgagtgcatgctttgctattacctccagcaagttcaacgagtgccaactcaacaacctcaacgcgttggaacccgaccaccgcgttgagtccgaaggtggtcttattgaaacatggaactctcaacaccctgagctgcaatgcgccggtgtcactgtttccaaacgcaccctcaaccgcaacggcctccatt

SEQ ID NO: 65760 - DNA, 254 bp, Glycine max
  Clone ID: 700757403H1
cgatgagcctgaaactgtagccactgctctcaaccactcttccctgcgccgccgtcccaccgccgctggcctcttcaattcgcccgagacgaccaccgacagttccggtgatgacttggccaaggattccggttccgacgactccatcagcagcgacgccgccaattcgcaaccgcaacaaaaacaagacactgatttctccgtcctcaaattcgcctaccgtccttccgtccccgctcatcgcaaagtgaagg

SEQ ID NO: 65761 - DNA, 242 bp, Glycine max
  Clone ID: 700757404H1
caagtcaactccctccaaactccaagctctctattttctctgagaaaatttgcaaatgtcgaatttcctgagcaatactaatccgaaccctaataagtccttcgaggtgaatcagcctcccactgattccgtgtccagtcttagcttcagtcccaaagccaacttcctcgtcgccacttcttgggacaatcaggttcgttgttgggaggtagcacggaatggagtaaatgttgccactgttc

SEQ ID NO: 65762 - DNA, 263 bp, Glycine max
  Clone ID: 700757406H1
gccgcggcgaggacggcagcgacgaagatcacattctcatcaggaccatgccgggaagaatcaactacatcaggaagaaggaaggaaaagaagaagaagaagaaggacacatgcagaagtgctgcagcgaaatgagcgagctgaaaagccccatatgccagtgcaaagcgctacagaagataatggataaccagagcgagcaactggaggggaaggagaagaagcagatggagagagagctcatgaacttggctattaggtgc

SEQ ID NO: 65763 - DNA, 207 bp, Glycine max
  Clone ID: 700757407H1
caccccactcaattgaagactccacagtccaagcaccgtctcaacttcaatgccctcaaatcagcgccacaaacacacccttctcccaaccctaattccgttgcaaacaaggaacccccaccagaacacccaattgaagtcattgccagaatccgtgactacccagatcgaaaggacaagcctttatccgttcttcaaaccagttcc

SEQ ID NO: 65764 - DNA, 121 bp, Glycine max
  Clone ID: 700757408H1
cattgattccgggaaccagtgttgaagaggcttacaacaagctaacagttgaacttgagaaaagtgttcctacattggttggcattgaatgtcccaaggatgaaaaacttcctcgtcgcaa

SEQ ID NO: 65765 - DNA, 215 bp, Glycine max
  Clone ID: 700757409H1
actttccttagttcaatatggggaagcccttcttcactctctctctttcttccctttgcttgctactcttgtcgagtgcatgctttgctattacctccagcaagttcaacgagtgccaactcaacaacctcaacgcgttggaacccgaccaccgcgttgagtccgaagtggtcttattgaaacatggaactctcaacaccctgagctgcaatgcg

SEQ ID NO: 65766 - DNA, 249 bp, Glycine max
  Clone ID: 700757410H1
cttaattattaacacttccttagttcaatatggggaagccctgcactctctctctttcttccctttgcttgctactcttgtcgagtgcatgctttgctattagctccagcaagctcaacgagtgccaactcaacaacctcaacgcgttggaacccgaccaccgcgttgagtccgaaggtggtttgattcaaacatggaactctcaacacccggagctgaaatgcgccggtgtcactgtttcaaactcac

SEQ ID NO: 65767 - DNA, 261 bp, Glycine max
  Clone ID: 700757411H1
aaaagatgcctcagaggcactcgaagaacaacaacgatctcgcgttcttcacgtacgacgagaagcggaaactaggttatggtacccagaaggagaggttgggaaaggactccattaagcccttcgatgcttgctctctctgcctcaaatccctaatcgaccctatgagctgccagaagggccatctcttttgcaaagagtgcatagtccagtgcctcttgtctcagaagaaagacattcaaaggaagcttgcagcccatg

SEQ ID NO: 65768 - DNA, 257 bp, Glycine max
  Clone ID: 700757412H1
gccagttctgatatttacaccatctgctctcaagactgtgaattatggaatcctgcttgcacaaaagcaatgactatgtcatttaatccaaacccgtgttctgatgcgtggagtttggaatttctgaagcgtaccggatttcattgtgatatcatttgtgtcactggatggactgccactccaatgcaggatgttcaggttacaattgattggtttatttcctctcaggaatgtgttcccaggacctattgtgtttt

SEQ ID NO: 65769 - DNA, 260 bp, Glycine max
  Clone ID: 700757413H1
tgaagaggaagatgaggatgaggatgaggaacaagatgaacgtcaattcccattcccacgcccacctcatcagaaggaagagcgaaagcaagaggaagatgaggatgaggagcagcagcgagagagcgaagaaagtgaagattctgagttacgaagacataagaataagaacccttttctcttcggctctaacaggttcgaaactctcttcaaaaaccaatatggtcgcattcgcgtcctccagaggttcaaccaacgct

SEQ ID NO: 65770 - DNA, 182 bp, Glycine max
  Clone ID: 700757414H1
accctccatacacactctctctgagtcggtcgagttgaatcggtgtgagtcagtgaccgagtcgaaccatgtcggacgaagaacaccatttcgaatccaaggccgatgctggagcctccaagacctatcctcaacaagccggaaccatccgcaaaaacggttacatcgtcatcaagggtcgt

SEQ ID NO: 65771 - DNA, 110 bp, Glycine max
  Clone ID: 700757415H1
atttggaaatttggctgatgacaccatcaattttgaggcttttccccacaagctggtgcagtttggagagattcaggaaaaagttgtattgaaattttcacaagaggaat

SEQ ID NO: 65772 - DNA, 100 bp, Glycine max
  Clone ID: 700757416H1
ctttgaacactcatcaccatggccaagcttgttctttccctttgtttccttcttttcagtggctgcttcgctctgagagagcaggcacagcaaaatgagt

SEQ ID NO: 65773 - DNA, 210 bp, Glycine max
  Clone ID: 700757417H1
cgtctacatacggtctcgaattcacatagagaaaagcagagacactaaccactctgtgaaatcaaaaccctaataataaaacaatggccacacttcaagcttcttctctctccaaaccttcccttctctccaaaccttccctcccattcccattcccgttcctctctccgaaccactccccattctccctctccttcccccccatgcgcc

SEQ ID NO: 65774 - DNA, 268 bp, Glycine max
  Clone ID: 700757418H1
gtgttttcccatcagtacacatctttgcaccaagaagcatttgttagttttttgcgatcaaagtaaaatcaaagctatgcaggaggcgaactcggtggcgaaatcaacatgcaacgcagtggaagtatgcaactaaaggagaagaaggtgagggatttgatggtggacaagaagaggctagtggaggtgccgtacatggcgtcgctggcccacacaatgactacactggtagcgaacaaggttgtggcggtgccggtggctgcgccgc

SEQ ID NO: 65775 - DNA, 124 bp, Glycine max
  unsure (1)..(124): unsure at all n locations
  Clone ID: 700757419H1
gaagaatgtcgagaaggtcaaattccacgaccacgaccacataacncggagagggaacgtcagcaacacggtgagaaggaggaagacgaaggtgagcagccacgtccattcccattcccacgcc

SEQ ID NO: 65776 - DNA, 247 bp, Glycine max
  unsure (1)..(247): unsure at all n locations
  Clone ID: 700757420H1
gtaatattcatatttccggcttattttacgacggcagatacaaattctggactaaacacgagagaaatcttgctttgacagaagaggaaaagatggaagtgattagaaatagaggcattcctgctgatgttcttgcaaagcgagctcatgaatttgaaaaacatgttgctcatgaaagcctcaaggatcagattcacancgttgacaagttgtattctactaaggttaataattttgcaaaatttat

SEQ ID NO: 65777 - DNA, 180 bp, Glycine max
  Clone ID: 700757422H1
gttcaatatcctagtataccttaataaataatttaagatactatgatgagagcacggttcccattactgttgctgggacttgttttcctggcttcagtttctgtctcatttggcattgcttactgggaaaaagagaaccccaaacacaacaagtgtctccagagttgcaatagcgagaga

SEQ ID NO: 65778 - DNA, 259 bp, Glycine max
  Clone ID: 700757423H1
ctcttccccttcacttcataccaatgttccttttcacttccccacactcccccttttaccgttttacctgcgttaaaccctcttagaatctcaccccacttttcactacatcttataacacaccttcccctgttttcctctgttttgcttcttctagagtaccctcttcctacatttttttcccctcacttttcttccgtacccatttcccataattgtattttatcctcgaacatatcaatagttcctcgatcagact

SEQ ID NO: 65779 - DNA, 252 bp, Glycine max
  Clone ID: 700757424H1
gcatcgagcgaatcggctcgagctagtacaccgtattaaagaaagtaagatatactatgatgagagcgcggttcccatagctgttgctgggagttgttttcctggcatcagtttctgtctcatttggcattgcgtattgggaaaagcagaaccccagtcacaacaagtgcctccgaagttgcaatagcgagaaagactcctacaggaaccaagcatgccacgctcgtggcaacctcctaaaggtggaggaag

SEQ ID NO: 65780 - DNA, 256 bp, Glycine max
  Clone ID: 700757425H1
atttctctcttcactcatcagatcgctgtctctctctctcttacacacacaaggttctggttttattggggcatatgattgaagattttgatctgttgcttttaccctttcagtggtaaaagttatgaaatacagattgaattcttaactctgataattggttactggggattcgaactatggggtctcaaggtggtggtgataataatggaaaacattcccaactccagcctttggtgcggcaaaattcaatgta

SEQ ID NO: 65781 - DNA, 258 bp, Glycine max
  Clone ID: 700757426H1
cacgcagcgaggtagcgtcttcttcttccgtttctctgcatcggtgtgaacaatggctacatacgctgcgatgaagcccacaaagcccgggttggaggagtcccaagaacagatccacaagataaggatcaccctttcctccaagcacgtcaaaaacctacgagaaggtttgtgcggatttggttcgcggtgcaacggataagagactcagggtgaagggacctgttaggatgcccactaaggttcttcacatcacta

SEQ ID NO: 65782 - DNA, 255 bp, Glycine max
  Clone ID: 700757427H1
ccgcccaactgcttctagaaggttgcttcctgagaaaggcaccccagaatatgaagaaatgattaataaccatgaaaaggcttatttgagaacaattacatcaaagttgccgactctcattagcctttcagtgatagagatcttgtcgacacatgcttctgatgaggtctaccttggccagagggacaacccacattggacctctgattcaaaagcattacaagcctttcaaaagtttggaaacaagctcaagga

SEQ ID NO: 65783 - DNA, 180 bp, Glycine max
  Clone ID: 700757428H1
aattttgataaaccgcgatctcaggttgccgcaccttaaaaccggaaacaaaagcaatcgttacttgatttcaagaatctctcaatttcttcctacttctttgtgtacgatttcttaagggaaagaaaatcactctctgtgctggccacagacttcgtgaatcattttcttttccacaca

SEQ ID NO: 65784 - DNA, 152 bp, Glycine max
  Clone ID: 700757429H1
tgaaattttgataaaccgcgatcacaggttgccgcaccttataaccggcaacaaaagcaatcgttacttgatttcaagaatttctcaatttctttctacttctttgtgtacgatttcttaagggaaagaaaatcactctctgtgctggccac

SEQ ID NO: 65785 - DNA, 254 bp, Glycine max
  Clone ID: 700757430H1
gcaaagcaatggctacttcaaagttgaaaacccagaatgtggttgtatctctctccctaaccttaaccttggtactggtgctactgatcagcaaggcaaactcagcggaaactgtttctttcagctggaacaagttcgtgccgaagcaaccaaacatgatcctccaaggagacgctattgtgacctcctcgggaaagttacaactcaataaggttgacgaaaacggcaccccaaaaccctcgtctcttggtcgc

SEQ ID NO: 65786 - DNA, 95 bp, Glycine max
  Clone ID: 700757431H1
atttgatcttatgctgaaaggggagggaataaggtgcctcatctgcatggaagagtaaatcaatgatgttctctgctgaacagtgtttgcgtgta

SEQ ID NO: 65787 - DNA, 217 bp, Glycine max
  Clone ID: 700757433H1
gaagctggaaatataaagaggataaccattcatgacccacattctacttcagagtctgcaaaacaacataacaagcaagaaatgctaattagtaataagttacacgctcttgtggaatatgagactatggaggctgctgagaaagcagtggctatgttaaataatgaacaagactggagaaatggcatgcgggttaaacttctcaagggaatgggga

SEQ ID NO: 65788 - DNA, 188 bp, Glycine max
  Clone ID: 700757434H1
ctcgagccgatcgcaaattttctcccccaaatcgtagatctacggttaaattggtgtactgtggtaagatgggaggaggatttagagtgcttcacttagttaggccatatctcacgtatcttcctgaagttcaaactgctgacaggaaagtgccatttagcgagaaggtcatagacactgtgatctct

SEQ ID NO: 65789 - DNA, 245 bp, Glycine max
  Clone ID: 700757435H1
cactgaccaagccatggcgatgagaaccaaactttctttagctatctttttcttttttcttttagccttattttcaaacctagcctttggcaaatgtaaagaaaccgaggtagaagaagaagaccctgagctcgtaacatgcaaacaccaatgccaacagccacagcaatacactgagggtgacaagcgggtatgcttgcaaagatgtgacaggtatcatcgtatgaagcaagagcgagagaaac

SEQ ID NO: 65790 - DNA, 142 bp, Glycine max
  Clone ID: 700757436H1
gaagatgaacaaattccctctcaccctcctcgccgaccaagccatggaaagcgtgaacaagacgaggacgaggacgaagatgaagataaacctcgtcctagtcgaccaagccaaggaaagcgtgaacaagaccaggaccagg

SEQ ID NO: 65791 - DNA, 171 bp, Glycine max
  Clone ID: 700757437H1
cgcgatcacaggttgccgcaccttaaaaccggaaacaaaagcaatcgttacttgatttcaagaatttctcaatttctttctacttctttgtgtacgatttcttaagggaaagaaaatcactctctgtgctggccacagacttcgagaatcattttctattccacattaaat

SEQ ID NO: 65792 - DNA, 253 bp, Glycine max
  Clone ID: 700757440H1
ctccttcactcgccggaatctgacagcgctcggaaaccgcctaattgccatgtcagcgcgaaccagaaaccctacctgctcaattctttcggcagcaatttgaccttcccttccaacgccgccttaatcgaacgcgccgcgaagttctccgtgttcgccggcgagaactcgccgcctccgccgggggaggcgcgcctgattccagcaggaaccggttcgactttggacagagtgaagaacgagccgaaagaga

SEQ ID NO: 65793 - DNA, 235 bp, Glycine max
  Clone ID: 700757441H1
attgggtaggaccctgggacagacaacaacccatatttggggtttgtgtacacgtcattccaagagcgagcaacatttgtggcgcacgggaacacggctcggctcgcgaaggagggcggggatccagtgctggcgcgcctatgcgggaccatcgcagcggacgagaagcggcacgagaacgcgtactcaagaatcgtggagaagcttctggaagtggaccccaccggggcatggt

SEQ ID NO: 65794 - DNA, 255 bp, Glycine max
  Clone ID: 700757442H1
cttcgaggttaacgctcgagacaacaagaagtttacatttgcagggaaggacaacattgtgagttctctggacaacgttgctaaggagcttgcctttaactatccttctgagatggtgaacggagtattcgaccgaaaggagagtttctttttcccttttgagttgccgagagaggagcgtggtcgtcgcgctgatgcgtgagaggtttagaacaatcaagaaaaggtgtgcatgtggctgaagatcacggggaa

SEQ ID NO: 65795 - DNA, 177 bp, Glycine max
  Clone ID: 700757443H1
taagatttgaaattttgataaaccgcgatcacaggttgccgcaccttaaaaccggaaacaaaagcaatcgttacttgatttcaagaatctctcaatttcttcctacttctttgtgtacgatttcttacgggaaagaaaatcactctctgtgctggccacagacttcgtgaatcattt

SEQ ID NO: 65796 - DNA, 237 bp, Glycine max
  Clone ID: 700757444H1
cttatcttagctaccccatcacaacaaccacggtactatttcagcatactctattaggcaaaaacaccaccaaatgggagaggaaaaggagcagcctaagaatgacaccgagaaaaagcccgaggaggtagcccccaagaaagacgacggacccatccctgtcgtttacaaactcgacttgcattgcgagggatgcgtcaagaagatcaaacgccctgtcgccacttcgaaggtgtg

SEQ ID NO: 65797 - DNA, 253 bp, Glycine max
  Clone ID: 700757445H1
aatttcgatgctcagtcatctcttttaccattctcttctctcttgctcttgcaggagagagccatgtccatgcatcgctacctgaggaagattattgggaagctgtttggccaaacactcccattcccactgcactgcgagagcttctaacgcctctccctgcaggtgttgaaatcgatgaactccctaagcaaattgatgatacacagtacccaaaaacattcttctataaagaagactttcatccaggcaa

SEQ ID NO: 65798 - DNA, 240 bp, Glycine max
  Clone ID: 700757446H1
aacagaagagaatcctcgctctcttcgccatcttccttacctttttttctcatttcctcagtctaacgtgtccatcattatcaaaccacactcactcgctcgctcgcacactctttcatttttgaattatgtatcattttcaaatacgtttttaatgttatgcggtaattggcgggaaccaagtgtcaattcagataccctttgtgtcgaattggccaattacgaaagattcgcgttgaa

SEQ ID NO: 65799 - DNA, 113 bp, Glycine max
  Clone ID: 700757447H1
gtcttcactcaaaactctgctctttcattttcataattcccacacattatggctgagcttcactaccaaccacaacaccaataccccctccgctaccctaacgatccacacca

SEQ ID NO: 65800 - DNA, 86 bp, Glycine max
  Clone ID: 700757448H1
acaaaacaaaagcatcatatgctgtcgatttatttattcatagttgaagcgctagtcatagttacatagcccgatactttccacgc

SEQ ID NO: 65801 - DNA, 264 bp, Glycine max
  Clone ID: 700757449H1
gaatacaggtatatcattggcctgtgctatgaatagttcttttagggggcgtgccagttctgatatttacaccatctgctctcaagactgtgaattatggaatcctgcttgcacaaaagcaatgactatgtcatttaatccaaacccgtgttctgatgcgtggagtttggaatttctgaagcgtaccggatttcattgtgatatcatgtgtgtcactggatggactgccactccaatgcaggatgttcaggttacaattgattg

SEQ ID NO: 65802 - DNA, 262 bp, Glycine max
  Clone ID: 700757450H1
gacactttccttagttcaatatggggaagcccttcttcactctctctctttcttccctttgcttgctactcttgtcgagtgcatgctttgctattacctccagcaagttcaacgagtgccaactcaacaacctcaacgcgttggaacccgaccaccgcgttgagtccgaaggtggtcttattgaaacatggaactctcaacaccctgagctgcaatgcgccggtgtcactgtttccaaacgcaccctcaagcgcaacggcct

SEQ ID NO: 65803 - DNA, 236 bp, Glycine max
  Clone ID: 700757451H1
ttaacactttccttagttcaatatggggaagcccttcttcactctctctctttcttccctttgcttgctactcttgtcgagtgcatgctttgctattacctccagcaagttcaacgagtgccaactcaacaacctcaacgcgttggaacccgaccaccgcgttgagtccgaaggtggtcttattgaaacatggaactctcaacaccctgagctacaatgcggcggtgtcactgttt

SEQ ID NO: 65804 - DNA, 182 bp, Glycine max
  Clone ID: 700757452H1
aaattttgataaaccgcgatcacaggttgccgcaccttacaaccggaaacaaaagcaatcgttacttgatttcaagaatctctcaatttcttcctacttctttgtgtacgatttcttaagggaaagaaaatcactctctgtgctggccacagacttcgtgaatcattttcttttccacacaa

SEQ ID NO: 65805 - DNA, 115 bp, Glycine max
  Clone ID: 700757453H1
tggtccttaaacactcatcagtcatcaccatggccaagctagttttttccctttgttttctgcttttcagtggctgctgcttcgctttcagttccagagagcagcctcagcaaaa

SEQ ID NO: 65806 - DNA, 252 bp, Glycine max
  Clone ID: 700757454H1
gcaagctctctatcctttctggtagcaatgccctctgcaactgcaagcttcggattcttcttctgtcgacaacgcctttactcttctttccccttccctccgcgtccaagactcctctccaccactcgcaccccataccctctccaatacgaactcatcatcaaccgtccttctaaccccgactctccccgcccacaacctgctcgacctattaactcccctgaacccgaactcaacaaggcccagaggaag

SEQ ID NO: 65807 - DNA, 251 bp, Glycine max
  Clone ID: 700757455H1
caagttcgataatcgaaagtgcctggtgattcgatgttgtgtttacataggagttgtttgtgaaaatgagaaggcaggggcactatggggatccatctgccaacacttgtgttggtggtagccagatgcatcatatggctggtcaaaggggggaggccaagtcgggtaattttgaaggacggctagaggcctttactccacagagagagaatccgtatgcaaattccaagcaggagggtcagggtcagtgg

SEQ ID NO: 65808 - DNA, 254 bp, Glycine max
  Clone ID: 700757456H1
gacaaatattattttcatcattaatttttttcttcttcctctctgtcattcggttaattagggtacacaaacaatgatggcttcaacaacgcaccagttttagcttttaattttaatttaaaatcagaattgtagtaggttgctagaagaatgaaagactaagtttggggtccatgcatgcaaaaaatgatgaagccaccttcaaactcttccttcccttcctttctcagagtgaagcctcgtctctcttctta

SEQ ID NO: 65809 - DNA, 250 bp, Glycine max
  Clone ID: 700757457H1
attaaatgtacagtctctttcttcatagcatttggaaatttggctgatgacaccatcaattttgaggcttttccccacaagctggtgcagtttggagagattcaggaaaaagttgtattgaaattttcacaagaggaatttcttacagcttggtcaactcaggtgcgtcctgcaacaactctgttggctgatgggtgtccatatttgtatgctatggtgcatgatagttcagtgtctacaataccaggtg

SEQ ID NO: 65810 - DNA, 252 bp, Glycine max
  Clone ID: 700757458H1
cccagttaagaagagtctttggttgaaggaagaagggtaaactaggagtaggagggaagaagggttgaaggaagaaaaaaagaaaaacacagaaatggagggtgggaacaacagcagcagtaacaacaaccctgatgagttggcggtggggtgcttgctttcgatcaggacaacgttgggcgacgaattcgaaggccaggtcgtcaccttcgatcgcccctccaacattctcgtactccaggagccttccaa

SEQ ID NO: 65811 - DNA, 250 bp, Glycine max
  Clone ID: 700757459H1
tctctttgcaccattcaagatagtaatagttctggaggcatacagggagccaggcatgctcaatttggactatctccatctgattttcccttcaacaagctcccagcagacatgcttctaggtggtttctcaaggcttgaccatgcagcagcacagcctattaggccaccttgtggaacctataagaacaacaccactactaaggccaatgttggcatttcttgcttgttgacagtgggaaatcctggcc

SEQ ID NO: 65812 - DNA, 248 bp, Glycine max
  Clone ID: 700757460H1
gttccagggggaactgctgtattaccctcaacagctctgatgctttcagttcctgcacagattgctggatgtaaaactattgtccttgcaactcctccagctcaggatggtactatatgcaaggaggtagtgtattgtgcaaagaagggtggggtgactcacatccttagagctggaggagagcgagccatatctgccatggcttggggaacagaaacgtgtcccaaggttgagaaaattttggccca

SEQ ID NO: 65813 - DNA, 90 bp, Glycine max
  Clone ID: 700757463H1
gggaaacaaaactacccttttgcttttgctctttgttctttgccatggagtggccacaacagcaatggccttccatgatgatgagggtgg

SEQ ID NO: 65814 - DNA, 88 bp, Glycine max
  Clone ID: 700757464H1
aaaaccattattaggaccgcatacctctattggttttgaaatgtggacgttctgagtgggcaaatcaaactcaaatgccatgaagttt

SEQ ID NO: 65815 - DNA, 265 bp, Glycine max
  Clone ID: 700757465H1
agcaagcagagcttttgtcaattctctattgatcttcttggtggaggaattttagtggacaaaactggagattggatcacacttatacaaaattctccaattagtaacttgttgagagttgctgcttggaagaaaggctgtttaatggttaagattgtgatgtctgggaatgcagcagtcaaaaggagtgattgggcctcattggtccaagtgtttttaacaaacagcaacagtacagagcattttgatgcatgtaagtggacaa

SEQ ID NO: 65816 - DNA, 255 bp, Glycine max
  unsure (1)..(255): unsure at all n locations
  Clone ID: 700757466H1
acttattaacactttccttagttcaatatgngggaagcccttcttcactctctctctttcttccctttgcttgctactcttgtcgagtgcatgctttgctattacctccagcaagttcaacgagtgccaactcaacaacctcaacgcgttggaacccgaccaccgcgttgagtccgaaggtggtcttattgaaacatggaactctcaacaccctgagctgcaatgcgccggtgtcactgtttccaaacgcaccct

SEQ ID NO: 65817 - DNA, 232 bp, Glycine max
  Clone ID: 700757467H1
gtcatttaatccaaacccgtgttctgatgcattgagtttggaatttttgaagcgtaccggatttcactgtgatatcatttgtgtcactggatggactgccaccccaatgcacgatgttcaggttacaattgattggtttatttcctctcaggaatgtgttcccaggacttattgtgttttaaatccacaaaatccttttgtgttaaataggtggatggggaaactgatttcc

SEQ ID NO: 65818 - DNA, 254 bp, Glycine max
  Clone ID: 700757468H1
aaagcaatggctacttcaaagttgaaaacccagaatgtggttgtatctctctccctaaccttaaccttggtactggtgctactgaccagcaaggcaaactcagcggaaactgtttctttcagctggaacaagttcgtgccgaagcaaccaaacatgatcctccaaggagacgctattgtgacctcctcgggaaagttacaactcaataaggttgacgaaaacggcaccccaaaaccctcgtctcttggtcgcgc

SEQ ID NO: 65819 - DNA, 238 bp, Glycine max
  Clone ID: 700757469H1
caccgcacgaatatcttgttgtttggagcgatccgagaaaaactctgtaaacatgttggtttaccaggacctccttacaggtgatgagcttctctctgactccttccgttacaaggaaattgagaatggaatgctgtgggaagttgaggggaagtgggttgttaaaggagcagttgatgtagacgttggtgcaaacccttctgctgagggtggaggagaagatgagggagttgatgat

SEQ ID NO: 65820 - DNA, 238 bp, Glycine max
  Clone ID: 700757470H1
ctatgaagaaagagactgtacatttaatgtagggagaagtcatcttagcatttggaaatttggctgatgacaccatcaattttgaggcttttccccacaagctggtgcagtttggagagattcaggaaaaagttgtattgaaattttcacaagaggaatttcttacagcttggtcaactcaggtgcgtcctgcaacaactctgttggctgatgggtgcccatatttgtatgctatggt

SEQ ID NO: 65821 - DNA, 238 bp, Glycine max
  Clone ID: 700757471H1
gttaataaataatttaagatactatgatgagagcacggttcccattactgttgctgggacttgttttcctggcttcagtttctgtctcatttggcattgcttactgggaaaaagagaaccccaaacacaacaagtgtctccagagttgcaatagcgagagagactcgtacaggaaccaagcatgccacgctcgttgcaacctccttaaggtggagaaagaagaatgtgaagaaggtga

SEQ ID NO: 65822 - DNA, 250 bp, Glycine max
  Clone ID: 700757473H1
aaactttaagcagatgtctaatgttttgtgggtagctcctgaggacaaggcgagtttatggtcacaacttcattatgtttcgtgtaataatctggaaatgcaagaagcttatcttgtcaatctcgtaaatgtgttacgagaattgtatttgcacagtccagaggaagctcgccaattgagaaggaaagctctctctcgtattgaatggctgcaaaaagctgatgtgcctaccatagcacagattgaagag

SEQ ID NO: 65823 - DNA, 248 bp, Glycine max
  Clone ID: 700757474H1
ggaagatcatacatagtagtgttggtgggttgcaaagatgcttgggggtcttctccataggggtcataagataaaagggacagtggtgttgatgcgcaagaatgtgttggacgtgaatagcgtaaccagcgttgggggaattattggtcaaggtctcgacttagttggctcaacactcgatactcttactgccttcttgggccgatccgtgtctctccagcttattagtgctaccaaagctgatgcca

SEQ ID NO: 65824 - DNA, 246 bp, Glycine max
  Clone ID: 700757475H1
gtggtcaattgcaacagttttaacacccattgctgcaaaatttgggttgccatgtcttcttattatgcgtgccttcatgggaattggtgagggtgttgcgatgcctgcaatgaataatatactttccaaatggattccagtgtcagagagaagcagatcacttgcactagtatatagtggcatgtaccttggttcagtcactggcttggcattctcacctatgctaatccagaaatttgggtggcc

SEQ ID NO: 65825 - DNA, 233 bp, Glycine max
  Clone ID: 700757476H1
gcagcagctacaggacagtcaccagaagattcgtcacttcaatgaaggagacgtactcgtgattcctcctggtgttccttactggacctataacactggcgatgaaccagttgttgccatcagtcttcttgacacctctaacttcaataaccagcttgatcaaacccctagggtattttaccgtgctgggaacccagatatagagtacccagagaccatgcaacaacaacaac

SEQ ID NO: 65826 - DNA, 211 bp, Glycine max
  Clone ID: 700757477H1
gggctcgagctcgctaaccaagaaggaactagggttttacagaatacaagctctctctctctctcgtcggttttcgtcaatcaaatccaatccaatatcaaatatgagtcgtcatcccgaggttaagtgggctcagaggcttgacaaggtctatatcacggtgcaattggctgattcaaaagctggcaaagtggatctcacgccagatggt

SEQ ID NO: 65827 - DNA, 250 bp, Glycine max
  Clone ID: 700757478H1
gaaattttgataaaccgcgatcacaggttgccgcaccttaaaaccggaaacaaaagcaatcgttacttgatttcaagaatttctcaatttctttctacttctttgtgtacgatttcttaagggaaagaaaatcactctctgtgctggccacagacttcgtgaatcattttcttttccacttttagtttattccctgaacactctcctatttgatataggacttcgtgtcagatttaaacttcttctgttt

SEQ ID NO: 65828 - DNA, 142 bp, Glycine max
  Clone ID: 700757479H1
tctaaatctaccatcaaagtcaaagtgaagtatggctcatcctatcaccaaattcaaatcagttctcatgcaagttttggggaattgaagaaaatgttaacagaacctacaggattgcacattcaggatcagaaattgattt

SEQ ID NO: 65829 - DNA, 216 bp, Glycine max
  Clone ID: 700757480H1
tgatcgcagtgcctactggtgttgcatggtggatgtacaacaatgaagacactcctgttgttgccgtttctattattgacaccaacagcttggagaaccagctcgaccagatgcctaggagattctatcttgctgggaaccaagagcaagagtttctaaaatatcagcagcagcagcaaggaggttcccaaagccaaaggggaatcccccaagaag

SEQ ID NO: 65830 - DNA, 256 bp, Glycine max
  Clone ID: 700757481H1
cttcaaaacactcataacacaaagcacaaagcaaagctcatccttgagttaaaaaatggcagcagcttcttccatggctctctcatccccatccttggctggcaaggccgtgaagctgggcccatcagccccagaagtgggaagggtgagcatgaggaagaccgtcaccaagcaggtctcctcaggaagcccatggtacggcccagaccgagtcaagtacttgggcccattctctgaggagccccgtcctacctaa

SEQ ID NO: 65831 - DNA, 116 bp, Glycine max
  Clone ID: 700757482H1
tgagaacattgctcgcccttcacgtgctgacttctacaacccaaaagctggtcgcattagcaccctcaacagtctcaccctcccaggccacagccaattcggactcagtgcccaat

SEQ ID NO: 65832 - DNA, 197 bp, Glycine max
  Clone ID: 700757483H1
gtgatgataacttaattagtgttcatgaatatgtcaagccttactttagtggttctaaattgaaaagctttctagctggtcataatatcaccattactgatggtattgacaaaactagtgcaactttgcaatttagaaagttagcagattgtgattttctcaagagaaactttaagcagatgtctaatgttttgtgg

SEQ ID NO: 65833 - DNA, 103 bp, Glycine max
  Clone ID: 700757484H1
caagatttttgttttggcacagagtgatgtctttcccaggttattcctttggcacctggaagctaaggggaggttttacttgaactggattataggttcttat

SEQ ID NO: 65834 - DNA, 235 bp, Glycine max
  Clone ID: 700757485H1
gcaagaaaaagactggctatctttagttgctgttcatagtgatgcatggttacttgctattgcattctattttggagccagatttgggtttgataaagctgacaggaaacggcttttcaacatgatcaatgaactgccaacaatatttgaagttgttactggtgcagcaaagaagcaagttaaggagaagtcttcagtttcaaaccacagtggcagcaagtctaagtccagctct

SEQ ID NO: 65835 - DNA, 233 bp, Glycine max
  Clone ID: 700757486H1
cttattaacactttccttagttcaatatggggaagcccttcttcactctctctctttcttccctttgcttgctactcttgtcgagtgcatgctttgctattacctccagcaagttcaacgagtgccaactcaacaacctcaacgcgttggaacccgaccaccgcgttgagtccgaaggtggtcttattgacacatggaactctcaacaccctgagctgcaatgcgccggtgtc

SEQ ID NO: 65836 - DNA, 244 bp, Glycine max
  Clone ID: 700757487H1
gacgaaggagctcttcttctaccacactttaattcaaaggccatagtgatactagtgattaatgaaggagatgcaaacattgaacttgttggcattaaagaacaacaacagaagcagaaacaggaagaggaacctttggaagtgcaaaggtacagagctgaattgtctgaagacgatgtatttgtacttccagcagcttatccatttgtcgtccacgctacctaaaaccacaatttccgagctt

SEQ ID NO: 65837 - DNA, 160 bp, Glycine max
  Clone ID: 700757488H1
tgcagaccgagctagctagctagcaagcaagcacagagatggaggcaaagcgaggccatgccctcatgtgcttggcacgtgtttcactcttcctctgcgctctaaccctatccgctgctcacggaagcaccacggttcaagacatcgcgagaaagttgaa

SEQ ID NO: 65838 - DNA, 161 bp, Glycine max
  Clone ID: 700757489H1
tctccattgtctttgaacactcatcaccatggccaagcttgttctttccctttgtttccttcttttcagtggctgcttcgctctgagagagcaggcacagcaaaatgagtgccagatccaaaaactcaatgccctcaaaccggataaccgtatagagtcag

SEQ ID NO: 65839 - DNA, 246 bp, Glycine max
  Clone ID: 700757490H1
accaattcacatcactgaaggaaattatgtcagaaagcaagatgtcagcattgaatatgatgcatgtacaattccaaatgattgtggttcattggttgttgccaaggttggaaatcacaaacaaattgttggtttccatgttgctggaagcaaaggaagactgggatatgcttcattgataccatatgttgagccagttgtgcaagctcaaagtgctgaagtttactttgacttcttccctgtgga

SEQ ID NO: 65840 - DNA, 235 bp, Glycine max
  Clone ID: 700757491H1
cctagttcaatatcctagtataccttaataaataatttaagatactatgatgagagcacggttcccattactgttgctgggacttgttttcctggcttcagtttctgtctcatttggcattgcttactgggagatagagaaccccaaacacaacaagtgtctccagagttgcactagcgcgagagactcgtacaggagccaagcatgtcacgctcgttgcaacctccttaaggtg

SEQ ID NO: 65841 - DNA, 201 bp, Glycine max
  Clone ID: 700757492H1
gttcaatatcctagtataccttaataaataatttaagatactatgatgagagcacggttcccattactgttgctgggacttgttttcctggcttcagtttctgtctcatttggcattgcttactgggaaaaagagaaccccaaacacaacaagtgtactccagagtttgcaataggcgagagagactcgtaccaggaacca

SEQ ID NO: 65842 - DNA, 239 bp, Glycine max
  Clone ID: 700757493H1
gtgcggtttcctttgttggtgttgctgggaactgttttcctggcatcagtttgtgtctcattaaaggtgagagaggatgagaataaccctttctacttgagaagctctaacagcttccaaactctctttgagaaccaaaacggtcgcattcgtctcctccagagattcaacaaacgctccccacaacttgagaactttcgagactaccggattgtccagtttcagtcaaaacccaacac

SEQ ID NO: 65843 - DNA, 117 bp, Glycine max
  Clone ID: 700757494H1
gctatacacacacacacacacactaagaataatggcttctatcctccactactttttagccctctctctttctttctctttccttttcttcttatccgactccgtccccattcccca

SEQ ID NO: 65844 - DNA, 106 bp, Glycine max
  Clone ID: 700757495H1
tgctcacattggtgaattgaaatctggtgtctatgttccactgcctacaaaaaacaaaatggtggaaactcccaaggactggcaactggatctaccttgtgacaaa

SEQ ID NO: 65845 - DNA, 118 bp, Glycine max
  Clone ID: 700757496H1
actaacaattccttcacttgcagcactgttgcatcatcatcttcattgcaaaaccctaaacttcaccttcaaccatgaccacacaagtaccaccacacagtgtccaagtccacacaac

SEQ ID NO: 65846 - DNA, 274 bp, Glycine max
  Clone ID: 700757501H1
tgatccttttcttggtggaattcaaaaatatgccactcccatgatgcccctagatgaagaaattctttctaaggttgcacaagatatagttgaggaatggtttgattgtgttgatgaggaggattcctttgaggaagtttctttgagtgcagcactcaatggtgttgagggtttggactatatggaaagaattcctcttgccacatctgagggttttcctcatgtgctttcacgcaaaaatggtgaaaaaggcaaaaggagatttgtttctggg

SEQ ID NO: 65847 - DNA, 269 bp, Glycine max
  Clone ID: 700757502H1
ttcattatgcagaaaagggacaagcttagttgtcaagttggaatcaacccatactccatggaatggactggtttggccaatagattactgagtaagggcaacgatattctgtgttgcgattatgctagttttgatggtttgattaccaagcaagttatgagcaaaatggcagaaatgataaacagtctttgtggtggtgatgcaaaattgatgcgtgaaaggacacacctgctgttggcttgttgttcaaggatggcaatttgtaagaa

SEQ ID NO: 65848 - DNA, 259 bp, Glycine max
  Clone ID: 700757503H1
caggaggaaattctgtcttctagtgcaagtgatttcagaactgcaatggtgagtagaaatagcaagcctcaagctactgcaatgcatgtgggagctatagaaattatcattgatagtttcgcaagtcctgactgcaacatagttggtgcaatgctcttggttgatacttatcataccaatcctgaaaatgcagttcgtagtatttttgtcgcgcctttcagaggcggaaggcctattcgggtggttacatttccgaata

SEQ ID NO: 65849 - DNA, 267 bp, Glycine max
  Clone ID: 700757504H1
tgataacttaattagtgttcatcaccatacacacacaaagaaacaaaatttttgaaggattgtaaaaacatacttggagctttgtgtgtgtatggtgatgataacttaattagtgttcatgaatacgtcaagccttactttagtggttctaaattgaaaagctttctagctggacataatatcaccattactgatggtattgacaagactagtgcaactttgcaatttagaaagttagcagattgtgattttctcaagagaaacttt

SEQ ID NO: 65850 - DNA, 264 bp, Glycine max
  Clone ID: 700757505H1
actcgagccgctcgagccgagttattgtgatcaagcagacaaccaaccagaggctgggacgagtgtcacttgtgtaattcacctaactccttcatctgttgtgagttgttcaaattaccaaaaatggatgaagaaatttggttctgctcaacatatcatggctggacatgaaaagaagaatgtagagattcctattttgaaagctagtgcaagaattgcaacacggcttaattacttgtgtcctcagttctttccagctccagg

SEQ ID NO: 65851 - DNA, 263 bp, Glycine max
  Clone ID: 700757506H1
tcctagtacaccgtattaaagaatttaagatatactatgatgagagcgcggttcccattactgttgctgggagttgttttcctggcatcagtttctgtctcatttggcattgcgtattgggaaaagcagaaccccagtcacaacaagtgcctccgaagttgcaatagcgagaaagactcctacaggaaccaagcatgccacgctcgttgcaacctccttaaggtggaggaagaagaagaatgcgaagaaggtcaaattccacg

SEQ ID NO: 65852 - DNA, 259 bp, Glycine max
  Clone ID: 700757507H1
taccaggtgattttgtcattggtgttaagttgacaaccataaacaatatgtgtgcatatgggctcaatcctggtatttcaggttctcgtcttttgggcaccattcctcagtccatttcacagcaaactgtttggactcaaatggcaacagtgagaacaccattgaattttgattctagcaagcagagcttttgtcaattttctattgaccttctcggtggaggaattttagtggacaaaactggagattggatcacact

SEQ ID NO: 65853 - DNA, 262 bp, Glycine max
  Clone ID: 700757508H1
acactcatcaccatggccaagcttgttctttccctttgtttccttcttttcagtggctgcttcgctctgagagagcaggcacagcaaaatgagtgccagattcaaaagctgaatgccctcaaaccggataaccgtatagagtcggaaagtgggttcattgagacctggaagcctaacaacaagccattccagtgtgccggtgttgctctctctcgctgcagccttaaccgcaatgcccttcgtagaccttcctacaccaacg

SEQ ID NO: 65854 - DNA, 262 bp, Glycine max
  Clone ID: 700757509H1
caaaactcattttccaactacatttcttccaccaactcataaaatcgtcatatctgttcccaaaagcttgtttgtgagaatggcttcgggtgaaaagaaattcccacctcaacaacaacaaacacagcctgggaaggagcatgctatgaatccagtaccccaattcactagccctgactacaagccttcaaataaacttcaaggaaagatagcattagtgactgggggtgactctgggattggacgagcggtgtgtaacttg

SEQ ID NO: 65855 - DNA, 263 bp, Glycine max
  Clone ID: 700757510H1
ttaattattaacacttccttagttcaatatggggaagcccttcactctctctctttcttccctttgcttgctactcttgtcgagtgcatgctttgctattagctccagcaagctcaacgagtgccaactcaacaacctcaacgcgttggaacccgaccaccgcgttgagtccgaaggtggtttgattcaaacatggaactctcaacaccctgagctgaaatgcgccggtgtcactgtttccaaactcaccctcaaccgcaatg

SEQ ID NO: 65856 - DNA, 239 bp, Glycine max
  Clone ID: 700757511H1
caggttgatgcctgaaccaacagctgtggctttgttatatggacagcaacaacagcagacttctcatgagaatatgggcagtggaactgagaaaattgctctcattttcagtatgggtgctggttattgtgatgttgctgtcactgctacagcgggtggagtatcacagattaaagccttggcaggaagtaccattggtggtgaagacttgcttcagaatatgatgcatcatctgctac

SEQ ID NO: 65857 - DNA, 262 bp, Glycine max
  Clone ID: 700757512H1
attgtttgcaattcgtggatttacaatgccaaactcttcaaaagtgaccgcattttctttgccaaccagacatatcttccaagtgagacaccagctccactagtcaaatatagagaagaagagttgcataatttaagaggagatggaactggagaacgcaaagagtgggaaaggatctatgattatgatgtctacaatgatttaggtgatccggataaaggtgaaaatcatgcccgtcctgttctcggaggacatgacacct

SEQ ID NO: 65858 - DNA, 264 bp, Glycine max
  Clone ID: 700757513H1
cgggtgctgatcgtgccacaaaactttgtggtggctgcaagatcacagagtgacaacttcgagtatgtgtcattcaagaccaatgatacacccatgatcggcactcttgcaggggcaaactcattgttgaacgcattaccagaggaagtgattcagcacactttcaacctaaaaagccagcaggccaggcagataaagaacaacaaccctttcaagttcctggttccacctcaggagtctcagaagagagctgtggcttagagc

SEQ ID NO: 65859 - DNA, 266 bp, Glycine max
  Clone ID: 700757514H1
cttggttgtttattatacaatagcaactcgatttagaaaatttctaccgcattacattaggtggcatctgtataccttgttgatctacattctcccatcttttctcactgctgaaattaaatataagcggaatcagagtaatattcagatttccggcttattttacgacggcagatacaaattctggactaaacacgagaaaaatcttgctttgacagaagaggaaaagatggaagtgattagaaatagaggcattcctgctgatg

SEQ ID NO: 65860 - DNA, 285 bp, Glycine max
  Clone ID: 700757517H1
gcgtacttcggctcgaggcaccagcaagatagctgccgcaagcagctccagggggtgaacctcacgccctgcgagaagcacatcatggagaagatccaaggccgcggcgatgacgatgatgatgatgacgacgacaatcacattctcaggaccatgcggggaagaatcaactacataaggaggaacgaaggaaaagacgaagacgaagaagaagaaggacacatgcagaagtgctgcacagaaatgagcgagctgagaagccccaaatgccagtgcaaagcgctg

SEQ ID NO: 65861 - DNA, 265 bp, Glycine max
  Clone ID: 700757518H1
ctcgagccgttctgctttgggtctcacagggaagtcaagtagcggaaatcaggaagtgtggttggttgtgaaagcgcagtggctatcttatttaaatgatttggtgatctctaccctgaatttagaattcttggattgtacttttgcttctacttttcgatggtctagtatgagagcatttcttaaattacttctccgttgtttcgtcttgggtctcgtgatgtgggatggctgttgaaggcttgaagcagtggctatcttattg

SEQ ID NO: 65862 - DNA, 256 bp, Glycine max
  Clone ID: 700757519H1
catacatactagtgttggtgggttgcaaagatgcttggggaccttctccataggggtcataagatttaagggacagtggtgttgatgcgcaagaatgtgttggacgtgaatagcgtaaccagcgttgggggaattattggtcaaggtctcgacttagttggctcaacactcgatactcttactgccttcttgggccgatccgtgtctctccagcttattagtgctaccaaagctgatgccaacggaaaagggacac

SEQ ID NO: 65863 - DNA, 262 bp, Glycine max
  Clone ID: 700757520H1
atcgtttaatgcctgtgttggagcccattatatctttctttggtgactcccaagctagagcaactgaggaggatcatgaggactcataatgaatgttggtgctccttggcagcatagtgttaaagcaaattggacctttaggcacaagattgttgatttagagaaagattgtttgagattacattaatttaactttattttgcaaaaaaattggacctttaggattttatcatttgttctgttgtgactttctaattttata

SEQ ID NO: 65864 - DNA, 259 bp, Glycine max
  Clone ID: 700757522H1
ggaagcccttctctctctctctttcttccctttgcttgctactcttgtcgagtgcatgctttgctattagctccagcaagctcaacgagtgccaactcaacaacctcaacgcgttggaacccgaccaccgcgttgagtccgaaggtggtttgattcaaacatggaactctcaacaccctgagctgaaatgcgccggtgtcactgtttccaaactcaccctcaaccgcaatggcctccacttgccatcttactcacctta

SEQ ID NO: 65865 - DNA, 258 bp, Glycine max
  Clone ID: 700757523H1
cagagttgcaatagcgagagagactcgtacaggaaccaagcatgccacgctcgttgcaacctccttaaggtggagaaagaagaatgtgaagaaggtgaaattccacgaccacgaccacgaccacaacacccggagagggaacctcagcaacccggtgagaaggaggaagacgaagatgagcaaccacgtccaatcccattcccacgcccacaacctcgtcaagaagaagagcacgagcagagagaggaacaggaatgg

SEQ ID NO: 65866 - DNA, 259 bp, Glycine max
  Clone ID: 700757524H1
gttcattgttttattctcttaaatcacagaatctctagtttttgttcagttcattgttttattctcttaaatcacagaatctctagtttttgttcaaatttgactttaactttctaaagggtgtttctgtgtgtgtttgtttgttttcatcttccttcatgataattgtttgtgagaaatgggaattctgttttcagcatgtgtgtttagttggcaagaaaacatgagaaaagcaattttgatttttgaattttccgtt

SEQ ID NO: 65867 - DNA, 259 bp, Glycine max
  Clone ID: 700757525H1
taccttaataaataatttaagatactatgatgagagcacggttcccattactgttgctgggacttgttttcctggcttcagtttctgtctcatttggcattgcttactgggaaaaagagaaccccaaacacaacaagtgtctccagagttgcaatagcgagagagactcgtacaggaaccaagcatgccacgctcgttgcaacctccttaaggtggagaaagaagaatgtgaagaaggtgaaattccacgaccacgacc

SEQ ID NO: 65868 - DNA, 259 bp, Glycine max
  Clone ID: 700757527H1
gagatctcgtctttgaagtttctaagatgacttctccctacattaaatgtacagtctctttcttcatagcatttggaaatttggctgatgacaccatcaattttgaggcttttccccacaagctggtgcagtttggagagattcaggaaaaagttgtattgaaattttcacaagaggaatttcttacagcttggtcaactcaggtgcgtcctgcaacaactctgttggctgatgggtgcccatatttgtatgctatggt

SEQ ID NO: 65869 - DNA, 262 bp, Glycine max
  Clone ID: 700757528H1
ctaacaattccttcacttgcagcactgttgcatcatcatcttcattgcaaaaccctaaacttcaccttcaaccatgaccacacaagtaccaccacacagtgtccaagtccacacaacaacacacccctacgaagctggcgtcgtcccccccggagcccgtttcgaaccgccgcgttatgaagccggcgtcaaagcgccctccatttaccattccgagagaggtccaacgacttcccaggtcctcgccgtcctcgccggcctc

SEQ ID NO: 65870 - DNA, 260 bp, Glycine max
  Clone ID: 700757529H1
caacgattaacaatggcttcaaccgacaagtcaccggacccaacgccggcgaagggtccggatccaactccggggaagccgatgagtgttggtcagcacgtgatcgacaagagtgcaatgatggtgcagtcgctggaccccattaagctgatgagtcagcacgtgtgctccttcgctatctacagccatgacatgtctcgccagatagagacacatcactactgctccagactccaccagaacttcatacaatgtgctgt

SEQ ID NO: 65871 - DNA, 237 bp, Glycine max
  Clone ID: 700757530H1
atatagtgcaactttgcaatttagaaagttagcagattgtgattttctcaagagaaactttaggcagatgtctaatgttttgtgggtggctcctgaggacaaggcgagtgtatggtcacaacttcattatgtgtcatgtaataatctggacattcaagaagcttatcttgtcaatctcgtaaatgtgttacgagaattgtatttgcacagtccagaggaagctcgccaattgagagg

SEQ ID NO: 65872 - DNA, 262 bp, Glycine max
  Clone ID: 700757531H1
gtgtgattgatgctgtcatcggtgctttgagcaaagcaggttatgataaaccaggatcccaaaaggtttatattcaatccactaatagttctgtactgctgaagttcaaggagaaaaccagttatgagcttgtgtacaagattgacgagaccattggtgatgccgctaatgcagctgttgaggatataaagagctttgctagttctgtggttgtcaacaaggactccataattcctaataatgatcaattcctgacggccta

SEQ ID NO: 65873 - DNA, 276 bp, Glycine max
  Clone ID: 700757532H1
ttcggctcgagaatgaataacatggtccatacttttgttgttggtgatgatcagtcaacaccatatttggacaagctacattcttggctaaaacgggtaggtgcaaatgtcaaggcacatatttctgacaatgaactttgcattgaggaagaggagaaggaaaatattagtagtgtacatagtgaaaaacttgcatttgcatttggtttaatagattctcatcacacacctcaaattttacgtatagtaaagaatttgagaatgtgtagagattgc

SEQ ID NO: 65874 - DNA, 263 bp, Glycine max
  Clone ID: 700757533H1
ctactggctcctgttttgaaggctgtaattgagaaaaccaatgtgaacccaagtgaagttggggatattgttgtaggtagtgtattggctcctggagctcaaagagctagtgaatgccgaatggctgcattttatgctggttttcccgaaactgtgcctgttaggaccgttaataggcaatgttcatctgggctccaggctgtcgctgatgtagctgctgctataagggctgggttctatgacattggtattggtgccggttt

SEQ ID NO: 65875 - DNA, 261 bp, Glycine max
  Clone ID: 700757534H1
ctcgagccgctcgagccggttcaatatcctagtataccttaataaataatttaagatactatgatgagagcacggttcccattactgttgctgggacttgttttcctggcttcagtttctgtctcatttggcattgcttactgggaaaaagagaaccccaaacacaacaagtgtctccagagttgcaatagcgagagagactcgtacaggaaccaagcatgccacgctcgttgcaacctccttaaggtggagaaagaagaa

SEQ ID NO: 65876 - DNA, 258 bp, Glycine max
  Clone ID: 700757536H1
ctaatccgttcattttttttttgtttaattattttgtggggatttgctagaatctgttttcagtcttttatgaaatttaaagctgggggagctcaaaactttaattatattaactttttgatctaattcagaagtaattacttggtgtatacatagttttttttttggtttaccttaattagcgatttagctatttcgcaatagaagtctcatttcctttgtttttgaagataaactgatttgggaaggggagaagtt

SEQ ID NO: 65877 - DNA, 254 bp, Glycine max
  Clone ID: 700757537H1
agagaatataggaatataagaactaagatggattggatcggagcgtaccgcggaggccagagaagcagggactggtgcgacccttcatcaccattcactgatttgtgggaccctcgtcgtgtcggtgacgctgatgatatcacctcctctctcgcccatgctcacgttgactggcgtgagactgataaagctcatatcttccgtgctgatcttccaggggtgaagaaagaggatctgaaggtgcaggtggagga

SEQ ID NO: 65878 - DNA, 253 bp, Glycine max
  Clone ID: 700757539H1
ttttaatgagatgctcattagatatagctatgaaaaattactgcgccaggctaaagctccaagtatgtttttacaatccttcaaaaattttgtttctttgtgtgtgtatggtgatgataacttaattagtgttcatgaatacgtcaagccttactttagtggttctaaattgaaaagctttctagctggtcataatatcaccattactgatggtattgacaagactagtgcaactttgcaatttagaaagtta

SEQ ID NO: 65879 - DNA, 249 bp, Glycine max
  Clone ID: 700757543H1
atggaagagtgagcatggacgtgtctaccataaccacgaagaagaggcaaagagacttgagattttcaagaataacttgaactatatcagggacatgaatgcaaacagaaaatcaccccattctcatcgtttaggattgaacaagtttgctgacatcactcctcaagagttcagcaaaaagtacttgcaagctcccaaggatgtgtcgcagcaaattaaaatggccatcaagaaaatgaagcgggaaca

SEQ ID NO: 65880 - DNA, 258 bp, Glycine max
  Clone ID: 700757544H1
ctcaccgattgctagaatggaatttcgatgctcagtcatctcttttaccattctcttctctcttgctcttgcaggagagagccatgtccatgcatcgctacctgaggaagattattgggaagctgtttggccaaacactcccattcccactgcactgcgagagcttctaaagcctctccctgcaggtgtagaaatcgatgaactccctaagcaaattgatgatacacagtacccaaaaacattcttctataaagaaga

SEQ ID NO: 65881 - DNA, 256 bp, Glycine max
  Clone ID: 700757545H1
gtctttgaacactcatcaccatggccaagcttgttctttccctttgtttccttcttttcagtggctgcttcgctctgagagagcaggcacagcaaaatgagtgccagatccaaaagctgaatgccctcaaaccggataaccgtatagagtcggaaggtgggttcattgagacctggaaccctaacaacaagccattccagtgtgccggtgttgccctctctcgctgcacccttaaccgcaatgcccttcgtagacc

SEQ ID NO: 65882 - DNA, 260 bp, Glycine max
  Clone ID: 700757546H1
ctccaactccattgttggaatctggtttgcaaaaagacagagggttaattgtggaatattttggaaggatgtcttacgatgctcataacgttaatcagccccaagagaaagatttgttggagggaaatttttcctttgatattaaatctcgctctagattggaaaaagtttcctctacaaaagcacaatttgttagtggaaaaaccttcaaatatgatataattggtgctggttcacattcttcagatgattttcctgaa

SEQ ID NO: 65883 - DNA, 262 bp, Glycine max
  Clone ID: 700757547H1
cccaactaacaataattccttcacttgcagaacttagttctctgttgcatcatcatcatcttcattagtgttagccctaaacttcaccttcaaccatgaccacagtgccaccacacagtgtccaagtgcacacaacaacacaccgctacgaagccggcgtcgtcccgccggctcgttttgaggcgccgcgttacgaagccggcatcaaggcgccctcatccatttaccattccgagagaggtccgacgacctctcaggttct

SEQ ID NO: 65884 - DNA, 258 bp, Glycine max
  Clone ID: 700757549H1
aacttattaacactttccttagttcaatatggggaagcccttcttcactctctctctttcttccctttgcttgctactcttgtcgagtgcatgctttgctattacctccagcaagttcaacgagtgccaactcaacaacctcaacgcgttggaacccgaccaccgcgttgagtccgaaggtggtcttattgaaacatggaactctcaacaccctgagctgcaatgcgccggtgtcactgtttccaaacgcaccctcaa

SEQ ID NO: 65885 - DNA, 260 bp, Glycine max
  Clone ID: 700757550H1
ctcgagccgtttcgatcttcgatctctgaaaatgagagagtgcatttcaatccacatcgatcaggccggtattcaggtcggaaacgcctgctgggagctctactgcctcgaacacggcattcagcctgatgggcagatgccaagtgataagactgttggtggaggtgatgatgctttcaacaccttcttcagtgaaactggggctggaaagcacgtgcctcgtgcgatttttgtagatctcgagcctactgtgattgatg

SEQ ID NO: 65886 - DNA, 259 bp, Glycine max
  Clone ID: 700757551H1
cacgaccacaacacccggagagggaacgtcagcaacacggtgagaaggaggaagacgaaggtgagcagccacgtccattcccattcccacgcccacgccaacctcatcaagaggaagagcacgagcagaaggaggaacacgaatggcatcgcaaggaggaaaaacacggaggaaagggaagtgaagaggaacaagatgaacgtgaacacccacgcccacaccaacctcatcaaaaggaagaggaaaagcacgaatggca

SEQ ID NO: 65887 - DNA, 254 bp, Glycine max
  Clone ID: 700757552H1
ttaattattaacacttccttagttcaatatggggaagcccttcactctctctctttcttccctttgcttgctactcttgtcgagtgcatgctttgctattagctccagcaagctcaacgagtgccaactcaacaacctcaacgcgttggaacccgaccaccgcgttgagtccgaaggtggtttgattcaaacatggaactctcaacaccctgagctgaaatgcgccggtgtcactgtttccaaactcaccctca

SEQ ID NO: 65888 - DNA, 264 bp, Glycine max
  Clone ID: 700757553H1
gtttttccacggtatacctcagccttttcaacttcatcacaactattggtgtctgcatcacaatattcctcatcagaacaaaactggacacaatcttcatcgacagaataaaactgcatgaattgagtgaaataacctagagttaatgccaaacacttcttcaacattgaatctttggagaatgctgggtacgtcatcaaagccaacctcatgttgtgtggcatccatcactttttggaagaccccaaggtggtggtgcctgaa

SEQ ID NO: 65889 - DNA, 254 bp, Glycine max
  Clone ID: 700757554H1
actcttcttagttccagcacaacaagctctccatttctcccacactttcttttctttcaccaaaaatgtcaccatctttcacacttttgttcttcccggaactcatgcagtcccctatgatcactttccaagccaccctctgcgtccttctcttcaccctcatgttcacgctgctcttcactcctggtgggcttccttgggcctgggcccggcccagacccatcatccctggcccagtaactgccctgttaggg

SEQ ID NO: 65890 - DNA, 250 bp, Glycine max
  Clone ID: 700757555H1
atgaaatcaaggattctgtggttgctggattccagtgggcatcaaaagaaggtgctttggctgaagaaaacatgagagccatctgctttgaagtatgtgatgttgtgctgcacgctgatgctatccacagaggaggtggtcaaatcattcctactgccaggagagtcttctatgcttcccagattactgccaaacccaggcttcttgagcctgtctacctggttgaaatacaggctcctgaacaagctct

SEQ ID NO: 65891 - DNA, 255 bp, Glycine max; identical to SEQ ID NO: 61930
  Clone ID: 700757556H1

SEQ ID NO: 65892 - DNA, 253 bp, Glycine max
  Clone ID: 700757557H1
gaaaaattgatgcgtgaaaggacgcacctgctgttggcttgttgttcaaggatggcaatttgtaagaaagatgtttggagagttgaatgtggaatcccttctggatttccgctcacagttatttgcaatagcatttttaatgagatgctcattagatatagctatgaaaaattactgcgccaggctaaagctccaagtatgtttttacaatccttcaaaaattttgtttctttgtgtgtgtatggtgatgata

SEQ ID NO: 65893 - DNA, 253 bp, Glycine max
  Clone ID: 700757558H1
gagagaaatcttgctttgacagaagaggaaaagatggaagtgattagaaatagatgcattcctgctgatgttcttgcaaagcgagctcatgcatttgaaaaacatgttgctcatgaaagtctcaaggatcaaattcctgctgttgacaagttgtattctactaagggtaataagtttgctgaaattatgtaccttagacaaagtgttgttggtgatcttatactgcttactgatgggtagttgtctgagggta

SEQ ID NO: 65894 - DNA, 253 bp, Glycine max
  Clone ID: 700757559H1
atggccaagcttgttctttccctttgtttccttcttttcagtggctgcttcgctctgagagagcaggcacagcaaaatgagtgccagatccaaaagctgaatgccctcaaaccggataaccgtatagagtcggaaggtgggttcattgagacctggaaccctaacaacaagccattccagtgtgccggtgttgccctctctcgctgcacccttaaccgcaatgcccttcgtagaccttcctacaccaacggtc

SEQ ID NO: 65895 - DNA, 252 bp, Glycine max
  Clone ID: 700757560H1
cacacaagagcgagcgcaacattattcgagtacgtagcttaacaatattttaagcaattgctgctacaatgatagcgcggtttcctttgttgccgttgctgttgctgggaattgtttttctagcatcagtttctgtctcattacaggtgaagccgccgagtcaccacgagtgcctccagagttgcgagagtgaaacggatccatacaagcggaaagcatgcaagcttagttgcaagttcgttcctgagcacg

SEQ ID NO: 65896 - DNA, 257 bp, Glycine max
  Clone ID: 700757561H1
ggtccttaaacactcatcagtcatcaccatggccaagctagttttttccctttgttttctgcttttcagtggctgctgcttcgctttcagttccagagagcagcctcagcaaaacgagtgccagatccaaaaactcaatgccctcaaaccggataaccgtatagagtcagaaggagggctcattgagacatggaaccctaacaacaagccattccagtgtgccggtgttgccctctctcgctgcaccctcaaccgca

SEQ ID NO: 65897 - DNA, 257 bp, Glycine max
  Clone ID: 700757562H1
gcaaatcctaaaaagttcactgagatatatagaactatcttcaatttcacaaaatgaagaaagtgtttgtcacatttgtagctctgctagttgtatttgttcttacagtgacagcttcagagtcaaagccaccagtcacaacaaattcagcaccaaatgactacaattgttcacaagtgatgaataacttgtttgtttcgtgcgtagattacctcattggtggagatgctgttccttcaggtgtttgttgccaaagt

SEQ ID NO: 65898 - DNA, 259 bp, Glycine max
  Clone ID: 700757563H1
gtaacagtctgtgtctgtgtgtgtgttcagtttaacaaatggatcaagctgtccactgatctgtaaccgtggtggactcgacaagacaacaacaatattcagaacattaacaagaccacaccacaccatgagcgtcatcgacattctcaccagagttgattccatttgcaaaaagtacgacaaatacgacgtccaaagccaaagggactccaatctctcctccgacgatgcattcgccaaactctacgcctccgtcgac

SEQ ID NO: 65899 - DNA, 206 bp, Glycine max
  Clone ID: 700757564H1
cggttcgaggagaaagtgtctctccagtatccactcttggcgtttacaagaatcgttttatatttgatcatcctctttccctctctctctctctctcaaccccgattccagaatattccgaacgccatgtttcatggccgtcaagatccagagatttgagttgatggggggtaacatttccaaggaggatagcatttggaggcaga

SEQ ID NO: 65900 - DNA, 261 bp, Glycine max
  Clone ID: 700757565H1
gccatggcgatgagaaccaaactttctttagctatctttttcttttttcttttacccttattttcaaacctagcctttggcaaatgtaaagaaaccgaggtagaagaagaagaccctgagctcgtaacatgcaaacaccaatgccaacagccacagcaatacactgagggtgacaagcgggtatgcttgcaaagatgtgacaggtatcatcgtatgaagcaagagcgagagaaacaaatccaagaggaaactcgtgagaag

SEQ ID NO: 65901 - DNA, 273 bp, Glycine max
  Clone ID: 700756966H1
ttgtctttgaacactcatcaccatggccaagcttgttctttccctttgtttccttcttttcagtggctgcttcgctctgagagagcaggcacagcaaaatgagtgccagatccaaaagctgaatgccctcaaaccggataaccgtatagagtcggaaggtgggttcattgagacctggaaccctaacaacaagccattccagtgtgccggtgttgccctctctcgctgcacccttaaccgcaatgcccttcgtaaccttcctacaccaacggt

SEQ ID NO: 65902 - DNA, 270 bp, Glycine max
  Clone ID: 700756968H1
ggaacaggaatggcctcgcaaggaggaaaaacgcggagaaaagggaagtgaagaggaagatgaggatgaggatgaggaacaagatgaacgtcaattcccattcccacgcccacctcatcagaaggaagagcgaaagcaagatgaagatgaggatgaggagcagcagcgagagagcgaagaaagtgaagattctgagttacgaagacatgagaataagaacccttttctcttcggctctaacaggttcgaaactccttcaaaaaccaatat

SEQ ID NO: 65903 - DNA, 267 bp, Glycine max
  unsure (1)..(267): unsure at all n locations
  Clone ID: 700756970H1
ggacagtgagaaaactttgtcagcaanaaaagttccaagctgaatgtcggatatcttctaaagtgggattagaataaagacctatttagaagatatcccacattcagcttgggaccttttttgctgggacagtgagaaaactttgccaaataatttttctgcagaattgctctcttgcaaattggatactgttactggccaatattatcctcagtgggctccgattaattgtcgagttcatcgacaaccattcacatcactgaagga

SEQ ID NO: 65904 - DNA, 269 bp, Glycine max
  Clone ID: 700756972H1
agatcatacatagtagtgttggtgggttgcaaagatgcttgggggtcttctccataggggtcataagataaaagggacagtggtgttgatgcgcaagaatgtgttggacgtgaatagcgtaaccagcgttgggggaattattggtcaaggtctcgacttagttggctcaacactcgatactcttactgccttcttgggccgatccgtgtctctccagcttattagtgctaccaaagctgatgccaacggaaaaggaaacttggaaaggc

SEQ ID NO: 65905 - DNA, 271 bp, Glycine max
  Clone ID: 700756973H1
gcggcaaggcaaatctgcattgcgatggcgcctccgaagctcttcgtctttgcgctttctgtaaccctaattttcgccatcgttgggcgccgaagccgatatttccatcgaaggaagcactccagagcctgatacctccgccatcaggatccaattagatcaactcaattccaagatccaaattctcgagtctcaaatcagcgaaaagttggaagaagtgaagaagaaggacgaaattatagcagaaaaagaaagtccattgaagataaat

SEQ ID NO: 65906 - DNA, 269 bp, Glycine max; identical to SEQ ID NO: 58204
  Clone ID: 700756975H1

SEQ ID NO: 65907 - DNA, 268 bp, Glycine max
  Clone ID: 700756976H1
agacgtactcgtgattcctcctggtgttccttactggacctataacactggcgatgaaccagttgttgccatcagtcttcttgacacctctaacttcaataaccagcttgatcaaacccctagggtattttaccttgctgggaacccagatatagagtacccagagaccatgcaacaacaacaacagcagaaaagtcatggtggacgcaagcaggggcaacaccagcaggaggaagaggaagaaggtggcgcgtgctcagtggcttca

SEQ ID NO: 65908 - DNA, 266 bp, Glycine max
  Clone ID: 700756977H1
gaagaaattcaaccaagcgcgggtaaacggcgggagtaactatgactctcttaaggtagccaaatgcctcgtcatctaattagtgacgcgcatgaatggattatcgagattcccactgtccctgtctactatccagcgaaaccacagccaagggaacgggcttggcggaatcagcggggaaagaagaccctgttgagcttgactctagtccgactttgtgaaatgacttgagaggtgtaggataagtggagctggaaacagcgaaa

SEQ ID NO: 65909 - DNA, 264 bp, Glycine max
  Clone ID: 700756979H1
catgggaaacaaaactacccttttgcttttgctctttgttctttgccatggagtggccacaacaacaatggccttccatgatgatgagggtggtgataaaaagtcaccaaaaagtttgtttttgatgagcaactccacgagggttttcaagactgatgcaggggaaatgcgtgtgctgaaaagccatggtggtaggatattttataggcacatgcacattggcttcatctctatggaaccaaagtccttgtttgttcctcagta

SEQ ID NO: 65910 - DNA, 264 bp, Glycine max
  Clone ID: 700756980H1
caaggtttcagcttttgagtaccactaccaatggtgattttgttcaagggaaagatctcgcaatggttaaagttaatgtagcatgtgctgctgttggcttgacatcaagttacactccaactccattgttggaatctggtttgcaaaaagacagagggttaattgtggagtattttggaaggatgtcttacgttgctcataacgttaatcagccccaagagaaagatttgttggagggaaatttttccttgatattaaatctcg

SEQ ID NO: 65911 - DNA, 270 bp, Glycine max
  Clone ID: 700756981H1
cctagatgaagaaattctttctaaggttgcacaagatatggttgaggaatggtttgattgtgttgatgaggaggattcctttgaggaagtttctttaagtgcagcactcaatggtgttgagggtttagactatatggaaagaattcctcttgccacatctgagggttttcctcatgtgctttcacgcaaaaatggtgaaaaaggcaaaaggagatttgtttctggggatggtgaagagatgacattgattccgggaccagtgttgaagag

SEQ ID NO: 65912 - DNA, 271 bp, Glycine max
  Clone ID: 700756982H1
aaaaggtttcgttcaaagtcacactcacctccgatccaaagttacccttcaaagtgtttagcgttccagaggcggcaccttttactgccgttctcaaattcgccgccgaagaattcaaagtcccgccccagaccagcgctatcatcaccaacgatggtgttggcataaatccccagcagagcgcaggcaatgtcttccttaagcatggttcagaactgcgcctgattccgcgtgatagggtcggtgccttttagatgttacgggtgtctga

SEQ ID NO: 65913 - DNA, 264 bp, Glycine max
  Clone ID: 700756983H1
gtgcggtttcctttgttggtgttgctgggaactgttttcctggcatcagtttgtgtctcattaaaggtgagagaggatgagaataaccctttctacttgagaagctctaacagcttccaaactctctttgagaaccaaaacggtcgcattcgtctcctccagagattcaacaaacgctccccacaacttgagaactgtcgagactaccggattgtccagtttcagtcaaaacccaacacaatccttctccccaccatgctgacg

SEQ ID NO: 65914 - DNA, 266 bp, Glycine max
  Clone ID: 700756985H1
ccttgctctatactacacagtacacacactagaagaataatggcttccatcctccactactttttagccctctctctttcttgctcttttcttttcttcttatccgactcagtcacccctacaaaaccaataaaccttgttgttctacccgttcaaaatgatggttccacagggctccattgggccaacctccaaaaaagaacccctctaatgcaagtaccagtcctggtggacctcaatggaaatcactgtgggttaactgtgag

SEQ ID NO: 65915 - DNA, 262 bp, Glycine max
  Clone ID: 700756986H1
gttcctcactgaccaagccaatgcgatgagaaccaaactttctttagctatctttgtcttttttcttttagccttattttcaaacctagcctttggcaaatgtaaagaaaccgaggtagaagaagaagaccctgagctcgtaacatgcaaacaccaatgccaacagccacagcaatacactgagggtgacaagcgggtatgcttgcaaagatgtgacaggtatcatcgtatgaagcaagagcgagagaacaaatccaagagg

SEQ ID NO: 65916 - DNA, 198 bp, Glycine max
  Clone ID: 700756987H1
gaagaaaaatccctccgagtcaactcggacgagttgcctcatcgtacggttccttcctcggactctttcctcttcttccccttccgaatcaccgttcgcagggttttgctctctctctctctctgtctctcgcttcgtttctagttcagatctcgcattggcttcagctgaaaccacgcggtttaatttcattccctt

SEQ ID NO: 65917 - DNA, 267 bp, Glycine max
  Clone ID: 700756988H1
cttctctgttaaaaaaaaattaggcgtctaaagggccaaagcttagaaagttgaagctttttttgttgaggtgaaagtgaaatggttggcaaggataatctgagggctgaggacttgaacttgtgctttaagaagcttatgatggtggccgggagtgggaacagtgagaaaggggtgaacttgaaggttggggtgatcaccgagtggaaggatattcctgtggagcttctgatgcaaattctgtcccttgtggatgatcagacggtg

SEQ ID NO: 65918 - DNA, 268 bp, Glycine max
  Clone ID: 700756989H1
gggagttgatcctggaactaaccctgtttgccatttccttggaagcaaggccattttatgggtacccaatttatctatggacactgcctatcagactaacgttgttgtttaattagtccatgcatctgcatcttgggcaccataagattgtatataaaataaattatggtgtgttgtgtatgttgtgcaagacctggaacttcacctttctacgtacgtgtgctgttaggatgcagtgtgctttgatgatctttgatgaatatgcagt

SEQ ID NO: 65919 - DNA, 265 bp, Glycine max
  Clone ID: 700756990H1
gtacgatttcttaagggaaagaaaatcactctctgtgctggccacagacttcgtgaatcattttcttttccactcttagtttattttctgaacactctcctatttgatataggacttcgtgtcagatttaaacttcttctgtttctttctcagttctctgcttaatttcaagttcaagctggtgaaatcttggattagtgctctcactcttctatctggtataggacttcgtgggtagacttttccattctctcctttctttcac

SEQ ID NO: 65920 - DNA, 255 bp, Glycine max
  Clone ID: 700756991H1
cattacgtttgtgtttggttctctttctcttctctttatctgaacgaaggagagagtgaaagatccttttgtggatcgaacatcttgcgttttattgtggtgttgaggatcgaaaatggatcagatattcaacaaggtcggatcctattggttcaaccagaaagcctccagccagctcaattccgttggtgatgacatcaattcgatgacaaacagtattgaagggggaaccaaatggttggtcaacaaataaaa

SEQ ID NO: 65921 - DNA, 188 bp, Glycine max
  Clone ID: 700756992H1
tgaaattttgataaaccgcgatcacaggttgccgcaccttaaaaccggaaacaaaagcaatcgttacttgatttcaagaatctctcaatttcttcctacttctttgtgtacgatttcttaagggaaagaaaatcactctctgtgctggccacagacttcgtgaatcattttcttttccactcttagtt

SEQ ID NO: 65922 - DNA, 266 bp, Glycine max
  Clone ID: 700756993H1
tgacaatctaattctgcaaaaatggcaagcaataaggagtctaagttcccagcacagagccagaaaactcagccaggaaaagaacatgtaatgaatccactcccacaagccacaaatcctgatcacaaggccgccaataaactccagggaaaggtggcgttggtgacaggaggtgactcaggaattggcagagcggtttacctgtgtttcgcaaaagagggtgcaaccgtggcctttacatacgtaaaggccatgaggacagggat

SEQ ID NO: 65923 - DNA, 263 bp, Glycine max
  Clone ID: 700756994H1
attttgattctagcaagcagagcttttgtcagttttctattgaccttctcggtggaggaatcttagtggacaaaactggagattggatcacacttatacaaaattctccaattagtaacttgttgagagttgctgcttggaagaaaggctgtttaatggtcaagattgtgatgtctgggaatgcagcagtcaaaaggagtgattgggcctcattggtacaagtgtttttaacaaacagcaacagtacgagcattttgatgcat

SEQ ID NO: 65924 - DNA, 262 bp, Glycine max
  Clone ID: 700756995H1
atggtactgcaattgatcccaaaaggggttctgttagcaacattgcacctttggcaattggactcattgttggggcaaacatccttgttggtgggccatttgatggagcctgcatgaaccctgctctagcttttgggccttccttagtgggctggagatggcaccaacactggatcttctgggtgggtccactgattgggtgtgcactggcagcactggtgtatgaatatgttgtgatcccaactagccccctcatcaacac

SEQ ID NO: 65925 - DNA, 267 bp, Glycine max
  Clone ID: 700756996H1
atggaatttcgatgctcagtcatctcttttaccattctcttctctcttgctcttgcaggagagagccatgtccatgcatcgctacctgaggaagattattgggaagctgtttggccaaacactcccattcccactgcactgcgagagcttctaaagcctctccctgcaggtgttgaaatcgatgaactccctaagcaaattgatgatacacagtacccaaaaacattcttctataaagaagaccttcatcaggcaaaacaatgaaag

SEQ ID NO: 65926 - DNA, 274 bp, Glycine max
  Clone ID: 700757001H1
tctcgagccgctcgagccgctcgagcggtgaggtagatctacggttaaattggtgtagtgtggtaagctgggaggaggatttagagtgacttcacttagttaggccatttctctcgtttcttcctgaagttcaaactgctgacaggaaagtgccatttagagagaaggtcatatacactgtgatctctcttttcattttcctggtttgtagtcagctccctctatatgggatacactcaacaacatgtgctgatccattctattggatgcgtgt

SEQ ID NO: 65927 - DNA, 268 bp, Glycine max
  Clone ID: 700757003H1
gtgttggtgggttgcaaagatgcttgggggtcttctccataggggtcataagataaaagggacagtggtgttgatgcgcaagaatgtgttggacgtgaatagcgtaaccagcgttgggggaattattggtcaaggtctcgacttagttggctcaacactcgatactcttactgccttcttgggccgatccgtgtctctccagcttattagtgctaccaaagctgatgccaacggaaaagggaaacttggaaaggctacctttttggaa

SEQ ID NO: 65928 - DNA, 269 bp, Glycine max
  Clone ID: 700757004H1
cacacacacacacacactaagaataatggcttctatcctccactactttttagccctctctctttctttctctttccttttcttcttatccgactccgtccccattccccaacaccacactaaccctacaaaacctataaaccttctggttctacccgttcaaaatgatgcttccacagggctccattgggccaacctccaaaaaaggacccctctaatgcaagtaccagtcctggtggacctcaatggaaaccacttgtgggttaact

SEQ ID NO: 65929 - DNA, 92 bp, Glycine max
  Clone ID: 700757005H1
cgtcgcaagtcgacaacgtcgctctctggtggtctggaagtaggtgaccatggatcagcagtgtcatcgtcatgtggtcttcatatatgtgc

SEQ ID NO: 65930 - DNA, 272 bp, Glycine max
  Clone ID: 700757007H1
agtacaccgtattaaagaatttaagatatactatgatgagagcgcggttcccattactgttgctgggagttgttttcctggcatcagtttctgtctcatttggcattgcgtattgggaaaagcagaaccccagtcacaacaagtgcctccgaagttgcaatagcgagaaagactcctacaggaaccaagcatgccacgctcgttgcaacctccttaaggtggaggaagaagaagaatgcgaagaaggtcaaattccacgaccacgaccacaa

SEQ ID NO: 65931 - DNA, 97 bp, Glycine max
  Clone ID: 700757009H1
aaattaattaagagcaccgagcactattagtttgcgtttagcttctgtcatgtttattaagatatatttcgcagattgtaacacaaaattttgtggc

SEQ ID NO: 65932 - DNA, 170 bp, Glycine max
  Clone ID: 700757010H1
taaaccgcgatcacacgttgccgcaccttaaaaccggaaacaaaagcaatcgttacttgatttcaagagtctctcaatttcttcctacttctttgtgtacaatttcttaaggtaaagaagatcactctctgtgctggccacagacttcgtgaatcattttcttttccaca

SEQ ID NO: 65933 - DNA, 170 bp, Glycine max
  Clone ID: 700757013H1
tgaaattttgataaaccgcgatcacaggttgccgcaccttaaaaccggaaacaaaagcaatcgttacttgatttcaagaatctctcaatttcttcctacttctttgtgtacgatttcttaagggaaagaaaatcactctctgtgctggccacagacttcgtgaatcattt

SEQ ID NO: 65934 - DNA, 254 bp, Glycine max
  Clone ID: 700757014H1
cacctttgttcactcttcttctcttgcggctagggttttagcgcagttcttctagatttaaggaagatgggtaaggaaaaggttcacatcagtattgtggtcattggccatgtcgactctgggaaatccactaccactggtcacctgatttacaagcttggaggcattgacaagcgtgttattgagaggtttgagaaggaagctgctgagatgaacaagaggtctttcaagtatgcctgggtgctggacaactt

SEQ ID NO: 65935 - DNA, 272 bp, Glycine max
  Clone ID: 700757015H1
aacaattccttcacttgcagcactgttgcatcatcatcttcattgcaaaaccctaaacttcaccttcaaccatgaccacacaagtaccaccacacagtgtccaagtccacacaacaacacaccgctacgaagctggcgtcgtcccccccggagcccgtttcgaaccgccgcgttatgaagccggcgtcaaagcgccctccatttaccattccgagagaggtccaacgacttcccaggtcctcgccgtcctcgccggcctcccggtcggtggc

SEQ ID NO: 65936 - DNA, 278 bp, Glycine max
  Clone ID: 700757016H1
caaaagggtctgagagacaggggaaggtatccaagctggccaaaggagagatgctaatgttgaacattggatcaatgtcgacgggggctagagtagttgctgtgaagaatgacttggcgaagttgcaacttacttcccctgtgtgcactagcaagggtgagaagattgcacttagtcgacgtgttgagaagcattggcgtcttatcgggtggggacaaatccaagctggaatcactcttgatgtccctcccgccccccatctgagttgaacactgatc

SEQ ID NO: 65937 - DNA, 211 bp, Glycine max
  Clone ID: 700757017H1
ctcgagccgctcgagccgaatcggctcgagtgataaaccgcgatcacaggttgccgcaacttaaaacacggaaacaaaagcaatcgttacttgatatcaagaatctctcaatttcttcctacttctttgtgtacgatttcttaagggaaagaaaatcactctctgtgctggccacagacttcgtgaatcattttcttttccacacaacata

SEQ ID NO: 65938 - DNA, 188 bp, Glycine max
  Clone ID: 700757019H1
gaaattttgataaaccgcgatcacaggttgccgcaccttaaaaccggaaacaaaagcaatcgttacttgatttcaagaatttctcaatttctttctacttctttgtgtacgatttcttaagggaaagaaaatcactctctgtgctggccacagacttcgtgaatcattttcttttccacttttagttt

SEQ ID NO: 65939 - DNA, 266 bp, Glycine max
  Clone ID: 700757022H1
caacagtacagagcattttgatgcatgtaagtggacaaaatcggaaccacattcctgggaattgatcttcccaatagaggtatgcggtcctaataatggttttgaaatgtggagttctgagtgggcaaatcaaacttcatggcatttgagtttccttattgacaatcccaaacagtctacagtttttgacattctcttgggaatttctcaagattttgaaattgctggtaatactcttatgccagctttttctgttccacaggcta

SEQ ID NO: 65940 - DNA, 269 bp, Glycine max; identical to SEQ ID NO: 61255
  Clone ID: 700757023H1

SEQ ID NO: 65941 - DNA, 267 bp, Glycine max
  Clone ID: 700757026H1
aatttgtttaaattgtctcttgatgatgttgaaactcctaaaggttccatgttggatctgaaaatttctcaatctaaaattgcacttcccaagaacacagttggaggaaccattctgcgtagtgatctattggcaaattttttgacagagggcaattttagagcaagtgttgatttgcagcgcactcatcgtattagaggaatgattaaaatggtggccacagttggtattcctgagaatacaggtatatcattggcctgtgctatg

SEQ ID NO: 65942 - DNA, 270 bp, Glycine max
  Clone ID: 700757027H1
atttgaaattttgataaaccgcgatcacaggttgccgcaccttaaaaccggaaacaaaagcaatcgttacttgatttcaagaatctctcaatttcttcctacttctttgtgtacgatttcttaagggaaagaaaatcactctctgtgctggccacagacttcgtgaatcattttcttttccactcttagtttatttactgaacactctcctatttgatataggacttcgtgtcagatttaaacttcttctgtttctttctcagttctctg

SEQ ID NO: 65943 - DNA, 271 bp, Glycine max
  Clone ID: 700757028H1
caaactttctttagctatctttttcttttttcttttagccttattttcaaacctagcctttggcaaatgtaaagaaaccgaggtagaagaagaagaccctgagctcgtaacatgcaaacaccaatgccaacagccacagcaatacactgagggtgacaagcgggtatgcttgcaaagatgtgacaggtatcatcgtatgaagcaagagcgagagaaacaaatccaagaggaaactcgtgagaagaaagaggaggaaagccgtgaaagggaa

SEQ ID NO: 65944 - DNA, 271 bp, Glycine max
  Clone ID: 700757031H1
ggcaccaacagccaagactctgacttacctggcccaggagaaaaccctagaatcgagcttcgttcgggacgaggaggagcgtcccaaggttgcctacaacgaattcagcgacgagatcccagtgatttctcttgccggaatcgacgaggtggatggacgcagaagagagatttgtgagaagatcgtggaggcttgcgagaattggggtatattccaggttgttgatcacggtgtggatcaacaactcgtggccgagatgaccgtctcgcca

SEQ ID NO: 65945 - DNA, 276 bp, Glycine max
  Clone ID: 700757032H1
gaaaaacccaaaaagattgatgccagattgagacaaagaatagatcctcaatacaatgaggttcaggctcagatggaaacaaatttgtttaaattgtctcttgatgatgttgaaactcctaaaggttccatgttggatcttaaaatttctcaatctaaaattgcacttcccaaaaacacagttggaggaaccattctgcgtagtgacctattggcaattttttgccaaagttcaataacctcgagactaccggattgtcagtttcagtcaaaacca

SEQ ID NO: 65946 - DNA, 215 bp, Glycine max
  Clone ID: 700757034H1
tgctagtggatcaccatctagccaatgacaacaggaccaagccttatgtggagctaatcggcgaaagcctcgactaggtcttcactgagtactctagagccattaccttgctctcagcacgatcaactcctcttcactgggcacaaatggttaggtcagaaagcagtgcaatggtgccgactatcaccattatcaggacccttgacttttcctcc

SEQ ID NO: 65947 - DNA, 267 bp, Glycine max
  Clone ID: 700757035H1
gggccacacacttcctccactagccaggatagcggacacacagagtggcaaagaaatgttgctcgatccagaaaaaaaagctgaatactatagaaggatgcgagatgatttgaagaaggctgacaacgaagacaagcttatagagcgtcagcgggcttagagaaaaaagaatcaagcagaagatgaaatggaaggctgggaatgcggaagaggacgaccaagatgatatatctgggtcagaagtagatgagactgttgatagatggc

SEQ ID NO: 65948 - DNA, 266 bp, Glycine max
  Clone ID: 700757036H1
tagtttcgcaagtcctgattgcaacatagttggtgcaatgcttttggttgatacttatcataccaatcctgaaaatgcagttcgtagtatttttgttgcgcctttcagaggcggaaggcccattcgggtggttacatttccgaataccattgtgcagattgaaccagacatgaattcaaggtttcagcttttgagtaccactaccaatggtgattttgttcaagggaaagatctcgcaatggttaaagttaatgtagcatgtgctg

SEQ ID NO: 65949 - DNA, 267 bp, Glycine max
  Clone ID: 700757039H1
tctcgagcgaatcggctcgagagacaattttgttcctctcgagaaccaaccttcatttcacctttttagttttctctgtagtcactctgtttttcattattatcgcaggaaaagaaaaggaaaaaaaaaaccctaatctctggaatagcgttggattggagcgttttgagggcatcaaatcaatagagtgaagcagatcaagaggaagaggagggcacaaccaatgacaatggggtccaccgataaagaattggaagagcagcttct

SEQ ID NO: 65950 - DNA, 268 bp, Glycine max
  Clone ID: 700757041H1
tgaaacagaagttacagattggccagtaccactgaaaatcatttctggaaccattcttgcaacaattttgggaacaaccttctggaaactcttttcctttcttagagatgctggtaatgggggagtttttgttggtaatgttgcttcagcattcacaacttcaagtgtgcttgaggcccaaagtagaaagcccaacagatatgaagtttcccaatacagatatcgcaatgtgccaataaagcgcagagcatgggttgaaggccagatg

SEQ ID NO: 65951 - DNA, 267 bp, Glycine max
  Clone ID: 700757042H1
gttggagatctcgtctttgaagtttctaagatgacttctccctacattaaatgtacagtctctttcttcatagcatttggaaatttggctgatgacaccatcaattttgaggcttttccccacaagctggtgcattttggagagattcaggaaaaagttgtattgaaattttcacaataggaatttcttacagcttggtcaactcaggtgcgtcctgcaacaactctgttggctgatgggtgcccatatttgtatgctatggtgcat

SEQ ID NO: 65952 - DNA, 268 bp, Glycine max
  Clone ID: 700757043H1
atcagaaaacaagggacagccacacagaagttatcttgaatcagaaaacatgatgctaagaagctcttcaacaccagttcttggatccctcctctcatccttcccagatagtcctaacaacaatattcactcagaaacctgtcatgcacttaaacactttccaccaaccagtgtcccacaaccttatcacaaacttacttgccaccaaacccggtcctttgcatgtggttcttctccaatctctccctcaattggtgagcttgaaagg

SEQ ID NO: 65953 - DNA, 267 bp, Glycine max
  Clone ID: 700757044H1
tggcgcagggctcctgcctgcacctcatgaaggctgcgtatcccgagggattcgaagaggccgccatcggatctatcctcaaggagactctcaaggcgttggagtatctccatcgacacggacacattcaccgcgacgttaaggccgggaatattcttcttgacgataacggcctggtcaagctcgctgactttggtgtttccgcttgcatgttcgacaccggcgaccgccagcgctccagaaacaccttcgtcggaactccgtgct

SEQ ID NO: 65954 - DNA, 269 bp, Glycine max
  Clone ID: 700757046H1
accaccgcagtcatcactcgcgacgtgagacggcgagacctccacctcctcaccgctgccttgctgcgccgccgcgacgcgagagtgaaagacggcgagacctccgcaccgctgcgccgccactagagctcctcgccctcaccctcgcgagaccccctcattcctcattcagtctcagactctcagcacctcaccggcgccgttagagacagttctcgttggacctcaccctctcatcctcacggacctcgccgccattgatcctcatc

SEQ ID NO: 65955 - DNA, 273 bp, Glycine max
  Clone ID: 700757048H1
ctcgagccgctcgagccgtgtctttgaacactcatcaccatggccaagcttgttctttccctttgtttccttcttttcagtggctgcttcgctctgagagagcaggcacagcaaaatgagtgccagatccaaaagctgaatgccctcaaaccggataaccgtatagagtcggaaggtgggttcattgagacctggaaccctaacaacaagccattccagtgtgccggtgttgccctctctcgctgcacccttaaccgcaatgcccttcgtaga

SEQ ID NO: 65956 - DNA, 197 bp, Glycine max
  Clone ID: 700757049H1
ggtggatgccgaaaacctaatcagaaaaaaaatcgtagttggaggcgccgcactccactccactccaatcaatcagatactagcgatggggaggaagcgaaaggtagcaccgaaatcttctgtatccgccgagcccccgctgaagcaacaccaaccaaaacccgaaaatgccgctcaggaatacgaagaagaggtcg

SEQ ID NO: 65957 - DNA, 265 bp, Glycine max
  Clone ID: 700757050H1
agattgcaaaattatcttccgtttcaggattagcgtttcaccgttacagtgaaacatgggagaaccaagacgaatctatctgcgtatctttgcgctgctcctcttcatttccgcctcttcgtttcagcttctccgcgctttcgatgacgcgatcttttacgagtcgttcgacgaggatttcgaagaccgttggattgtgtctcagaaagatgagtacaatggtgtctggaaacatgccaagagtgagggacatgatgattatggg

SEQ ID NO: 65958 - DNA, 265 bp, Glycine max
  Clone ID: 700757052H1
gtttgctttgttctctttctctctcctcaaattttttcctctctctctagggttccaagagtgtcttgaactactccagaaccctctcttgtttttcacaaatttgggtttagtagagtactgacccagaaaagaaggttcaacaggtacctaagagaggggatagaaagaaaaaaatagaaactgtacgtataaaagaagaaccatacatagatataaggaaaaagggaaaatattttgaataaggaagatataaggcaatata

SEQ ID NO: 65959 - DNA, 264 bp, Glycine max
  Clone ID: 700757053H1
taagatttgaaattttgataaaccgcgatcacaggttgcagcaccttaaaaccggaaacaaaagcaatcgttacttgatttcaagaatttctcaattactttctacttctttgtgtacgatttcttaagggaaagaaaatcactctctgtgctggccacagacttcgtgaatcattttcttatccacttttagtttattttctgaacactctcctatttgatataggacttcgtgtcagatttaaacttctgctgtatctttct

SEQ ID NO: 65960 - DNA, 260 bp, Glycine max
  Clone ID: 700757054H1
acaaaatcagaaccacattcctgggaattgatcttcccaatagaggtatgtggtcctaataatggttttgaaatgtggagttctgagtgggcaaatcaaacttcatggcatttgagtttccttattgacaatcccaaacagtctacagtttttgatattctcttgggaatctctcaagattttgaaattgctggtaatactcttatgccagctttttctgttccacaggctactgccagatcttctgaaaatgcggaatc

SEQ ID NO: 65961 - DNA, 137 bp, Glycine max
  Clone ID: 700757056H1
caccatcaattttgaggcttttcctgaatctctccaaactgcaccatcttgttgggaaaagcctcaaaattgatggtgtcatcagccaaatttgaggcttttccccacaagctggtgcagtttggagagattcagga

SEQ ID NO: 65962 - DNA, 142 bp, Glycine max
  Clone ID: 700757059H1
attgaacttgaagctcactgagcaagtgcgtaatacttcaatgcactctaagtgcttattgcaaattgtattcttgcggttagttttgattaaagttgtttatgtgtgtctcagattacagatactctactattgtatatta

SEQ ID NO: 65963 - DNA, 265 bp, Glycine max
  Clone ID: 700757060H1
atggggaagcccttcttcactctctctctttcttccctttgcttgctactcttgtcgagtgcatgctttgctattacctccagcaagttcaacgagtgccaactcaacaacctcaacgcgttggaacccgaccaccgcgttgagtccgaaggtggtcttattgaaacatggaactctcaacaccctgagctgcaatgcgccggtgtcactgtttccaaacgcaccctcaaccgcaacggcctccacttgccatcttactcacctt

SEQ ID NO: 65964 - DNA, 265 bp, Glycine max
  Clone ID: 700757061H1
ctcgagccgcggctgcgagattgatgaagaaacttctaataagctcgaagggttgcctggtgttctgtttgtgctgccggattcgtatgttgatcctgagaacaaggactatggtgctgaattatttgtgaatggagagatcgtccagagatcacctgaaagacagagaagggtggaaccacagccacaaaggcatcaggacagaccacgatacaatgatagaacaaggtatgtccggcgcagagaaaacatgcagtgaaggacc

SEQ ID NO: 65965 - DNA, 198 bp, Glycine max
  Clone ID: 700757062H1
atcattggaagctatgtgatctggactgctgttgctggagttagatactcaattgagcaaataagaaaaaggagatcttcggttttgtttggccaattatggaagtggtgtggcattcttgtgaagagttctgcacttctgtctatatggatatttgttatcccagtgcttattgggcttctctttgagcttttggtc

SEQ ID NO: 65966 - DNA, 264 bp, Glycine max
  Clone ID: 700757063H1
gaaacataccgaatgagagcatcaaactcttcttcttcgatttccattgcgaacgttactttttcttcttctttctcttcattttcttcgctcttcgatcttcgtccggggactgctccgaataccaccaccaccactcgccgatggccacgatcggaggcttacacgactcccaaggctctcaaaacagcgtcgaaaccgaagccctcgctcgattcgccgtagacgaacacaacaagaagcagaattcgcttctggagtttg

SEQ ID NO: 65967 - DNA, 223 bp, Glycine max
  unsure (1)..(223): unsure at all n locations
  Clone ID: 700757064H1
tctcgagccgattcggctcgagatatatactatgatgagagtgcagtttcctttgttggtactngtgggaactgttttcctggcatcagtttgtgtctcattaaaggtgagagaggatgagaataaccctttctacttgagaagctctaacagcttccaaactctctttgagaaccaaacggtcgcattcgtctctccagagattcaaaaacgctcccacaat

SEQ ID NO: 65968 - DNA, 192 bp, Glycine max
  Clone ID: 700757065H1
attctggacttcacttgttagttccaaaaaatgttgcttccatgaagtctagtcccgtgacaaataatttcgacagcttttttgtaagatggccacaaacccttgtgacaaattctcaagaaggctaataagttgaaaaacgtcattccaagttttcttgcctccactccgggcctatgttaataagaagac

SEQ ID NO: 65969 - DNA, 264 bp, Glycine max
  Clone ID: 700757067H1
aaaattcttccaccaagttatgggtttccttgtgttgcttcttttctccctcttaggtctctcttctagttccagcatatcaactcatcgttccatattggaccttgacctaaccaagtttaccacacagaaacaggtgtcttcactgttccaactatggaagagtgagcatggacgtgtctaccataaccacgaagaagaggcaaagagacttgagattttcaagaataacttgaactatatcagggacatgaatgcaaacag

SEQ ID NO: 65970 - DNA, 262 bp, Glycine max
  Clone ID: 700757068H1
acataccagctggcaccccactgtacatcgttaacagagatgagaatgataagctcttccttgccatgctccatatacctgtctctgtctctactcctggaaaatttgaggaatttttcgggcctggaggacgagacccagaatcggtcctctcagcattcagctggaatgtgctgcaagctgcgctccaaaccccaaaagtaaagttcgaaaagctttttgatcaacagaacgagggaagtattttcgcaataagcagaga

SEQ ID NO: 65971 - DNA, 263 bp, Glycine max
  Clone ID: 700757069H1
agcatagcatcactatggctcttctgagtcgagcctcttcacgcttccctcagctggtttcccctcaaagagttgtttccctccacacaacgctcccatctcttaacgcatcaacatccacacccacgcccgccccatatgccccgccaccgcctccgtccgcttcccctcccgccggcgtgtcgaaggcggcggagttcgtgatctcgaaggttgacgatctgatgaactgggcccggcgcggctccatctggcccatgacc

SEQ ID NO: 65972 - DNA, 260 bp, Glycine max
  Clone ID: 700757070H1
ctgaagttatagatcgcagtgcctactggtgttgcatggtggatgtacaacaatgaagacactcctgttgttgccgtttctattattgacaccaacagcttggagaaccagctcgaccagatgcctaggagattctatcttgctgggaaccaagagcaagagtttctaaaatatcagcaagagcaaggaggtcatcaaagccagaaaggaaagcatcagcaagaagaagaaaacgaaggaggcagcatattgagtggctt

SEQ ID NO: 65973 - DNA, 262 bp, Glycine max
  Clone ID: 700757071H1
ggttttccctttcttcttcttcttcttcttattaccctaaccctaaccttagctattcgaattccactcctcttcgcgaaatcatggcgacgactttggtgagctccgcgggtgggatgcttgcgatgctggacacgctctctccaacctcaacaacttagttttttattatggtctattgtcgattctaaaatcctagctgatgaaactgatgacaacaattgatgtatattgtttcaggctacaccaaaactcagtgagg

SEQ ID NO: 65974 - DNA, 263 bp, Glycine max
  Clone ID: 700757072H1
aaaaagtttcctctacaaaagcacaatttgttagtggaaaaaccttcaaatatgatataattggtgctggttcacattcttcagatgattttcctgaaaaggaagatcaagaaaaacccaaaaagattgatgccagattgagacaaagaatagatcctcaatacaatgaggttcaggctcagatggaaacaaatttgtttaaattgtctcttgatgatgttgaaactcctaaaggttccatgttggatcttaaaatttctcag

SEQ ID NO: 65975 - DNA, 261 bp, Glycine max
  Clone ID: 700757073H1
cggagttttggtatgcagagggaggaagccaggcagaagggaggagggacacaaattcacagcatagcaaaagatggtggcttccatcaccccaagtaccaaaaactggtctttctgatactgaaaggaaaaggttgcttcatcagggtagggtggtacggcaagtattcaaggctgccaaagctatcaatgaaagtgtgttgcttgaaatgcccgtgccatctattattaaagatgcacttgcaaaggtgataattttgt

SEQ ID NO: 65976 - DNA, 264 bp, Glycine max
  Clone ID: 700757074H1
cgagaagccaagggggggcgagatggctttgatctagacaaagtctgaaaaacgaaaccacaaaagaacagactccagggtagtgagaaaggaggacgccatgccgaagaacaagtgtccccgagaagcagttacagaatggacacgtggtagcggtgccacaatctgcttccacttttcaacaacacctgttcgctgtcatgttcttctgcttctcgtctttgttcactcttccagtgcaaacctaacaaacatgggaagtaa

SEQ ID NO: 65977 - DNA, 261 bp, Glycine max; identical to SEQ ID NO: 59225
  Clone ID: 700757075H1

SEQ ID NO: 65978 - DNA, 262 bp, Glycine max
  Clone ID: 700757076H1
ttaagaccgtggaactcgtgaagccaactggatgggtttatctttccttgtctggagttgatcctagggatacctttgtgaatactttcatgttgcaaattgctgtgttgtcaaaccatctcaatggaagggatactcacgtgcggcagatcaaagtttacgggcctcgaccgaaccctatcccacatcagccattccaatttacttcaagggaattcatcacctactcttctataagatgagagtttatggaaggatttga

SEQ ID NO: 65979 - DNA, 241 bp, Glycine max
  Clone ID: 700757081H1
tgaacacccacgcccacaccaacctcatcaaaaggaagaggaaaagcacgaatggcaacacaagcaggaaaagcaccaaggaaaggaaagtgaagaagaagaagaagaccaagacgaggatgaggagcaagacaaagagagccaagaaagtgaaggttctgagtctcaaagagaaccacgaagacataagaataagaacccttttcacttcgaaccaacaaggttccaaactctcttcaaa

SEQ ID NO: 65980 - DNA, 252 bp, Glycine max
  Clone ID: 700757085H1
cttgttcctctcgcccagaatccgcgatctaccccgacgatggcaccgggcttttctcggcttctacagatctctgaaatggggcctgtttcagctttagccaagtactcgctcgtcttcctgggtgaccaatccgtgggcgaaatcagcatcatcactcgctgcatgtatgataaattcgataacacctatcaggctacaattggtcttgattttctatcagaaactatgtatcttgaagatcgaactgtt

SEQ ID NO: 65981 - DNA, 258 bp, Glycine max
  Clone ID: 700757086H1
tgacaattggattcggtgtaagagctctcctcatttcctctcgaaacagtaaccctctctcgtcgccgccactgctctcactcttctctccctttagcgccgtcagatcccttcattctccgccgcctttctccgcagccgaagccatgcccgaaactgagactcacgatgtggagtggccggcgaacgcgttagggacactttcatcagcttcttccaggacaaaaatcacgtcaactggaagtctagccctgtcgt

SEQ ID NO: 65982 - DNA, 259 bp, Glycine max
  Clone ID: 700757087H1
aaagatgtcaggggcacaaggagcacaaccaaaggagtcaaaaacagcaacaacatatgagtcagtagaaggaggagagaaccgaacaaggactgacttgctttcaagggaggatcaaggctgcattcaagtggaaaaacttcaggagaaggtccatgatcctgctggcaaaggtggtcctgtctttggtgctggcaaagatgaagacaaacaagaccttggagttactggcacaggctaattaacctactatatatat

SEQ ID NO: 65983 - DNA, 260 bp, Glycine max
  Clone ID: 700757088H1
gaatcctgcttgcacaaaagcaatgactatgtcatttaatccaaacccgtgttctgatgcatggagtttggaatttctgaagcgtacaggatttcattgtgatatcatttgtgtcactggatggactgccactccaatgcaggatgttcaggttacaattgattggtttatttcctctcaggaatgtgttcccaggacttattgtgttttaaatccacaaaatccttttgtgttgaataggtggatggggaaactgactt

SEQ ID NO: 65984 - DNA, 255 bp, Glycine max
  Clone ID: 700757089H1
aaatcataaaattcttccaccaagttatgggtttcgctgtgttgcttcttttctccctcttaggtctctcttctagttccagcatatcaactcatcgttccatattggaccttgacctaaccaagtttaccacacagaaacaggtgtcttcactgttccaactatggaagagtgagcatggacgtgtctaccataaccacgaagaagaggcaaagagacttgagattttcaagaataacttgaactatatcaggg

SEQ ID NO: 65985 - DNA, 263 bp, Glycine max
  Clone ID: 700757090H1
ccacgcccacaacctcgtcaagaagaagagcacgagcagagagaggaacaggaatggcctcgcaaggaggaaaaacgcggagaaaagggaagtgaagaggaagatgaggatgaggatgaggaacaagatgaacgtcaattcccattcccacgcccacctcatcagaaggaagagcgaaagcaagaggaagatgaggatgaggagcagcagcgagagagcgaagaaagtgaagattctgagttacgaagacataagaataagaa

SEQ ID NO: 65986 - DNA, 259 bp, Glycine max
  Clone ID: 700757091H1
ggaatttactctccacattggaatctgaatgcaaacagtgtgatctatgtgactcgaggacaaggaaaggttagagttgtgaactgccaagggaatgcagtgttcgacggtgagcttaggaggggacaattgctggtggtaccacagaacttcgtggtggcggacaagccggagaacaaggattcgaatacatagtattcaagacacaccacaacgcagtcactagctacttgaaggatgtgtttagggcaattccctc

SEQ ID NO: 65987 - DNA, 259 bp, Glycine max
  Clone ID: 700757092H1
gaaagaaataggagagatttccatcacagtaaaagcaaaacaaaggttgatttcccaatttataaaatatttactgtctgatctaatcaatcagaatacttgttacaataatgaaatcaataatatctattgactgattataatgaatattgatcgattctaacaacttaattgggaattttacttttgcattagcaccaagtcttgtttgtttccatttccaatatttttaaatatgagaagaaacgtggtttggttt

SEQ ID NO: 65988 - DNA, 259 bp, Glycine max
  Clone ID: 700757093H1
ctcgagccgttgagggaaaagtaatagtaaacagtggagtagatgctgaaactttgtcttgtgatttgagagccaatgattttctggattgtgttaatgaagtatcatccaatgtagcttcaagtgaacaattggtggcagcaagtattatattagcgtcagtatgtgcggcgactgattatgttggatttatttgtgatgcttcatatcatattcttcagtcatgcaagtgggattccctgatggtgctgactattct

SEQ ID NO: 65989 - DNA, 238 bp, Glycine max
  Clone ID: 700757094H1
aacttattaacactttccttagttcaatatggggaagcccttcttcactctctctctttcttccctttgcttgctactcttgtcgagtgcatgctttgctattacctccagcaagttcaacgagtgccaactcaacaacctcaacgcgttggaacccgaccaccgcgttgagtccgaagtggtcttattgaaacatggaactctcaacaccctgagctgcaatgcgccggtgtcactg

SEQ ID NO: 65990 - DNA, 82 bp, Glycine max
  Clone ID: 700757096H1
caaaagaagacatggtattcattattaaaacaaggcgagatattggacattttcagtgcactaaactcaatgcttcaagatt

SEQ ID NO: 65991 - DNA, 275 bp, Glycine max
  Clone ID: 700757101H1
cttccatagccccccaaaaatgaagagcaccatcttctttgctctctttctcttttgtgccttcaccacctcatacctaccttcagccatcgctgatttcgtgctcgataatgaaggtaaccctcttgaaaatggtggcaatattatatcttgtcagacataacagcatttggtggaataagagcagccccaacgggaaatgaaagatgccctctcactgtggtgcaatcttcgcaatgagtcgacaaagggatgggacaatcatctcgtcccat

SEQ ID NO: 65992 - DNA, 272 bp, Glycine max
  Clone ID: 700757102H1
attggaaagggttaggatattcaattttacataattaaagataaaatcaacgatagctatagttttaaaattaaccatcgatttagttgcaactggaacacaggtttctttcaatgaaataatattaatatcaatttataagctggtaatgtaaaatactgctaatgttaatatgaagtttggatggtcttattggcagaagatgctaggtggtgttcatcaatattctgaaaggtaaaacgattttggtttttaatgataatataaccatg

SEQ ID NO: 65993 - DNA, 268 bp, Glycine max
  Clone ID: 700757104H1
aggaattttagtggacaaaactggagattggatcacacttatacaaaattctccaattagtaacttgttgagagttgctgcttggaagaaaggctgtttaatggttaagattgtgatgtctgggaatgcagcagtaaaaggagtgattgggcctcattggtacaagtgtttttaacaaacagcaacagtacagagcattttgatgcatgtaagtggacaaaatcggaaccacattcctgggaattgatcttcccaatagaggtatgtg

SEQ ID NO: 65994 - DNA, 267 bp, Glycine max
  Clone ID: 700757105H1
attcaaaccttgctctatattacacagtacacacactataagaataatggcttccatcctccactactttttagccctctctctttcttgctcttttcttttcttcttatccgactcagtcacccctacaaaaccataaaccttgttgttctacccgttcaaaatgatggttccacagggctccattggtccaacctccaaaaaagaacccctctaatgcaagtaccagtcctggtggacctcaatggaaatcacttgtgggttaac

SEQ ID NO: 65995 - DNA, 265 bp, Glycine max
  Clone ID: 700757106H1
gaaatgatcaacagtctttgtggtggtgatgaaaaactgatgcgtgaaaggacacacctgctgttggcttgttgttcaaggatggcaatttgtaagaaagatgtttggagagttgaatgtggaatcccttctggattccgctcacagttatttgcaatagcatttttaatgagatgctcattagatatagctatgaaaaattactgcgccaggctaaagctccaagtatgtttttacaatccttcaaaaattttgtttctttgtg

SEQ ID NO: 65996 - DNA, 270 bp, Glycine max
  Clone ID: 700757109H1
aacactttccttagttcaatatggggaagcccttcttcactctctctctttcttccctttgcttgctactcttgtcgagtgcatgctttgctattacctccagcaagttcaacgagtgccaactcaacaacctcaaccgttggaacccgaccaccgcgttgagtccgaaggtggtcttattgaaacatggaactctcaacaccctgagctgcaatgcgccggtgtcactgtttccaaacgcaccctcaaccgcaacggcctccacttgcc

SEQ ID NO: 65997 - DNA, 271 bp, Glycine max
  Clone ID: 700757110H1
cagatccaaaaactcaatgccctcaaaccggataaccgtatagagtcagaaggagggctcattgagacatggaaccctaacaacaagccattccagtgtgccggtgttgccctctctcgctgcaccctcaaccgcaagcccttcgtagaccttcctacaccaacggtccccaggaaatctacatccaacaaggtaagggtatttttggcatgatatacccgggttgtcctagcacatttgaagagcctcaacaacctcaacaaagaggaca

SEQ ID NO: 65998 - DNA, 270 bp, Glycine max
  Clone ID: 700757111H1
ctgcaacatagttggtgcaatgcttttggttgatacttatcataccaatcctgaaaatgcagttcgtagtatttttgtcgcgcctttcagaggcggaaggcctattcgggtggttacatttccgaataccattgtgcgattgaaccagacatgaattcaaggtttcagcttttgagtaccactaccaatggtgattttgttcaaggaaaagatctcgcaatggttaaagttaatgtagcatgtgctgctgttggcttgacatcaagttac

SEQ ID NO: 65999 - DNA, 272 bp, Glycine max
  Clone ID: 700757112H1
gttgaaactcctaaaggttccatgttggatcttaaaatttctcaatctaaaattgcacttcccaaaaacacagttggcggaaccattctgcgtagtgacctattggcaaattttttgacagagggcaattttagagcaatgttgatttgcagcgcactcatcgtatcaaaggaatgattaaaatggtggccacagttggtattcctgagaatacaggtatagcattggcctgtgctatgaatagttcttttagggggcgtgccagttctgat

SEQ ID NO: 66000 - DNA, 274 bp, Glycine max
  Clone ID: 700757113H1
agcaaaatgaccaagttcacaatcctcctcatctctcttctcttctgcatcgcccacacttgcagcgcctccaaatggcagcaccagcaagatagctgccgcaagcagctccagggggtgaacctcacgccctgcgagaacacatcatggagaagatccaaggccgcggcgatgacgatgatgatgatgacgacgacaatcacattctcaggaccatgcggggaagaatcaactacataaggaggaacgaaggaaaagacgaagacgaagaaga

SEQ ID NO: 66001 - DNA, 280 bp, Glycine max
  Clone ID: 700757115H1
agtatttttggcatgatatacccgggttgtcctagcacatttgaagagcctcaacaacctcaacaaagaggacaaagcagcagaccacaagaccgtcaccagaagatctataacttcagagagggtgatttgatcgcagtgccactggtgttgcatggtggatgtacaacaatgaagacactcctgttgttgccgtttctattattgacaccaacagcttggagaaccagctcgaccagatgcctaggagattctatcttgctgggaaccaagagcaaga

SEQ ID NO: 66002 - DNA, 283 bp, Glycine max
  Clone ID: 700757116H1
agaaattatcattgatagtttcgcaagtcctgattgcaacatagttggtgcaatgcttttggttgatacttatcataccaatcctgaaaatgcagttcgtagtatttttgttgcgcctttcagaggcggaaggcccattcgggtgttacatttccgaataccattgtgcagattgaaccagacatgaattcaaggtttcagcttttgagtaccactaccaatggtgattttgttcaagggaaagatctcgcaatggttaaagttaatgtagcatgtgctgctg

SEQ ID NO: 66003 - DNA, 252 bp, Glycine max
  Clone ID: 700757117H1
gcaaaaagaaagaatcccaggcgaggagaaagatggaggggaaggagcaggatgtgtcgttgggagcgaacaagttccccgagagacagccgattgggacggcggcgcagagccaagacgacggcaaggactaccagagccggcgccggcgccgctggttgacccgacggagtttacgtcatggtcgttttacagagcagggatagcagagtttgtggcaactttccggtttctctacatcaccgtcttaac

SEQ ID NO: 66004 - DNA, 268 bp, Glycine max
  Clone ID: 700757118H1
cggctcgagatacatagtagtgttggtgggttgcaaagatgcttgggggtcttctccataggggtcataagataaaagggacagtggtgttgatgcgcaagaatgtgttggacgtgaatagcgtaaccagcgttggggaattattggtcaaggtctcgacttagttggctcaacactcgatactcttactgccttcttgggccgatccgtgtctctccagcttattagtgctaccaaagctgatgccaacggaaaagggaaacttgga

SEQ ID NO: 66005 - DNA, 267 bp, Glycine max
  Clone ID: 700757119H1
cagaaggaagagcgaaacaagaggaagatgaggatgaggagcagcagcgagagagcgaagaaagtgaagattctgagttacgaagacataagaataagaacccttttctcttcggctctaacaggttcgaaacttcttcaaaaaccaatatggtcgcattcgcgtcctccagaggttcaaccaacgctccccacaacttcagaatctccgagactaccgcattttggagttcaactccaaacccaacaccctccttctccccaacca

SEQ ID NO: 66006 - DNA, 262 bp, Glycine max
  Clone ID: 700757121H1
gtttcatatactacgttttgccggcaataagaggaaacggtggcggaatagaacgagccgcactcgggaaagacacttgccctatcactgtagtgcaatctcccaatccaaactctaaggggttagaaattaatttgaatctgcataccccgcctattacataaacgaaaccctaattttgcaaataaagttcagttacccacagcagtgtgaaagaaagaatccttggtgggccatttctaaggatatatctgaaggacca

SEQ ID NO: 66007 - DNA, 264 bp, Glycine max
  Clone ID: 700757122H1
agatcatacatagtagtgttggtgggttgcaaagatgcttgggggtcttctccataggggtcataagataaaagggacagtggtgttgatgcgcaagaatgtgttggacgtgaatagcgtaaccagcgttggggaattattggtcaaggtctcgacttagttggctcaacactcgatactcttatctagttcttgggccgatccgtgtctctccagcttattagtgctaccaaagctgatgccaacggaaaagggaaacttgga

SEQ ID NO: 66008 - DNA, 266 bp, Glycine max
  Clone ID: 700757123H1
gagctagctagctagcaagcaagcacagagatggaggcaaagcgaggccatgccctcatgtgcttggcacgtgtttcactcttcctctgcgctctaaccctatccgctgctcacggaagcaccacggttcaagactcgcgagaaagttgaaactcggggacaacgagcttctgcgcacggagaagaagttcaaggttttcatggagaattacgggaggagctactccacagaggaggagtatttgcgccgtttggggattttcgcc

SEQ ID NO: 66009 - DNA, 262 bp, Glycine max
  Clone ID: 700757124H1
ccgtattaaagaatttaagatatactatgatgagagcgcggttcccattactgttgctgggagttgttttcctggcatcagtttctgtctcatttggcattgcgtattgggaaaagcagaaccccagtcacaacagtgcctccgaagttgcaatagcgagaaagactcctacaggaaccaagcatgccacgctcgttgcaacctccttaaggtggaggaagaagaagaatgcgaagaaggtcaaattccacgaccacgacca

SEQ ID NO: 66010 - DNA, 264 bp, Glycine max
  Clone ID: 700757125H1
aaataattggttttaatatatatttttctttaaattaaaaaaataatattttctaatataaatttgctatgcgtgtgcgagagtgtgatataataaatatatacactttgattgatgtgaactacaatatcatatatcattaattaggtgacggtccttgggatataaagagaagggagagttagttaagatagttggactattaatgagttagtgggttagttggttagaggaatttataagattaaataggggaagaaggat

SEQ ID NO: 66011 - DNA, 187 bp, Glycine max
  Clone ID: 700757127H1
cgatggagtttcgcgatcttccatcctttggagccttctcctcattgtctctttcttctctcctcaaacaagggtgaggcttctggttccgtcttcttcgtcgatagctccagtaatcaattcattcgcgccagatcatccaactatgagcaacttcactgttgtagaagaactggtgctgtttgtc

SEQ ID NO: 66012 - DNA, 272 bp, Glycine max
  Clone ID: 700757128H1
caaagaatagatcctcaatacaatgaggttcaggctcagatggaaacaaatttgtttaaattgtctcttgatgatgttgaaactcctaaaggttccatgttggatcttaaaatttctcagtctaaaattgcacttcccagaacacagttggaggaactattctgcgtagtgatctattggcaaattttctgacagagggcaattttagagcaagtgttgatttgcagcgcactcatcgtattaaaggaatgattaaaatggtggccacagtt

SEQ ID NO: 66013 - DNA, 271 bp, Glycine max
  Clone ID: 700757129H1
ggaagaagaagaaaaactcaagatttatactggttcagccacaaaccgtgcctacattcagtccccatgcaacctgtggttcttgagatttctttcaaccttgtaaaatcctttacaagccaaagatccacaagggattaccctcccttgttctctttgaataaccaagtggatgtaccctccacttgaactgatccacaagagatgtaccctctcttgttctcagtataacaatccccaagtagatgtaccctctacttgtaccacaaag

SEQ ID NO: 66014 - DNA, 273 bp, Glycine max
  Clone ID: 700757130H1
attcctttgaggaagtttctttgagtgcagcactcaatggtgttgagggtttggactatatggaaagaattcctcttgccacatctgagggttttcctcatgtgctttcacgcaaaaatggtgaaaaaggcaaaaggagtttgtttctggggatggtgaagagatgacattgattccgggaaccagtgttgaagaggcttacaacaagctaacagttgaacttgagaaaagtgttcctacattggttggcattgaatgtcccaaggatgaaaa

SEQ ID NO: 66015 - DNA, 273 bp, Glycine max
  Clone ID: 700757131H1
ggttgaggaatggttcgattgtgttgatgaggaggattcctttgaggaagtttctttaagtgcagcacttaatggtgttgagggtttggactatatggaaagaattcctcttgccacatctgagggatttcctcatgtgcttcacgcaaaaatggtgaaaaaggcaaaaggagatttgtctctggggatggtgaagagatgacactgattccgggaaccagtgttgaagaggcttacaacaagctaatagttgaacttgagaaaatgtcccta

SEQ ID NO: 66016 - DNA, 280 bp, Glycine max
  Clone ID: 700757132H1
ctgtcttctagtgcaagtgatttcagagctgcaatggtgagtaaaaatagcaagcctcaagctactgcaatgcatgtgggagctatagaaattatcattgatagtttcgcaagtcctgattgcaacatagttggtgcaatgctttggttgatacttatcataccaatcctgaaaatgcagttcgtagtatttttgttgcgcctttcagaggcggaaggctcattcgggtggttacatttccgaataccattgtgcagattgaaccagacatgaattcagg

SEQ ID NO: 66017 - DNA, 273 bp, Glycine max
  Clone ID: 700757133H1
tccattggtccttaaacactcatcagtcatcaccatggccaagctagttttttccctttgtgttctgcttttcagtggctgctgcttcgctttcagttccagagagcagcctcagcaaaacgagtgccagatccaaaactcaatgccctcaaaccggataaccgtatagagtcagaaggagggctcattgagacatggaaccctaacaacaagccattccagtgtgccggtgttgccctctctcgctgcaccctcaaccgcaacgcccttcgt

SEQ ID NO: 66018 - DNA, 266 bp, Glycine max
  Clone ID: 700757135H1
aatcttctaaaattaaattaccatatatagtcacattttctttacactttgtgaggtctaaaatgttgtccatttttcacaaggggtttgctcacccacctgaagagcttaaaagccctgcatctaacagtggtccaacaagcctaagattcctgaggaaactctaagagaatttctttctcatcatccccataacactttttctctgagttttggtcactctgctgttctagcttatactcgtcctgatccaccttcctttgttc

SEQ ID NO: 66019 - DNA, 261 bp, Glycine max
  Clone ID: 700757136H1
tggattagtgcttccactctcctatctggtataggacttcgtgggtagacttttctatttctctccttctttcactctcttcttctcactgatccgcattgccgttcaaagtggtcttatttgaaaaacactgggcgttggtgcaaatgtttgcttcattaattttctctggagacaacaggcttcctgagaaaacaatctttacttgcagagatttggacatcttggttgtttattatacaatagcaactcaatttagaa

SEQ ID NO: 66020 - DNA, 259 bp, Glycine max
  Clone ID: 700757137H1
aaattttgataaaccgcgatcacaggttgccgcaccttaaaaccggaaacaaaagcaatcgttacttgatttcaagaatctctcaatttcttcctacttctttgtgtacgatttcttaagggaaagaaaatcctctctgtgctggccacagacttcgtgaatcattttcttttccactcttagtttattgcgtgaacactctcctatttgatataggacttcgtgtcagatttaaacttcttctgtgtctttctcagtt

SEQ ID NO: 66021 - DNA, 263 bp, Glycine max
  Clone ID: 700757138H1
gttcaatatcctagtataccttaataaataatttaagatactatgatgagagcacggttcccattactgttgctgggacttgttttcctggcttcagtttctgtctcatttggcattgcttactgggaaaagagaaccccaaacacaacaagtgtctccagagttgcaatagcgagagagactcttacaggaaccaagcatgccacgctcgttgcaacctccttaaggtggagaaagaagaatgtgaagaaggtgaaattcca

SEQ ID NO: 66022 - DNA, 265 bp, Glycine max
  Clone ID: 700757141H1
ttccgggaaccagtgttgaagaggcttacaacaagctaacagttgaacttgagaaaagtgttcctacattggttggcattgaatgtcccaaggatgaaaaacttcctcgtcgcaaagtttttgataaacctaaacgcgctgcttcactattctccctatggagtttaatcttgtggttcgtcagaagtttttaaaagttgtgaggttcattatgaagaaaagggacaagcttagttgtcaagttggaatcaacccatattctatg

SEQ ID NO: 66023 - DNA, 270 bp, Glycine max
  Clone ID: 700757144H1
aacagcttggagaaccagctcgaccagatgcctaggagattctatcttgctgggaaccaagagcaagagtttctaaaatatcagcaagagcaaggaggtcatcaaagccagaaaggaaagcatcagcaagaagaaaaaacgaaggaggcagcatattgagtggcttcaccctggaattcttggaacatgcattcagcgtggacaagcagatagcgaaaaacctacaaggagagaacgaaggggaagacaagggagccattgtgacagtga

SEQ ID NO: 66024 - DNA, 274 bp, Glycine max
  Clone ID: 700757146H1
taaacactcatcagtcatcaccatggccaagctagttttttccctttgttttctgcttttcagtggctgctgcttcgctttcagttccagagagcagcctcagcaaaacgagtgccagatccaaaaactcaatgccctcaaaccggataaccgtatagagtcagaaggagggctcattgagacatggaaccctaacaacaagccattccagtgtgccggtgttgccctctctcgctgcaccctcaaccgcaacgcccttcgtagaccttcctac

SEQ ID NO: 66025 - DNA, 276 bp, Glycine max
  Clone ID: 700757147H1
gtctttgaacactcatcaccatggccaagcttgttctttccctttgtttccttcttttcagtggctgcttcgctctgagagagcaggcacagcaaaatgagtgccagatccaaaagctgaatgccctcaaaccggataccgtatagagtcggaaggtgggttcattgagacctggaaccctaacaacaagccattccagtgtgccggtgttgccctctctcgctgcacccttaaccgcaatgcccttcgtagaccttcctacaccaacggtcccca

SEQ ID NO: 66026 - DNA, 277 bp, Glycine max
  Clone ID: 700757148H1
cacttccttagttcaatatggggaagcccttcactctctctctttcttccctttgcttgctactcttgtcgagtgcatgctttgctattagctccagcaagctcaacgagtgccaactcaacaacctcaacgcgttggaaccgaccaccgcgttgagtccgaagtggtttgattcaaacatggaactctcaacaccctgagctgaaatgcgccggtgtcactgtttccaaactcaccctcaaccgcaatggcctccacttgcgatcttactcacttt

SEQ ID NO: 66027 - DNA, 268 bp, Glycine max
  Clone ID: 700757149H1
tggagattggatcacacttatacaaaattctccaattagtaacttgttgagagttgctgcttggaagaaaggctgtttaatggttaagattgtgatgtctgggaatgcagcagtcaaaaggagtgattgggcctcattggtacaagtgtttttaacaaacagcaacagtacagagcattttgatgcatgtaagtggacaaaatcggaaccacattcctgggaattgatcttcccaatagaggtatgcggtcctaataatggttttgaa

SEQ ID NO: 66028 - DNA, 265 bp, Glycine max
  Clone ID: 700757150H1
gcctctttctatagggggaggagctggtgcaaagaatgctattctcatgaatatgccaaatgctgttctttcaatgtggagatattttgttggagatctcgtctttgaagtttctaagatgacttctccctcattaaatgtacagtctctttcttcatagcatttggaaatttggctgatgacaccatcaattttgaggcttttccccacaagctggtacagtttggagagattcaggaaaaagttgtattgaaattttcacaag

SEQ ID NO: 66029 - DNA, 260 bp, Glycine max
  Clone ID: 700757152H1
ccattggtccttaaacactcatcagtcatcaccatggccaagctagttttttccctttgttttctgcttttcagtggctgctgcttcgctttcagttccagagagcagcctcagcaaaacgagtgccagaccaaaaactcaatgccctcaaaccggataaccgtatagagtcagaaggagggctcattgagacatggaaccctaacaacaagccattccagtgtgccggtgttgccctctctcgctgcaccctcaaccgc

SEQ ID NO: 66030 - DNA, 260 bp, Glycine max
  Clone ID: 700757153H1
atttgaaattttgataaaccgcgatcacaggttgccgcaccttaaaaccggaaacaaaagcaatcgttacttgatttcaagaatctctcaatttcttcctacttctttgtgtacgatttcttaagggaaaaaaatcactctctgtgctggccacagacttcgtgaatcattttcttttccactcttagtttatttgctgaacactctcctatttgatataggacttcgtgtcagatttaaacttcttctgtttctttctc

SEQ ID NO: 66031 - DNA, 261 bp, Glycine max
  Clone ID: 700757154H1
cttaattattaacacttccttagttcaatatggggaagcccttcactctctctctttcttccctttgcttgctactcttgtcgagtgcatgctttgctattagctccagcaagctcaacgagtgccaactaacaacctcaacgcgttggaacccgaccaccgcgttgagtccgaaggtggtttgattcagacatggaactctcaacaccctgagctgaaatgcgccggtgtcactgtttccaaactcaccctcaaccgcaa

SEQ ID NO: 66032 - DNA, 260 bp, Glycine max
  Clone ID: 700757155H1
cccaaggatgaaaaacttcctcgtcgcaaagtttttgataaacctaagacgcgctgcttcactattctccctatggagtttaatcttgtggttcgtcagaagtttttaaattttgtgaggttcattatgaaaaaagggacaagcttagttgtcaagttggaatcaacccatattctatggaatggactggtttggccaatagattactgagtaagggcaacgatattctgtgttgcgattatgctagttttgatggtttg

SEQ ID NO: 66033 - DNA, 261 bp, Glycine max
  Clone ID: 700757156H1
ctctttctccgagaacaaaaaaaaaaacgtgattcgctcttctcttcgaataaaccacaaaaccaacaaacgagaagaggagtgagagaagatggggttgtcgttcacgaagctgttcagcaggttgtttgcaagaaggaaatgaggattctgatggtaggtctcgatgctgctggtaagacaaccatcttgtacaagctcaagcttggagaaatcgtcaccaccatccccaccatcggatttaatgttgagactgtggag

SEQ ID NO: 66034 - DNA, 264 bp, Glycine max
  Clone ID: 700757157H1
gaagcagatcgtgacagtggagggaggcctcagcgttatcagccccaagtggcaagaacaagaagacgaagacgaagatgaagacgaagaatatgaacaaactccctcttatcctccacgacgaccaagccaggaaagcatgaagatgacgaggacgaggacgaagaagaagatcaacctcgtcctgatcaccctccacagggaccaagcaggcccgaacaacaagaaccacgtggaagaggatgtcagactagaaatggggtt

SEQ ID NO: 66035 - DNA, 263 bp, Glycine max
  Clone ID: 700757158H1
ctgggatatgcttcattgataccatatgttgagccagttgtgcaagctcaaagtgctgaagtttactttgacttcttccctgtggaggttgatagtcaagagggagttgctcacattggtgaattgaaatcggtgtctatgttccactgcctacaaaaactaatttggtggaaactcccaaggaatggcaactggatctaccttgtgacaaaattcctagtgtcttgaccacaactgatgagagattggtaggcacagaacat

SEQ ID NO: 66036 - DNA, 233 bp, Glycine max
  Clone ID: 700757159H1
atgagaaccaaactttctttagctatctttttctttattcttttaggcttattttcaaacctagcctttggcaaatgtaaagaaaccgaggtagaagaagagaccctgagctcgtaacatgcaaacaccaatgccaacagccacagcaatacactgagggtgacaagcgggtatgcttgcaaagatgtgacaggtatcatcgtatgaagcaagagcgagagaaacaaatccaa

SEQ ID NO: 66037 - DNA, 270 bp, Glycine max
  Clone ID: 700757161H1
tgttcatttaaataaatatttttgatgagataatgcaaggatctgtagctgaagcagaagcagaagcagaagcaggggatgaggaagtgaagtctacgctccttttcaatggcaaactctaagctgaatatcattctcattcacattctcttcctctctttctcctccttcgaagcattagattcccagcttaagcaacaaaaccaagacgaagaagagagggttccattcgtgggcgtgaacatcggcaccgacgtctcgaaccttcca

SEQ ID NO: 66038 - DNA, 270 bp, Glycine max
  Clone ID: 700757162H1
ctgaaaccttgaattcatgtctggttcagcttttgagtaccactaccaatggtgattttgttcaaggaaaagatctcgcaatggttaaagttaatgtagcatgtgctgctgttggcttgacatcaagttacactccactccattgttggaatctggtttgcaaaaagacagagggttaattgtggaatattttggaaggatgtcttacgttgctcataacgttaatcagccccaagagaaagatttgttggagggaatttttcctttgat

SEQ ID NO: 66039 - DNA, 235 bp, Glycine max
  Clone ID: 700757165H1
taaaattcttccaccaagttatgggtttccttgtgttgcttcttttctccctcttaggtctctcttctagttccagcatatcaactcatcgttccatattggaccttgacctaaccaagtttaccacacagaacaggtgtcttcactgttccaactatggaagagtgagcatggacgtgtctaccataaccacgaagaagaggcaaagagacttgagattttcaagaataacttg

SEQ ID NO: 66040 - DNA, 260 bp, Glycine max
  Clone ID: 700757166H1
cacaggctctgcctgttgctttgatgattcatgataactcgtcggatcgcacggcctttgtgccggcgacgcatcattcaaatttctgccctatcaactttcgatggtaggatagtggcctaccatggtgtgacgggtgacggagaattagggttcgattccggagagggagcctgagaaacggctaccacatccaaggaaggcagcaggcgcgcaaattacccaatcctgacacggggaggtagtgacaataaataaca

SEQ ID NO: 66041 - DNA, 258 bp, Glycine max
  Clone ID: 700757169H1
ccttcacttgttgctcgtcttagtttctgtgttgtgtcatttttattgctatatcctaattaaacttcaccctcaaaatgagtgatcccacactagcacaaccacacctagtcgaagtccacacaacctcgaaatcgttgttaccacacacaaccataaccatagaccctcaataaatgcctcaggtgaaaagaagaaaattgtgggggtgctctacaaagggaatgagtatgctaaattgaaccccaatttcgtggg

SEQ ID NO: 66042 - DNA, 261 bp, Glycine max
  Clone ID: 700757172H1
cgatgccctaagagtccctgcaggaaccacatactatgtggttaaccctgacaacgacgagaatctcagaatgataacactcgccatacccgttaacaaacccggtagatttgagagtttcttcctatcagcactcaagctcaacagtcctacttgcaagggttcagcaagaatattctagaggcctcatacgacaccaaattcgaggagataaacaaggttctgtttggtagagaggaggggcagcaacaaggggaggag

SEQ ID NO: 66043 - DNA, 264 bp, Glycine max
  Clone ID: 700757175H1
tggaaccacttactatttggttaaccctcacgaccaccagaatctcaaaataatcaaacttgccatacccgtcaacaaacctggcagatatgatgatttcttcttatctagcactcaagcccaacagtcctacttgcaaggcttcagccataatattctagagacctccttccatagcgaattcgaggagataaacagggttttgtttggagaggaagaggagcagaggcagcaagagggagtgatcgtggaactctcaaagga

SEQ ID NO: 66044 - DNA, 258 bp, Glycine max
  Clone ID: 700757176H1
gtaatattcagatttccggcttattttacgacggcagatacaaattctggactaaacacgagataaatcttgctttgacagaagaggaaaagatggaagtgattagaaatagaggcattcctgctgatgttttgcaaagcgagctcatgaatttgaaaaacatgttgctcatgaaagcctcaaggatcaaattcctgctgttgacaagttgtattctactaaggttaataagtttgcaaaaattatgaaccttagaca

SEQ ID NO: 66045 - DNA, 264 bp, Glycine max
  Clone ID: 700757177H1
gttatttgcaatagcatttttaatgagatgctcattagatatagctatgaaaaattactgcgccaggctaaagctccaagtatgtttttacaatccttcaaaaattttgtttctttgtgtgtgtatggtgatataacttaattagtgttcatgaatacgtcaagccttactttagtggttctaaattgaaaagctttctagctggtcataataccatcagtaatggtgatattatgaccagctagaaagcttttcataatatca

SEQ ID NO: 66046 - DNA, 269 bp, Glycine max
  Clone ID: 700757178H1
gtttatctccgcactccgtcttcatcaatcagcatcaccaccgctccaacacaggggaaaatgagggagatccttcacgttcagggagggcaatgcgggaaccagatcggttcgaagttctgggaagtggtgtcgacgagcacggcatagatccgacggggaagtacgtcggaaactcagatctacaactcgagcgcgtgaacgtgtactacaacgaagcttcctgcgggcggtttgtcccacgcgcagtgctgatggacctggagccc

SEQ ID NO: 66047 - DNA, 270 bp, Glycine max
  Clone ID: 700757179H1
tttatgtaagggagacaaataaaacatggaataaaaagctcgcagtggccagtaatttgccaaaagcaaactggagaaagaatatagtcttcagctggacaaggatcattcatcttgaaagaagagtttgtgtgtacaatctttatagttctaaggagggtgcaagagagaactgaatttgctgtgatggcaactcgtagatatgcttttggaagagctgatgaggccactcatccagactccatgagggccactttggctgaatttgtt

SEQ ID NO: 66048 - DNA, 256 bp, Glycine max
  Clone ID: 700757182H1
aacttattaacactttccttagttcaatatggggaagcccttcttcactctctctctttcttccctttgcttgctactcttgtcgagtgcatgctttgctattacctccagcaagttcaacgagtgcaactcaacaacctcaacgcgttggaacccgaccaccgcgttgagtccgaaggtggtcttattgaaacatggaactctcaacaccctgagctgcaatgcgccggtgtcactgtttccagacgcaccctca

SEQ ID NO: 66049 - DNA, 259 bp, Glycine max
  Clone ID: 700757183H1
cgctcctcagatatcaacaaaaggattcgcacagcacttgggagaggtaagaaaattgtttttcttactagagttgatccttttccagtagctttactggctgttctttttggcgttaagaatgaaatctgagttctaacgccactaaccctatgctgacgcgacttcttgagaactgtaagagtctcaaatatctggttgatgagtgtccttttgcatttgtgaactagtatgtaatattttattcacttaaataaag

SEQ ID NO: 66050 - DNA, 256 bp, Glycine max
  Clone ID: 700757184H1
cttacttattaacacttccttagttcaatatggggacgcccttcactctctctctttcttccctttgcttgctactcttgtcgagtgcatgctttgctattagctccagcaagctcaacgagtgcaactcaacaacctcaacgcgttggaacccgaccaccgcgttgagtccgaaggtggtttgattcaaacatggaactctcaacaccctgagctgaaatgcgccggtgtcactgtttccaaactcaccctcaac

SEQ ID NO: 66051 - DNA, 255 bp, Glycine max
  Clone ID: 700757185H1
ccattgtgcagattgaaccagacatgaattcaaggtttcagcttttgagtaccactaccaatggtgattttgttcaagggaaagatctcgcaatggttaaagttaatgtagcatgtgctgctgttgcttgacatcaagttacactccaactccattgttggaatctggtttgcaaaaagacagagggttaattgtggagtattttggaaggatgtcttacgttgctcataacgttaatcagccccaagagaaaga

SEQ ID NO: 66052 - DNA, 257 bp, Glycine max
  Clone ID: 700757187H1
gctgcttcactattctccctatggagtttaatcttgtggtccgtcaaaagtttttaaattttgtgaggttcattatgaagaaaagggacaaacttagttgtcaagttggaatcaacccatactccatgaatggactggtttggccaatagattactgagtaagggcaatgatattctgtgttgcgattatgctagttttgatggtttgattaccaagcaagttatgagcaagatggcagaaatgataaacagtcttt

SEQ ID NO: 66053 - DNA, 260 bp, Glycine max
  Clone ID: 700757188H1
cactgctcttcctcttcgattagggtttcattttttcaacccgatctatattgcgttgccgcagctattccttcctctcttcgattttgtcacttctcgctcttacacgatcttaagcttcgaagtatacaagtttgcttcattgctatgtggtgccacttggcttatcaccggcaaccacctggttatcctgtgtaaaactccatggtaccagagggctagggagtcatgggctgctctcaggatgctaatttttatag

SEQ ID NO: 66054 - DNA, 194 bp, Glycine max
  Clone ID: 700757189H1
agatttgaaattttgataaaccgcgatcacaggttgccgcaccttaaaaccggaaacaaaagcaatcgttacttgatttcaagaatctctcaatttcttcctacttctttgtgtacgatttcttaaggaaagaaaatcactctctgtgctggccacagacttcgtgaatcattttcttttccactcttagttta

SEQ ID NO: 66055 - DNA, 260 bp, Glycine max
  Clone ID: 700757190H1
gcggttgaagaaagaaatggtctgagatggagatttgacttctcctcctggttgttgatttccattgcgcactctaatcgcaattgatttgattttacaaagagagagaagaaacaattggaatttgcaggatgaagagctctctgaaaaaattgcgaggtctggcacttcacaatcacaagcatgtctcctccaagtccattcggcctctgggccagcttgacgagctcgcccgggcaacccaggatatgcaagacatg

SEQ ID NO: 66056 - DNA, 262 bp, Glycine max
  Clone ID: 700757191H1
aattaagaaatccttctccggagccatggcagatctcaagtccacattcttgaacgtctattctgttctcaaatctgaactcctccacgaccctgcttttgagttctccgatgatgctcgtaattgggcgaccggatgctggactacaatgtgccgggaggaaagttgaaccggggactgtcagtaattgatagctacagattgttaaaagaaggacaggcattaaatgatgacgaaatttttcatgccagtgctcttggtt

SEQ ID NO: 66057 - DNA, 242 bp, Glycine max
  Clone ID: 700757192H1
gaggaggaatttgcgggaaagaaacgaaacccagacatgaatcgggtgaaacagaaggtaacaagccaaccccacgataattagccatgaaagctcttcacttgagcttctacttctacatcatcgtcttcatatgtccctattcctctcctttcaagtcagcactgtaaaaggggtcaacaacaccagcgccaatgaatctggcaatagaagaattctgcaccagccattgttcccggcga

SEQ ID NO: 66058 - DNA, 263 bp, Glycine max
  Clone ID: 700757193H1
ctgagagcgtcgaaggcacagccgtcgcgtgggaaggtcccaaaataaattaggtttgattattaggggagggaaaatggatgaatcaacgaagaaggggtctgtgacctcactcgcctccctcttcccagagaggaggcgcaaagggcggccaagcgcgtcgaagacaccattgccgacaagcagagcgagctcgaccgcctacgaggtttcgccaccgacaacaacagcctcatcaacctcgtccacaagctccccgaaca

SEQ ID NO: 66059 - DNA, 265 bp, Glycine max
  Clone ID: 700757194H1
tgatgagagtgcggtttcctttgttggtgttgctgggaactgttttcctggcatcagtttgtgtctcattaaaggtgagagaggatgagaataaccctttctacttgagaagctctaacagcttccaaactcctttgagaaccaaaacggtcgcattcgtctcctccagagattcaacaaacgctccccacaacttgagaaccttcgagactaccggattgtccagtttcagtcaaaacccaacacaatccttctcccccaccat

SEQ ID NO: 66060 - DNA, 154 bp, Glycine max
  Clone ID: 700757195H1
tcaaaaattttgtttctttgtggtgtatggtgatgataacttaattagtgttcatgaatacgtcaagccttactttagtgggtctaaattgaaaagctttctagctggtcataatatcaccattactgatggtattgacaagactagtgcactt

SEQ ID NO: 66061 - DNA, 236 bp, Glycine max
  Clone ID: 700757196H1
ctcgagcgctcgagccgctcgagccgagcatttttaatgagatgctcattagatatagctatgaaaaattactgcgccaggctaaagctccaagtatgtttttacaatccttcaaaaattttgtttctttgtgttgtatggtgatgataacttaattagtgttcatgaatacgtcaagccttactttagtggttctaaattgaaaagctttctagctggtcataatatcaccatta

SEQ ID NO: 66062 - DNA, 250 bp, Glycine max
  Clone ID: 700757201H1
gagaaagagaacatccacaaccacacccaccacacgaggagagaggacgtagagaaagaggacgccaggaaggtgagaaggaggaaaaggaacaagacgagcgtgaattacaaccacgtccatttccacgaccagaggagcacgaaggagaacagtggaaaggaaggcatcgtcatgaagacccggaagagagggcgagaatgagactgagggaagcagaaagaatagagagggaaaggggaggaacaga

SEQ ID NO: 66063 - DNA, 249 bp, Glycine max
  Clone ID: 700757202H1
taagagtcacagctccactatcctcctaggagattctatcttgctgggaaccaagagcaagagtttctaaaatatcagcagcagcagcaaggaggttcccaaagccagaaaggaaagcaacaagaagaagaaaacgaaggaagcaacatattgagtggcttcgcccctgaattcttgaaagaagcgttcggcgtgaacatgcagatagtgagaaacctacaaggtgagaacgaagaggaggatagtgga

SEQ ID NO: 66064 - DNA, 249 bp, Glycine max
  Clone ID: 700757203H1
agcggtttcctttgttggtgttgctgggaactgttttcctggcatcagtttgtgtctcattaaaggtgagagaggatgagaataaccctttctacttgagaagctctaacagcttccaaactctctttgagaaccaaaacggtcgcattcgtctcctccagagattcaacaaacgctccccacaacttgagaaccttcgagactaccggattgtccagtttcagtcaaaacccaacacaatccttctcc

SEQ ID NO: 66065 - DNA, 250 bp, Glycine max
  Clone ID: 700757204H1
cacctttctttgactgttctccaccccagggtaatgcccacactaagttattcccaaaccacaccaatgtcgacctcttcaccactcttcctcctcctaattattattattattattcctatcctccactttcacgcggcggaagcgccggccaagggacagtggcagctcctccacaaaaacatcggcattgtcgccatgcacatgcagctcctccacaacgaccgcgtcatcatcttcgaccgcaccg

SEQ ID NO: 66066 - DNA, 251 bp, Glycine max
  Clone ID: 700757205H1
aacaagctcttcatttctcccacactttcttttctttcaccaaaaatgtcaccagatttcacacttttgttcttcccggaactcatgcagtcccctatgatcactttccaagccaccctctgcgtccttctcttcaccctcatgttcacgctgctcttcactcctggtgggcttccttgggcctgggcccggcccagacccatcatccctggcccagtaactgccctgttagggatctttactggctccac

SEQ ID NO: 66067 - DNA, 250 bp, Glycine max
  Clone ID: 700757206H1
gttctttaattttctgattttagcaaattaaaatagtagtgttattggtaggttttggcaaagatgttttcagttccaggggtgtcgggaatcctgaacagaggaggagggcataagataaaagggacagtggtgttgatgaggaagaatgtgttggacttcaacagcgtggctgatcttactaaaggaaatgttgggggactcataggcaccggcctcaacgttgttggctcaacacttgataacctca

SEQ ID NO: 66068 - DNA, 251 bp, Glycine max
  Clone ID: 700757208H1
ttctcgaccgaatccgctcgacgtgctcgagcacacacacacacacactaagaataatacgcttctatcctccactactttttagccatctctctttctttctctttccttttcttcttatccgactccgtccccattccccaacaccacactaaccctacaaaacctataaaccttctggttctacccgttcaaaatgatgcttccacagggctccattgggccaacctccaaaaaaggacccctctaat

SEQ ID NO: 66069 - DNA, 248 bp, Glycine max
  Clone ID: 700757213H1
ttgaaattttgataaaccgcgatcacaggttgccgcaccttaaaaccggaaacaaaagcaatcgttacttgatttcaagaatctctcaatttcttcctacttctttgtgtacgatttcttaagggaaagaaaatcactctctgtgctggccacagacttcgtgaatcattttcttttccactcttagtttatttcctgaacactctcctatttgatataggacttcgtgtcagatttaaacttcttct

SEQ ID NO: 66070 - DNA, 249 bp, Glycine max
  Clone ID: 700757214H1
ttctcgagcgaatcggctcgagcaaatgctgttctttcaatgtggagatattttgttacagatctcgtctttgaagtattctaagatgacttctccctacattaaatgtacagtctctttcttcatagcatttggaaatttggctgatgataccatcaattttgaggcttttccccacaagctggtgcagtttggagagattcaggaaaaagttgtattgaaattttcacaagaggaatttcttacagc

SEQ ID NO: 66071 - DNA, 242 bp, Glycine max
  unsure (1)..(242): unsure at all n locations
  Clone ID: 700757216H1
caaggaaaggttagagttgtcctcgagtcacatagatcacactgtttgcattcagattccaatgtggagagtgtgatcactgtgactcgggacaggnnaggttagagttgtgaactgccaagggaatgcagtgttcgacggtgagcttaggaggggacaactgctggtggtaccacagaacttcgtggtggcggacaagccggagaacaaggattcgaatacatagtattcaagacacacca

SEQ ID NO: 66072 - DNA, 242 bp, Glycine max
  Clone ID: 700757217H1
aattttgataaaccgcgatcacaggttgccgcaccttaaaaccggaaacaaaagcaatcgttacttgatttcaagaatctctcaatttcttcctacttctttgtgtacgatttcttaagggaaagaaaatcactctctgtgctggccacagacttcgtgaatcattttcttttccactcttagtttatttgctgaacactctcctatttgatataggacttcgtgtcagatttaaacttctt

SEQ ID NO: 66073 - DNA, 250 bp, Glycine max
  Clone ID: 700757218H1
tgctcgagcgaatcggctcgagcaaatgctgttctttcaatgacggagatattttgttggagatctcgtctttgaagtttctaagatgacttctccctacattaaatgtacagtctctttcttcatagcatttggaaatttggctgatgataccatcaattttgaggcttttccccacaagctggtgcagtttggagagattcaggaaaaagttgtattgaaattttcacaagaggaatttcttacagct

SEQ ID NO: 66074 - DNA, 249 bp, Glycine max
  Clone ID: 700757219H1
attgccgttcaaagtggtcttatttgaaaaacacttgggcgttggtgcaaatgtttgcttcgttaattttctctggagacgacaggctcactgagaaaacaatttttacttgcagagatttggacatcttggttgtttattatacaatagcaactcaatgtagatcaacaaggtatacagatgccacctaatgtaatgcggtagaaatttcctaaattgagttgctattgtataataaacaaccaagat

SEQ ID NO: 66075 - DNA, 251 bp, Glycine max
  Clone ID: 700757221H1
ggaaaaatttgtacaaatgatgaagagcatctatgaaacagaagttacagattggccagtaccactgaaaatcatttctggaaccattctacgcaacaattttgggaacaaccttctggaaactcttttcctttcttagagatgctggtaatgggggagtttttgttggtaatgttgcttcagcattcacaacttcaagtgtgcttgaggcccaaagtagaaagcccaacagatatgaagtttcccaatac

SEQ ID NO: 66076 - DNA, 250 bp, Glycine max
  Clone ID: 700757224H1
aaaaaacattgcccttgttctttcaaagttaccaaacacaagtacacaacacaacagcaacatatggcgtctgaacaattggctcgcagagagaacaccaccaccgagaaggagattcacgttgagaaacacagggttcccaagatggccacccacttcgagcaccttgcggacaagctaaagaatctgacatcaccgctgggaaggatactccgcagggtagcatagaagccttgcaagctggagagag

SEQ ID NO: 66077 - DNA, 248 bp, Glycine max
  Clone ID: 700757225H1
cccagatatagagcacccagagaccatgcaacaacagcagcagcagaagagtcatggtggacgcaagcaggggcaacaccagcagcaggaggaagaaggtggcagtgtgctcagtagcttcagcaaacatttcttagcacaatccttcaacaccaacgaggacacagctgagaaacttcggtctccagatgacgaaaggaagcagatcgtgacagtggagggaggcctcagcgttatcagccccaagt

SEQ ID NO: 66078 - DNA, 247 bp, Glycine max
  Clone ID: 700757227H1
aacacaacaagaaaagacaacacagagagaagcgtcttaataaacgctcttctctgaaaaacctgatttcttctcttcttctcttctctttcgtttcgatcttcgatctctgaaaatgagagagtgcatttcaatccacatcggtcacgccggtattcaggtcggaaacgcctgctgggagctctactgcctcgaacacggcattcagcctgatgggcagatgccaagtgataagactgttggtgga

SEQ ID NO: 66079 - DNA, 246 bp, Glycine max
  Clone ID: 700757229H1
atccttcaaaaattttgtttctttgtgtgtgtatggtgatgataacttaattagtgttcatgaatatgtcaagccttactttagtggttctaaattgaaaagctttctagctggtcataatatcaccattactgatggtattgacaaaactagtgcaactttgcaatttagaaagttagcagattgtgattttctcaagagaaactttaagcagatgtctaatgttttgtgggtggctcctgagga

SEQ ID NO: 66080 - DNA, 237 bp, Glycine max
  Clone ID: 700757230H1
gacagagggcaattttagagcaagtgttgatttgcagcgcactcatcgtattagaggaatgattaaaatggtggccacagttggtattcctgagaatacaggtatatcattggcctgtgctatgaatagttcttttagggggcgcgccagttctgatatttacaccatctgctctcaagactgtgaattgtggaatcctgcttgcacaaaagcaatgactatgtcatttaatccaaa

SEQ ID NO: 66081 - DNA, 242 bp, Glycine max
  Clone ID: 700757231H1
caacgccgtgagcagctacattaaggatgtgtttagggcaatcccttcggaggttctttccaattcttacaaccttggccagagtcaagtgcgtcactcaagtatcaaggaaactccggccctttggtcaacccataaataacaacaagcatatatgaaggtgtggtgaggccatcttatatgaaataatatcaaaatatattttgtgtaataataaaactatggcctatgtatttaccacc

SEQ ID NO: 66082 - DNA, 245 bp, Glycine max
  Clone ID: 700757232H1
aacgaaggaagcaacatattgagtggcttcgcccctgaattcttgaaagaagcgttcggcgtgaacatgcagatagtgagaaacctacaaggtgagaacgaagaggaggatagtggagccattgtgacagtgaaaggaggtctaagagtcacagctccagccatgaggaagccacagcaagaagaagatgatgatgatgaggaagagcagccacagtgcgtggagacagacaaaggttgccaacg

SEQ ID NO: 66083 - DNA, 247 bp, Glycine max
  Clone ID: 700757236H1
cttgaaagaagcgttcggcgtgaacatgcagatagtgagaaacctacaaggtgagaacgaagaggaggatagtggagccattgtgacagtgaaaggaggtctaagagtcacagctccagccatgaggaagccacagcaagaagaagatgatgatgatgaggaagagcagccacagtgcgtggagacagacaaaggttgccaacgccaaagcaaaaggagcagaaatggcattgatgagaccatttgc

SEQ ID NO: 66084 - DNA, 244 bp, Glycine max
  Clone ID: 700757237H1
ccgggcggacggtcgtcggtgcagatcttggtggtagtagcaaatattcaaatgagaactttgaaggccgaagaggggaaaggttccatgtgaacggcacttgcacatgggttagtcgatcctaagggacgggggaagcccgtctgatagcgctctgtgcgcgtactccgaaagggaatcgggttaaaattcctgaaccgggacgtggcggctgacggcaacgttagggagtccggagacgtcg

SEQ ID NO: 66085 - DNA, 247 bp, Glycine max
  Clone ID: 700757238H1
ggccaagtaaattggaaaggtgtagcatactacaataggctgatcaattacttgctagaaaaaggtattactccatatgcaaatctctaccattatgatcttcctttagcacttgaggagaggtacaacggattattgagccggcaagttgtgaatgattttgcagattatgcagaattttgtttcaagacttttggagatagagttaagaattggatgacgtttaatgaacctcgtgtggtggctg

SEQ ID NO: 66086 - DNA, 246 bp, Glycine max
  Clone ID: 700757239H1
gaccaagttcacaatcctcctcatctctcttctcttctgcatcgcccacacttgcagcgcctccaaatggcagcaccagcaagatagctgccgcaagcagctccagggggtgaacctcacgccctgcgagaagcacatcatggagaagatccaaggccgcggcgatgacgatgatgatgatgacgacgacaatcacattctcaggaccatgcggggaagaatcaactacataaggaggaacgaagg

SEQ ID NO: 66087 - DNA, 247 bp, Glycine max
  Clone ID: 700757240H1
aattaagagagttttttttgttcctcactgaccaagccatggcgatgagaaccaaactttctttagctatctttttcttttttcttttagccttattttcaaacctagcctttggcaaatgtaaagaaaccgaggtagaagaagaagaccctgagctcgtaacatgcaaacaccaatgccaacagccacagcaatacactgagggtgacaagcgggtatgcttgcaaagatgtgacaggtatcatcg

SEQ ID NO: 66088 - DNA, 246 bp, Glycine max
  Clone ID: 700757241H1
atgccacctaatgtaatgcggtagaaattaaatataagcggaatctgagtaatattcatatttccggcttattttacgacggcagatacaaattctggactaaacacgagaataatcttgctttgacagaagaggaaaagatggaagtgattagaaatagaggcattcctgctgatgttcttgcaaagcgagctcatgaatttgaaaaacatgttgctcatgaaagcctcaaggatcaaattcctg

SEQ ID NO: 66089 - DNA, 246 bp, Glycine max
  Clone ID: 700757242H1
taaaaggatagaagatgatcagaaatttaaaaacaaaaaaagtaagaaaaggaaaaacttggaggcatcaaatcagttggagaatgatagaaagaaaagtaagaaagaaatgatctctaagacaagagaggaggttgaagctgattacaaggctgcatccttagccccagatgttatggagaagaaacagatgcaaactgaaactctctctgctgtctttgagacatactttcgcattttgaagaa

SEQ ID NO: 66090 - DNA, 245 bp, Glycine max
  Clone ID: 700757243H1
gatcgcagtgcctactggtgttgcatggtggatgtacaacaatgaagacactcctgttgttgccgtttctattattgacaccaacagcttggagaaccagctcgaccagatgcctaggagattctatcttgctgggaaccaagagcaagagtttctaaaatatcagcaagagcaaggaggtcatcaaagccagaaaggaaagcatcagcaagaagaagaaaacgaaggaggcagcatattgagtg

SEQ ID NO: 66091 - DNA, 242 bp, Glycine max
  Clone ID: 700757244H1
gagagattggtaggcacagaacatgagggatatgatccttttcttggtggaattcaaaaatatgccactcccatgatgcccctagatgaagaaattctttctaaggttgcacaagatatggttgaggaatggtttgattgtgttgatgaggaggattcctttgaggaagtttctttaagtgcagcactcaatggtgttgagggtttagactatatggaaagaattcctcttgccacatctga

SEQ ID NO: 66092 - DNA, 242 bp, Glycine max
  Clone ID: 700757247H1
cacaatttctgggtcacccttaccattccccttctaccactctgcatattgaaatcggctataactataagagcaaatcgtaactttctctgggtcatgcatgctgaagggaacacagacccttatcatcccttgaaacctctcttcaaaaaataggctcttgcccagtgacaggctgatagcagagccaggtgctaaaaaggtcgaagatgtatatgaacccaatccaaatgaaataaacg

SEQ ID NO: 66093 - DNA, 244 bp, Glycine max
  Clone ID: 700757248H1
agccattccagtgtgccggtgttgccctctctcgctgcaccctcaaccgcaacgcccttcgtagaccttcctacaccaacggtcccacggaaatctacatccaacaaggtaagggtatttttggcatgatatacccgggttgtcctagcacatttgaagagcctcaacaacctcaacaaagaggacaaagcagcagaccacaagaccgtcaccagaagatctataacttcagagagggtgattt

SEQ ID NO: 66094 - DNA, 116 bp, Glycine max
  Clone ID: 700757249H1
tctttcgcttgttcgtttgtttaattcaataaaggaaattaggcatgaccctcttgttgagtatgctctgcctatttgagaataacacacacttcacacatcattacgacaattaa

SEQ ID NO: 66095 - DNA, 248 bp, Glycine max
  Clone ID: 700757252H1
caattttcacagctttgcatacactttcttttgtgaacaacccatcttcttcacctttctcaatttccacaccaacccttaactttctactaaacattcggcattttatgagttgatcagcacccagatgcggtaagaaaaccaacctacacttattcacaagcgcctctgtcaaagaagcagctccacagtgtgttatgaagcacccgacagaagggtgtcctaaaatcaattgttgttgcacccaa

SEQ ID NO: 66096 - DNA, 246 bp, Glycine max
  Clone ID: 700757253H1
gtagttcttcatcatagtcttaaacattaaaccttagcaaaactcaacaatgctagacatcaaaggctacctcgtactcttcttcctatggttcatatcaaccattctgatacgttccatcttcaagaaaccatagcgtctaagactcccaccgggtcctccaatttcaatacccttgctgggacacgcgccatatctccgttcactgctccaccaagcattgtacatgctatcactgcgctatgg

SEQ ID NO: 66097 - DNA, 245 bp, Glycine max
  Clone ID: 700757254H1
atcgggagaagtaatcgagcttcagcaatggtgtacgtcaaggctcagaaatcaaaagcctacttcaagagatatcaagtcaagttcaagagaagaagagagggaaaaaccgattaccgtgccaggattcggttgattaatcaggacaagaacaaatataacactccgaaataccgatttgtggttcgctttagcaacaaggacattgttgcacaaataatatctgctagcattgccggcgattt

SEQ ID NO: 66098 - DNA, 242 bp, Glycine max
  Clone ID: 700757255H1
ctcgagcgaattcggctcgagaattttgataaaccgcgatcacaggttgccgcaccttaaaaccggaaacaaaagcaatcgttacttgatttcaagaatttctcaatttctttctacttctttgtgtacgatttcttaagggaaagaaaatcactctctgtgctggccacagacttcgttaatcattttcttttccactcttagtacaattattgaacactctcctatttgatatatgactt

SEQ ID NO: 66099 - DNA, 243 bp, Glycine max
  Clone ID: 700757258H1
tgtttctttccctcttccgtttattaacactcataccgcaccctcttcttcttcctctctttctctcttcttcgtcgctggccttgcctttcaagatccaaacctcttcccaatgaggaacctctctttcttcttcttcttcttcttcaccttcttcgccgccgtcagatctgatccctcagatcaccgctacaaagaaggcgaccccgtccctctctacgccaacaaagttggccccttcca

SEQ ID NO: 66100 - DNA, 241 bp, Glycine max
  Clone ID: 700757259H1
tatttctgaaggtaagttggaggaggcgattgagaacttaacagaagctatttcactcaatcctacctctgccataatgtatggaactagagccagtgtttacatcaaaatgaagaaacccaatgctgcgatccgtgatgcaaatgctgctttggagattaatcctgattctgctaaaggatacaaatcacgtggcatagcacgagcaatgcttggtcaatgggaagaagctgcaaaggat

SEQ ID NO: 66101 - DNA, 243 bp, Glycine max
  Clone ID: 700757260H1
tgcttttcctcttctcgccgccaaccgccacatcgaaaccatcttcgcctccttcttccgctcagtccccgacgtcaggctccgccgcgagtgcctcacgacccaggacggcggcgcgtcgccctcgactgggtctccggcgacgaccgtcgcttgccccccgattctccactcctcatcttgttgccaggtttaaccggaggtagtggggatgcttacgtgagacacatgttagttagagct

SEQ ID NO: 66102 - DNA, 242 bp, Glycine max
  Clone ID: 700757262H1
atacaataccaacacgatttacaaaatttctaccgcattacaaggtatacagacgccacctaatgtaatgcacgtagaaattttctaaatcgagttgctattgtataataaacaaccaagatgtccaaatctctgccgcattacattaggtggcatctgtataccttgttgatctacattctcccatcttttctcactgctgaaattaaatataagcggaatcagagtaatattcagatttc

SEQ ID NO: 66103 - DNA, 239 bp, Glycine max
  Clone ID: 700757263H1
ctccattgtctttgaacactcatcaccatggccaagcttgttctttccctttgtttccttcttttcagtggctgcttcgctctgagagagcaggcacagcaaaatgagtgccagatccaaaagctgaatgccctcaaaccggataaccgtatagagtcggaaggtgggttcattgagacctggaaccctaacaacaagccattccagtgtgccggtgttgccctctctcgctgcaccct

SEQ ID NO: 66104 - DNA, 243 bp, Glycine max
  Clone ID: 700757264H1
ctcactcttcactcaaaactcttgtctttcattttgataattcccacactatggctgagcttcactaccaacaacaacaccaataccctcaccgataccctaatgatccatacgaacaacaaactagctactccactcaggtcgtcaaggcggccaccgccgtcaccgcgggcggctccctcttgatcctcgcctcgttgatccttgccggcaccatcatcgccctcaccatcgtcacaccac

SEQ ID NO: 66105 - DNA, 241 bp, Glycine max
  unsure (1)..(241): unsure at all n locations
  Clone ID: 700757265H1
cggctcgagtatatatactatgatgagagtgcggtttcctttgttggtgttgctgggaactgttttcctggcatcagtttgtgtctcattaaaggtgagagaggatgagaataaccctttctacttgagaagctctaacagcttccaaactctctttgagaaacaaaacgggtcgcattcgtctcctccagagattcaacaaacgctccgcacaacttgagatttancgagactaccggat

SEQ ID NO: 66106 - DNA, 241 bp, Glycine max
  Clone ID: 700757266H1
gcctcaagctactgcaatgcatgtgggagctatagaaattatcattgatagtttcgcaagtcctgactgcaacatagttggtgcaatgcttttggttgatacttatcataccaatcctgaaaatgcagttcgtagtatttttgttgcgcctttcagaggcggaaggcccattcgggtggttacatttccgaataccattgtgcagattgaaccagacatgaattcaaggtttcagcttttg

SEQ ID NO: 66107 - DNA, 241 bp, Glycine max
  Clone ID: 700757267H1
atcctccactactttttagccctctctctttctttctctttccttttcttcttatccgactccgtccccattccccaacaccatactaaccctacaaaacctataaaccttctggttctacccgttcaaaatgatgcttccacagggctccattgggccaacctccaaaaaaggacccctctaatgcaagtaccagtcctggtggacctcaatggaaaccacttgtgggttaactgtgagc

SEQ ID NO: 66108 - DNA, 73 bp, Glycine max
  Clone ID: 700757269H1
acgatttcttaagggaaagaaaatcactctctgtgctggccacagacttcgtgaatgcttttcttttccacac

SEQ ID NO: 66109 - DNA, 242 bp, Glycine max
  unsure (1)..(242): unsure at all n locations
  Clone ID: 700757272H1
gggaagtcgtactgtaaagcggattgctgatgtttcaaaacttagaaattaccagtttccacaggatgcaggtcgtgtggcccatccagtgcgaccacactcttacatcaagatggacaacttctacacagttacggacagggnaaagggggctgaagttgttagaatgtacaaaaccttgctgggaagtcaagggttccgaaaaggcatggatctttattttaagagacatgtgggccaag

SEQ ID NO: 66110 - DNA, 240 bp, Glycine max
  Clone ID: 700757273H1
caatttctttctacttctttgtgtacgttttcttaagggaaagaaaatcactctctgtgctggccacagacttcgtgaatcattttcttttccactttgagtttattttttgaacactctcctatttgatataggacttcgtgtcagatttaaacttcttctgtgtctgtctcagttctctgttcaatttcaagttcaagtgggtgaaatcttggattagtgcttccactctcctatctg

SEQ ID NO: 66111 - DNA, 242 bp, Glycine max
  Clone ID: 700757274H1
gttcccaggacctattgtgttttaaatccacaaaatccttttgtgttaaataggtggatggggaaactgactttcccccagggcacttcccgaagtgtcaaaagaatgcctctttctatagggggaggagctggtgcaaagaatgctattctcatgaatatgccaaatgctgttctttcaatgtggagatattttgttggagatctcgtctttgaagtttctaagatgacttctccctacat

SEQ ID NO: 66112 - DNA, 238 bp, Glycine max
  Clone ID: 700757275H1
gtctttgaacactcatcaccatggccaagcttgttctttccctttgtttccttcttttcagtggctgcttcggtctgagagagcagggacagcaaaatgagtgccagatccaaaagctgaatgccctcaaaccggataaccgtatagagtcggaaggtgggttcattgagacctggaaccctaacaacaagccattccagtgtgccggtgttgccctctctcgctgcacccttaaccg

SEQ ID NO: 66113 - DNA, 238 bp, Glycine max
  Clone ID: 700757276H1
tctctccattgtctttgaacactcatcaccatggccaagcttgttctttccctttgtttccttcttttcagtggctgcttcgctctgagagagcaggcacagcaaaatgagtgccagatccaaaagctgaatgccctcaaaccggataaccgtatagagtcggaaggtgggttcattgagacctggaaccctaacaacaagccattccagtgtgccggtgttgccctctctcgctgca

SEQ ID NO: 66114 - DNA, 239 bp, Glycine max
  Clone ID: 700757277H1
ccataattggttatgccattaaggccaataataacttgaagattttggaacatttgaggcacttgggttgtggtgctgtgcttgttagtgggaatgagctgaagttggctcttcgagctggctttgatcccacaaggtgtatctttaatgggaatgggaaaatcttggaggatttggtcttggctgctcaggaaggtgtgtttgtcaacattgatagtgagtttgacttggaaaacatt

SEQ ID NO: 66115 - DNA, 238 bp, Glycine max
  Clone ID: 700757278H1
gagaatacaggtatatcattggcctgtgctatgaatagttcttttagggggcgtgccagttctgatatttacaccatctgctctcaagactgtgaattatggaatcctgcttgcacaaaagcaatgactatgtcatttaatccaaacccgtgttctgatgcgtggagtttggaatttctgaagcgtaccggatttcattgtgatatcatttgtgtcactggatggactgccactccaa

SEQ ID NO: 66116 - DNA, 227 bp, Glycine max
  Clone ID: 700757279H1
ggctcgagcaagaaatagaagtgagtggtacgttcgagattggagacgaaaattgaattgcgtgagtgaaagttacatcaaccccttacgagcaaaccaattccctttgcaagcaatctcagatagctcattcacataatccctctctccgctgcttatcggaatcggtatggtccaaccggcgccggcgatgactcagttcctcaactccgtcctctcccagcgcg

SEQ ID NO: 66117 - DNA, 241 bp, Glycine max
  Clone ID: 700757280H1
ttaattattaacacttccttagttcaatatgggcaagcccttcactctctctctttcttccctttgcttgctactcttgtcgagtgcatgcttcgctattagctccagcaagctcaacgagcgccaactcaacaacctcaacgcgttggaacccgaccaccgcgttgagtccgaaggtggtttgattcaaacatggaactctcaacaccctgagctgaaatgcgccggtgtcactgtttcc

SEQ ID NO: 66118 - DNA, 238 bp, Glycine max
  Clone ID: 700757282H1
ccttctggatttccgctcacagttatttgtaatagcatttttaatgagatgctcattagatatagctatgaaaaattactgcgccaggctaaagctccaagtatgtttttacaatccttcaaaaattttgtttctttgtgtgtgtatggtgatgataacttaattagtgttcatgaatatgtcaagccttactttagtggttctaaattgaaaagctttctagctggtcttaatatca

SEQ ID NO: 66119 - DNA, 239 bp, Glycine max
  Clone ID: 700757284H1
aatctaacggcatattctctctctctctatatgccgcagcgcatgctttgatcggccaagtcatctctctcgctcccattctccgtatttccaagatcccaacgcactgtcttatcctcccagattccgagtaatggtggtgaagatgatgaggtggcggccctggccgcctctcctctcgaagaagttccaagtgaggctgcacgtgcggaggctccagggctgcgatctgctgcaga

SEQ ID NO: 66120 - DNA, 241 bp, Glycine max
  Clone ID: 700757287H1
tactcgagccgaatcggctcgagagcagtcaaaaggagtgattggacctcattggtacaagactttttaacaaacagcaacacgtacagagcattttgatgcatgtaagtggacaaaatcggaaccacattcctgggaattgatcttcccaatagaggtatgcggtcctaataatggttttgaaatgtggagttctgagtgggcaaatcagacttcatggcatttgagtttccttattgac

SEQ ID NO: 66121 - DNA, 242 bp, Glycine max
  Clone ID: 700757288H1
ctttgattccaaataaccaccatcaacatgttcacggctagtaaactagccttcacattaacaccacctcgtccatgcactgcacccttgacaccaatctcttcagcttctggtgttcacctcattcagttcaatggcaggcacttatgcctccgccaaaggctgtttctactttctcctatggccactgcagatcaacaagggaaagttgaagaatttgaagatgattcaaatactgttga

SEQ ID NO: 66122 - DNA, 279 bp, Glycine max
  Clone ID: 700756902H1
gtgagaaggaggaagacgaagatgagcaaccacgtccaatcccattcccacgcccacaacctcgtcaagaagaagagcacgagcagagagaggaacaggaatggcctcgcaaggaggaaaaacgcggagaaaagggaagtgaagaggaagatgaggatgaggatgaggaacaagatgaacgtcaattcccattcccacgcccacctcatcagaaggaagagcgaaagcaagaggaagatgaggatgaggagcagcagcgagagacgaagaaagtgaaga

SEQ ID NO: 66123 - DNA, 279 bp, Glycine max
  Clone ID: 700756903H1
ctcgtagactgtgtggaagaaagcgaaggttgttacaatggatggcactatcaatcgttcgaatgggttttagaacatggtgggattgccactgatgatgattatccttacagagctaaagagggtagatgcaaagccaataagatacaagacaaggttacaattgacggatatgaaactctaataatgtcagatgagagtacagaatcagagacagagcaagcgttcttaagcgccatccttgagcaaccaattagtgtctccttgatgcaaaagatt

SEQ ID NO: 66124 - DNA, 275 bp, Glycine max
  Clone ID: 700756904H1
gcaatgactatgtcatttaatccaaacccgtgttctgatgcgtggagtttggaatttctgaagcgtaccggatttcattgtgatatcatttgtgtcactggatggactgccactccaatgcaggatgtacaggttacaattgattggtttatttcctctcaggaatgtgttcccaggacctattgtgttttaaatccacaaaatccttttgtgttaaataggtggatggggaaactgactttcccccagggcacttcccgagtgtcaaaagaatg

SEQ ID NO: 66125 - DNA, 279 bp, Glycine max
  Clone ID: 700756905H1
aacaaacacagacagacagagagagagaaagagaaccaaaccaaataaagctcttggttggttcacccttgtgcttattttttgttgctgagaaagagcaaagaagaagaataagaagaaggttttgatcggatgcgatgagcacacaaggacaagtgattgatgaggcggttctggatgacataatccggcgcctaacggaggtccgattggcccgacccggaaagcaggttcagctctccgagtctgagatcaagcaacttgcgtcgcttccagaga

SEQ ID NO: 66126 - DNA, 276 bp, Glycine max
  Clone ID: 700756906H1
tggaatatcacaaatgggtagtagcagatggaattggtgggcttgttggggttcagaagtattttcaaaaatgaagctcttgttgttcttggtgcctctcgtactagttgctggctttgcttctgtaaagggtccaagcctttgcagatggggtttcattgcggactgttctatctcatttactcctcttcctgcttcttcaaattcctcctcacaaacacttcatcaatctaatgaaactaaagttttcaatgtctccagcccgggttcaattta

SEQ ID NO: 66127 - DNA, 58 bp, Glycine max
  Clone ID: 700756909H1
agggccttgagcttttctttctctctttctttgctctcttttcttttaggtttccact

SEQ ID NO: 66128 - DNA, 278 bp, Glycine max
  Clone ID: 700756910H1
caactacactaatattctctctctctctctgttgcaacgccatcaacaacgtcaccttgatggatgcggaatcggacaagcgctctgcttccaccttttctccttcttcatcttcttcttactcctcttcctcgtgcctccgtttggatcggctcgtcgactccgaggagattgaggcggcggagactctggcgcagttggcaaactgcaacactcactcctccgataaatggtgcaccaaacaagacacaacccgagtcagcgcgagtcgccgactc

SEQ ID NO: 66129 - DNA, 278 bp, Glycine max
  Clone ID: 700756911H1
tgataaaccgcgatcacaggttgccgcaccttaaaaccggaaacaaaagcaatcgttacttgatttcaagaatttctcaatttctttctacttctttgtgtacgatttcttaagggaaagaaaatcactctctgtgctggccacagacttcgtgaatcattttcttttccacttttagtttatttgctgaacactctcctatttgatataggacttcgtgtcagatttaaacttcttctgtttctttctcagttctctgttcaatttcaagttcaagc

SEQ ID NO: 66130 - DNA, 276 bp, Glycine max
  Clone ID: 700756912H1
aggaaattgaggaaaaacttgtgaggaggaacaatgatccgagtctgcagggcaatcgacttggcccggttcaactgccatacactttgctttatcctagcagtgagggcaatcgacttggcccggttcaactgccatacactttgctttatcctagcagtgaggaagggttaacttttaggggaattccaaatagcatctctatctaagggagcctgtggtttactctaattactctatatatagtgcatgtgtacctccaataaaaaagatgca

SEQ ID NO: 66131 - DNA, 276 bp, Glycine max
  Clone ID: 700756913H1
ccgaaatgttaagagaatgcctctttctatagggggaggagctggtgcaaagactgctattctcatgaatatgccaaatgctgttctttcaatgtggagatattttgttggagatctcgtctttgaagtttctaagatgacttctccctacattaaatgtacagtctctttcttcatagcatttggaaatttggctgatgacaccatcaattttgaggcttttccccacaagctggtacagtttggagagattcaggaaaagttgtattgaaattt

SEQ ID NO: 66132 - DNA, 275 bp, Glycine max
  Clone ID: 700756914H1
gaaaaaaaaaagaaaaaagaaaatgaaaacgaaaacttcacgttcctgaaagagagagagagagaaagttaaggacttaaatggtttgtttcagttcgtgaattccattagatctcttgcatttgtaaacagttttgcggggtttttgctttgtacgcaacaagttgtactttttttttcctgtgtcggaaaatgagtttcatcggaaacttcgttacttgatcgaagtttggttcatcggatcgagttcgaatgctgtttttcaggagtgacaa

SEQ ID NO: 66133 - DNA, 275 bp, Glycine max
  Clone ID: 700756916H1
tctcactcataaaatgatttctgcgatttcgtgggtgcccaaaggggtttcgaagtcggaacctgtcgtggctgatcctcctcccgaagaggaaatccaagaaatcatcgccagccacactaccaaaagtggagacagtgacaatgaagtcgccaacaacgatgaagttgtggcacaagcattaaacgtagctgatgcagttggcaaagcctccaccggaagctgtgacgaaataacccttgcgttgaaggaccttgcatggaccgttatgacga

SEQ ID NO: 66134 - DNA, 280 bp, Glycine max
  Clone ID: 700756917H1
atgaaataatgttacctccctctctctaacctcactttaactccttcatttcttctttcttttctaaaacctcaaaccgcaacacaacacaacacaacacaatacaagtttcgtattcgtaacgtaacttgtttctcccttcttcctctcctctctccgtttcccgaattctgccctcacttcacccaattccaattccccacatccccagctaggggaattagggtttcgccgccccattcatcgatgcgccaccaccaccgtcgtagggtttgctgcg

SEQ ID NO: 66135 - DNA, 278 bp, Glycine max
  Clone ID: 700756918H1
aaaaggcgtaacatgcacgagagagcaatgcttcattatggtatttctttagatttgaaaccatctgcaacagatgctgctgctatcaaggctgccattgagaaactgcatgtaccagatgagatggaagacaacttgtagctagatgtatgaagtgcaaagtgctaacttggtgtaaattaccagcatttgaatcctgatcacagggatttggctctgcttgtgctttcggcaaaattgttcactaaagcagcacaactgttgaggagtatttattc

SEQ ID NO: 66136 - DNA, 277 bp, Glycine max
  Clone ID: 700756919H1
gagagaagtaatggcgaacatagacatcgaagggatcttgaagcagcagcagccttatgatgggcgcgttccgaagacgtagatagtgtgtactttgggccctgcttctcgatccgtagaaatgaccgagaagcttctgagggcagggatgaacgttgctcgtttcaatttctctcatggcacccacgactatcaccaggaaaccctcaacaatctcaagactgccatgcacaacactggcatactctgtgccgtcatgctgacactaagggacctg

SEQ ID NO: 66137 - DNA, 275 bp, Glycine max
  Clone ID: 700756920H1
cttaattattaacacttccttagttcaatatggggaagcccttacactctctctctttcttccctttgcttgctactcttgtcgagtgcatgctttgctattagctccagcaagctcaacgagtgccaactcaacaacctcaacgcgttggaacccgaccaccgcgttgagtccgaaggtggtttgattcaaacatggaactctcaacaccctgagctgaaatgcgccggtgtcactgtttccaaactcaccctcaaccgcatggcctccacttg

SEQ ID NO: 66138 - DNA, 273 bp, Glycine max
  Clone ID: 700756921H1
atgaaactctaataatgtcagatgagagtacagaatcagagacagagcaagcgttcttaagcgccatccttgagcaaccaattagtgtctccattgatgcaaaagattttcatttatacaccgggggaatttatgatggagaaaactgtacaagtccgtatgggattaatcactttgttttacttgtgggttatggttcagcggatggtgtagattactggatagcgaaaaattcatggggagaagattggggagaaatggttacatttggat

SEQ ID NO: 66139 - DNA, 276 bp, Glycine max
  Clone ID: 700756922H1
gttccaaactctcttcaaaaaccaatatggccacgttcgcgtcctccagaggttcaacaaacgctcccaacagcttcagaatctccgagactaccgcattttggagttcaactccaaacccaacacccttcttctcccccaccatgctgacgctgattacctcatcgttatccttaacgggactgccattcttaccttggtgaacaacgacgaccgagactcttacaaccttcaatctggcgatgccctaagagtccctcaggaaccacatactat

SEQ ID NO: 66140 - DNA, 275 bp, Glycine max
  Clone ID: 700756923H1
tgatccttttcttggtggaattcaaaaatatgccactcccatgatgcccctagatgaagaaattctttctaaggttgcacaagatatagttgaggaatggtttgattgtgttgatgaggaggattcctttgaggaagtttctttgagtgcagcactcaatggtgttgagggtttggactatatggaaagaattcctcttgccacatctgagggttttcctcatgtgctttcacgcaaaaatggtgaaaaaggcaaaaggaatttgtttctgggga

SEQ ID NO: 66141 - DNA, 276 bp, Glycine max
  Clone ID: 700756924H1
caagtgttgatttgcagcgcactcatcgtattaaaggaatgattaaaatggtggccacagttggtattcctgagaatacaggtatatcattggcctgtgctatgaatagttcttttagggggcgtgccagttctgatatttacaccatctgctctcaagactgtgaattatggaatcctgcttgcacaaaagcaatgactatgtcatttaatccaaacccgtgttctgatgcgtggagtttggaatttctgaagcgtaccgatttcattgtgatat

SEQ ID NO: 66142 - DNA, 188 bp, Glycine max
  Clone ID: 700756925H1
gaaatttcgataaaccgcgatcacaggttgccgcaccttaaaaccggaaacaaaagcaatcgttacttgatttcaagaatctctcaatttcttcctacttctttgtgtacgatttcttaagggaaagaaaatcactctctgtgctggacacagacttcgtgaatcattttcttttccactcttagtat

SEQ ID NO: 66143 - DNA, 276 bp, Glycine max
  Clone ID: 700756926H1
cggctcgagccatcaacaaagtgatcaaagttcctcttttgagtcttcgtgcttccttccacgctccttctcatcaaacccctcatcatagaaatttggaaaaagggttctgaaatcttagctactgagtgcgtaatcactgagatctgccttcatcctgggttggttttgttgatgggtgcttgctggagtaataggattaagtctgtgagtccttccaatacagggatcacttctagaagtgtcagcaggagtggcctgacgtcagctcaaata

SEQ ID NO: 66144 - DNA, 275 bp, Glycine max
  Clone ID: 700756927H1
cacaaaacttccacttgagagaaaagtagtgtattaagactacaaattttcaatttttcaatggcgtcgaggcaacaaaaagaggatcgagctgaggcagctgcgaaagttgctgcgaaagaactcgaacaactcaaccgagaaaaagaccgtgatttcagtgttggtgttgcagaccaacaccaacaagaagaacatcagttagatcaacaaaagcgtggtgtaatcggatccatgttcaaggcggtgcaagacaccacgagaacgccaaggaa

SEQ ID NO: 66145 - DNA, 98 bp, Glycine max
  Clone ID: 700756928H1
actagttctagatcgcgagcggccgctcgcgatctagaactgttcaatatcctagtataccttaatacataatttaagatactatgatgagagcacgg

SEQ ID NO: 66146 - DNA, 271 bp, Glycine max
  Clone ID: 700756929H1
tactagttcaatatcctagtataccttaataaataatttaagatactatgatgagagcacggttcccattactgttgctgggacttgttttcctggcttcagtttctgtctcatttggcattgcttactgggaaaaagagaaccccaaacacaacaagtgtctccagagttgcaatagcgagagagactcgtacaggaaccaagcatgccacgctcgttgcaacctccttaaggtggagaaagaagaatgtgaagaagtgaaattccacga

SEQ ID NO: 66147 - DNA, 180 bp, Glycine max
  Clone ID: 700756930H1
ttctagatcgcgagcggccgccctttttttttttttttgaagaaactgttcacttccataaaactttcaacaaaatttgaacaatgtttttcactcccttaacagaactatgaccagctggatatcacaaacatcgacatctaaaaattacattcccttcaaaaatttcattacttccac

SEQ ID NO: 66148 - DNA, 249 bp, Glycine max
  Clone ID: 700756931H1
agtacaccgtattaaagaatttaagatatactatgatgagagcgcggttcccattactgttgctgggagttgttttcctggcatcagtttctgtctcatttggcattgcgtattgggaaaagcagaaccccagtcacaacaagtgcctccgaagttgcactagcgagaaagactcctacaggaaccaagcatgccacgctcgttgcaacctccttaaggtggaggaagaagaagaatgcgaagaaggtc

SEQ ID NO: 66149 - DNA, 276 bp, Glycine max
  Clone ID: 700756932H1
cttaattattaacacttccttagttcaatatggggaagccctacactctctctctttcttccctttgcttgctactcttgtcgagtgcatgctttgctattagctccagcaagctcaacgagtgccaactcaacaacctcaacgcgttggaacccgaccaccgcgttgagtccgaaggtggtttgattcaaacatggaactctcaacaccctgagctgaaatgcgccggtgtcactgtttccaaactcaccctcaaccgaatggcctccacttgcc

SEQ ID NO: 66150 - DNA, 127 bp, Glycine max
  Clone ID: 700756933H1
ggcatgaccctcttgttgagtatgctctgcctatttgaaaatttccacacctcttttaattgtcgtaatgatgtgtgaagtgtgtgttattttaaaaaaaaggaaaaaaaaaaaagggcgccccccg

SEQ ID NO: 66151 - DNA, 278 bp, Glycine max
  Clone ID: 700756934H1
cttattaacactttccttagttcaatatggggaagcccttcttcactctctctctttcttccctttgcttgctactcttgtcgagtgcatgctttgctattacctccagcaagttcaacgagtgccaactcaacaacctcaacgcattggaacccgaccaccgcgttgagtccgaaggtggtcttattgaaacatggaactctcaacaccctgagctgcaatgcgccggtgtcactgtttccaaacgcaccctcaaccgaacggcctccacttgccat

SEQ ID NO: 66152 - DNA, 272 bp, Glycine max
  Clone ID: 700756936H1
ctctccattgtctttgaacactcatcaccatggccaagcttgttctttccctttgtttccttcttttcagtggctgcttcgctctgagagagcaggcacagcaaaatgagtgccagatccaaaagctgaatgccctcaaaccggataaccgtatagagtcggaaggtgggttcattgagacctggaaccctaacaacaagccattccagtgtgccggtgttgccctctctcgctgcacccttaaccgcaatgccctcgtagaccttcctaca

SEQ ID NO: 66153 - DNA, 274 bp, Glycine max
  Clone ID: 700756937H1
acgaccaccagaatctcaaaataatcaaacttgccatacccgtcaacaaacctggcagatatgatgatttcttcttatctagcactcaagcccaacagtcctacttgcaaggcttcagccataatattctagagacctccttccatagcgaattcgaggagataaacagggttttgttgggagaggaagaggagcagaggcagcaagagggagtgatcgtggaactctcaaaggaacaaattcggcaactgagcagcgtgccaaatctagttca

SEQ ID NO: 66154 - DNA, 187 bp, Glycine max
  Clone ID: 700756938H1
tgaaattttgatagaccgcgatcacaggttgccgcaccttaaaaccggaaacaaaagcaatcgttacttgatttcaagaatctctcaatttcttcctacttctttgtgtacgatttcttaagggaaaggaaatcactctctgtgctggccacagacttcgtgaatcattttcttttccacacaacat

SEQ ID NO: 66155 - DNA, 274 bp, Glycine max
  Clone ID: 700756939H1
tggtgaacaagtcctcaagtttccaccacctcatgtcattcaagtgagtaagtctgcatggatgaccgatgaagaatttgcaagagagatggttgcgggtgtaaatccatgcgtaattcgtggtcttcaagagtttcctccaaaaagcaatctggatcctacaatctatggtgagcaaaccagtaagataacagcagatgcccttgatctagatggatacacagtggacgaggcactagcaagtcggaggttatttagttagattaccatgatg

SEQ ID NO: 66156 - DNA, 272 bp, Glycine max
  Clone ID: 700756941H1
attcttcagaagatttttctgaaaaggaagatcaagaaaaacccaaaaagattgatgccagattgagacaaagaatagatcctcaatacaatgaggttcaggctcagatggaaacaaatttgtttaaattgtctcttgatgatgttgaaactcctaaaggttccatgttggatcttaaaatttctcaatctaaaattgcacttcccaaaaacacagttggaggaaccattctgcgtagtgacctattggcaaatttttgacagagggcaatt

SEQ ID NO: 66157 - DNA, 275 bp, Glycine max
  Clone ID: 700756942H1
tctcgagccgattcggctcgaggaaagtcttccatagccccccatcaatgaagagcaccatcttctttgctctctttctcatttgtgccttcaccacctcatacctaccttcagccatcgctgatttcgtgctcgataatgaaggtaaccctcttgaaaatggtggcacatattatatcttgtcagacataacagcatttggtggaataagagcagccccaacgggaaatgaaagatgccctctcactgtggtgcaactcgcaatgagctcgaca

SEQ ID NO: 66158 - DNA, 272 bp, Glycine max
  Clone ID: 700756944H1
aaaactacccttttgcttttgctctttgttctttgccatggagtggctacaacaacaatggccttccatgatgatgagggtggtgataaaaagtcaccaaaaagtttgtttttgatgagcaactccacgagggttttcaagtctgatgcaggggaaatgcgtgtgctgaaaagccatggtggtaggatattttataggcacatgcacattggcttcatctctatggaaccaaagtccttgtttgttcctcagtactcgactctaatctcatc

SEQ ID NO: 66159 - DNA, 269 bp, Glycine max
  Clone ID: 700756945H1
ctcgagccgtgccagttctgatatttacaccatctgctctcaagactgtgaattatggaatcctgcttgcacaaaagcaatgactatgtcatttaatccaaacccgtgttctgatgcgtggagtttggaatttctgaagcgtaccggatttcattgtgatatcatttgtgtcactggatggactgccactccaatgcaggatgttcaggttacaattgattggtttatttcctctcaggaatgtgttcccaggactattgtgttttaaa

SEQ ID NO: 66160 - DNA, 271 bp, Glycine max
  Clone ID: 700756946H1
caattcaccacttgcctctctcgctaccctacctcaaagggtgctctaatcttcggggatgcaccaaacaacatgcaacaatttcacaaccaagatattttccacgatttggctttcaccccattaaccgtcacaccacaaggagaatacaacgtgagagtcagctccataagaatcaaccagcacagtgtgttcccaccgaacaagatatcatcaaccatcgtagggtcttctggaggaacaatgattagcacctaactcctcacatggt

SEQ ID NO: 66161 - DNA, 270 bp, Glycine max
  Clone ID: 700756948H1
cgaaaggaagcagatcgtgacagtggaaggaggtctcagcgttatcagccccaagtggcaagaacaacaagatgaagatgaagatgaagacgaagatgatgaagatgaacaaattccctctcaccctcctcgccgaccaagccatggaaagcgtgaacaagacgaggacgaggacgaagatgaagataaacctcgtcctagtcgaccaagccaaggaaagcgtgaacaagaccaggaccaggacgaggacgaagtgaagatgaagatcaa

SEQ ID NO: 66162 - DNA, 192 bp, Glycine max
  Clone ID: 700756949H1
taagatttgaaattttgataaaccgcgatcacaggttgccgcaccttaaaaccggaaacaaaagcaatcgttacttgatttcaagaatctctcaatttcttcctacttctttgtgtacgatttcttaagggaaagaaaatcactctctgtgctggccacagacttcgtgaatcattttcttttccacacaac

SEQ ID NO: 66163 - DNA, 209 bp, Glycine max
  Clone ID: 700756950H1
gaacaatccctggggttacgcggggaagccttgaattagcttgagaaatatactgctcatctacgaatgcttttcacataaataggcatctcttatatagaatactttcatgttggatgatttgtttaggcagttcgttgtataatcttgacaataaaaatttggcagcatttcaagaagttaaagctatgtatttaaacaatatcttt

SEQ ID NO: 66164 - DNA, 273 bp, Glycine max
  Clone ID: 700756952H1
ccattactgatggtattgacaagactagtgcaactttgcaatttagaaagttagcagattgtgattttctcaagagaaactttaagcagatgtctaatgttttgtgggtagctcctgaggacaaggcgagtttatggtcacaacttcattatgtttcgtgtaataatctggaaatgcaagaagcttatcttgtcaatctcgtaaatgtgttacgagaattgtatttgcacagtccagaggaagctcgccaattgagaaggaaagctctctctc

SEQ ID NO: 66165 - DNA, 269 bp, Glycine max
  Clone ID: 700756953H1
cttggttgtttattatacaatagcaactcgatttagaaaatttctaccgcattacattaggtggcatctgtataccttgttgatctacattctcccatcttttctcactgctgaaattaaatataagcggaatcagagtaatattcagatttccggcttattttacgacggcagatacaaattctggactaaacacgagaaaaatcttgctttgacagaagaggaaaagatggaagtgattagaaatagaggattcctgctgatgttct

SEQ ID NO: 66166 - DNA, 271 bp, Glycine max
  Clone ID: 700756954H1
acgagcagcaacaaagaccccaggaagaggaagaagaagaagaggatgagaagccacagtgcaagggtaaagacaaacactgccaacgcccccgaggaagccaaagcaaaagcagaagaaatggcattgacgagaccatatgcaccatgagacttcgccacaacattggccagacttcatcacctgacatctacaaccctcaagccggtagcgtcacaaccgccaccagccttgacttcccagccctctcgtggtcagactcagtgctgag

SEQ ID NO: 66167 - DNA, 272 bp, Glycine max
  Clone ID: 700756957H1
aacttattaacactttccttagttcaatatggggaagcccttcttcactctctctctttcttccctttgcttgctactcttgtcgagtgcatgctttgctattacctccagcaagttcaacgagtgccaactcaacaacctcaacgcgttggaacccgaccaccgcgttgagtccgaaggtggtcttattgaaacatggaactctcaacaccctgagctgcaatgcgccggtgtcactgtttccaaacgcaccctaaccgcaacggcctcca

SEQ ID NO: 66168 - DNA, 272 bp, Glycine max
  Clone ID: 700756958H1
tatatatactatgatgagagtgcggtttcctttgttggtgttgctgggaactgttttcctggcatcagtttgtgtctcattaaaggtgagagaggatgagaataaccctttctacttgagaagctctaacagcttccaaactctctttgagaaccaaaacggtcgcattcgtctcctccagagattcaacaaacgctccccacaacttgagaaccttcgagactaccggattgtccagtttcagtcaaaacccacacaatccttctccccca

SEQ ID NO: 66169 - DNA, 151 bp, Glycine max
  Clone ID: 700756959H1
attgaacttgaagctcactgagcaagtgcgtaatacttcaatgcactctaagtgcttattgcaaattgtattcttgcggttagttttaattaaagttgtttatgtttgtctcagattacagatactctactattttatattattttattcc

SEQ ID NO: 66170 - DNA, 197 bp, Glycine max
  Clone ID: 700756961H1
ctcgagccgaatcggctcgagtaaaccgcgatcacaggttgccgcaccttaaaaccggaaacaaaagcaatcgttacttaatttcaagaatttctcaatttctttctacttctttgtgtacgatttcttaagggatagaaaatcactctctgtgctggccacagacttcgtgaatcattttcttttccacacaaaat

SEQ ID NO: 66171 - DNA, 267 bp, Glycine max
  Clone ID: 700756962H1
ctctccattggtccttaaacactcatcagtcatcaccatggccaagctagttttttccctttgttttctgcttttcagtggctgctgcttcgctttcagttccagagagcagcctcagcaaaacgagtgccagatccaaaaactcaatgccctcaaaccggataaccgtatagagtcagaaggagggctcattgagacatggaaccctaacaacaagccattccagtgtgccggtgttgccctctctcgctgaccctcaaccgcaac

SEQ ID NO: 66172 - DNA, 267 bp, Glycine max
  Clone ID: 700756963H1
actcatcagtcatcaccatggccaagctagttttttccctttgttttctgcttttcagtggctgctgcttcgctttcagttccagagagcagcctcagcaaaacgagtgccagatccaaaaactcaatgccctcaaaccggataaccgtatagagtcagaaggagggctcattgagacatggaaccctaacaacaagccattccagtgtgccggtgttgccctctctcgctgcaccctcaaccgcaacgccctcgtagaccttccta

SEQ ID NO: 66173 - DNA, 269 bp, Glycine max
  unsure (1)..(269): unsure at all n locations
  Clone ID: 700697901H1
gctttctcttccttcataatttctcaactttcaaatctccattcagcttcattttcctgaatagaaaaaaccctttctgggagaaagattatagccttcagctggaaaaggatcattcatcttgaaagaagagtatgtgtgtgacaatctttatagttctaaggagggtgcaagagagaactgaatgtgctgtgatggcaactcgtagatatgcttgtggaagagctgatgaggcnactcatccagactcgatgaggggcactttggct

SEQ ID NO: 66174 - DNA, 287 bp, Glycine max
  Clone ID: 700697903H1
cctcaaccgtctcggatgagatgatcgtgttcagggagcttaacaagcttgaagtccaaggggttacgggaataatgttcaagaaggcctttgaccaggttgaaggccaaggacatcaatcttcaagtgaccgagaagttcaaggagcgggtggtggacgaagctacaaccctagctatggtgcacgcccgctgaggcgagccatcatgaggctgctggaggacaccttgctgagaagatgctcgcagggagtaaggaggcgatctgcatatagatgtgatcgaggg

SEQ ID NO: 66175 - DNA, 293 bp, Glycine max
  unsure (1)..(293): unsure at all n locations
  Clone ID: 700697905H1
accttgctctatactacacagtacacacactagaagaataattgctttcaatctccaataatttttaagccttcccctttcttgctcttttcttttcttcttatccgactcagtcacccctacaaaaccaataaaccttgttgttctacccgttcaaaatgatggttccacagggctccattggggcaacctccaaaaaagaacccctctaatgcaagtaccagtcctggtggacctcaatgganatcacttgtgggttaactgtgagcagcagtactcatccanaaacgtac

SEQ ID NO: 66176 - DNA, 293 bp, Glycine max
  Clone ID: 700697907H1
gaagaagatcaacctcgtcctgatcaccctccacagcgaccaagcaggccgaacaacaagaaccacgtggcagaggatgtcagactagaaatggggttgaggaaaatatttgcaccatgaagcttcacgagaacattgctcgcccttcacgtgctgacttctacaacccaaaagctggtcgcattagcaccctcaacagtctcaccctcccagccctccgccaattcggactcagtgcccaatatgttgtcctctacaggaatggaatttactctccacattggaacttgaag

SEQ ID NO: 66177 - DNA, 293 bp, Glycine max
  Clone ID: 700697908H1
gaaaaggaaaaccctaagagatgaagagaactcctatcttgttccctctcttctttcttctttgtgccttcacctcatatctaccttcagccaccgctgatgatgatcatgtgtacgacactgacggcgataagcttcaatacggtgtcaattatttcgtgttgccagtgataagaggaaatggcggtggaatacaagtagcaaaagcaggaaacgaaacttgccctctgactgtggtgcaatctggcaacgagctctctgaggggttaccgataaagattgcatctcgatcc

SEQ ID NO: 66178 - DNA, 179 bp, Glycine max
  Clone ID: 700697909H1
tattcaaaccttgctctatactacacagtacaccaacttgaagaaatattggcttccatcctccactactttttagccctctctctttcttgctcttttcttttcttcttatccgactcagtcacccctacataaccaataaaccttgttgttctacccgttcaaaatgatggttccac

SEQ ID NO: 66179 - DNA, 289 bp, Glycine max
  unsure (1)..(289): unsure at all n locations
  Clone ID: 700697910H1
cgctngagcggattcggctcgtgcttagttctttgcgatttctatagttcaattatgggacagccttcagtctctctctctgttctctttgcctgctactcttgtcgagtgcatgcttcgcgagtagctccagctagctcatcgagtgccgacccatcaacctcaacgcgttggaacccgaccaccgcgttgagtccgacgttgtgtgattcagagatggtgctctcagcaccctgagctgaaatgcgccggtgtcactgcctacagactcgacctcaaccgcaatggc

SEQ ID NO: 66180 - DNA, 295 bp, Glycine max
  Clone ID: 700697912H1
ctcatcgatctacacacatacttagtttctccaactacacgacggacaagcatggggaagcctgcgaagatcggagagtggggtggatacgccggcgatcgtcgggatctgagggctactccggaccggctgatcgaggtgaaggtcacggcggacaacagcagctgcatccgctccatctccttcatctacatcggagccgatggcaaaccgtacgaggaggggccatggggtttcggccatgctggcacggagtacaagattgatctgtgcaggttcgacgagagcttgacgg

SEQ ID NO: 66181 - DNA, 289 bp, Glycine max
  Clone ID: 700697914H1
tcatgtagttcaaataaccctaatggcacaggggaattctgtctctagtgcaatgcttccagaatgcaatggtgagtagaaatagcaagcctcaagctactgcaatgcatgtgggagctatagaaattatcattgatagtttcgcaagtcctgactgcaacatagttggtgcaatgcttttggttgatacttatcataccaatcctgacaatgcagttcgtagtatttttgtcgcgcctttcagatgcggaatgcctattcgggtggttacactttcgaataccattgt

SEQ ID NO: 66182 - DNA, 275 bp, Glycine max
  unsure (1)..(275): unsure at all n locations
  Clone ID: 700697915H1
tggtgatgaaaaattgatgcgtgaaaggacacacctgctgttgggcctgttgttccaggatggcatttgtcagtagatgtctggagagttgaatgtggaatccttctggatttccgctcacagttatttgcaatagcatttttaatgagatgctcattagatatagctatgaaaaattactgcgccaggctanagctccaagtatgtttttacaatctttcaaaaattctgtttctttgtgtgtgtatggtgatgataacttaattagtgttcat

SEQ ID NO: 66183 - DNA, 301 bp, Glycine max
  unsure (1)..(301): unsure at all n locations
  Clone ID: 700697916H1
gtgatgataacttaattagtgttcatgaatacgtcaagccttactttagtggttctacattgaaaagctttctagctggtcataatatcaccattactgatggtattgacaagactagtgcaactttgcactttagaaagttagcagattgtgattttctcaagagaaactttaagcagatgtctaatgttttgtgggtagctcctgaggacaaggcgagtttatggtcacaacttcattatgtatcgtgtaatgatctgganatgcaagaagcttatcttgtcaatctcgctaatgtgtt

SEQ ID NO: 66184 - DNA, 302 bp, Glycine max
  unsure (1)..(302): unsure at all n locations
  Clone ID: 700697917H1
attctccaaacactctagaatttgcatgcaatgttcctcataccatgggcatacgcgagctttctatgatggggatattgctgctggtatgtcttgctaagggttcatctgatgttaacatgcaaaaggaagaagatggagaacttcgctttcctaatcaccctcttatcgtgagagacgggaacagaaggctaatgcaagacatagattgcggaggattgtgcaagacaaggtgcagtgcccattcgaggccanacgtgtgcaacagggcttgtggcacgtgtcgtgtgaggtgcagtgtg

SEQ ID NO: 66185 - DNA, 301 bp, Glycine max
  Clone ID: 700697918H1
caaccgcaatggcctccacttgccaacttactcaacttatccccggatgattatcatcggccaaggggaaggagcacttggagttgcaattccaggatgtcctgagacgtttgaggagccacaagaacaatcaaacagaagaggctcaaagtcgcagaagcagcagctacaggacagtcaccagaagattcgtcacttcaatgaaggagacgtactcgtgcattctcctggtgttacttactggacctacgaacactggcgatgaaccagttgttgccatcagtcttcttgacacctctaa

SEQ ID NO: 66186 - DNA, 297 bp, Glycine max
  unsure (1)..(297): unsure at all n locations
  Clone ID: 700697919H1
actcgagccgannatcggctcgagatctttcctctcctcccccctctttagctatnnctctctgtgngtagtaagcaacaanattccatcaagtgtgatctctaaataatatgtggagttgtgtgtgtgtggagtactcttacttgataattttcatgtctgcaattgcaagtgcaagtgccgtcgaaccgtgccactagaccaaaaagtgtttttgttgttgccaccatgtgtgtgcaagatggtgaacagctggtgaagatctatagagagaacgttgataacacatagagttca

SEQ ID NO: 66187 - DNA, 176 bp, Glycine max
  Clone ID: 700697920H1
tcgggactttcactagccgcagcagcctcaggaggaagaataaaggatgtctcacaggaagttcgagcacccaaggcacgggtcactgggatttctccccaggaagcgtgctgctcgtcacaggggaaaagtgaaggcattccccaaggatgacccatccaaggcacccaagctca

SEQ ID NO: 66188 - DNA, 291 bp, Glycine max
  unsure (1)..(291): unsure at all n locations
  Clone ID: 700697921H1
gactcgtgctatcatcaacttgtcagccattggttanacactcatgcagttgttgagccattcatcatagcaacaaacaggcatctcagtgttgttcaccctatttataaactccttcaccctcactatcgtgacaccatgaacataaatggccttgctcggttatcactggtcaacgacggtggcgttatagaacaaacatttttgtggggaaggtattctgtggaaatgtctgctgtagtttacaaggattgggtttttacagatcaagcattgcctgctgatcttata

SEQ ID NO: 66189 - DNA, 291 bp, Glycine max
  Clone ID: 700697922H1
gcgtgaggacttatggatcacctccaaactctggtgttcagatcatgcttcagaagatgtgcccaaagcattggataaaacattgcaggatttgcaacttgattaccttgacctctatctgatccactggccagtgcgcatgaaaagcggatcagttggattcaagaaggaatatctcgatcaaccggacattcccagcacatggaaagcaatggaggcactctatgactcaggcaaggcaagagccataggagttagcaatttctcttcaaaaaagcttcaagatctcat

SEQ ID NO: 66190 - DNA, 263 bp, Glycine max
  Clone ID: 700697924H1
taattattaacacttccttagttcaatatggggaagcccttcactctctctctttcttccctttgcttgctactcttgtcgagtgcatgctttgctattagctccagcaagctcaacgagtgccaactcaacaacctcaacgcgttggaacccgaccaccgcgttgagtccgaaggtggtttgattcaaacatggaactctcaacaccctgagctgaaatgcgccggtgtcactgtgtccaaactcaccctcaccgcaatggc

SEQ ID NO: 66191 - DNA, 285 bp, Glycine max
  unsure (1)..(285): unsure at all n locations
  Clone ID: 700697925H1
tgatgataagcttgtgttgggtaaacacacaagaattctttgatctgtgcctaccatagcacagattgaagagttccattcgatgcagaggatgatgaatgctcctgattcaaatgataatatcgatctactgttgagcattgatttgttgggtttacacggagcaggtaaagcttttccanacaagattgtttttgatgataagcttgtgttggctaacacacaagaattctttgatggaaatttccagtggatcttggttaccaattttgtgaatgtctttat

SEQ ID NO: 66192 - DNA, 283 bp, Glycine max
  Clone ID: 700697926H1
gcccttggtttcctgtttttcagtgagtgctgcttcgctttcagttccagagagcagcctcagcaaaacgagtgccagatccaaaaactcaatgccctcaaaccggataaccgtatagagtcagaaggagggctcattgagacatggaaccctaacaacaagccattccagtgtgccggtgttgccctctctcgctgcaacctcaaccgcaacgcccttcgtagaccttcctacgacaacgggtcccaggaaatctacatccaacaaggtaagggtaattttg

SEQ ID NO: 66193 - DNA, 249 bp, Glycine max
  Clone ID: 700697928H1
gcgtttaacttatgagaccaggttaggagctcgtgtccttgtcccagtataagatctgcgatggcacgttgcttgtaccatctgtttacttatttttatcatgcagtgcatgtgacttgaaactgtgatggacttgtattgctttctgccttatggcacctgtagtagtgaactgatgaaggaagttcatgcggactctgaagctttgttggcttagaatggtaattttgctgtattctatttcacagg

SEQ ID NO: 66194 - DNA, 214 bp, Glycine max
  unsure (1)..(214): unsure at all n locations
  Clone ID: 700697929H1
cgnatctaagcaccctgatgactgaacggcctggtggttatccatggatcaaaacgtgaggagcctttgatgtcttgacggccatctgcggtgatgcttctataaggctccaacgcgcgacttccttgcccagacaaggttccgaagatacctgtagcacttagccgtaacttgtggtccgaggtctaaactggtccagacttgtagcagtatt

SEQ ID NO: 66195 - DNA, 272 bp, Glycine max
  Clone ID: 700697930H1
aatcaatgatgttctctgctgaacagtgtttgcgtgtaatgtgaaaagagaattgaataaatttggcatgtaattcggttattggattcatgctacatgagtgtgtaaagaggtaatgggggtgatgactttcttggtcattgtcgtggctttgtgatttctattgcaaatgttgtcttgtaactttgttgtattttcagcaatatatgatatatgatatctatcttaaaaaaaaaaaaacaaaaaccaaaagaaaaaaaaaaaaagggggg

SEQ ID NO: 66196 - DNA, 263 bp, Glycine max
  Clone ID: 700697931H1
atcagtcatcaccatgggcaagctaattttttccccttggtttcctgttttcagtggctgctgtttcgctttcagtttcagagagcagcctcagcaaaacgagtgccagatccaaaaactcaatgccctcaaaccggataaccgtatagagtcagaaggagggctcattgagacatggaaccctaaacacaagccattcagtgtgcgggtgtcgcctctctcgctgcaccctcaacgcaacgccttcgtagaccttcctacac

SEQ ID NO: 66197 - DNA, 256 bp, Glycine max
  Clone ID: 700697933H1
tggtgatgataacttaattagtgttcatgaatatgtcaagccttactttagtggttctaaattgaaaagctttctagctggtcataatatcaccattactgatggtattgacaaaactagtgcaactttgcaatttagaaagttagcagattgtgattttctcaagagaaactttaagcagatgtctaatgttttgtgggtggctcctgaggacaaggcgagtttatggtcacaacttcattgatgttcgtgtaat

SEQ ID NO: 66198 - DNA, 292 bp, Glycine max
  Clone ID: 700697935H1
gtgttaaataggtggatggactgccaaccccaatgcaggatgttcaaggttacaattgattggtttatttcctctcaggaatgtgttcccaggacttattgtgttttaaatccacaaaatccttttgtgttaaataggtggatggggaaactgactttcccccagggcacttcccgaaatgttaagagaatgcctctttctatagggggaggagctggtgcaaagaatgctattctcatgaatatgccaaatgcctggtctttcattgtggagatattttgttggagatctc

SEQ ID NO: 66199 - DNA, 181 bp, Glycine max
  Clone ID: 700697940H1
gacattttgatagacctcgatcacaggctgccgcaccttaaaatcggagacaagatcaatcgttacttgatttcaagaatctctcaatttcttcctacttctctgtgtacgattacttaagggcaagcaactcactgtctgagctggtcacagacttcgtgaatcattttctattccactc

SEQ ID NO: 66200 - DNA, 289 bp, Glycine max
  Clone ID: 700697941H1
aaggaaaaccatttcttctgaagataaaccttttaactagatttggcacgtttgctcagtgcccgaatctagttcaaggaaaaccatttcttctgaagataaaccttttaacttgagaagccgcgaccccatctactccaacaagcttggcaagttctttgagatcaccccagagaaaaacccccagcttcgggacttggatatcttcctcagtattgtggatatgaacgagggagctcttcttctaccacacttcaattcaaaggcgatagtgatactggtaattaat

SEQ ID NO: 66201 - DNA, 291 bp, Glycine max
  unsure (1)..(291): unsure at all n locations
  Clone ID: 700697942H1
attcgagcgaatcggctcgagttcaaaccttgctctatactaaccagtacacacactaactgaataatggcttccatcatccactactttttagccctctctctttcttgctcttttcttttcttcttatccgactcagtcacccctacaaaaccaataaaccttgttgttctacccgttcaaaatgatggttccacagggctccattgccgtaacctccanaaaagaacccctctaatgcaagtaccagtcctggtggacctcaatggaaatcacttgtgggttaactgt

SEQ ID NO: 66202 - DNA, 284 bp, Glycine max
  Clone ID: 700697944H1
tgcgttttgtgtctgatggagtgatggatcatttgcgacgctttgcgcgccgccgagttctagggagatgctcgtcgtccgttatgcatagttgcgtagacatgagccgtgtagatacgacaggagccgggcagtgaagcaccaggtagaggatcagactgcgccgcgccgctcctgctcgggcgtggagatggctcggtatggagatcgtcggagtagaccgtcggtgtactcactcgagcttcggggtagacggtgcatacagtcgcggcgcactcagttgg

SEQ ID NO: 66203 - DNA, 293 bp, Glycine max
  Clone ID: 700697945H1
tcaatatcctagtataccttaataaataatttaagatactatgatgagagcacggttcccattactgttgctgggacttgttttcctggcttcagtttctgtctcatttggcattgcttactgggaaaaagagaaccccaaacacaacaagtgtctccatagttgcaatagcgagagagactcgtacaggaaccaagcatgccacgctcgttgcaacctccttaaggtggagaaagaagaatgtgaagtaggtgaaattccacgaccacgaccacgttcacaacacccggaga

SEQ ID NO: 66204 - DNA, 294 bp, Glycine max
  Clone ID: 700697946H1
agcttgctcatcaagtccaagaaccaacctaccttttgcaatctcaattcaatggcgtcctctctcattgcgaagcgcttcctctcctcttccctcctctccaggtccctccttcgccccgccgcttccgcttcccaccgctctttcaacaccaacgccatgcgccagtatgacaaccgcgccgacgaccacagcaccgacatcgatcgtcactccgaacgctctttccctagcactgcgcgccgcgacgatatcttctcagatgtgttggatccattttttccgactcggagt

SEQ ID NO: 66205 - DNA, 287 bp, Glycine max
  unsure (1)..(287): unsure at all n locations
  Clone ID: 700697947H1
gttcttccatcttttatcctcagacacataaaatatggtgctttaagccaagtctttcagtaacgccaccgccacaacaacaacaacaacaacgaacctctcacgaagaaaaaccgaagccgataaccagtgtttcgaacccatttgtgaagcactgcctcaaacttcgcaattcctcttcttatcgtcgctctcatgcttctgctattgttgtgggtgctacccctataagctgatattcctgatgggttggataaatccactgctcgntgtgcgcgtgactccgt

SEQ ID NO: 66206 - DNA, 281 bp, Glycine max
  Clone ID: 700697949H1
aaaatgaagagctccgttctcacttggagaaactaagacttgaacaagctagcctgttagaagtaagcaatatcactaccaaatcagatggacaaattgaaaacagtatctcaaacctaccagaaatggtcaccgagaatatttctctgaagggtcagcttataaaagaacagagcagatctgagagtttgttggcagagataatgaaactttcagctgagcttaggaaagcagtccaagcacagaataaccttgtacgcttgtacagcctgtattaagag

SEQ ID NO: 66207 - DNA, 289 bp, Glycine max
  Clone ID: 700697950H1
cctcaaaccggataaccgtatagagtcagaaggagggctcattgagacatggaaccctaacaacaagccattccagtgtgccggtgttgccctctctcgctgcaccctcaaccgcaacgcccttcgtagaccttcctacaccaacggtccccaggaaatctacatccaacaaggtaagggtatttttggcatgatatacccgggttgtcctagcacatttgaagagcctcaacaacctcaacaaagaggacaaagcagcagaccacaagaccgtcaccagaagatctat

SEQ ID NO: 66208 - DNA, 267 bp, Glycine max
  Clone ID: 700697951H1
atttacaccatctgctctcaagactgtgaattgtggaatcctgcttgcacaaaagcaatgactatgtcatttaatccaaacccgtgttctgatgcatggagtttggaatttctgaagcgtactggatttcattgcgatatcatttgtgtcactggatggactgccaccccaatgcaggatgttcaggttacaattgattggtttatttcctctcaggaatgtgttcccaggacctattgtgttttaaatccacaaaatccttttgtg

SEQ ID NO: 66209 - DNA, 272 bp, Glycine max
  Clone ID: 700697952H1
cagctacttgaatatatctatcagcaagaacatagtccctgatgaaatcaaagggagggtgcttcatcattccttccctgtttctcttttcctgccccgcaatgtccgattggagcacaaaacattgaagcttctgaagtattggacctggcaatttgttattgttaggccagtatgttccattctgattattgcactccagcttcttgggctgtaccccagctgggtcagctggacgtttagtattatactgaacttttcagtctccatgg

SEQ ID NO: 66210 - DNA, 281 bp, Glycine max
  Clone ID: 700697955H1
gcttttaatttggaagagagacaaaccagcaagagtggagatggcgacgtcgacgtgcttcctgtgtccgtctacggcgagtttgaaaggcagggccagattcagaatcagaatcagatgcagcagcagcgtgtcggtcaatattcgaagggagcccgaacctgtaacgacgctaaaaaaagcgtttgctcccgccacggtggcgaatctaggtccaggcttcgacttcctaggctgcgcgtggacggactcggagacttgtgtcggtgaaggttgaccac

SEQ ID NO: 66211 - DNA, 250 bp, Glycine max
  unsure (1)..(250): unsure at all n locations
  Clone ID: 700697956H1
atgaaggctagcggcgggctgaccatgccccgggccgtcccgttggaggccatgtgcaggccgcgtacagctatgcgtgatgttcttaagaggctctgaaaacctcatggatcgaattgctggcatcggctgaagggtgtatgactatgacgtagcttccaagttccgagcatatatattcgtattgtgggttgccttgctactanaaaagaaaaaaaccatttaaaatgtttaaaaaaaaagggggggc

SEQ ID NO: 66212 - DNA, 249 bp, Glycine max
  Clone ID: 700697957H1
atcttttacacgacttcttgagtataaaaaatactctttgaatgaagagacggcctcctgagtatgttactgacacgtcctcaggaggccgtctcttcattcaaagagtatcttttacacgacttcttgagtataaaaacactcatttgtacaatcctacctgtctattgaattgtctttagaaaaaaaaaaaaaggggggggccgccgattattgacctcgtcaccccgggatttatttcgggccggg

SEQ ID NO: 66213 - DNA, 288 bp, Glycine max
  Clone ID: 700697958H1
acggaggtcaagcccgccctgaccaacatggtctccgctgctaagctcattcgcacccagctcgccagcgccaagtgagcacctttttttgcctttttcgtttccgaggagggcgtcgtcgatgccaatttgtttccaataaacagggctccccccctgtgcccgccgttctgttgtgctccgtctgtggttaggttactagttttcttgatctcgcccccacgcggtacctgttttactatctgtttggtggtttctgaggcaagttgcccgtgtacttgtatcgta

SEQ ID NO: 66214 - DNA, 290 bp, Glycine max
  Clone ID: 700697959H1
gaaaagagcaaaaaaaggagaggatttataaaaacttgatggctagtttggacactcaaatgctcttcggaattgaaggggatgggagaggaaattagttcatttctacctcaatcctctccaattccgaacgagatttgaggttcccaaatagcctaaaggaaatgagctgaaggttacgtttgatcctctagccttgctggcaattgaatcatactagtatatccgatgaagaaacaaaagtgcgtggagaagtggaggcacgtctatgaactctacactctgcagtt

SEQ ID NO: 66215 - DNA, 289 bp, Glycine max
  Clone ID: 700697960H1
ctatttttcaagtaacttaaggtttcaaacctaggaagttggaagtcatggcagcaacattgatggcagcaacaacaagttctggtactcttaaagcaactcctttccttggccaaggcaagggtgccaatgccaatgctcttagggatgttgtctccatgggaactgggaagtacaccatgggcaatgatttgtggtatggaccagacagagtgaaatacttgggacccttctcagctcagaccccttcatacttgaaaggagaattccctggggattatggatggga

SEQ ID NO: 66216 - DNA, 287 bp, Glycine max
  unsure (1)..(287): unsure at all n locations
  Clone ID: 700697961H1
gcggtttcctttgttggtgttgctgggaactgttttcctggcatcagtttgtgtctcattaaaggtgagagaggatgagaataaccctttctacttgagaagctctaacagcttccaaactctctttgagaaccaaaacggtcgcattcgtctcctccagagattcaacaaacgctccccacaacttgagaaccttcgagactaccggattgtccagtttcagtcanaacccaacacaatccttctcccccaccatgctgacgccgatttcctcctctttgtcctta

SEQ ID NO: 66217 - DNA, 280 bp, Glycine max
  unsure (1)..(280): unsure at all n locations
  Clone ID: 700697962H1
tggaatcaaatggcaacagtgagaacacattgaattttgattctagcaagcagagcttttgtcaattctctattgatcttcttggtggaggaattttagtggacaaaactggagattggatcacacttatacaaaattctccaattagtaacttgttgagagttgctgcttggaagaaaggctgtttaatggttaagattgtgatgtctgggaatgcagcagtncaaaggagtgattgggctcattggtacagtgtttntaacaacagcacagtacagag

SEQ ID NO: 66218 - DNA, 133 bp, Glycine max
  unsure (1)..(133): unsure at all n locations
  Clone ID: 700697963H1
tcctcncctgcaccctcgggcgcttctggcggcgagcagtgtgttgtgttgtgtagtgtcggtgcaggggaggactacaggacacgacgccgccatcaggcatcatcatcatctcagactcagagcatgccag

SEQ ID NO: 66219 - DNA, 244 bp, Glycine max
  Clone ID: 700697965H1
tcggcattcggctcgagcaagctggtacagtttggagagattcaggaaaaagttgtattgaaattttcacaagaggaatttcttacagcttggtcaacccaggtgcgtcctgcaacaactctgttggctgatgggtgtccatatttgtatgctatggtgcatgatagttcagtgtctacaataccaggtgattttgtcattggtgttaagttgacaaccataaacaatatgtgtgcatatgggc

SEQ ID NO: 66220 - DNA, 287 bp, Glycine max
  Clone ID: 700697966H1
aagagatactactctgagtctgactactttaagcaagcacttcgccaaggtgcaccagcaaagcctagggtaccaaggattccaagaatgccgcacttacatgatttccagtttttcaataacccaaggctaaatgaattgtatgaaaaggaagtgcggtaccttatgcaagcgaaccagaagaaagataccattgatggtgaagacgaagatcagttggacgctttgacagcagaggagcaggaagagaaggacaattatagaggagggtttgcgtcatggacaag

SEQ ID NO: 66221 - DNA, 276 bp, Glycine max
  Clone ID: 700697967H1
ctcgagccgcagaagccccactcaaccaccacacctctcctcgttcacgctaccccttactgctcttcttctacctttcaagttttaaaagtataaagatggcagagacattcctatttacctcagagtcggtgaacgagggacaccctgacaagctctgcgaccaaatctccgatgctgtcctcgacgcttgcctcgagcaggacccagacagcaaagttgcctgcgacacatgcaccaaaaccatcttggtcatggtcttcggagaaatcacga

SEQ ID NO: 66222 - DNA, 272 bp, Glycine max
  unsure (1)..(272): unsure at all n locations
  Clone ID: 700697968H1
caaaatagtagaacaaataattatccatattatagatcatgtccaactgatatttaaaacgaagagttcattgaattagaaagaaaacccaatataaaaaaacaaaaatgatctgcatgagtttgtgtgtgtgtgtgtgtcaatttgttctcactaaaatcttatttgaattatttcctataattcacaaaaatcttaggtgtgtgtatctattaagccaacaatggtagtgtcagaanatttagtntgttatcttttggatcaatagaact

SEQ ID NO: 66223 - DNA, 254 bp, Glycine max
  Clone ID: 700697969H1
ctttcttcttcttcttctcttcttcttcaagattgcgacgacgatccaagtgatagacactcgttgcgatggaacttgtagctgaatccgagcgaactctgtacccatacgtgactggatcctctgtagtcgctatcaaatacaaagatgggattctaatggccgctgacatgggaggttcgtatggatctaccctgcggtataagagtgttgagcgtatcaagcctattggaaagcattctcctcctggtgct

SEQ ID NO: 66224 - DNA, 259 bp, Glycine max
  Clone ID: 700697970H1
cctttggaagtggagcaaacgatcatgtcttctggaattatgcttgttataattctggggttattccttattgttcgagataccctaaaccttgattttatcaaagacttgttgtaattaattattgtgaattctatagttagcagtgggcttcaaaaaaagtacttcatgattcttatcttcaatgctgttgcacaccagtgtcttagccggtggtatatctgtactagaggaggcaagatcattttaaacgattgag

SEQ ID NO: 66225 - DNA, 283 bp, Glycine max
  unsure (1)..(283): unsure at all n locations
  Clone ID: 700697971H1
tccgttctccctctcctctcgcttcatacacaccagggcggcacgcgcagcgccatgggcccgccatcaccaacccacctctcttcaattataaacctatcctatatcatcattgacccaagctcacgcgactagtgggtattgatttgcggtcgcgcagatccaggatgcgattcgngngttaacttccaaggaaccagttcattgctggttctgctagcangaggttggatttcagaggcagaagctttcagccaggcgggctcagggcgcgggcacatca

SEQ ID NO: 66226 - DNA, 241 bp, Glycine max
  unsure (1)..(241): unsure at all n locations
  Clone ID: 700697972H1
tgcggtttcctttgttggtgttgctgggaactgttttcctggcatcagtttgtgtctcattaaaggtgagagaggatgagaataaccctttctacttgagaagctctaacagcttccaaactctctttgagaaccanaacggtcgcattcgtctcctccagagattcaacaaacgctccccacaacttgagaaccttcgagactaccggattgtccagtttcagtcaaaacccaacacaat

SEQ ID NO: 66227 - DNA, 283 bp, Glycine max
  Clone ID: 700697974H1
accgattgctagaatggaatttcgatgctcagtcatctcttttaccattctcttctctcttgctcttgcaggagagagccatgtccatgcatcgctacctgaggaagattattgggaagctgtttggccaaacactcccattcccactgcactgcgagagcttctaaagcctctccctgcaggtactgaaatcgatgaactccctaagcaaattgatgatacacagtacccaaaaacattcttctataaagaagaccttcatccaggcaaaacaatgaaagta

SEQ ID NO: 66228 - DNA, 283 bp, Glycine max
  Clone ID: 700697976H1
aaaattcttccaccaagttatggggttccttgtgttgcttcttttctccctcttaggtctctcttctagttccagcatatcaactcatcgttccatattggaccttgacctaaccaagtttaccacacagaaacaggtgtcttcactgttccaactatggaagagtgagcatggacgtgtctaccataaccacgaagaagaggcaaagagacttgagattttccagatcacttgaactatatcagggacatgaatgcaaaccagaaatcaccccatctcatcg

SEQ ID NO: 66229 - DNA, 271 bp, Glycine max
  unsure (1)..(271): unsure at all n locations
  Clone ID: 700697977H1
gcaagttagataaagaacaaactggggatggcaaggattctgaaaacgatgatgataagaatgagaacactgacaatgtggataagaaggacagcaaagctgaaagtgcagagccaagtgctgaaggtggccatttgaagtcatttcaactgctctcaagtagccaaaatgcctttacaggtcttgctggtactggattttctaattcctcattttcctttggttccatttcaaatgaagggtctggttctatttntgggactgaaagtga

SEQ ID NO: 66230 - DNA, 283 bp, Glycine max
  unsure (1)..(283): unsure at all n locations
  Clone ID: 700697979H1
gttgctgcttggaagaaaggctgtttaatggttaagattgtgatgtctgggaatgcagcagtcaaaaggagtgattgggcctcattggtacaagtgtttttaacaaacagcaacagtacagagcattttgatgcatgtaagtggacaaaatcggaaccacattcctgggaattgatcttcccaatagaggtatgtggtcctaataatggttttgaaatgtggagttctgagtgggcanatcaaacttcatggcatttgagtctcttattgacaatgcaaacag

SEQ ID NO: 66231 - DNA, 289 bp, Glycine max
  Clone ID: 700697980H1
gcaacagtgagaacaccattggattttgaatctaacaagcagaacctttgtccattttccaatgaccttctcggtggaggaatcctagtgggacaaaactggagattggatccacacttatacaaaattctcccattagtaacctgttgagagatgctgcctggaagaaaggctgtttaatggtccagattgtgatgtctgggaatgcagcagtcaagaggagtgattgggcctcattggtacaagtgtttttaacaaacagcaacagtacagagcattatgatgcatg

SEQ ID NO: 66232 - DNA, 250 bp, Glycine max
  Clone ID: 700697981H1
atggaaagctgcggataaagtttcggtggatggatagactttggattggggaccctgctgctattgttcttgatgatgtccacttattgacggatgcttctaatggcttggcgttttgttcataggcttgtggtattctttcgataccatatctgatatattgcacccatccattgtgcagcatttcgaatttagcaaacatcttaacctgcagtggacttgcaagttgcacataactatcatcgcatcg

SEQ ID NO: 66233 - DNA, 189 bp, Glycine max
  Clone ID: 700697982H1
actcgagcgaatcggctcgaggcgaagagaatggctcccaagggattaatctttttggctgtggtatgcttctcagcacagtcactgagttcgtgtcttgcggaggataatggacttgttatgaacttctaccaggcatcatgccctcaagctgaagacatcaatcaagaacaagtcaagcttctctac

SEQ ID NO: 66234 - DNA, 288 bp, Glycine max
  Clone ID: 700697983H1
aatatcctagtacaccgtattaaagaatttaagatatatgatgatgagagcgcggttcccattactgttgctgggagttgttttcctggcatcagtttctgtctcatttggcattgcgtattgggaaaagcagaaccccagtcacaacaagtgcctccgaagttgcaatagcgagaaagactcctacaggaaccaagcatgccacgctcgttgcaacctccttaagcgtggaggaagaagaagaatgcgaagaaggtcaaattccacgaccacgaccacaacacccgg

SEQ ID NO: 66235 - DNA, 257 bp, Glycine max
  Clone ID: 700697984H1
ccttaataaataatttaagatactatgatgagagcacggttcccattactgttgctgggacttgttttcctggcttcagtttctgtctcatttggcattgcttactgggaaaaagagaaccccaaacacaacaagtgtctccagagttgcaatagcgagagagactcgtacaggaaccaagcatgccacgctcgttgcaacctccttaaggtggagaatgaagaatgtgaagaaggtgaaattccacgaccacgacc

SEQ ID NO: 66236 - DNA, 282 bp, Glycine max
  Clone ID: 700697986H1
ctacaccaaaatcatctcttcactaatggaaggtggactaaagggaagctcattacaagatatgaagcttttgtttgttgaaatgggtgttggctatgaccttcatggtcaggacataacagctgccgcaatgagagcatgcagagatgcaatttctgccaattcaattccagctttccgtaaaggtatttctgaattgggttttaattatttatccattcagccattctatacattagatccaatccaatattatttttcacataaatgaattttttttaa

SEQ ID NO: 66237 - DNA, 282 bp, Glycine max
  Clone ID: 700697987H1
gttcttcatcatagtcttaaacattaaaccttagcaaaactcaacaatgctagacatcaaaggctacctcgtactcttcttcctatggttcatatcaaccattctgatacgttccatcttcaagaaaccacagcgtctaagactcccaccgggtcctccaatttcagtactcctgctgggatacgcgccatatctccgttcactgctccatcaagcattgtacaagctatcactgcgctatggacccttgatccacgtcatgatcggttcgaagcacgtggt

SEQ ID NO: 66238 - DNA, 280 bp, Glycine max
  Clone ID: 700697991H1
aggggacagtgcctcaggagctggcaatgctcattctttgacttaggggaggttggtaacaataggatttgaaaatctgaatgatccgagttcgtgtgcaggtaattgtaagtgtgtagctgtttctgagacatgggtgtctgcttaggctttgattacgttagtagtagataacaaactggctttgtgggtgtctgacagcagtacagcaccatgtgtatgtaagctggaggtggaaggtactggtgtgttacaagtagctgatcgaccttctcgtatg

SEQ ID NO: 66239 - DNA, 112 bp, Glycine max
  Clone ID: 700697992H1
cagtgttaagaggttcacagtacacaacttcttattcggagaaggggtcgatatgacaggagttccaaccaagatgctgacggtaaattgttcggcgagaatgacagtgcat

SEQ ID NO: 66240 - DNA, 186 bp, Glycine max
  Clone ID: 700697994H1
tggcagaaatgataaacagtctttgtggtgtgatgaaaattgatgcgtgaaaggcacactgctgtggctgttgtcaagatgcattgtagaagtgttgagatgatgtgatcctcgattcgcaagtatcaagcttaaggtgctgatagagaatatggcacaagtcaagttcactaatgtctggggagg

SEQ ID NO: 66241 - DNA, 252 bp, Glycine max
  Clone ID: 700697995H1
attggtccttaaacactcatcagtcatcaccatggccaagctagttttttccctttgttatctgctgttcagtggctgctgcttcgccttcagttccagagagcagcctcagcaaaacgagtgccagatccaaaaactcaatgccctcaaaccggatcaccgtatagagtcagaaggagggctcattgagacatggagccctgccgacaagccattccagactgccggtgttgccctctctcgactgcacct

SEQ ID NO: 66242 - DNA, 95 bp, Glycine max
  Clone ID: 700697996H1
agcaaagcaatggctacttcaaagttgaaaacccagaatgtggttgtatctctctccctaaccttaaccttggtactggtgctactgaccagcaa

SEQ ID NO: 66243 - DNA, 262 bp, Glycine max
  Clone ID: 700698002H1
tgcagaccgagctagctagctagcaagcaagcacagagatggaggcatagcgaggccatgccctcatgtgcttggcacgtgcttcactcttcctctgcgctctaaccctatccgctgctcacggaagcaccacggttcaagacatcgcgagaaagttgaacactcggggacaacgagcttctgcgcacggagaagaagttcaaggttttcatggagaattacgggaggagctactccacagaggaggagtatttgcgccgtt

SEQ ID NO: 66244 - DNA, 232 bp, Glycine max
  unsure (1)..(232): unsure at all n locations
  Clone ID: 700698003H1
cgctgtgggttctttctcaattctcagatctcactcagttccttcgccggagccatagttttttattcccccaccaccgtgattcgtctccctaatcttctattaacttcgagtgagaatgtatggtaatgttggatcccaaccgggggtacagcagtctcaaacaagtttgcctccanatccttttgggagtgcgtttaatgttgctggttcaggactcattcgaggtgga

SEQ ID NO: 66245 - DNA, 279 bp, Glycine max
  Clone ID: 700698004H1
ggatgtcttacgttgctcataacgttaatcagccccaagagaaagatttgttggaaggaaatttttcctttgatattaaatctcgctctagattggaaaaagtttcctctacaaaagcacaatttgttagtggaaaaaccttcaaatatgatatcgttggtgctggttcacattcttcagaagatttttctgaaaaggaagatcaagaaaaacccaaaaagattgatgccagattgagacaaagaatagatcctcaatacaatgaggttcggctcagat

SEQ ID NO: 66246 - DNA, 127 bp, Glycine max
  Clone ID: 700698005H1
gtcactcgccagtattatcctgagtgggctccaattaattgtcgagttcatctgaaaccaattcacatcactagtagggaattatgtcagcaagcacgatgtcagcattgaatatgatgcatgtacc

SEQ ID NO: 66247 - DNA, 279 bp, Glycine max
  Clone ID: 700698006H1
attgtctttgaacactcatcaccatggccaagcttgttctttccctttgtttccttcttttcagtggctgcttcgctctgagagagcaggcacagcaaaatgagtgccagatccaaaagctgaatgccctcaaaccggataaccgtatagagtcggaaggtgggttcattgagacctggaaccctaacaacaagccattccagtgtgccggtgttgccctctctcgctgcacccttaaccgcaatgcccttcgtagaccttcctacaccaacggtcccc

SEQ ID NO: 66248 - DNA, 276 bp, Glycine max
  Clone ID: 700698008H1
gcaggacgcacctgagttgaccaagctgtaagaactctgttggctgatgggtgcccatatttgtatgctatggtgcatgatagttcagtgtctacaataccaggtgattttgtcattggtgttaagttgacaaccataaacaatatgtgtgcatatgggctcaatcctggtatttcaggttctcgtcttttgggcaccattcctcagtccatttcacagcaaactgtttggaatcaaatggcaacagtgagaacaccattgaattttgattctagc

SEQ ID NO: 66249 - DNA, 148 bp, Glycine max
  Clone ID: 700698010H1
cttgcaagggttcagcaagattattctagaggcctcatacgacaccaaattcgaggagataaacaaggttctgtttggtagagaggaggggcagcaacaaggggaggagaggctgcaagagagtgtgattgtggaaatctcaaagaaa

SEQ ID NO: 66250 - DNA, 264 bp, Glycine max
  Clone ID: 700698011H1
gtatgtgtcattcaagaccaatgatagaccctcgatcggaaaccttgcaaggggcaactcattgttgaacgcattgccagaggaagtgattcagcacacttttaacctaaagagccagcaggccaggcaggtgaagaacaacaaccctttcagcttcctggttccacctcaggagtctcagaggagagctgtggcttagagagccctttttgcatgtgctaccacacttttgtccttttgggctctagctagtgctggtagcag

SEQ ID NO: 66251 - DNA, 249 bp, Glycine max
  Clone ID: 700698012H1
cggctcgagcaaacttaattattaacacttccctagttccatatggggacagccttcactctctctctttcttccctttgcttgctactcttgtcgagtgcatgctttgctattagctccagcaagctcaacgagtgccaactcaacaacctcaacgcgttggaacccgaccaccgcgttgagtccgaagtggtttgattcaaacatggaactctcaacaccctgagctgaaatgcgccggtgtcactg

SEQ ID NO: 66252 - DNA, 277 bp, Glycine max
  Clone ID: 700698013H1
aaacaattcaattcaatctgcctcgatcatggagaggaaaacatttgggtttttgttcttgctcctccttgtcttagcttctgatgtgacggtgaagagagcagaggcgaaagattgcttgacaaggaggcacgggttccagggtagatgcttattcgacaggcaatgtgcacatgtgtgcaggagcgatggtttcatcggtggtcagtgccgaggccctcttcgcaaatgcttttgcagcaggccatgttgatcgaaattactactgccaaagagg

SEQ ID NO: 66253 - DNA, 278 bp, Glycine max
  Clone ID: 700698014H1
gttcaatatcctagtacaccgtattaaagaatttaagatatactatgatgagagcgcggttcccattactgttgctgggagttgttttcctggcatcagtttctgtctcatttggcattgcgtattgggaaaagcagaaccccagtcacaacaagtgcctccgaagttgcaatagcgagaaagactcctacaggaaccaagcatgccacgctcgttgcaacctccttaaggtggaggaagaagaagaatgcgaagaaggtcaaattccacgaccacga

SEQ ID NO: 66254 - DNA, 280 bp, Glycine max
  Clone ID: 700698015H1
gggaaccaagagcaagagtttctaaaatatcagcagcagcagcaaggaggttcccaaagccagaaaggaaagcaacaagaagaagaaaacgaaggaagcaacatattgagtggcttcgcccctgaattcttgaaagaagcgttcggcgtgaacatgcagatagtgagaaacctacaaggtgagaacgaagaggaggatagtggagccattgtgacagtgaaaggaggtctaagagtcacagctccagccatgaggaagccacagcaagaagaagatgatg

SEQ ID NO: 66255 - DNA, 269 bp, Glycine max
  Clone ID: 700698016H1
gtggacgagtgtattggtgttggtgttcttgtgtcttagtcttagtaatggtgatgatcaagagaagaagaaaccctgtttgtgggagtggaagagactgagtagcgcttactctgcctatcgggcacttactccttcaagtattggtcttgacatgcttaagaaccttgtcactcacacatatgcccgtttctttcctccaaatatagattttagaagagaggaggaagggcaagtcaaagagcatggagctggggaaaaggttagag

SEQ ID NO: 66256 - DNA, 178 bp, Glycine max
  Clone ID: 700698017H1
ctctctccattggtccttaaacactcatcagtcatcaccatggccaagctagttttttccctttgttttctgcttttcagtggctgctgcttcgctttcagttccagagagcagcctcagcaaaacgagtgccagatccaaaaactcaatgccctcaaaccggataaccgtatagagt

SEQ ID NO: 66257 - DNA, 273 bp, Glycine max
  unsure (1)..(273): unsure at all n locations
  Clone ID: 700698018H1
atcacacttatacaaaattctccaattagtaacttgttgagagttgctgcttggaagaaaggctgtttaatggtcaagattgtgatgtctgggaatgcagcagtcaaaaggagtgattgggcctcattggtacaagtgtttttaacaaacagcaacagtacagagcattttgatgcatgtaagtggacaaaatcagaaccacattcctgggaattgatcttcccaatagaggtatgtggtcctaataatggttttgaaatgtggangttctga

SEQ ID NO: 66258 - DNA, 271 bp, Glycine max
  Clone ID: 700698020H1
catcatgttggtgcctcagcagctgacactggagactcatctctgcagttgtcaagagctgctagcattgttatggtgattgcatattgtgcttaccttgtcttccaactgtggactcacaggcagctatttgaagcccagaatgaagatgatgaagagggtggcagtgattcagaagcagtgataggattctggagtgggtttacttggctggttgggatgactatgaccattgctttgttgtctgaatatgtggtgcaaacattgaggt

SEQ ID NO: 66259 - DNA, 199 bp, Glycine max
  Clone ID: 700698021H1
ctcggtattctgctcgagctttatgattatttggtgaagaaaaagttgcacaacactgctaaagcattcatgacagaagggaaggtttctcctgatccagtagcaattgatgctcctggaggttttctttttgagtggtggtctgttttctgggatattttcattgtgatgacagatgagaaacattctgatactgctg

SEQ ID NO: 66260 - DNA, 278 bp, Glycine max
  Clone ID: 700698023H1
cagatggtgaacaagtcctcaagtttccaccacctcatgtcattcaagtgagtaagtctgcatggatgaccgatgaagaatttgcaagagagatggttgcgggtgtaaatccatgcgtaattcgtggtcttcaagagtttcctccaaaaagcaatctggatcctacaatctatggtgagcataccagtaagataacagcagatgcccttgatctagatggatacacagtggacgaggcactagcaagtcggaggttatttatgttagattaccatgat

SEQ ID NO: 66261 - DNA, 280 bp, Glycine max
  Clone ID: 700698024H1
tgatggtactagagagaattgtgaaaagaatcttggggaatgtagttccttttcccttcctcgagcagcctttgaacttttctccagcattaaagccagcatattccaaacttttagaggaactctaatttcaggagcagtttcctcagtacctacatttgaaaagaagaatggatatgattgtctagataagacagatttggaaacttctgacctctttactgaacaacatccaatggctgagttgcaatatactgaggacaagacttcatatcctgaa

SEQ ID NO: 66262 - DNA, 276 bp, Glycine max
  Clone ID: 700698025H1
aaaggtcggaacataaggcggggaagagttagtttcttctctcttcgatggaaggcggggaagaggttctcccttcggccactgccacctccgccgccaccggcaatcccaccgcttcgcctcctccgctcgctgatcttgtcggtgctcccgatctcgctgctgcctcggacgacgtcgttacccaacctgacattcacgcgctgatttcagacgaagagcacgatcacgagcatgaacatgacgatgacctcgagcacgagcacgatcagcatg

SEQ ID NO: 66263 - DNA, 280 bp, Glycine max
  unsure (1)..(280): unsure at all n locations
  Clone ID: 700698026H1
ctcgagcgattcggctcagagcaaagcaatggctacttagctaagttgaaacccagcatgtggttgtatctcactccctaaccttaaccttggtaatggtgctaatgaacaacaagggcaaacttcagcggaaacctgttcctttcagctgggaacagttcgtgccgaagcaaccanacatgatcctccaaggagacgctattgtgacctcctcgggaaagttacaactcaataaggttgacgaaaacggcaccccaaaaccctcgtctcttggtcgcgc

SEQ ID NO: 66264 - DNA, 202 bp, Glycine max
  Clone ID: 700698027H1
tacaaaactaaccttttgcctttgctccttggtccttggcactgaattggcaacaacaacattggctttccagatgattaaggttgttattaaaagttcaccaaaaggttggttttgaaggaccacttcaaggagggtttccagaattgatgcaggggaattgcctgtcttgaaaagccatggtggtaggaaatttaatagg

SEQ ID NO: 66265 - DNA, 272 bp, Glycine max
  Clone ID: 700698028H1
agcgccttcttcactctctctctttcttccctttgcttgctactcttgtcgagtgcatgctttgctattacctccagcaagttcaacgagtgccaactcaacaacctcaacgcgttggaacccgaccaccgcgttgagtccgaaggtggtcttattgaaacatggaactctcaacaccctgagctgcaatgcgccgctgtcactgtttccaaacgcaccctcaaccgcaacggctccacttgccatcttactcaccttatccccaaatgatc

SEQ ID NO: 66266 - DNA, 273 bp, Glycine max
  Clone ID: 700698029H1
acgtcatcttggaaccaggcccagcatgtgttggtcatcgcactcactgttagagttagagttagagttagagttggatggagtcgttaacgttgtgaagcataagcaacaacacaacatgagattgaagaggaacaagttggaggacattccggaggaaacagaacttcctcctattggtattgatactaatccagcagagcttgaagaaccggccttcacttggaaacagatttggaaatactgaggcgggccatggatatgggactttgg

SEQ ID NO: 66267 - DNA, 275 bp, Glycine max
  Clone ID: 700698030H1
atactatgatgagagtgcggtttcctttgttggtgttgctgggaactgttttcctggcatcagtttgtgtctcattaaaggtgagagaggatgagaataaccctttctacttgagaagctctaacagcttccaaactctctttgagaaccaaaacggtcgcattcgtctcctccagagattcaacaaacgctccccacaacttgagaaccttcgagactaccggattgtccagtttcagtcaaaacccaacacaatccttctcccccaccatgct

SEQ ID NO: 66268 - DNA, 272 bp, Glycine max
  Clone ID: 700698031H1
ggattctcttctttattccttttgtaatttcattcattcttaatctttgtgaaaaataatgttcatcgagaattttaaggttgagtgtcctaatgtgaagtacaccgagactgagattcagtccgtgtacaactacgaaaccaccgaacttgttcacgagaacaggaatggcacctatcagtggattgtcaaacccaaatctgtcaaatacgaatttaaaaccaacatccatgttcctaaattaggggtaatgcttgtgggttggggtggaa

SEQ ID NO: 66269 - DNA, 272 bp, Glycine max
  Clone ID: 700698032H1
cgggagacatagaaatcttcaaggtctggcatctgctattcttaggctttgggagaaaagtttagttgcaaagattggtgtccagcgtggtattgtgaataccaacaatgaactgatggctcaggaactgaaggcattaacaggaggtaccttactgctaaggaataaatattacattgtaatatatcgtgggaaggacttttttcccaaccagggggctgtaatactgctaaaaacaggcattgacaaaacaggtgcaggatgttgaggag

SEQ ID NO: 66270 - DNA, 270 bp, Glycine max
  unsure (1)..(270): unsure at all n locations
  Clone ID: 700698034H1
cccgncctcgcccggcgaatgggctgaccctgtttctaaacccggcggcgacgatgcatggcccgaacgaggtgtttcggcgtggcgttcaacggcggcttcaatcagcccatcatgtgcggcggggagcgacgcagatgacgctgcaggagcggggcaaagccgatccgcccatctacagcatcaggatacgcgtagcgcagcagccgtaagcttgatcttctccttcagcaaggggccgagtgggacgggccgtacccgctcaagttc

SEQ ID NO: 66271 - DNA, 252 bp, Glycine max
  Clone ID: 700698035H1
aagtttcgcctttgttgattttagtgatcctcgagatgctgatgatgcaagatataacttggatggtcgggatgttgatggaagtcgtattattgtggaatttgcaaaaggggctcctcgtgggtcccgggaatatttggggcgaggtcctcctcctggctctggacgctgctttaattgtggccttgttggtcattgggcacgggattgcaaagctggggattggaagaataagtgttaccgctgtgggaa

SEQ ID NO: 66272 - DNA, 272 bp, Glycine max
  Clone ID: 700698036H1
ctatataagatataggatatgaacatgtgtccgaggtgcaagttctgaagattagagtctatctgcagggatggctgctagtatagatgacatccaatcgaaggttgcacaagatatggttgaggaatggttcgattgtgttgatgaggaggattcctttgaggaagtttctttaagtgcagcacttaatggtgttgagggtttggactatatggaaagaattcctcttgccacatctgagggattcctcatgtgctttcacgcaaaaatgg

SEQ ID NO: 66273 - DNA, 172 bp, Glycine max
  Clone ID: 700698037H1
gagaacaccattgaattttgattctagcaagcagagcttttgtcagttttctattgaccttctcggtggaggaatcttagtggacaaaactggagattggatcacacttatacaaaattctccaattagtaacttgttgagagttgctgcttggaagaaaggctgtttaatg

SEQ ID NO: 66274 - DNA, 278 bp, Glycine max
  Clone ID: 700698040H1
attagatctgctgttttaaatcctgagttgcctcagaattctcgcctccatattcttgaggaattcaatgcgggcctgtttgattatctaattgcaacagatcttagccagatcaaaggaaaaggatgaagtgcctaaggaaagtaatgttggatcatggaagtctaggcaacatgctaagataaaattagattctgaatttggagttgtaaggggaattgactttaaaaatgtatacacggttataaactttgaaatgcctgaacatgtagcgggat

SEQ ID NO: 66275 - DNA, 97 bp, Glycine max
  Clone ID: 700698041H1
tcttcagagcatttggaaatttggctgatgacaccatcgattttgaggcttttccccacaagctggagaacaaaaaagagattcaggaaaaagttgt

SEQ ID NO: 66276 - DNA, 56 bp, Glycine max
  Clone ID: 700698043H1
ctcgagcggactagttctagatcgcgatctagaactagttctagatcgcgagcgga

SEQ ID NO: 66277 - DNA, 275 bp, Glycine max
  Clone ID: 700698044H1
cttaaacactcatcagtcatcaccatggccaagctagtttactccctttgttctctgcttttcagtggctgctcgttcgctttcagttccagagagcagcctcagcaaaacgagtgccagatccaaaaactcaatgccctcaaaccggataaccgtatagagtcagaaggagggctcattgagacatggaaccctaacaacaagccattccagtgtgccggtgttgccctctctcgctgcaccctcaaccgcaacgcccttcgtagaccttccta

SEQ ID NO: 66278 - DNA, 270 bp, Glycine max
  Clone ID: 700698045H1
agggttttagcgcagttcttctagatttaaggaagatgggtaaggaaaaggttcacatcagtattgtggttattggccatgttgactctgggaagtccactaccactggccacctgatctacaagcttggaggcattgacaagcgtgttattgagagatttgagaaggaagctgctgagatgaacaagaggtctttcaagtatgcctgggtgcttgataagcttaaggctgagcgtgaaagaggaatcacaattgatattgccttgtgga

SEQ ID NO: 66279 - DNA, 222 bp, Glycine max
  Clone ID: 700698046H1
ctagaatcttcacttcagaaaccgaagccatggcggatcggttcttccccaacccgatgcccgagttcgtacccgaaacgacgccgtccactcctcaggaagaagcagaagccctcacagtgggcgactcgctcccgaagctcctcgccatgccccacgcgccactcttggagcgtctcaaacgcgccgctctcgagttccaagaaaccatagtgatagaaa

SEQ ID NO: 66280 - DNA, 273 bp, Glycine max
  Clone ID: 700698047H1
tgtgcaaggatcctcaatgtttgttgtgtgaacagagatacgcgtttgactttggcataaagttaactgttgtcttcttcttcccttcccctctctctctctctatctccctgatgggtatcttcaggtttcagtttgatgatggaataaggaaagatcattgtcgtattaccgatgactggatgacttttttgcagttttgaaaacttgttcgccttgtggcttgtgttgctgcctaagccaactactgccggcagcatggcaattgcagcg

SEQ ID NO: 66281 - DNA, 274 bp, Glycine max
  Clone ID: 700698048H1
gagaaaggggtggtgtagagtctgacatagatgattatgatcactcgagtggtaagggcgtagacactacagctgctcaagccagaagaggacaggatatccaaggaattcctttggatagccttaatctcactagagatagatatcggcaaactaggcttgcgcaatacaagaattatgaaaatatccctggttccagggacaagtcggggaaggattgtcagaataccaaaaaaggatactccttttatgacttcagaaaaaattcaagatc

SEQ ID NO: 66282 - DNA, 175 bp, Glycine max
  Clone ID: 700698049H1
ctagaacaaaggacaacaatcttctcgggaagttcgagcttacagggatccctccagcaccaagaggagtgcctcagatcaatgtctgcttcgacatcgacgctaacgggattctgaatgtctctgcagaggataagactgctggtgtgaagaacaagatcacgatcacaaacga

SEQ ID NO: 66283 - DNA, 250 bp, Glycine max
  Clone ID: 700698050H1
gttcgagtgaggaatttccagtcgggtccccaactctgtcactgtctggtaaccctaatcgtggaggcaagaaaagtttggtttcctacggggatggctcacctgattcagctgggaagtagggttccaccggggcattgaaatgtatcttacaccgttagcccattggctgttgatcaagtccatcaatactttttgttatatttctactgtaagaagcggtttggtccttgagctgcccagctgttac

SEQ ID NO: 66284 - DNA, 272 bp, Glycine max
  Clone ID: 700698051H1
ctttgaacactcatcaccatggccaagcttgttcttaccctatgtttccttcttttcagtggctgcttcgctctgagagagcaggcacagcaaaatgagtgccagatccaaaagctgaatgccctcaaaccggataaccgtatagagtcggaaggtgggttcattgagacctggaaccctaacaacaagccattccagtgtgccggtgttgccctctctcgctgcacccttaaccgcaatgcccttcgtagaccttcctacaccaacggtcc

SEQ ID NO: 66285 - DNA, 273 bp, Glycine max
  Clone ID: 700698052H1
gatcttctctttatcctctcatctcctctcgccgtctcctgcacgaataccataacctcacgcaaccaaacacgcccttagctccaacccattcccctcgtcatcggaaaattcaaccgccacgccgtgaaatatggaggctccggcggtggttggcgatcttgttgggatccaattgacgttgtcgccccgctacttgtttgggaactctaagcgtatctgttttctgactttcttcgtcttcaaattttaaaaacgatggcgagaatcgag

SEQ ID NO: 66286 - DNA, 189 bp, Glycine max
  Clone ID: 700698053H1
ctttgaagtagccattgctttgcttcaaagttgaacacccagaatgtcgttgtatctctctccctaaccttaaccttgctggtcagtagcaccagtaccaaggttaaggttagggagagagatacaaccacattctgggtactggtgctactgaccagcaaggcaaactcagcggaaactgtttctttc

SEQ ID NO: 66287 - DNA, 274 bp, Glycine max
  Clone ID: 700698054H1
gaataagtacagtagaattcgacagtgtccggcgaggaggcggaggcgaatatgaggaagaagttcggcacccgattccccgcggctcgtatcaatcagataatgcaagcagatgaggatgttggacagattgcactagcagttcctgttttagtttcgaggtctcttgaattgtttttacaagatctaattgaccgtacttatgaaattactcttcaaagtggagcaaagacactgaattccttccacctgaagcactgtgtgaagaggcaca

SEQ ID NO: 66288 - DNA, 270 bp, Glycine max
  Clone ID: 700698056H1
catcgatctacacacatacatagtttcttctactacacgacgccaaacatggggaagcctgcgaagatcggagagtcgggtggatacgccggcgatcgtcgggatctgagggctactccggaccggctgatcgaggtgaaggtcacggcggacaacagcagctgcatccgctccatctccttcatctacatcggagccgatggcaaaccgtacgaggaggggccatggggtttcggccatgctggcacggagtacaagattgatctgtgc

SEQ ID NO: 66289 - DNA, 272 bp, Glycine max
  Clone ID: 700698058H1
tttgttctgtatcaggcaatttctgttcggacaagaaagccgcagccgtgaattggattgaagggcgtggcaagtctgtggtgtgtgaggccataattaaggaggatgttgtgaagaaggtgttgaaaaccagtgtggaggccctggtcgaacttaatatgctcaaaaaccttacgggctcagccatggctggtgctcttggtggcgtcaattgtccatgctagcaatattgtgtctgctatctacattgccactggtcaggatcctgccca

SEQ ID NO: 66290 - DNA, 272 bp, Glycine max
  Clone ID: 700698059H1
gaatcttagtggacaaaactggagattggatcacacttatacaaaattctccaattagtaacttgttgagagttgctgcttggaagaaaggctgtttaatggtcaagattgtgatgtctgggaatgcagcagtcaaaaggagtgattgggcctccattggtacaagtgtttttaacaaacagcaacagtacagagcattttgatgcatgtaagtggacaaaatcagaaccacattcctgggaattgatcttcccaatagaggtatgtggtct

SEQ ID NO: 66291 - DNA, 285 bp, Glycine max
  Clone ID: 700698060H1
ccacacttttcatttcccccaaattccgttctctcagtcacaggtaatcacaatctcctcattttcctccaatttcatgcaattgcttttgtttctctccttcaattatttctcctaatttcattttattcgattcatataagaaagataattgtgaactaatccaggaccatgcaattcatttcaattggaatataatatagtatacacaaagagggtctgttgatttgttggttaaggccttagaggagagatagagatactactactactagttctgtctgt

SEQ ID NO: 66292 - DNA, 271 bp, Glycine max
  Clone ID: 700698062H1
cttggaactttgttactctcacacatgtctcgctccgtgcctttggtttcaatcatttttgtcttgcttctgcttctggtggccactgagatgatggggccaacaatggtggcagaagcaagaacttgtgagtctcagagccaccgtttcaaggggccatgtttgagtgacaccaactgtggctctgtttgccgaaccgaacgtttcactggaggacactgccgtggcttccgtcgcagatgcttctgcaccaaacattgttaattttaaa

SEQ ID NO: 66293 - DNA, 272 bp, Glycine max
  Clone ID: 700698063H1
gttagcaaaaatcaatagcttcgattattcatgatctggtatgaagtatgaactgtttgactaaaccatacttttgcagattactgatgaaggtggtggaataccaaggagtggtctctcaagaatttttacgtatctctatagtacagcagaaaaccctcctgatcttgatgtacataatgaaggagtaactatggctggatatggttatgggattcctattagtcgtctttatgctcgatatttcggcggggacttgcagatcatctcta

SEQ ID NO: 66294 - DNA, 144 bp, Glycine max
  Clone ID: 700698064H1
ctcgagcgctctgcataaccatgtcgcaatcactgaagctactcaaagaacacgcctccaaccccaaactctggtctggtcattggcctgaggagttgccggaatcgtggttctggtggagacacggcggagcacacggcgggg

SEQ ID NO: 66295 - DNA, 118 bp, Glycine max
  Clone ID: 700698065H1
attgaccttctcggtggaggaattttagtggacaaaactggagattggatcacacttatacaaaattctccaattagtaacttgttgagagttgctgcttggaagaaaggctgtttaa

SEQ ID NO: 66296 - DNA, 270 bp, Glycine max
  Clone ID: 700698066H1
gatcaagaaaaacccaaaaagattgatgccagattgagacaaagaatagatcctcaatacaatgaggttcaggctcagatggaaacaaatttgtttaaattgtctcttgatgatgttgaaactcctaaaggttccatgttggatcttaaaatttctcaatctaaaattgcacttcccaaaaacacagttggaggaaccattctgcgtagtgacctattggcacctttgttgacagagggcaattttagagcaagtgttgatttgcagcgc

SEQ ID NO: 66297 - DNA, 179 bp, Glycine max
  Clone ID: 700698067H1
caagcatccacacaaacactttcacgtcgcacgggcgctgcacacagtgagccgcagcgtcggcaccaatggcttactaccaggaggtggactactgctcggaagaagtgaagtcggtggccccggacggcttcggccggcacggaagcggcgtccagcaacacgtcgtcaaagagaag

SEQ ID NO: 66298 - DNA, 92 bp, Glycine max
  Clone ID: 700698068H1
gccaccgaaactcacactcgtgttggtggtgctgtttttcgcccccgttgacgcgcattttccggcaaccggagagcttccaacgtaccgcg

SEQ ID NO: 66299 - DNA, 269 bp, Glycine max
  Clone ID: 700698069H1
gttctgagtgggcaaatcaaacttcatggcatttgagtttccttattgacaatcccaaacagtctacagtttttgatattctcttgggaatttctcaagattttgagattgctggtaatactcttatgccagctttttctgttccacaggctactgccagatcttctgaaaatgcggaatcctctgcatgatctggaatttgtgtttccttttgcttgttcgttggtttaattcattaaaggaaattaggcttgaccctcttgttgagt

SEQ ID NO: 66300 - DNA, 261 bp, Glycine max
  Clone ID: 700698072H1
cacttattaacactttccttagttcaatatggggaagcccttcttcactctctctctttcttccctttgcttgctactcttgtcgagtgcatgctttgctattacctccagcaagttcacagagtgccaactcaacaacctcaacgcgttggaacccgatcaccgcgttgagtccgaagtggtcttattgaaacatggaactctcaacaccctgagctgcaatgcgccggtgtcactgtttccaaacgcagcctcaaccgc

SEQ ID NO: 66301 - DNA, 267 bp, Glycine max
  Clone ID: 700698073H1
gaataaccgaataaggtctaacagcctacaatagcttatgtggtcaacaactaaaaataagtcatcacaaaggggccttaatcaactccaatccatctgtcggtgccgtgagccactgtttcccactggaacgccgctggttcgagaaaacgcggccacgcatgcaaattgacttccccagtctaccaccatgtgcataccacatggaagccagtctcgtctcgcgcggcaaccccgatcgagattatggatgaaaacggatggata

SEQ ID NO: 66302 - DNA, 265 bp, Glycine max
  Clone ID: 700698075H1
gcgatactgataagagagataccaacaagaaaagaaaaaaagaagagttgagattccctttgaagaaaagatggcatcccataggcaaagctatgaagctggtcaaactaagggccgaactgaggaaaagacgaaccagacgatgggcaatattggagagaaggctcaagctgcaaaggagaagacccaggaaatggcccaagctgcaaaggagaagacccaacaaacagcccaagctgccaaggacaagacttgcgacattccc

SEQ ID NO: 66303 - DNA, 263 bp, Glycine max
  Clone ID: 700698076H1
gaagtttttaaactttgtgaggttcattatgaagactagggacaagcttagttgtcaagttggaatcaacccatattctatggactggactggtttggccaatagattactgagtaagggcaacgatattctgtgttgcgattatgctagttttgatggtttgattaccaagcaagttatgagcaagatggcagaaatgatcaacagtctttgtggtggtgatgaaaaactgatgcgtgaaaggacaccctgctgttggcttg

SEQ ID NO: 66304 - DNA, 184 bp, Glycine max
  Clone ID: 700698077H1
cactagtcacaatttgttggaggagaagagatggtttggccaattaggtccagaataagttctcttctctgttctaaggcacctttagttggttcatacatctatgactcatgtgggtgcttacgcttttctgctccaaccagctcctccataacaaggcattggccaaaaattatggattggg

SEQ ID NO: 66305 - DNA, 271 bp, Glycine max
  Clone ID: 700698078H1
tgtgagcaacactactcatccaaaacataccaagcacccttctgccactccacccaatgctccagagccaacactcaccaatgcctcagttgcccagcggcatcaaggccagggtgccacaaaaacacgtgtggcctcatgtccaccaaccccatcacccaacaaaccggtttgggtgaactaggccaagatgtgcttgcaatccacgccactcaaggctccacccaacaacttggtccattggtcacagtccctcagttcctcttttctt

SEQ ID NO: 66306 - DNA, 270 bp, Glycine max
  Clone ID: 700698079H1
tgtgattttgtcattggtgttaagttgacaaccataaacaatatgtgtgcatatgggctcaatcctggtatttcaggttctcgtcttttgggcaccattcctcagtccatttcacagcaaactgtttggaatcaaatggcaacagtgagaacaccattgaattttgattctagcaagcagagcttttgtcaattctctattgatcttcttggtggaggaattttagtggacaaaactggagattggatcacacttatacaaaattctcca

SEQ ID NO: 66307 - DNA, 268 bp, Glycine max
  Clone ID: 700698080H1
tctggtttgcaaaaagacagagggttaattgtggaatattttggaaggatgtcttacgttgctcataacgttaatcagccccaagagaaagatttgttggagggaaatttttcctttgatattaaatctcgctctagattggaaaaagtttcctctacaaaagcacaatttgttagtggaaaaaccttcaaatatgatataattggtgctggttcacattcttcagatgattttcctgaaaaggaagatcaagaaaaacccaaaaaga

SEQ ID NO: 66308 - DNA, 214 bp, Glycine max
  Clone ID: 700698081H1
gaatccggtcgaagctctgagatgtttgatctgcacaatgttgtcatatctatacctctgcctggaattcgggaagctccaagtgtcagacagatagatggagagtggaagttggactccagaaactctgtgttggaatggtccattctccttattgatcagtcggatcgcagtggttccatggacatttcctgttcccccagctgatccgtca

SEQ ID NO: 66309 - DNA, 249 bp, Glycine max
  Clone ID: 700698082H1
aaacagtaaagctaacttcaacacctttaattttctaaaagtaattcagcggctgaataccaagcggagaagatgagtcaggagcagccacggcgtcccaaaggccaaaaccccatcaaatacggcgacgtttttgtcgtctccggcgaccttgcacagaagcccgtcgcaccggaagatgctgccatgatgcaaagcgcggaaactcgagtgctcggacaaacccaacccggcggacagcttccgtca

SEQ ID NO: 66310 - DNA, 137 bp, Glycine max
  Clone ID: 700698084H1
cttgtctttgaacactcatcaccatggccaagcttgttctttccctttgtttccttcttttcagtggctgcttcgctctgagagagcaggcacagcaaaatgagtgccagatccaaaagctgaatgccctcaaaccg

SEQ ID NO: 66311 - DNA, 250 bp, Glycine max
  Clone ID: 700698085H1
aaaaagtttgctgcgccctgatttccatgtctcggcccaaaattgttgggtccgcaaaggtggtgctaatatgggagaggtaagtgctgaaatgctggtaaatttgggaatcctcttgggtattattggtcacctgaacggaggcagtttttgaatgaatcaatgagtttgtgggagataagttgctatgcacttcaacaggtctgaagttatagctgcatggggaactcttgaacacgtaacggtacac

SEQ ID NO: 66312 - DNA, 150 bp, Glycine max
  Clone ID: 700698087H1
ttggaatggcagaagcttaacctgtccatctcggaaatgtggtaccgagattggaattgccccgtccagagggagctcgccaattgagaagggaagctctctcccgtattggatggctgccaaaagctgatgtgcctaccatagcacaga

SEQ ID NO: 66313 - DNA, 270 bp, Glycine max
  unsure (1)..(270): unsure at all n locations
  Clone ID: 700698088H1
cctagtataccttgatagcttctagctgctcatacgcttaatttcccgatctcataaacaatacaaaaaaccaaaaacctggcttcagtttctgtctcatttggcattgcttactcggaaaaagagatccccaaacacaacaagtgtctccacagttgcaatgnngagagagactcgtacaggaaccaagcatgccacgctcgttgcaacctccttaaggtggagcaagaagaatgtgaagaaggtgaaattccacgaccacgaccacga

SEQ ID NO: 66314 - DNA, 242 bp, Glycine max
  Clone ID: 700698089H1
aatgaaccctgctcggatcgtggggatgtctctctctgtaaacgcagaaggcggtgttcctggcgccaagactgggcctggtgattttaggcttgatgttgcgtggatcaaagcgatgatagctttgtgaactccacaagtcatagttttatgtcacatcggccctttccttctttatcaccctgcctcagtggcgacgctgaactcatctagcgaccacgagcacaggtgtatacatagca

SEQ ID NO: 66315 - DNA, 266 bp, Glycine max
  Clone ID: 700698092H1
ctcgagcgttcacgagaacattgctcgcccttcacgcgctgacttctacaaccctaacgctggtcgcattagtaccctcaacagcctcaccctcccagccctccgccaattccaactcagtgcccaatatgttgtcctctacaagaatggaatttactctccacattggaatctgaatgcaaacagtgtgatctatgtgactcgaggacaaggaaaggttagagttgtgaactgccaagggaatgcagtgttcgacggtgagctta

SEQ ID NO: 66316 - DNA, 190 bp, Glycine max
  Clone ID: 700698093H1
gcctggtagatttgagagtttcttccaatctagcatggaagttcaacaatcctacttgcaaggattcagcaggaacatttaaaaggcttctaacattacaaaatccaagagattaaccaaggtcctgttaattaaagaggaagggcaccaccaagggaaccgaagctgccagagaacgtgattgtggaaa

SEQ ID NO: 66317 - DNA, 266 bp, Glycine max
  Clone ID: 700698094H1
ctaccggattgtccagtttcagtcaaaacccaacacaatccttctcccccaccatgctgacgccgatttcctcctctttgtccttagcgggagagccatacttaccttggtgaacaacgacgacagagactcctacaaccttcaccctggcgatgcccagagaatcccagctggaaccacttactatttggttaaccctcacgaccaccagaatctcaaaataatcaaacttgccatacccgtcaacaaacctggcagatatgatg

SEQ ID NO: 66318 - DNA, 264 bp, Glycine max
  Clone ID: 700698096H1
agagcaagtatgcttgctgcctcactacaacgagccatgggtgtccaaaacaagggagctcctcatagagagctccaacgtttgtctcttcgccatcttcttcgtggcaggaaaattctaattgtagacgacaatggtgtgaaccgtgcagtagcagctggtgcattgaaaaagtatggagcagatgtggtttgtgttagcagtggaaaagatgccatctcttccttgaagccaccccatcagtttgatgcctgtttcatggat

SEQ ID NO: 66319 - DNA, 121 bp, Glycine max
  unsure (1)..(121): unsure at all n locations
  Clone ID: 700836345H1
cgtcgcangcacgcgtacgtaagctcggaattaattccggaccggtacctgcaggcgtaccagctttccctgatagtgagtcgtcattagagcttggcgtaatcatggtcatagctgtttc

SEQ ID NO: 66320 - DNA, 170 bp, Glycine max
  unsure (1)..(170): unsure at all n locations
  Clone ID: 700836402H1
gtngctcgcgtacgtaagctcggaattccgagcttggcatcctctagagcggccgccgactagtgagctcgtcgacccgggaattaattccggaccggtacctgcaggcgtaccagctttccctatagtgagtcgtattagagcttggcgtaatcatggtcatagtgttt

SEQ ID NO: 66321 - DNA, 190 bp, Glycine max
  Clone ID: 700836475H1
agtcgcatgcacgcgtacgtaagctcggaattccgagcttggcatcctctagagcggccgccgactagtgagctcgtcgacccgggaattaattccggaccggtacctgcaggcgtaccagctttccctatagtgagtcgtattagagcttggcgtaatcatggcatagctgtttcctgtgtgaaattgt

SEQ ID NO: 66322 - DNA, 172 bp, Glycine max
  unsure (1)..(172): unsure at all n locations
  Clone ID: 700836591H1
gtcgcangcacgcgtacgtaagctcgggccgactagtgagctcgtcgacccgggaattaattccggaccggtacctgcaggcgtaccagctttccctatagtgagtcgtattagagcttggcgtaatcatggtcatagctgtttcctgtgtgaaattgttatccgctccaat

SEQ ID NO: 66323 - DNA, 195 bp, Glycine max
  Clone ID: 700836643H1
tcgcatgcacgcgtacgtaagctcggaattccgagcttgggatcctctagagcggccgccgactagtgagctcgtcgaaccgggaattaattccggaccggtacctgcaggcgtaccagctttccctatagtgagtcgtattagagcttggcgtaatcatggtcatagctgtttcctgtgtgaaattgttatccg

SEQ ID NO: 66324 - DNA, 169 bp, Glycine max
  unsure (1)..(169): unsure at all n locations
  Clone ID: 700837141H1
ctggtcatggnagaaanatccaaggnccanctgtaccaggcagnaaggtcagtaaagaatncccggtcaacgtgtatgccnatgcaaaaggnnttngcnntacnntgtagaanagcatgcaagcttgctgccnggtcngngcttttacaagcaanngggccncntgcac

SEQ ID NO: 66325 - DNA, 187 bp, Glycine max
  unsure (1)..(187): unsure at all n locations
  Clone ID: 700837392H1
gtcgcangcacgcgtacgtaagctcgggccgactagtganctcgtcgacccgggaattaattccggaccggtacctgcaggcgtaccagctttccctatagtgagtcgtattagagcttggcgtaatcatggtcatagctgtttcctgtgtgaaattgttatccgctcacaattccacacaacatac

SEQ ID NO: 66326 - DNA, 129 bp, Glycine max
  unsure (1)..(129): unsure at all n locations
  Clone ID: 700837806H1
ngnnncangcacgcgtacgtaagctnggaattcggctcgagnannactcaaaaagatagactgnntttccggggattcggtnntagcagaaacntgcactntatgtncctgtnctnatnanaagaanac

SEQ ID NO: 66327 - DNA, 173 bp, Glycine max
  unsure (1)..(173): unsure at all n locations
  Clone ID: 700837822H1
nnncncgcacgcgtacgtaagctnntgaattccggaccggnacntgcaggcgtaccagctttccctatagtgagtcgnacnagagcttggcgtaatcatggtcatagctgttctcctgtgtgaaatngttatccgctcannattccacacancatacgagnnatgcnagnagn

SEQ ID NO: 66328 - DNA, 171 bp, Glycine max
  unsure (1)..(171): unsure at all n locations
  Clone ID: 700837823H1
tncncgcacgcgtacgtaagcnngggccgactagtgagnncntcgacccgggaattaattccggaccggtacctgcangcgtaccagctttcccnanagtgagtcgtattngagcntggcgtnntcatggtcatagttgtttcctgtgtnaaattgttatntgctcacaat

SEQ ID NO: 66329 - DNA, 194 bp, Glycine max
  unsure (1)..(194): unsure at all n locations
  Clone ID: 700837943H1
cgaaaacgtcgcangcacgnnttacgtaagctcggaattanttccggaccggtacctgtnggcgtaccagctttccctatagtgagtcgtattanngcttggcgtaatcattgtcatagctgtttcctgtgtgaaattgtttgccgctcacaattccanncaacatacgatntactananntcgncncaatnga

SEQ ID NO: 66330 - DNA, 221 bp, Glycine max
  unsure (1)..(221): unsure at all n locations
  Clone ID: 700838402H1
cntcgnangnnnncntcngtatncgcggcntncggctcgagngttctacantcangggcngccgccgactnntgagctcntcgacccgggaattaattccggaccggtncctgcaggngtancagctttccctatagtgantcgtattagagcttggcgtaatcanngtcatagannnttcctgggtgaaattgttatccgcncacaattccacacaacan

SEQ ID NO: 66331 - DNA, 179 bp, Glycine max
  unsure (1)..(179): unsure at all n locations
  Clone ID: 700838623H1
tcgcangcacgcgtacgtaagctcggaattccgagcttggatcctctagagcggccgccgactagtgagctcgtcgacccgggaattaattccggaccggtacctgcaggcgtaccagctttccctatagtgagtcgtattagagcttggcgtaatcatggtcatagctgtttcctgtg

SEQ ID NO: 66332 - DNA, 133 bp, Glycine max
  unsure (1)..(133): unsure at all n locations
  Clone ID: 700838815H1
gncgtcgcangcacgcgtacgtaagctcgggccgactagtgagnnacgtacgacccgggaattaattaccggaccggtaacctgccaggcgtaaccagctttaccctaancngtgagtacgnattagagacnt

SEQ ID NO: 66333 - DNA, 188 bp, Glycine max
  unsure (1)..(188): unsure at all n locations
  Clone ID: 700839047H1
acgtnnaanncgncgcatgcacgcgtacgtaagctcggaattccgagcttggatcctctagagcggccgccgactagtgagctcgtcgacccgggaattaattccggaccggtacctgcaggcgtaccagctttccctatagtgagtcgtattagagcttggcgtaatcatggtcatagctgtttcct

SEQ ID NO: 66334 - DNA, 148 bp, Glycine max
  unsure (1)..(148): unsure at all n locations
  Clone ID: 700839283H1
tagccaaacgcgtacgtaagctcggaattaattccggaccggtacctgcaggcgtaccagctttccctatagtgagtcgtattagagcttggcgtaatccatggtcanagctgtttcctgtgtgaaattgttatccgctcacaattcc

SEQ ID NO: 66335 - DNA, 215 bp, Glycine max
  unsure (1)..(215): unsure at all n locations
  Clone ID: 700839333H1
atacgcangcacgcgtacgtaagctcgggaattccgagcttgggatcctctagagcggccgccgactagtgagctcgtcgacccgggaattaattccggaccggtacctgcaggcgtaccagctttccctatagtgagtcgtattagagcttggcgtaatcatggtcatagctgnttccngtgtgaaatngttatccgctcacaattccacacaa

SEQ ID NO: 66336 - DNA, 150 bp, Glycine max
  unsure (1)..(150): unsure at all n locations
  Clone ID: 700839480H1
ncgtcgcatgcacgcgtacgtaagctcggaattccgagcttggntcctctagagcggccgccgactagtgagctcgtcgactgggaattaattccggaccggtacctgcaggcgtaccanctttccctatagtgagtcgtattagagctt

SEQ ID NO: 66337 - DNA, 126 bp, Glycine max
  unsure (1)..(126): unsure at all n locations
  Clone ID: 700839535H1
gtcacangcacgcgtacgtnagctcggaattcggctcgaggttctagatcgcgggcggccgccgaactagtgagctcgttcgacccggganttaattccggacccggtanctgcaggcgtaccagn

SEQ ID NO: 66338 - DNA, 84 bp, Glycine max
  unsure (1)..(84): unsure at all n locations
  Clone ID: 700839710H1
gtcgcacgnacgcgtacgtnagctcggnattcggctcgagcnagtggtttactgcactgtaatttaaaanaaaaaaaaaaaaan

SEQ ID NO: 66339 - DNA, 207 bp, Glycine max
  unsure (1)..(207): unsure at all n locations
  Clone ID: 700839838H1
acntcgcangcacgcgtncgtnagctcggaattccgagcttggatcctctagagcggccgccgactagtgagctcgtcganccgggaattaattccggaccggtacctgcaggcgtaccagctttccctatagtgagtcgnattagagcttggcgtaatcatggtcatagctgtttcctgtgtgaaattgttatccgctcacaattc

SEQ ID NO: 66340 - DNA, 244 bp, Glycine max
  Clone ID: 700839981H1
cctcgtcatgaagatgctccagattcagcccgagaaagaaatcgtcattgagttcataaaaaacgaggattacaagtacgttaggattctcggtgctttttacttgcgtatcactggttctgacattgacgtctaccgctacctcgaacctttatacaatgactatcgcaaacttagacgaaagctcgctgatggacagtttacattgacgcacgtggatgaggttatagatgaacttctcaca

SEQ ID NO: 66341 - DNA, 240 bp, Glycine max
  Clone ID: 700840047H1
gtgatgataacttaattagtgttcatgaatatgtcaagccttactttagtggttctaaattgaaaagctttctagctggtcataatatcaccattactgatggtattgacaaaactagtgcaactttgcaatttagaaagttagcagattgtgattttctcaagagaaactttaagcagatgtctaatgttttgtgggtggctcctgaggataaggcgagtttatggtcacaacttcatt

SEQ ID NO: 66342 - DNA, 234 bp, Glycine max
  Clone ID: 700840062H1
tggaggcagagaaagcaagatcaatggagaaaactagagatgaagctaaaggaagagaacaagctgaaaccaaaggtcaaaccaagaagggtggtggtgaggaacagggaagaagaagagaagaaataggagaagaaaataaacaatccagcctcgaagagatttctaaatgcagagctgaagctgaagagaaagttaaggagagaaaggagagatcaaaacaagcagcaagta

SEQ ID NO: 66343 - DNA, 250 bp, Glycine max
  Clone ID: 700840085H1
ggtttggtcccatatgatggccaggttcatctccaacaagacgaagacccacttactccgtcactccgaatcggcgaagggggtgatagtgtgccatcgccaccaatcctcggaagcaacgaaggcgaagtgggtggagatcgatggagtgaagctgttggaggagcacgtccagcgtgttatggtgaagaaggccacacccgattggcttcccttcctccccggttcctccttctgggtcccacctcct

SEQ ID NO: 66344 - DNA, 148 bp, Glycine max
  unsure (1)..(148): unsure at all n locations
  Clone ID: 700840110H1
gtacgtnagctcggaattaattccggaccggtacctgcaggcgtancagcctttccctatagtgagtcgtattagagcttggcgtaatcatggtcatagctgtttcctgtgtgaaattgttatccgctcacaattccacacaacatag

SEQ ID NO: 66345 - DNA, 60 bp, Glycine max
  unsure (1)..(60): unsure at all n locations
  Clone ID: 700840125H1
ncacgcgtacgtaagctcggaattcggctcgagnaaaaaaaaaaaaaaaaaaaaaaaaaa

SEQ ID NO: 66346 - DNA, 195 bp, Glycine max
  unsure (1)..(195): unsure at all n locations
  Clone ID: 700840210H1
gnacgtacgctcggaattccgagcttngatcctctagagcggccgccgactagtgagctcgtcgacccgggaattaattccggaccggtacctgcaggcgtaccagctttccctatagtgagtcgtattagagcttggcgtaatcatggtctnagctgtttcctgtgtgaaattgttatccgctcacaattccac

SEQ ID NO: 66347 - DNA, 81 bp, Glycine max
  unsure (1)..(81): unsure at all n locations
  Clone ID: 700840535H1
ncnngcacacgcgtacgtaagctcggaattcggctcgaggttctagatcgcgagcntccgccctttttttttttntntana

SEQ ID NO: 66348 - DNA, 65 bp, Glycine max
  unsure (1)..(65): unsure at all n locations
  Clone ID: 700840546H1
gtcgcacgcacgcgtacgtaagctcggaattcggctcgagnnaaanaaaaanaaanaaananana

SEQ ID NO: 66349 - DNA, 136 bp, Glycine max
  unsure (1)..(136): unsure at all n locations
  Clone ID: 700840577H1
ancgtcncanncacgcgtacntaagctcnggccgnctagtgacncccgtcgacccgannnttaattccggannggtagcntgcaggcgtaccagctttgcccnatagtngagncnnatnagaggcttngtcgtaan

SEQ ID NO: 66350 - DNA, 206 bp, Glycine max
  unsure (1)..(206): unsure at all n locations
  Clone ID: 700840732H1
atgcacgcgtacgtaagctcggaattccgagcttggatcctctagagcggccgccgactagtgagctcgtcganccgggaattaattccggaccggtacctgcaggcgtaccagctttccctatagtgagtcgtattagagcttggcgtaatcatggtcatagctgtttcctgtgtgaaattgttatccgctcacaattccacaca

SEQ ID NO: 66351 - DNA, 58 bp, Glycine max
  unsure (1)..(58): unsure at all n locations
  Clone ID: 700840769H1
gtcgcangcacgcgtacgtaagctcggaattcggctcgagnnaaaaaaaaaaaaaaan

SEQ ID NO: 66352 - DNA, 73 bp, Glycine max
  unsure (1)..(73): unsure at all n locations
  Clone ID: 700840785H1
gtcgcangcncgcgtacgttagctcggnattcggctcgagntanannaaannaaaaaaaaaaaaaaaaaaaan

SEQ ID NO: 66353 - DNA, 181 bp, Glycine max
  unsure (1)..(181): unsure at all n locations
  Clone ID: 700840903H1
cgctgcncgcgtacgtaagctcggaattccgagcttggcatcctctagagcggccgccgactagtgagctcgtcgaancgggaattaattccggaccggtacctgcaggcgtaccagctttccctatagtgagtcgtattagagcttggcgtaatcatggtcatagctgtttcctgtgtga

SEQ ID NO: 66354 - DNA, 128 bp, Glycine max
  unsure (1)..(128): unsure at all n locations
  Clone ID: 700841067H1
agttgngcnganggngnacgnnagctcnnaattgcggctcgaggnggntcnccgnanacncttctcagcnggnattcccaacattgatcgctganctgnnagangntntnaggtncnttacngttttg

SEQ ID NO: 66355 - DNA, 63 bp, Glycine max
  unsure (1)..(63): unsure at all n locations
  Clone ID: 700841212H1
tcanangcacgcgtacgtaagctcggaattcggctcgagaaaaaaaaaaaaaaaaaaaanncn

SEQ ID NO: 66356 - DNA, 60 bp, Glycine max
  unsure (1)..(60): unsure at all n locations
  Clone ID: 700841247H1
ctngcacgcgtacgtaagctcggaattcggctcgagtaaaaaaattaaaaaaaaaaaaan

SEQ ID NO: 66357 - DNA, 60 bp, Glycine max
  unsure (1)..(60): unsure at all n locations
  Clone ID: 700841475H1
gtcgcangcacgcgtacgtaagctcggaattcggctcgagaaaaaaaaaaaaaaaaaaat

SEQ ID NO: 66358 - DNA, 215 bp, Glycine max
  unsure (1)..(215): unsure at all n locations
  Clone ID: 700841478H1
gtcgcangcacgcgtacgtaagctcggaattccgagcttggatcctctagagcggccgccgactagtgagctcgtcgacncgggaattaattccggaccggtacctgcaggcgtaccagctttccctatagtgagtcgtattagagcttggcgtaatcatggtcatagctgtttcctgtgtgaaattgttatccgctcacaattccacacaacat

SEQ ID NO: 66359 - DNA, 203 bp, Glycine max
  unsure (1)..(203): unsure at all n locations
  Clone ID: 700841562H1
gtcgcatgcacgcgtacgtnagctcgganttccgagcttggntcctctagagcggccgccgactagtgagctcgtcgagccggganttnnttccggaccggtacctgcaggcgtaccagctttccctatagtgagtcgtattagagcttggcgtaatcntggtcatagctgtttcctgtgtgaaattgttatccgctcacaat

SEQ ID NO: 66360 - DNA, 74 bp, Glycine max
  unsure (1)..(74): unsure at all n locations
  Clone ID: 700841569H1
aagtcgcangcacgcgtacgtaagctcggaattcggctcgagatcgcgagcggccgccctttttttttttttnn

SEQ ID NO: 66361 - DNA, 156 bp, Glycine max
  unsure (1)..(156): unsure at all n locations
  Clone ID: 700841871H1
gtcgcangcacgcgtacgtaagctcggaattccggaccggtacctgcaggcgtaccagctttccctatagtgagtcgtattagagcttggcgtaatcatggtcatagctgtttcctgtgtgaaattgttatccgctcacaattccacacaacatag

SEQ ID NO: 66362 - DNA, 61 bp, Glycine max
  unsure (1)..(61): unsure at all n locations
  Clone ID: 700841896H1
gtcgcangcacgcgtacgtaagctcggaattcggctcgagnaaaaaaaaaaaaaaaaaaat

SEQ ID NO: 66363 - DNA, 183 bp, Glycine max
  unsure (1)..(183): unsure at all n locations
  Clone ID: 700841951H1
nnntcgcangcacgcgtacgtaagctcgggccgactagtgagnncgncgacccgggaattaattccggaccggtaccngcaggcgtaccagctttccctanagtgagtcgnattagagcntggcgtaatcatggtcatagctgtttccngtgngaaanngttanccgctcacaatnccacaca

SEQ ID NO: 66364 - DNA, 67 bp, Glycine max
  unsure (1)..(67): unsure at all n locations
  Clone ID: 700841980H1
ancacacnncnccnncacncnnacataanctcncaattcnactcnannaaaaaaaaaaaaaaaaaan

SEQ ID NO: 66365 - DNA, 132 bp, Glycine max
  unsure (1)..(132): unsure at all n locations
  Clone ID: 700842004H1
gcgtacgtnagctcgganttcggctcgaggatttgttgtgcngtcttacaagtnccgnacttnctcctgttttgtnntnntttgttnctnnnnntcnncncagcataccaggnctncngcgcnttttntntn

SEQ ID NO: 66366 - DNA, 136 bp, Glycine max
  unsure (1)..(136): unsure at all n locations
  Clone ID: 700842006H1
cacncanacgcgtacgtaagctcggaattcngctcgagaaatancgtntcgttaacttantcagtccnncnangacggngtgncgtgngcaaaccntnacatngatccnatcttatatnggaaactcctatcncct

SEQ ID NO: 66367 - DNA, 45 bp, Glycine max
  unsure (1)..(45): unsure at all n locations
  Clone ID: 700842064H1
cctgngcgtacgtngctcggnnttcggctcgagnanaaaaaaaaa

SEQ ID NO: 66368 - DNA, 189 bp, Glycine max
  unsure (1)..(189): unsure at all n locations
  Clone ID: 700842192H1
gtcgcangcacgcgtacgtaagctcgggccgactagtganctcgtcgacccgggaattaattccggaccggtacctgcaggcgtaccagctttccctatagtgagtcgtattagagcttggcgtaatcatggtcatagctgtttcctgtgtgaaattgttatccgctcacaattccacacaacatacgt

SEQ ID NO: 66369 - DNA, 190 bp, Glycine max
  unsure (1)..(190): unsure at all n locations
  Clone ID: 700842193H1
gtcgcangcacgcgtacgtaagctcgggccgactagtganctcgtcgacccgggaattaattccggaccggtacctgcaggcgtaccagctttccctatagtgagtcgtattagagcttggcgtaatcatggtcatagctgtttcctgtgtgaaattgttatccgctcacaattccacacaacatacagg

SEQ ID NO: 66370 - DNA, 176 bp, Glycine max
  unsure (1)..(176): unsure at all n locations
  Clone ID: 700842255H1
gtcgcangcacgcgtacgtaagctcgggccgactagtgaccncgtcgacccgggaattaattccggaccggtacctgcaggcgtaccagctttccctatagtgagtcgtattagagcttggcgtaatcatggtcatagctgtttcctgtgtgaaatngttatccgctcacaattct

SEQ ID NO: 66371 - DNA, 60 bp, Glycine max
  unsure (1)..(60): unsure at all n locations
  Clone ID: 700842286H1
gtcgcangcacgcgtacgtaagctcggaattcggctcgagncnaaaaaaaaaaaaaaaaa

SEQ ID NO: 66372 - DNA, 76 bp, Glycine max
  Clone ID: 700842310H1
gtcgcatgcacgcgtacgtaagctcggaattcggctcgaggttctagatcgcgagcggccgccctttttttttttt

SEQ ID NO: 66373 - DNA, 80 bp, Glycine max
  unsure (1)..(80): unsure at all n locations
  Clone ID: 700842436H1
gtcgcangcacgcgtacgtnagctcggaattcggctcgagctagttctagatcgcgagcgccgccctttttttttttttc

SEQ ID NO: 66374 - DNA, 57 bp, Glycine max
  unsure (1)..(57): unsure at all n locations
  Clone ID: 700842516H1
gcatgcacgcgtacgtaaagctcggaattcggctcgagcttttttttttttttnnan

SEQ ID NO: 66375 - DNA, 207 bp, Glycine max
  unsure (1)..(207): unsure at all n locations
  Clone ID: 700842522H1
cgcatgcacgcgtacgtaagctcggaattccgagcttgnatcctctagagcggccgccgactagtgagctcgtcgaccccgggaattaattccggaccggtacctgcaggcgtaccagctttccctatagtgagtcgtattagagcttggcgtaatcatggtcatagctgtttcctgtgtgaaattgttatccgctcacaattccac

SEQ ID NO: 66376 - DNA, 231 bp, Glycine max
  unsure (1)..(231): unsure at all n locations
  Clone ID: 700842595H1
gtcgcatgcacgcgtacgtaagctcggaattcggctcgaggttttctagatcgcgggcggccgccgactagtgagctcgtcgacccgggaattaattccggaccggtacctgcaggcgtaccagctttccctatagtgagtcgtattagagcttggcgtaattcatggtcatagctgtttcctgtgtgaaattgttatccgctcacaattnccacacaacatacgcgnnnn

SEQ ID NO: 66377 - DNA, 155 bp, Glycine max
  Clone ID: 700843185H1
gtcgcatgcacgcgtacgtaagctcggaattccggaccggtacctggcaggcgtaccagctttccctatagtgagtcgtattagagcttggcgtaatcatggtcatagctgtttcctgtgtgaaattgttatccgctcacaattccacacaacat

SEQ ID NO: 66378 - DNA, 346 bp, Glycine max
  unsure (1)..(346): unsure at all n locations
  Clone ID: 700862804H1
gnnaaaagtcgacgcacgcgtacgtnagcncnnccaangattgcgagtgagatanttatgccagccagccanagcgcagacgcgccganacagaacttaatgggcccgctaacagcgcgantngntggtgacccaatgacgaccngatnctccacgcccagncgcgtaccgnctnccatnggagaaaannatacngttgatgngtgnctggtcagagacatcaagaaatancgccggaanatnantgcaggcancntccncacaanatnacgangcnncncnagggggctcncccgtgaggacacnaaggntnnggcgnggagtatnacacaggggggggttnngc

SEQ ID NO: 66379 - DNA, 198 bp, Glycine max
  unsure (1)..(198): unsure at all n locations
  Clone ID: 700862880H1
gtcgcatgcacgcgtacgtaagctcggaattccggagcttgggatcctctagancggncgccgactagtgancttcgtcgacncgggaattaattccggaaccggtacctgcagggcgtaccanctttccctatagtgagtcgtantagngcttggcgtaatcatggtcataagctgtttcctgggtaaaattgttan

SEQ ID NO: 66380 - DNA, 176 bp, Glycine max
  unsure (1)..(176): unsure at all n locations
  Clone ID: 700764142H1
nangcacgcgtacgtaagctcgggccgactagtganntcgtcgacccgggaattaattccggaccggtacctgcaggcgtaccagctttccctatagtgagtcgtattagagcttggcgtaatcatggtcatagctgtttcctgtgtgaaattgttatccgtcacaattccacaca

SEQ ID NO: 66381 - DNA, 210 bp, Glycine max
  unsure (1)..(210): unsure at all n locations
  Clone ID: 700764184H1
cangcacgcgtacgtaagctcggaattcggctcgatgttctagatcgcgagcggccgccgactagtgagctcgtcgacccgggaattaattccggaccggtacctgcaggcgtaccagctttccctatagtgagtcgtatagagttggcgtaatcatggtcatagnntntcccgtntgaattgtatcngcncacnattccacacacctgg

SEQ ID NO: 66382 - DNA, 239 bp, Glycine max
  Clone ID: 700839038H1
aaggtcaaggacctttcccaggccgacttcggccgcctcgagatcgagctggccgaggttgagatgcccggcctcatggcctgtcggaccgagttcggcccctcccagcccttcaagggggcccgcatcaccggctccctccacatgaccatccagaccgccgttctcattgagaccctcaccgcccttggcgccgaggtccgctggtgctcctgcaacatcttctccacccaggacca

SEQ ID NO: 66383 - DNA, 253 bp, Glycine max
  Clone ID: 700842351H1
gctgctctaagagaaggtttacctctgaggaagtctgaggaggctttctatctaaactgggctgttcactcatttaggattaccaactgtggtgtggaggacactactcagattcacactcacatgtgctactccaacttcaatgacatcattcactcaatcatagacatggatgctgatgtgatcaccattgagaactctagatcagacgagaagttactttcagtcttccgcgagggagtgaaatatggtg

SEQ ID NO: 66384 - DNA, 246 bp, Glycine max
  Clone ID: 700836453H1
gcaagatcattatcgatacttatggaggatggggtgctcatggtggtggtgctttctccgggaaggaccctaccaaggttgataggagtggtgcttacattgtgagacaggctgctaagagcatgtggcaagtggacttgccagaaggtgcattgtgcaagtgtcttatgccattggtgtgcctgagcctttgtctgtgtttgttgacacctatggcactgggaagatccatgataaggagattct

SEQ ID NO: 66385 - DNA, 261 bp, Glycine max
  Clone ID: 700838630H1
gtctgcatggatgactgatgaagaatttgcaagagaaatgcttgctggtgtaaatccaaacttgattcgttgtcttaaggatttccctccacgaagcaagctagatagccaagtctatggtgatcatactagtcaaataaccaaagaacacctagagcccaacttagaagggctcactgtagatgaggcaattcaaaacaagagattgttcctactagatcatcatgacccaatcatgccatatttgaggcgaataaatgc

SEQ ID NO: 66386 - DNA, 258 bp, Glycine max
  Clone ID: 700838661H1
agttcatggactctattcaggcggaattaagctgccaacagatataatcagcaagattagtccactacccgtgcttaaggaaatcttccgaactgatggtgaacaggcccttaagtttcctcctcctaaagtaattcaagtgagtaagtctgcatggatgactgatgaagaatttgcaagagaaatgcttgctggtgtaaatccaaacttgattcgttgtcttaaggatttccctccacgaagcaagctagatagcca

SEQ ID NO: 66387 - DNA, 248 bp, Glycine max
  Clone ID: 700842353H1
agtttttctgcctgcagatgaaggtgttgaaagttctatttggctgctagcaaaggcttatgtagttgtgaatgactcgtgctatcatcaacttgtcagccattggttaaacactcatgcagttgttgagccattcatcatagcaacaaacaggcatctcagtgttgttcaccctatttataaactccttcaccctcactatcgtgacaccatgaacataaatggccttgctcggttatcactggtca

SEQ ID NO: 66388 - DNA, 233 bp, Glycine max
  Clone ID: 700836856H1
aaaaaagatcatacatagtagtgttggtgggttgcaaagatgcttgggggtcttctccataggggtcataagataaaagggacagtggtgttgatgcgcaagaatgtgttggacgtgaatagcgtaaccagcgttgggggaattattggtcaaggtctcgacttagttggctcaacactcgatactcttactgccttcttgggccgatccgtgtctctccagcttattagtgc

SEQ ID NO: 66389 - DNA, 239 bp, Glycine max
  Clone ID: 700839037H1
caaaaacaaagtaagagttcactcaatctcactgtgttgtgagttgtgtgtgagcaccaaccaacaatggtgtctctgactccgttatgtttctttattaccttgttgatcgctggtgcagacgcagcggcggagccccaaacggtgcgttttgacaccggggggttgagcagagacacctttcccaaaggattcttattcggaacggccacgtctgcgtaccaagtggagggtatggc

SEQ ID NO: 66390 - DNA, 248 bp, Glycine max
  Clone ID: 700836407H1
attctgcccttccctcgcgtttcaacaccgataacccgcaaaaatctccattgatctgcgcctcctgttccatggcaaagctgcctgtggaatacaacggcgactgcgccaccaccgcctcagcaccgcctccgcagccgcggagtctcagagatccattcccacgccgtttctcaccaaaacctttcaactcgtcgacgaccaatccatcgacgatgttatttcctggaacgacgacggatcaacgt

SEQ ID NO: 66391 - DNA, 235 bp, Glycine max
  Clone ID: 700836315H1
tcttatcacaacagttccattgtaattaagtactaagtataaactctctcccaatagatgaatattcttttttcttgttgccgccaccactcttctaatgtctagttctgagagcacaaacgcgagaactagaacagcgtcatggttttctaccccattctttgttatcgttctcccggtggccgtggctgcgcttctctaccggctcgaaccattcaagccggttcttttgccg

SEQ ID NO: 66392 - DNA, 233 bp, Glycine max
  Clone ID: 700836352H1
gctttctcttccttcataatttctcacctttcaaatctccattcagcttcattttctgcatagaaaaaacccttttctggagaaagaatatagtcttcagctggacaaggatcattcatcttgaaagaagagtttgtgtgtgacaatctttatagttctaaggagggtgcaagagagaactgaatctgctgtgatggcaactcgtagatatgtttttggaagagctgatgagg

SEQ ID NO: 66393 - DNA, 250 bp, Glycine max
  Clone ID: 700836404H1
gatggcacaagttgttaagccacatgaacctaagacacagtcatttaaacttttgagtggtcataccataccggctgttggattgggcacatggaagtctggttcacaagctgccaattctgtgatcaccgccattgttgaggctggttacagacacatagacactgcttcgcagtatggagttcaagaggaagttggacatgcactccaatctgccatgcaagcaggagtggaaaggaaggatctattt

SEQ ID NO: 66394 - DNA, 255 bp, Glycine max
  Clone ID: 700836417H1
ggacttacaaattatgcagcagcttattgcactggtctcctgttggcccgaagagtcctcaaaacacttgaaatggatgaggagtatgaaggaaatgttgaggctactggagaggattattcagtggaactgccgagagcaggaggccattccgtgcactccttgatgttggtcttgttaggactacaacaggaaatcgcgtctttggtgcccttaagggagctctggatgggggtttggatattcctcacagcg

SEQ ID NO: 66395 - DNA, 250 bp, Glycine max
  Clone ID: 700836420H1
gcattttgtttggaaagatgatataaaagttccttgcggtaaactagttgcctcagaccatcaagatagccccctggaatacaacgagtatgctgtctacgataaaaagcgggcacgcataagctattggtgggagtgaagtatgaagagaaggaagagaagggtgcggtgattgacacagctgaatgatgggaccaaaaaggatgtaagggaagcttttcttttttgtgatgcgggaattgaaagctat

SEQ ID NO: 66396 - DNA, 248 bp, Glycine max
  Clone ID: 700836423H1
caaaaggcattttagaaagaaatattgagttttctcagctggttgttgactaccaacgaaaattgcgtgaaagcactgagtcattgattgctgctgaggagctttcgcggaaactttctatggactgtcagttttaaagcaagaaaaggaagtcatatcaaatgctgaaaaaagggcatccgatgaagttcacagtttgtctgcaagggtgcagcgtttgcaggctagtttgagtaccatacagagta

SEQ ID NO: 66397 - DNA, 242 bp, Glycine max
  Clone ID: 700836428H1
catttgtgtcactggatggactgccactccaatgcaggatgttcaggttacaattgattggtttatttcctctcaggaatgtgttcccaggacttattgtgttttaaatccacaaaatcctttgtgttgaataggtggatggggaaactgactttcccccagggcacttcccgaagtgttaagagaatgcctctttctatagggggaggagctggtgcaaagaatgctattctcatgaatat

SEQ ID NO: 66398 - DNA, 248 bp, Glycine max
  unsure (1)..(248): unsure at all n locations
  Clone ID: 700836443H1
attctgcccttccctcgcgtttcaacaccgataacccgcaaaaatctccattgatctgcgcctcctgttccatggcaaagctgcctgtggaatacaacggcgactgcgccaccaccgcctcagcagccgcctccgcagccgcggagtctcagagatccattcccacgccgtttctcaccaaaanctttcaactcgtcgacgaccaatccatcgacgatgttatttcctggaacgacgacggatcaagt

SEQ ID NO: 66399 - DNA, 251 bp, Glycine max
  Clone ID: 700836447H1
acctaatgtaaaaaagccaaaggagtgtaccaaagtcttccttgtgaagctgccagagagtagaaagttcattgtgcctaaaaacatgagggtgcttgcagttccgttgtgccaagttcatgaaaacacaagacatatgggcaaattatatcaggggtcccacagctgctgtcaaaattctctttcaacatgatagaatcttgatacctgattgcaacctattttatcatccagggtgaagggactaaggc

SEQ ID NO: 66400 - DNA, 249 bp, Glycine max
  Clone ID: 700836451H1
gtcagcaaggctatgctgtgacaaaggacaccatttcaagtgcagcgaaaaccgcttcggagaaaactgcgccagtggcagagaaggccaaagactacactcttcaggctgcggagaaggccaaggtgcgggtggcacaacggcgagttacgtcggagagaaagcggtgcaggccaaggatgtcgccgtggagagtgggaagagtgcggctgggtatgctgccaaggtggctgctgatttgagggacaa

SEQ ID NO: 66401 - DNA, 248 bp, Glycine max
  Clone ID: 700836452H1
ctcaaggctcaacaaggagaggttaccgtgcttgcaaacctcgccgatcctgcctattcacttcaactatctactccacttccatccgttggattgccaaaagctaccttcagatttcctctggggaactttcgctgcaggagaaacaagaggaggaagtcaataatttgttgtcagtcgatggggttcttaaaggacaattgtttaatgggctctgctctgcccattacaaggacgaagaactgaaa

SEQ ID NO: 66402 - DNA, 246 bp, Glycine max
  Clone ID: 700836459H1
gtcttctgctaattgttctttgtttatcatttcaattaggaatgggaatttacgatgccatgaagttgtgcaaggcagatgtgtcaactgtttgccttgggcttgctgcatccatgggtgcattattcttgcttctggtacaaaaggcaagaggtattgtatgccgaattcaagagttatgatccatcagccacttggaactgctggtggaaaataaaacataattgcaggctacagaaatgagca

SEQ ID NO: 66403 - DNA, 254 bp, Glycine max
  Clone ID: 700836464H1
gcacaagttgaacttcgtgacgagcatgggaacccagttgaactaacagatgcatatgggaatccggtttggttaacggacgagaaaggcaacccggtgcacctcacggctgtggcaaccaatgcaccaaatctatgcttcagaatgacaccccacaagagcttcctcactccaagagttcaagctcgtctgaggatgaagggcatggagagaggatcaggaagggactgaaggataacatagaagaaaagtta

SEQ ID NO: 66404 - DNA, 245 bp, Glycine max
  Clone ID: 700836474H1
cgcagggtttagagaaaatttaacaattagggttgcttctcctttgccgacccatggctcccaaagctgatagttcaaagaaggctgatccaaaggcacaggccttgaaaactgccaaggcattaagtccggtgctaactttaagaagaagaccaagaagatccgaacatctgttaccttccatcgaccaaggactttgaaaaaggataggaaccccaaatatccacgcattagtgctccaccca

SEQ ID NO: 66405 - DNA, 246 bp, Glycine max
  Clone ID: 700836477H1
gttactatctataattaattaaattcctcgtggaatattgaagaagccatgtctacagctgggcaggtcatcaagtgcagagctgcggtggcatgggaagcagggaagccactgtcaatagaaccatagaagtggcaccaccccagaaaggtgaagtgcgtttgaggatcctcttcaactccctttgccgtagtgatgtttattggtgggatgctaaggaccagactcctctgtttcctcgtatct

SEQ ID NO: 66406 - DNA, 249 bp, Glycine max
  Clone ID: 700836478H1
gattggaatgacgcagctgctccaagtagaaaaaagaaactcactggcaatgtgactccagtgtcaccaaatgcaaatgcttcaaataattctatacatactcttaagagaaatgctcatcagataaagttgaaaatacaaatagttcacccactaaatcccttgatggccgttcgaaatctggttccagggataaaaggtctggatcttcagcacacaaaagactaggagaagccgtagttcagagac

SEQ ID NO: 66407 - DNA, 246 bp, Glycine max
  Clone ID: 700836491H1
cgaggactccgaaaagaaagagtcctttcgctactcgcgtcccgttctgcagagcacgctccagctcatgggatgcaaagcgcgtcacgccttcaagatcagccaaagagtttttgaacaaacaggaaagagaattctactgatattttgaagctggaagtagaggctttatcaggttttgatgctttcaagaagaattttgtgaagaaagatggtaggagtgtaccatttgagttgtacaaaagg

SEQ ID NO: 66408 - DNA, 253 bp, Glycine max
  Clone ID: 700836511H1
gcaaaacgcacgagttaggggcggcgatgggaggttcatcggaggatttctcggtggtggtgctggcgtcggacctcggcgtcgatgcgcgacctttcctcgaacacgatcaacagcaagaagaagagaattggcacactgttcccagtacctctcccccgacgaggacttctccgatctcgatcagttgcaattcctccgcctccaaggctccgacaagaactccaatcgcattctccgcatcgtcggcaag

SEQ ID NO: 66409 - DNA, 252 bp, Glycine max
  Clone ID: 700836512H1
gtcgccgaagctgcctccttcgccggggcagagaggtggtttgatgtcgcctgcgggtggaattgatgggaattcggcggccttcagcttggagtttggaaatggggagtttagtgggcctgaattgaagaaaatttggccaatgaaaagcttgcggatgttgccttgaccgatccaaagcgtgcgaaaaggattttggccaaccggcaatcggctgcgcgatccaaagagcgaaagatgcggtacatttcg

SEQ ID NO: 66410 - DNA, 254 bp, Glycine max
  Clone ID: 700836522H1
caaacccataaatcctctcaccaaataaacctcaatttattgcattgcataataccatgtcaatgaagttgtatgcttccctcacccttacggtgtggcttttcatggccacattttcgcgagcccaatacgttattgcacaaatggcgaacccgttgacaatgatgatgagtattacatcaggccagccataaccgacaacggagggcgtttcaccttgatcaaccgaaacgggtcgtgccctctctacgtgg

SEQ ID NO: 66411 - DNA, 255 bp, Glycine max
  Clone ID: 700836523H1
cacacaactactacaagtacttccttacaatcaaaaccaacaacaactatggcaagttatcaaaagcactacgatgatcagggtcgcaaggttgacgagtatggcaacgttgagaagcaaaccgacgaatacggcaacctgttcatgctgctagtgtcacctatgtagccaccagaactgctgctggtggttacagtgatgacattaataagcaacatgataccaccaatgcctacggcgtagacactggtagac

SEQ ID NO: 66412 - DNA, 250 bp, Glycine max
  Clone ID: 700836528H1
gggaaacaaaactacccttttgcttttgctctttgttctttgccatggagtggccacaacaacaatggccttccatgatgatgagggtggtgataaaaagtcaccaaaaagtttgtttttgatgagcaactccagagggttttcaagactgatgcaggggaaatgcgtgtgctgaaaagccatggtggtaggatattttataggcacatgcacattggcttcatctctatggaaccaaagtccttgtttg

SEQ ID NO: 66413 - DNA, 254 bp, Glycine max
  Clone ID: 700836532H1
attcactaatcactaccaattgctaaagatatttcactcactggtcacactactaatacagctttctggagatggcttcaactgtctcttacatgcttctacttccccttctagtgatggttgcctttgctggggattaaacaaagactttgacatcacatggggagatggccgctccaagatactaaaccatggagagttactcactctttcattggacaaagcatctggctcaggttttcaatcaaagaatg

SEQ ID NO: 66414 - DNA, 251 bp, Glycine max
  Clone ID: 700836538H1
tgggaatggtggtggtagtgccaggtgtctgtctgaggagaaaatagaataaaaagctatgaaattttggcacaaggtctgattgtagaattgaagaagatgactggggggggtatcactatgcaatcgacgccggaagctcaggatacttggatttgtatccagagcggaagatgtcctttttcaaaaatccttacattctcggactggctgctgtcgccggcatcggtggtctcctcttcggctacgac

SEQ ID NO: 66415 - DNA, 252 bp, Glycine max
  Clone ID: 700836539H1
gacgtggcatgcgtcttgctaaagaacctgatgagtttgtgaagttgttacagcaagctaagagtgaggcagctgctgcatttggcaatgacggggtttatttggagaagtacattcaaaacccaaggcacattgattccaggttcttgcagataaatatggtaatgttgttcactttggagaacgtgattgcagcattcagaggcgtaatcagaaactgcttgaagaagcaccatctcctgccctgacccc

SEQ ID NO: 66416 - DNA, 249 bp, Glycine max
  Clone ID: 700836541H1
ttcgtccttcgtggggtacaatgaatgagggtttgccagtttttgatgattctatttgggctgaagctgccatgtctctagattttcctcaaattgcagcagagactgcgatttattcatcgggtaacaacttgccgatgtgggtgtgtgggactctctgcaaaccccatggtgcatgtaatttcatcactttcaaaagggcaagggaaagccacaagctatagcttttcttctcatgccagctggact

SEQ ID NO: 66417 - DNA, 251 bp, Glycine max
  Clone ID: 700836556H1
ctctaagttcgttcctttcagcaatggatacaaagatctcgtcaattcattccttttcctcatatatattgtttttaacctaaaaccttaaaacccaataacagcttcccctttcccttctcaagactgcccaagccaccccatgctggtggaactgaaaaatggggagacttataacgggcacttggttaattgtgatacatggatgaacatccatctccgagaagtcatttgtacctctaaagatggag

SEQ ID NO: 66418 - DNA, 248 bp, Glycine max
  Clone ID: 700836558H1
gccggtgacactgctcagaaaaccaaggactatgccggtgacactgcacagacatcaaaggactatgccggtgatgctgctcagaaatcaaagggctatgtcggtgatgctgcacaaaagaccaaagaatatgtggtgatgctgctcagaagaccatggattatgccactgatgcagcacagaagaccaaagattatgctactcagaagactaaggactatgcaagtgatgcaactgatgctgcaaaa

SEQ ID NO: 66419 - DNA, 245 bp, Glycine max
  Clone ID: 700836573H1
gtctgataagcaaaccggaaccgtacggaagcactacatagggatggtgactatgcttgacattgtggtccacattgctggtgataaccacttgagtggtgacgatgatgatatcaccaaagaccttgataaaggatgtctggccctgtctcctccatcattggccactcctttgaaggccttagcttgtggactctcaatcctaataccagcctgttggattgtatggaagtgttgagcaaagg

SEQ ID NO: 66420 - DNA, 245 bp, Glycine max
  Clone ID: 700836575H1
gaagagatgacattgattccgggaaccagcgttgaagaggcttacaacaagctaatagttgaacttgagaaaagtgttcctacattggttggcattgaatgtcccaaggatgagaaacttcctcgtcgcaaatttttgataaacctaagacgcgctgcttcactattctccctatggagtttaatcttgtggttcgtcagaagtttttaaattttgtgaggttcattatgaagaaaagggacaag

SEQ ID NO: 66421 - DNA, 244 bp, Glycine max
  Clone ID: 700836577H1
cacacacacagctagcagatattacatacacgtgaatcactaattaagccatggagaagaaatcaatagctggaagaagttgtggtgcaaactgaggcaaagacttgcgagaacctggctgatacataaggggtccatgcttcaccactggcagctgcgatgatcactgcaagaacaaagagcacttgctcagaggcagatgcagggacgattttcgctgttggtgcaccaaaaactgttaaat

SEQ ID NO: 66422 - DNA, 248 bp, Glycine max
  Clone ID: 700836580H1
cttttcattactaccaactcttttaatctaatttcccccaaattcttttattattttgctcataaccccaattttcaatttcctctttcttcccttacgttatggacccaccaattcaccatccacttgggaacgccctgccgccgaggacgattccgtaatttccgattgcgagagcggggtttccgggggcgacacggcggctggctttgtgccggccgacgaaaacgccgacctcgtccggacca

SEQ ID NO: 66423 - DNA, 248 bp, Glycine max
  Clone ID: 700836587H1
caaaaagcaaaggaagagttcacataaatcatggtggagattcacgaagaaatcaacccctttgatcaagaagaaaatgaagacattggagaggaagaaatcgactatgaccagcttaagaagcggatgtggaggatcggatactgctgcagaagatgaaggagaaacggcccaaagaagagccagtccaagaagcaaaacaagaagcatctaggcggaagaagatgtcaagagcgcaagactcggtc

SEQ ID NO: 66424 - DNA, 247 bp, Glycine max
  Clone ID: 700836588H1
gaaaacctaagcttagaattagaaacaaagaaaagaagaaaggaaagaattgatcgttgaaaatgcagggaggaaagaaagcgggagagtccattaaggaaacagctacaaacattggtgcttctgccaaggtggcatggagaagaccaaggccactgtccaagagaaggcagaaagaatgacagcacgtgatccggtgcaaaaggagttggcaacccaaaagaaagaggcaaagatgaaccaggcg

SEQ ID NO: 66425 - DNA, 243 bp, Glycine max
  Clone ID: 700836590H1
ctttgccacaagaaggggactttgctctgtattgatggtacatttgcaactccattgaaccagaaggcccttgcccttggcgctgatctgattctgcactccttaacaaaatacatgggtggacatcagatgtccttggtggttgcataagtggttcaattaaggtggtttcgcaaattcggactttgcaccatgttttgggtggtacacttaacccgaatgctgcatacctattcatcagag

SEQ ID NO: 66426 - DNA, 243 bp, Glycine max
  Clone ID: 700836594H1
ctgtactaatgttattttgtcacattctgacatgagttgggaaaaatatgtatttttgtcgtcttcattgtggggaaaatatattatgcattctgatatgggtgaggaaacatatgtgattggtttttgttattgccataagtagtttttctgtttgtttggtatattgcgatcagcatttagaaatgataatgtatttacactgtattggtatcttgaattttcaagaatttccccgtatcc

SEQ ID NO: 66427 - DNA, 242 bp, Glycine max
  Clone ID: 700836613H1
cgccaactgagaaggaaagctctctctcgtattgaatggctgcaaaaagctgatgtgcctaccatagcacagattgaagagttccattcgatgcagagaatgatgaatgctcctgattcaaatgataatattgatctactgttgagcattgatttgttgggtttacaaggagcaggtaaagcttttccaaataagattgtttttgatgataagcttgtgttggctaacacacaagattcttt

SEQ ID NO: 66428 - DNA, 190 bp, Glycine max
  Clone ID: 700836619H1
gtacatctctctacactgatcccatccagaagcgatgatgcaatcagccttgtgacgtcactttgttcatgggatccctgcaagagaccaactgcagcagaggttcttcaacatcctttttttcagagttgcttttacatccctccatcccttcgcaccagagctgtaaccagaactccaccatctgctg

SEQ ID NO: 66429 - DNA, 243 bp, Glycine max
  Clone ID: 700836625H1
gcttcgaaggcgtgtgacaagaaacctcagagagcgtttcctctgtctggggtccattcacaatttcacatttcattcatattcattacttcatggtccttcaacaagctccttaatttcattctctccttccaccttttcctcacgcatcaccgtttcttttgtttctgtcttagtgtgccgtgtcccaatacatacataatagaacaacaaacacacacacataactctctctctctgctg

SEQ ID NO: 66430 - DNA, 236 bp, Glycine max
  Clone ID: 700836635H1
gtggtcctaataatggttttgaaatgtggagttctgagtgggcaaatcaaacttcatggcatttgagtttccttattgacaatcccaaacagtctacagtttttgatattctcttgggaatttctcaagattttgaaattgctggtaatactcttatgccagctttttctgttccacaggctactgccagatcttctgaaaatgcggaatcctctgcatgatctggaattgtgttt

SEQ ID NO: 66431 - DNA, 239 bp, Glycine max
  Clone ID: 700836639H1
ttgttgggtttacaaggagcaggtaaagcttttccaaacaagattgtttttgatgataagcttgtgttggctaatacacaagaattctttgatggaaattttccagtggattcttggttaccaatttttgtgaattgtctttatcctgtaagtcaattaccttcagaagctgtcgttgtaaatgttacatgtggtagtggacgtggtggtttacccaccactgcttggattattctgca

SEQ ID NO: 66432 - DNA, 238 bp, Glycine max
  Clone ID: 700836660H1
cacagttttagtgacagagaggttttcttttctctttatcttcaagatctgagtattgaatgcatagatggattggctttcgtcctcagtcctgggcattacgaaaagtttcagaatgaggcccgttgtactcacttagagccattcatctgcaaccaccagttcgataatgatgatgtgaaaccctttgatataacacagattaagggttattggaaacaggaaattctcaggtaca

SEQ ID NO: 66433 - DNA, 236 bp, Glycine max
  Clone ID: 700836673H1
caattttgtattggagcttgattttgagccatttaatgccacatttcctcgtccaactcgctcagcatccattggcaatggtgtccaatttctcaatcgccacctttcatctattatgtttcgcaacaaggattccttgcagcccttgcttgatttcctccgagctcacaaatacaagggccatgctctgatgttaaatgatagaatacaaaccatttccaaacttcagctgcatt

SEQ ID NO: 66434 - DNA, 235 bp, Glycine max
  Clone ID: 700836677H1
gcaatgggaaaattatctgcctatttttcactgcaaactggtgcagaccttgcagagctttcgttccccgtcttgttgaactttatgaaacactgagaaagaggcgaataaatctagagattatcttcatctcctttgaccgtgatgaggatggatttaaagaacacttcaagaatatgccatggctagctgttccatttgatttaaatttgcacagaagactgattgacagata

SEQ ID NO: 66435 - DNA, 234 bp, Glycine max
  Clone ID: 700836686H1
ggaagaaaaagaagagaagacaaaggaagcggaaatgcaagaagctgattacaccactaaggatgataatgatatagagaaggaaaaggatgttgtaatggaaaatcaagatgtcaagagtgtggaagatacagatgtcaacaaatccactcattctggagaagctaaagctggagaaaatgttgaggtacctattgaaaaggacaaaggaattgaggtctctgaagttttctg

SEQ ID NO: 66436 - DNA, 238 bp, Glycine max
  Clone ID: 700836706H1
ggtctctggagttacaccacagccacggaggcacccaggagaggctttaatgaatggcggttctgcatctagtaacttaagggcagctctctcccattgcgtacaacaagtgcgaagttatgattatcatcactatctttgccttctcgagctgcctccgtctatgcggaaggctgcatttgcactccgtgccttgaatgttgaaacagcgagggctatggatgttgcctcagatccc

SEQ ID NO: 66437 - DNA, 249 bp, Glycine max
  Clone ID: 700836709H1
ggctaattgcatacgatccctttgtaatgctgatgtgaaagaaggatttgtttttgggaaggatgcatctcttcccgagacgtatgtccgcgatgctaagatccccactaaggatctcagcgggaattcagcttcgaagaggacaacgcttgcattttttgcagggagcatgcatggttatgtgaggccaattttgttgcagcactgggaaaacaaagaccctgacatgaaaatctttgggagattgcc

SEQ ID NO: 66438 - DNA, 249 bp, Glycine max
  Clone ID: 700836722H1
caagtacttccttacaatcaaaaccaacaacaactatggcaagttatcaaaagcactacgatgatcagggtcgcaaggttgacgagtatggcaacgttgagaagcaaaccgacgaatacggcaaccctgttcatgctgctagtgtcacctatgtagccaccagaactgctgctggtggttacagtgatgacattaataagcaacatgataccaccaatgcctacggcgtagacactggtagacagcatt

SEQ ID NO: 66439 - DNA, 248 bp, Glycine max
  Clone ID: 700836724H1
tggtgatgataacttaattagtgttcatgaatatgtcaagccttactttagtggttctaaattgaaaagctttctagctggtcataatatcaccattactgatggtattgataaaactagtgcaactttgcaatttagaaagttagcagattgtgattttctcaagagaaactttaagcagatgtctaatgttttgtgggtggctcctgaggacaaggcgagtttatggtcacaacttcattatgttt

SEQ ID NO: 66440 - DNA, 250 bp, Glycine max
  Clone ID: 700836729H1
tgcagaccgagctagctagctagcaagcaagcacagagatggaggcaaagcgaggccatgccctcatgtgcttggcacgtgtttcactcttcctctgcgctctaaccctatccgctgctcacggaagcaccacggttcaagacatcgcgagaaagttgaaactcggggacaacgagcttctgcgcacggagaagaagttcaaggttttcatggagaattacgggaggagctactccacagaggaggagta

SEQ ID NO: 66441 - DNA, 249 bp, Glycine max
  Clone ID: 700836731H1
aggaaaagcctccaaaaccaacccaccgttggcgcgatggctttcccctccaaaggcgatgacgagcaggttctggtgcagcgtaaatcgaatgcgagagttttgacactaaacaggactaaacagttgaatgccctctctttttatatggtttctcggctacttgaaattttttctgaagatgagaaagattctgatattaaattggttgtcgtgaagggaaatggaagggctttttgtgctggtggt

SEQ ID NO: 66442 - DNA, 249 bp, Glycine max
  Clone ID: 700836739H1
gagattgtggaatttgtgatcacacaacataagcatatatatagaaagatgtcaggggcacaaggagcacaaccaaaggagtcaaaaacagcaacaacatatgagtcagtagaaggaggagagaaccgaacaaggactgacttgctttcaagggaggatcaaggctgcattcaagtggaaaaacttcaggagaaggtccatgatcctgctggcaaaggtggtcctgtctttggtgctggcaaagatgaa

SEQ ID NO: 66443 - DNA, 248 bp, Glycine max
  Clone ID: 700836741H1
ctgtctttctatatcctcagcaacacactcggaaaaatgtagaacaactagaatcttttgttccaaacaaaaacgtatgaattggtcggtttttctccggagtcgtcttcacttttctccgagtttttattatcatcatctctctcgtgtccctgtctccatctccatctcttagtttcttcttcaaatggcagaagttgaagacatagacaaccctcatcacgaccaccatcattacctttcttctt

SEQ ID NO: 66444 - DNA, 246 bp, Glycine max
  Clone ID: 700836742H1
aaaatctcttgcattggatacagctattggtatgtggcaattattatttgctgagaagcagtggccacttgttgatcattggtgccagttcttgcaggctcggcataacaaagcaatatctagggacacatggtctcagcttttggagtttgcaaaggtaaaataataaacaattaatggtgtcctcataatgtggatttacacttcctgtcttgatagggatttattgttgcatgactacatcta

SEQ ID NO: 66445 - DNA, 246 bp, Glycine max
  Clone ID: 700836744H1
agggaatcaatgttttttgttattcctgcttttggtggcattgtttcctgggagggagaaggggcaccttttggggaatctgaccagagcatttctcatcagattgttgacagggaagcacaaggacatcggttcctctcaagagaatatgttcaaccacagtgggtatatgactgtgtgaatgcacggattattttgccaactgagaattatttggtgggaaggactcctccaccacacttgtca

SEQ ID NO: 66446 - DNA, 231 bp, Glycine max
  unsure (1)..(231): unsure at all n locations
  Clone ID: 700836749H1
tatgattctgccagcgtgatnatatgtgcagttggagctcgatataagagttattgctcaaacatagctcggacattcttgattgatgcagatcctcttcaaagtagggcttatgaggttcttctgaaagcccatgaagctgtcataggttctatgaagcctggaaacaagtnaagtgttgcataccaagctgcagtttctgtngtggaaagggatgctcctgacctgatt

SEQ ID NO: 66447 - DNA, 246 bp, Glycine max
  Clone ID: 700836753H1
gacaaccttgtttttgtgctatgccactaatgagtaggggacaattggctctccaattccaattttagggcatttctctatcaaaggaaaaaaaatccttttaaatgatttgtcttttgtcaaacttacattaaatatagttttgatatatgatatgattgtttacacgtggctataaaatgaaattcatttactagtagagcatacttcttcctccaaaatactactctcaccttaaggtagtgt

SEQ ID NO: 66448 - DNA, 247 bp, Glycine max
  Clone ID: 700836757H1
tatggttgtggaaatcctgaaactgagatcataatcactaagaaccaaatgatccagctgaaatgcgctgcttgtggttttgtgtctgatgttgatatgagagacaagctgactaccttcatcattaagaaccctccagaggttaagaaaggatccaaagacaagaaggccatgaggagagctgagaaggagagactgaaggaaggtgaaatggctgatgaggaacagaagaaagtgaagaaagagg

SEQ ID NO: 66449 - DNA, 252 bp, Glycine max
  Clone ID: 700836765H1
gctagctagcaagcaagcacagagatggaggcaaagcgaggccatgccctcatgtgcttggcacgtgtttcactcttcctctgcgctctaaccctatccgctgctcacggaagcaccacggttcaagacatcgcgagaaagttgaaactcggggacaacgagcttctgcgcacggagaagaagttcaaggttttcatggagaattacgggaggagctactccacagaggaggagtatttgcgccgtttgggg

SEQ ID NO: 66450 - DNA, 245 bp, Glycine max
  Clone ID: 700836770H1
ctaagcttcccctttctttcactctcatcagatcctttcgtcgttgcgcgaaaccctatctctgaaccagcaaacatgtctgcagccatggatatgtcgctcgacgacataatcaagaacaacaaaaagtctggatccggaagttcacgtggccggacccgaccctccggatccggacctactcgccggctccccaaccgtgccgccaaccgcgccgcaccttatgcccccgctaaggcgccgga

SEQ ID NO: 66451 - DNA, 247 bp, Glycine max
  Clone ID: 700836771H1
aagttttgtgggaaaatgataatgctattagcatccctgctaatagaactcataattctcattcaaaaactaagggaatcacgtccaatcagcacccgccaatacctcaaactcatcgagaagaagaaccccaccatttgctacaccaaaagattgaacttgaaggcagagcacgctgctacagctactgagtgtagggtatgtctgtccgaattcgaggaaggggagaaggtgaggaaactgaaat

SEQ ID NO: 66452 - DNA, 249 bp, Glycine max
  Clone ID: 700836780H1
cctcacatggttctccagcaatccgtgtaccaggctttcactcaggtgtttgctcagcagctaccaaagcaagcacaggtgaaatctgtggcaccatttgggttatgcttcaactccaacaagatcaatgcatatcctagcgtggaccttgtgatggacaagcccaatggtcctgtttggagaatctctggtgaggacttgatggtgcaggcacaacctggggtcacgtgtttgggtgttatgaatgga

SEQ ID NO: 66453 - DNA, 250 bp, Glycine max
  Clone ID: 700836781H1
atcaccagtggttcttttccttctgagaagatcgaattgtgttttgcaaaaatgggagttccagagaaagaccctctttcccaattgagtttgcctcctggttttcggttttaccccaccgacgaggagcttctcgttcagtatctgtgccgcaaggtcgctggccaccatttctctcttccaatcattgccgaaattgacttgtacaagttcgacccatgggttcttccaagtaaagcgattttcggtg

SEQ ID NO: 66454 - DNA, 245 bp, Glycine max
  Clone ID: 700836784H1
caacaatttgcttggcaaatttgagttatctggaattcctcctgctcccagaggtgttcctcagatcactgtttgcttcgacattgatgccaacggtatattgaacgtgtctgcggaggacaaaaccactggacagaagaacaagattacaattaccaacgacaagggcaggctttctaaggaggagattgagaagatggtgcaggaagctgagaaatacaagtctgaggacgaggagcataaga

SEQ ID NO: 66455 - DNA, 246 bp, Glycine max
  Clone ID: 700836786H1
gcacaacaaagaaactatctctttctagaaacatattatgcccaaaatgtaaagggaaaggttcaaaaagtggaactgctggtaggtgttttggatgcaaaggcactggtatgaaaattacaagaaggcagattggactaggcatgattcaacaaatgcaacatgtctgtcctgactgcagaggatctggtgaggtcattaacgagagagataaatgtcctctgtgcaaaggaaacaaggtttccc

SEQ ID NO: 66456 - DNA, 243 bp, Glycine max
  Clone ID: 700836793H1
ttgacacagtagagactcattcatctgaattagttcttgtattttctataatttaggaaattgattatgttttccttggttttaagttaagttggttgtgtttttcaggtctatggtggagaggcaaggatttcaactttgagggaattatttcctctgatggaagacaagaagagccttgcttcatctgaagagcgttctcagataaagggaaaagcttctctattagctgcacttgactac

SEQ ID NO: 66457 - DNA, 238 bp, Glycine max
  Clone ID: 700836809H1
gtgtttttcttcttcttcatcaccatgtctttactttcagacctcatcaacctcaatctctcagaatccacagaaaagatcattgctgagtacatatgggttggtggatctggtatggacctcagaagcaaagccaggactcttcctgggccagtgagtgaccctgcaaaacttccgaagtggaactatgatgggtctagcacagatcaagctccaggggatgacagtgaagtcattc

SEQ ID NO: 66458 - DNA, 238 bp, Glycine max
  Clone ID: 700836810H1
gagaaaacaagaagtagtgagaagaagggagagaatggaggaaaaggcaaaagctgagcagaagaagataggtatgaccgagacttggttgaagaagcaccgtcttctttacaatggagccactagacaccctcttattattagcattcgcgatggcaccatcaacactgcttccttcaaaacatggctcgcacaggattacttgttcgttcgggcgtttgtcccatttgtggctagt

SEQ ID NO: 66459 - DNA, 238 bp, Glycine max
  Clone ID: 700836813H1
gctagctactagcatcttcttccatcaccacattcatcttaattaatattctctagtggtgcttcccaatcaatatcctttaattttgtctcaattcctttctttctcattcaccaatccatacttcattttgttaatttcttaatccaacaccaccaagatgccaactgacacatcatcagtttccggcggcgaaatcgtgtgtgtgaccggtgccggcggtttcatagcctcttgg

SEQ ID NO: 66460 - DNA, 235 bp, Glycine max
  Clone ID: 700836823H1
cttcaacatccaagcaagtgttaaaacagggaaccatatatggtgaataacaaagacatgcaagctcaggcatacctcctccaatatccatgtaagtgttaattcctcttataattccagtaacagtcaccacatctccaggtatgcacgcatcaacgagatcttgggtaagctcgcattccactgttcgaggcacccgtccttcttcatggtcttcaggctttaataattcttg

SEQ ID NO: 66461 - DNA, 236 bp, Glycine max
  Clone ID: 700836826H1
aagctcgccaattgagaaggaaagctctctctcgtattgaatggctgcaaaaagctgatgtgcctaccatagcacagattgaagagttccattcgatgcagaggatgatgaatgctcctgattcaaatgataatattgatctactgttgagcattgatttgttgggtttacaaggagcaggtaaagcttttccaaacaagattgtttttgatgataagcttgtgttggctaacaca

SEQ ID NO: 66462 - DNA, 237 bp, Glycine max
  Clone ID: 700836828H1
caactacaagaaagaacttccttataaccaaaaccaacaacaactatggcaagttatcagaagcactacgatgatcagggtcgcaaggtcgacgagtatggcaatgttgagaggcaaactgacgaatatggcaacccggttcatgccactagtgtcacttatgtagccaccaaaagtgttggtggctacaatgatgacgctaataagcaacatgatattactggtgtctatcccgag

SEQ ID NO: 66463 - DNA, 246 bp, Glycine max
  Clone ID: 700836834H1
aaaagctattttggccctgtgccaccaaagccatctcccccatttttgctcctctatctcttttttctaatcatcacaattgggtgagaaaaaaacacacacacaactcaacaatgggtgagaaagatgatggcttgggtttggggttgagtttgaagttaggatggggagaaaataatgataacaataataatcaacaacaacaccctttcaacgtgcacaagcctcctcaatcggttccaaacc

SEQ ID NO: 66464 - DNA, 236 bp, Glycine max
  Clone ID: 700836838H1
gcctcccaaatgtcagcgagaaagggttctgggttatgggtaatggccacggactgcagaaactaacttcaatcacaatcaattgctgccaaggagtgacagatgttgggcttgaagctattggaaggggttgtccaaatgtgcaaaacttgaagcttcgtaagagtgcttttctgtcagacaagggattagtatcatttgccagggctgctccatcagttgagagcctgcaattg

SEQ ID NO: 66465 - DNA, 235 bp, Glycine max
  Clone ID: 700836840H1
ctctttcttcttttttagctatccctctcttgaaaaatctagatctcgttcttccttgatctacgttacgcttttagtgaccggatctgtatggatctgaaccagatctacacgccgatggtggttttggcctggtctttcatagatctgatgcatggaggctcagatctactgtacagaggtgtgcgattcatgttcgtctctcttttggaatctgtttcgtagaaagtcgttt

SEQ ID NO: 66466 - DNA, 235 bp, Glycine max
  Clone ID: 700836842H1
tgagaaacaaagaaaggaaataattgatctttgaaaatgcagggaggaaagaaagctggagagtccatcaaggaaacagctgcaaacattggtgcttctgccaaggctggcatggagaaaaccaaggccactgtccaggagaaggcagaaagaatgacggcacgtgatccgatgcaaaaggagttggcaacccagaagaaagaggcaaagatgagccaggcagagctggacaagc

SEQ ID NO: 66467 - DNA, 235 bp, Glycine max
  Clone ID: 700836843H1
tttggatgttgaatcctctcatggtgacatgtttaccgaggaacagaatgagttaattgaatcagcagccgagatgctttatggtctgattcatgcccggtacatattgacaagcaaaggaatggctgcaatgctcgacaagtacaagaactatgattttggcagatgcccacgagtttactgctctggacaaccttgtattccagttggtcagtcagacatccctaggtctagt

SEQ ID NO: 66468 - DNA, 236 bp, Glycine max
  Clone ID: 700836844H1
cacacacaactactacaagtacttccttacaatcaaaaccaacaacaactatggcaagttatcaaaagcactacgatgatcagggtcgcaaggttgacgagtatggcaacgttgagaagcaaaccgacgaatacggcaaccctgttcatgctgctagtgtcacctatgtagccaccagaactgctgctggtggttacagtgatgacattaataagcaacatgataccaccaatgcc

SEQ ID NO: 66469 - DNA, 199 bp, Glycine max
  Clone ID: 700836846H1
gtgtctccctctgctcttgtttttcactctctaattctgtcgtgtctcaccctccctctcactctccaccgccaacaccagcgccactgccaccgcctcaggttcaacctcaacctcagcctcagcaagaacaacaaccataatagcagacacaacaagggatggttccatcacaggcgtcgtcgttgtttcagatact

SEQ ID NO: 66470 - DNA, 243 bp, Glycine max
  Clone ID: 700836850H1
ccccctctttctcttttcttgttctgtttttattttcactgttctctgataacaacgttgttagttgtcaccatggttgttctgtctcagccagcattaaaccagtttttccttctgaaaacatgcaagcccacgcccttgttcgcggggattcctgtggtcgacctcacggaccccgatgccaagacccacatagtcaatgcctgcagggacttcggcttcttcaagctcgtgaaccacggt

SEQ ID NO: 66471 - DNA, 235 bp, Glycine max
  Clone ID: 700836854H1
tacagcctaagcttaagcttatccctccccacttgttgcctctgccgtatgttatagccaaaagggtgtgtgagagagagaaacataaacacaaccaaccatcaagggaagttagagagagagttgagttgtgttgagagagatagagagatagaggagaagatgaacggtggtgaatcttacggtgctattgagacacaatacataaggaggcatcacaaacatgaaccaaggg

SEQ ID NO: 66472 - DNA, 238 bp, Glycine max
  Clone ID: 700836863H1
agataacttgacaaataaaatcaccatgtctatcatcccaaacttgttcggtggtagacgaagcaacgtcttcgacccattctctctggacgtatgggaccctttcgaggggtttcctttttccacaggtcacgtgccttcctctggtggggaaagcagtgccatagccaacactcgcgtggactggaaggagactccggcggctcacgtgttcaacgttgatcttcccgggttgaag

SEQ ID NO: 66473 - DNA, 236 bp, Glycine max
  Clone ID: 700836869H1
caagttgaatcaaacagtgaaagtaaaacattgtgcaattaatcatcaactgcaagtagccagtgcataagatcaatggcgtcaagacagcaattcaaggaagacagagccgaggcagctgcaaaactcgcagcgaaagacatcggcgacatcaacagaacaaacgagcgcgacgaggggtacgacttgcacgacgaagccaacttcaagcaagcacgagctgaagcagctgcaaa

SEQ ID NO: 66474 - DNA, 232 bp, Glycine max
  Clone ID: 700836871H1
caagtctgctttgattaactccattcatcaaattgcaaagtctcggtttcctgtgcaggagaagatgaagcgtgctgctgtgggtccgctacctggtgttactcaagacattgctggattcaagatagcacataaaccaagcatatatgtcctagataccccaggggttctggttccaagtatctcagacatagagacagggttaaaactggctctggcagagtctgtcaaa

SEQ ID NO: 66475 - DNA, 234 bp, Glycine max
  Clone ID: 700836872H1
ctggtttagacgctgaagatattgctctattatttgaagcaataaagccagcattgcaggatgctgaaggtgtcatgcagaagaaggcatacaaagtactttcgatcattctgaggagctcctccaatgattttgtttcatcaaagtttgaggagttgcgtcaaactatggttgaagttcttccgtgtcatttttctgccaaacgccatagacttgattgcctttacttcttaa

SEQ ID NO: 66476 - DNA, 233 bp, Glycine max
  Clone ID: 700836888H1
gaaaatttgaagagtttgtttattgtgaaaaaaagaaaaatgcaggcagcaaagaaagccatagagacctttaaggaaaccgcagccaacattggcgcctctgccaagtctggcttggagaaaaccaaggccactatccaagagaagaatgagaagatgaatgcagaagatcaaactcaaatggatatggctaccaagaggaaagaagagaagatcaaccaggctgagatgga

SEQ ID NO: 66477 - DNA, 232 bp, Glycine max
  Clone ID: 700836889H1
ctactacaagtacttccttacaatcaaaaccaacaacaactatggcaagttatcaaaagcactacgatgatcagggtcgcaaggttgacgagtatggcaacgttgagaagcaaaccgacgaatacggcaaccctgttcatgctgctagtgtcacctatgtagccaccagaactgctgctggtggttacagtgatgacattaataagcaacatgataccaccaatgcctacgg

SEQ ID NO: 66478 - DNA, 232 bp, Glycine max
  Clone ID: 700836890H1
ctctgatctgcaaacacatttcaagagaacgtttttgttgttgcgcccaatcggtgttgcatttttcttttgcagagaggaggggaagtctttatttgtgagatttttcttaggaagatgaaaaacacggagaggattgcaaatttggccgtagcaggtttaactttagccccgcttattgtgaaagtagattcaaatgtaaatgttatcttgactgcttgcctcaccgtgt

SEQ ID NO: 66479 - DNA, 237 bp, Glycine max
  Clone ID: 700836895H1
ctctccccgtaaatcaacacccttttactaagagcactgcattcctactcggcaacgaggtacgcctctttctcttactcttttgcttcaatttctaattccactctttactcttctactctcactttttaatttctctgtagggcactggtctttctcctaaggaaattgagatatgcgactttttcgtctatatccctcaatatggcggtggcactgcttccttgaatgttactg

SEQ ID NO: 66480 - DNA, 246 bp, Glycine max
  Clone ID: 700836907H1
gtacagcgttgcttggatggaagatagtgaggctcacaatctaaaaagggaatccgtgaaacaacaatacaaatcggtaaagcaacggacttcaaatttcaacaactatgcgatgggttctcatgtgatgcaatatggtgataccaacatcacagctgaaaagctttatttataccaaggttttgatcctgccactgtgaacttccctccacaaaacggcaggctagaaactaaaatggaagttgt

SEQ ID NO: 66481 - DNA, 245 bp, Glycine max
  Clone ID: 700836926H1
agaaaagatgctccctcacggttgttggaatggatagatgctggcgtagtataccacaaacaagggggtattggtctcctgcgttatgctgctgtattggcttctggaggagatgcccagttaactactgtcctagtttcagatctgactgatgttgaaaatgttgttggagaatcttccagtggctctgatattaatgttatggagaatctgggaaagtttatatctgaaaagtcttttgacgg

SEQ ID NO: 66482 - DNA, 249 bp, Glycine max
  Clone ID: 700836930H1
ccagataccattccccttcctataacaaacacaaaacaacccaatcattgtttgttcacatccgaatccacaacacactgttaataattattctgattcacgaaaaacaggaaaaccccaaaactctctttgttcacaatgggcacagagacctcatcggtagatatttcggaacccctgctcttggatcctcacgggaacgaggaaaaggaagagtatttgcgcgaagaggttccggagtggaaggag

SEQ ID NO: 66483 - DNA, 244 bp, Glycine max
  Clone ID: 700836941H1
ccattactcagcactgccattcttcaatcacactaatggctgtcaccttctcagatcttcacaccgaagagggcatcaaatccctcgatcaattcctttctgggaaaacctatatctctggggatcaattgacaaaggatgatatcaaagtgtatgcagctgttgtggaaaagccaggagactcttttcctaatgctgctaagtggtacgatgccgtctcttctcaacttgctccaagcttccc

SEQ ID NO: 66484 - DNA, 243 bp, Glycine max
  Clone ID: 700836943H1
gcttcttcttgtttattttgctcccataccattagcaacactgtgttagatactcagatcccccctcttttctctatgccattcccccagctgggaagggtgtactggaatcagagtgtagctgtggggtgcagattgattactattcttgtgttggccttttcaggatgggcaagtgcaagggttgtgggcagataggaagaatgggaacaacaaatgggtcaatgagttcttatgaatttt

SEQ ID NO: 66485 - DNA, 244 bp, Glycine max
  Clone ID: 700836944H1
ggcgagttctatcgggtaaagccaatgattagaggcatcgggggcgcaacgccctcgacctattctcaaactttaaataggtaggacggtgcggctgctctgttgagccgcgccatggaatcgagagctccaagtgggccatttttggtaagcagaactggcgatgcgggatgaaccggaagctgggttacggtgcccaactgcgcgctaacctagaccccacaaagggtgttggtcgattaag

SEQ ID NO: 66486 - DNA, 180 bp, Glycine max
  Clone ID: 700836946H1
ggtttctgctgcaatggtgcctcaaccacaaacaacacctacaaagaattatgcttcttattagctatgcacttaaggaaatctaaataaatatttttcattctaggtgatgtatcatgtatgtaccaaaatattttggtacgtaagtcttttaaaaagtttgcatctcctctttggttt

SEQ ID NO: 66487 - DNA, 241 bp, Glycine max
  unsure (1)..(241): unsure at all n locations
  Clone ID: 700836955H1
cagaaacccatttgccagagctggaggcaaganatggaatttccataacaatggaagacattggaacttcacgtgtttggaacatgcgctatagatactggccgaacaacaaaagcagaatgtatttgctcgagaacactggtgactttgtgagagccaatggactccaagagggagatttcatagtgatatactcagatgtgaagtgtggcaaatatatgataagaggagtgaaagtgag

SEQ ID NO: 66488 - DNA, 247 bp, Glycine max
  Clone ID: 700836963H1
ctctctcaagggttccaaacacaaagccaccattcactgttggccaactcaagaaagccattccaccgcactgctttcagcgttccctcctcacttcattgtcctatgttgtttatgacctttcattggctttcattttctacattgccaccacctacttccacctcctccctcaccccttttccctcattgcatggccaatctattgggttctccaaggttgcattcttactggcgtgtgggtgat

SEQ ID NO: 66489 - DNA, 243 bp, Glycine max
  Clone ID: 700836976H1
gagagagattgtgaagtagaaatcggtgcaagaaattctccactttatctaaaaaaattcggtgagtttgtgaagacaaaaaatcactagctactcaaaaatggccacagtaggaaggaacgttgcagctcctttgctgtttcttaacttgatcatgtattttattgttcttggctttgctagttggtgcctcaacaggttcatcaatggccaaacttaccaccctagttttggtggaaatgg

SEQ ID NO: 66490 - DNA, 257 bp, Glycine max
  Clone ID: 700837006H1
atggtggtgacttttggtcccactgggctgacaactgaggttaagtctgttgagatgcaccatgaggctctcacagaggctcttccaggtgacaatgttggatttaatgtgaagaatgttgcagtcaaggatctcaagcgtggttttgttgcatccaactccaaggacgaccctgccaaggaagctgccaacttcacatcccaagtcattatcatgaaccatcctggccagattggtaatggatacgcaccagtcct

SEQ ID NO: 66491 - DNA, 258 bp, Glycine max
  Clone ID: 700837012H1
tttgcttcttcgagtttcacagccaagtcgtaaaagggtttcaagggatggaaaacatgcagagcttctggcaattgggtgatgaactccgtgggcactcaaaagcatcggaggatcacaagtggttaatggttgcctcgaaactggccgaacagacaagattgaagggggagcgtgtgaacaaccttgatctttcaaagggacccattgaaacaaggtcaagggataaatttgggttccaggaagagaacaaatttg

SEQ ID NO: 66492 - DNA, 259 bp, Glycine max
  Clone ID: 700837013H1
gtgcccttgaaaatgagatgctccttcggatcaagaaacagggacttgatttcactccaagaattctaatagttaccaggttaatacctgatgcaaaggggacaacatgcaaccagcggctagaaagagtcagtggtactgaccatactcatattttgcgagttccattcagatcagagtcaggaactctccgtaaatggatttcaaggtttgatgtgtggccttatctagagacttatgcagaggatgttgccagtga

SEQ ID NO: 66493 - DNA, 266 bp, Glycine max
  Clone ID: 700837016H1
cacaaaacaaaaagtttacgttacaaatcgcataataaccgtcctaagtttattgagagaattttgcaagtgtgagaaacatggcatctcgtcaaaacaacaagcaagagcttgatgaaagagcaaggcaaggagagactgttgtcccgggtggaactggtggcaagagcctggaggctcagcaacaccttgctgaaggaaggagcaagggagggcaaacaaggaaggaacagctgggtacagaagggtaccaggaaatgggacgc

SEQ ID NO: 66494 - DNA, 256 bp, Glycine max
  Clone ID: 700837022H1
cacaacgcaagcaacacagagaagagaagattggtcttccttccttctgaaacgagaatcgtaatactagctttctttctcaacctctgtaaccaagcaagcataaatcgaaatattgtatagaattaggggagaatccattttgttgtttctctccttcatttcatagtaataatctctcaaaccaatacagcggtaataattaacctaaccctaacagaaaaatggtgaaggttcgcttgaacaccgccgatgt

SEQ ID NO: 66495 - DNA, 257 bp, Glycine max
  Clone ID: 700837027H1
catcttttctgataatcttttctgggtttgaatggtgcatgtaaaatggtgtaggaattagagggacctgagtgaaacaagtgtggcggagttctctaacaaacatgacagagaagaatggcaaacaaccattgttggagaggaagtactacgaggactgcccaggttgtaaagtggatcaagccaaagagttgagtaagggacaaggtgtatcctttacaaatctttttatcatatgggtggtggtgctgtgtgcc

SEQ ID NO: 66496 - DNA, 256 bp, Glycine max
  Clone ID: 700837040H1
taacacttccttagttcaatatggggaagcccttcactctctctctttcttccctttgcttgctactcttgtcgagtgcatgctttgctattagctccagcaagctcaacgagtgccaactcaacaacctcaacgcgttggaacccgaccaccgcgttgagtccgaaggtggtttgattcaaacatggaactctcaacaccctgagctgaaatgcgccggtgtcactgtttccaaactcaccctcaaccgcaatgg

SEQ ID NO: 66497 - DNA, 78 bp, Glycine max
  Clone ID: 700837043H1
ttgagttagtagtgcgttcgtggtaaacgagaatcgaatcattcttgtttttggatattcaatcctatttttgggttt

SEQ ID NO: 66498 - DNA, 254 bp, Glycine max
  Clone ID: 700837059H1
tgagaagaggggttgaattaactgcttgcaagcatggcgaagagcaaggaagacataacctatgcaacatcacaagcaaggctttcagaagatgaagcagtgagagtggcctacgagcatggctcaccccttgaaggaggaaagattgctgactctcaaccagttgacttgttttcaagtgcacacaatatgccaaagagtggccaaacaacaatggattcaaacactagtgatcaatctcagatgcaacgtga

SEQ ID NO: 66499 - DNA, 251 bp, Glycine max
  Clone ID: 700837070H1
tcggtctctgcttgatgagctttgtaactttaataagaagggactcttagaccttggacaccctcttctcaatcgaatctttgagagcttcgtcaaagctgctggaataggagcggttcaagctgtgtcccgtgaggcttatttcacagccattgacggtaccggggctgataatagtggaggtttgccaccagaaatttcaagcgccaagaaaaatcgtttgccaggtcttaaaggagagaccagtaaca

SEQ ID NO: 66500 - DNA, 251 bp, Glycine max
  Clone ID: 700837072H1
ttgcggacaagcttctcaacatcctcggacctaggttccttgggccccttgcgataatgagaatttggagcttctgtttgttttatgtcatggctgagttgtgggggagtgtggttatttccgtactcttttgggggtttgctaatcagataactactattgaagaagcaaaacgattctacccactgttcggactcggggccaatgtagcccttattttctctggccggacagtcaaatacttttctaat

SEQ ID NO: 66501 - DNA, 253 bp, Glycine max
  Clone ID: 700837075H1
agaaagaatagtgaagaagaagtgagagagacacagacacagtgcggtttgcgactctagtactattaattaaacaaatacttctaccacacattcttttcttcttctctctctcccagggtttcacgttttcatgtgaaaatggattgagaatctctttctatttttatattttctttcgggtcaattagggttttttctggcgtgattctgaaagcttggatctggatatcttctttgcttctttgctatg

SEQ ID NO: 66502 - DNA, 262 bp, Glycine max
  Clone ID: 700837080H1
gtcacctttccgttcatttcctctgttttttcttcaaatccattgtttcgtggaaatcccgaaatttaaccatgcttctccgaaccgccgcctccgccgcttctgcttcgtccctctccctcttcagccctacctccgaacctctccgttcggttcccgctcgtggattggtggttcgcgccgcgaaaggatccacgaaccaccgcgccctaaccggcgtgatctttgaaccgttcgaagaggtgaagaaggagctcgatct

SEQ ID NO: 66503 - DNA, 250 bp, Glycine max
  Clone ID: 700837087H1
gagtgccagatccaaaagctgaatgccctcaaaccggataaccgtatagagtcggaaggtgggttcattgagacctggaaccctaacaacaagccattccagtgtgccggtgttgccctctctcgctgcacccttaaccgcaatgcccttcgtagaccttcctacaccaacggtccccaggaaatctacatacaacaaggtaatggtatttttggcatgatattcccgggttgtcctagcacttatcaag

SEQ ID NO: 66504 - DNA, 253 bp, Glycine max
  Clone ID: 700837133H1
aaaacatgtttattagagaaacactatgcagaagcagtgatgtatttgttgaacctgtctgtgtatgtagctctccaaagtcttgatgaagatgctcacagtcaataggttattctgcttaaaggttaatccagatgatttgtcacatgcagtgttttctaggatgctccagcatatacctggacagcatatactggcacacgagtgctagagtctacgactaaatctttcatgtgttaaatctatctttcaa

SEQ ID NO: 66505 - DNA, 245 bp, Glycine max
  Clone ID: 700837153H1
cttgctaccaacactgagcttaaccgagcttcgcaaagatgaatcgggaaaagttaatgaagatggccggttcggttagaactggaggaaagggtactgtgagaagaaagaagaaggctgtccacaagacaacaaccacagatgacaaaaggcttcagagcaccctgaagagaataggggtgaatgccatccctgctattgaagaggtcaatatctttaaggatgacgtattatccatttctaaa

SEQ ID NO: 66506 - DNA, 246 bp, Glycine max
  Clone ID: 700837157H1
caaaacacaaacacaagcacaaggacagtgatctctctttctatctttttgtctgtctctctgaacacgttgatggattccccctctcgcccctccgtcatcatcgtaggtgccggcatctccggtatcgcggcggcgaaggtgttggccgagaacggcatagaggacctggtgatcctggaggcttcggaccgcgtcggcggcaggatccgcaaggagagtttcggcggcgtgtcggtggagctc

SEQ ID NO: 66507 - DNA, 245 bp, Glycine max
  Clone ID: 700837159H1
tacatttcatcacaatcttcctcaatcatgtcttcagaaacaaaagcagaaacacaaactttgaccaccccctcttactcctcagatgttgacaatggtatagtgaaggatgtagtcctatggagaagaaagaaaataaatataagcgttcttgttgcggcaacagcggcatgggtgttgatggaagtgtttgaattcaacttcctcactctcatatcatgggtggccatactcggtcttgcttc

SEQ ID NO: 66508 - DNA, 244 bp, Glycine max
  Clone ID: 700837207H1
tttcatttgggattcaaactcaccatggtggacgccttcaaactttgcatcttccttcttgcgtcgatctgtgctttcctagtcttttctaatccagtgctgtgtagtgataaggaggacagtgtattcaagggaatcaacagctacaggcaaacacggagcctggtacccctgagccaagtttcgaaggcaacatgtttggctgatgaagttgcagaagaaatagagaagatgccctgtgaaa

SEQ ID NO: 66509 - DNA, 244 bp, Glycine max
  Clone ID: 700837237H1
ctggatttggcgttgtccatagggggtagtttcgggaaacacacggtggagaagcccgcaccggattccgaagcgcgtgtttcaaattcggatagtcgcgatggaatgcgcgtggtggtggagccgagcgacaagcacgacattcaggcgttaaggagaatggaggcgaaaaagaagacagagcagaagagggagcgcgtgagggaaccgtccgagcccgaattgaaacgggatttcaagaggg

SEQ ID NO: 66510 - DNA, 247 bp, Glycine max
  Clone ID: 700837251H1
cacacaactactacaagtacttccttacaatcaaaaccaacaacaactatggcaagttatcaaaagcactacgatgatcagggtcgcaaggttgacgagtatggcaacgttgagaagcaaaccgacgaatacggcaaccctgttcatgctgctagtgtcacctatgtagccaccagaactgctgctggtggttacagtgatgacattaataagcaacatgataccaccaatgcctacggcgtagaca

SEQ ID NO: 66511 - DNA, 250 bp, Glycine max
  Clone ID: 700837265H1
ggttcatttagcaagggagttgaacaatttcgacaagctttggagatttcaccacggtgtgtgcctgcacaatatggacttgctttggggctgcttggtttggcaaaagattgcattaacctaggagcatatcaatggggggcttcactgttagaggaagcatctgaggttgcaagggcaagtgcttattttttaagaaatatctcatgtatttggaaactacatgctgatattcagcttgcatatgcta

SEQ ID NO: 66512 - DNA, 247 bp, Glycine max
  Clone ID: 700837266H1
gacgtcggcgggggccccggaaagagttatcttttctgtttaacagcctgcccaccctggaaacggctcagccggaggtagggtccagcggctggaagagcaccgcacgtcgcgtggtgtccggtgcgcccccggcggcccttgaaaatccggaggaccgagtgcctcccacgcccggtcgtactcataaccgcatcaggtctccaaggtgaacagcctctggtcgatggaacaatgtaggcaaggg

SEQ ID NO: 66513 - DNA, 251 bp, Glycine max
  Clone ID: 700837303H1
ctactacaagtacttccttacaatcaaaaccaacaacaactatggcaagttatcaaaagcactacgatgatcagggtcgcaaggttgacgagtatggcaacgttgagaagcaaaccgacgaatacggcaaccctgttcatgctgctagtgtcacctatgtagccaccagaactgctgctggtggttacagtgatgacattaataagcaacatgataccaccaatgcctacggcgtagacactggtagacag

SEQ ID NO: 66514 - DNA, 248 bp, Glycine max
  Clone ID: 700837305H1
tggaaaggcacactgtctccaaacttattggttcacctcctggatatgttggttacactgaaggtggtcaattgaccgaggcagttcggcgtcgtccttacactgttgtactgtttgatgagattgagaaagcccatcctgatgtgttcaacatgatgcttcagatcctggaagatggaagactaacagacagtaagggcagaacagtggatttcaagaacacacttcttataatgacatcaaatgtt

SEQ ID NO: 66515 - DNA, 251 bp, Glycine max
  Clone ID: 700837307H1
catcaaaattatcaaatccacctcttccggcaacctcaatttctgctccctaaatcatgcttgcgtttcgatcgaagccttgttgcagttacaaggaaacagcgtccctcgcacttgcacacttcaggcacttggtgttcaactacgcacgcgccgggagctctcggtgccctccacgcgccggcttcggggttcggagaggctacatcgtcgttgcctcgttgggggacccacccgaagtctggtccggc

SEQ ID NO: 66516 - DNA, 251 bp, Glycine max
  Clone ID: 700837308H1
gaagaaacaactcctgttgcccctgcagttgctcaggaaagcagtgaagtcacccctcctcctgctgaagaaagcactgaagagcaaagtagtggaaatgttgaagaaaactctggcaatgaagatgcagctgaagagacccctgaaattaagcttgaaactgctccagcagatttccgttttccaactacaaatcaaaccaggcattgctttacccgatacgttgaatatcatcgatgcgtagtgccaag

SEQ ID NO: 66517 - DNA, 249 bp, Glycine max
  Clone ID: 700837319H1
caagagttgaaggaaatggctgaagcacaactacgagaccagcatggcaaccctgtcccactcaccgatcaatacggtaatccggttatcttaactgacgagcgcggtaatcccgtccaactcactggtgtcgctaccaccgctaccggcacagcaggttctgggtttgggtcctatggtaccggtgcttacggtggtggtgcaagtgcaaccaccgttgcagatcttttggcaacccaaccaaggagt

SEQ ID NO: 66518 - DNA, 125 bp, Glycine max
  Clone ID: 700837340H1
ctctgttgacaatgtcttcggaacagtttgtcgaagtatgaattcaaattctgccttgtagctgaacattttttgaggcatatgttgtgattggtcatcctcttaaatacatttattcaacatgt

SEQ ID NO: 66519 - DNA, 250 bp, Glycine max
  Clone ID: 700837349H1
catcacacacaactactacaagtacttccttacaatcaaaaccaacaacaactatggcaagttatcaaaagcactacgatgatcagggtcgcaaggttgacgagtatggcaacgttgagaagcaaaccgacgaatacggcaaccctgttcatgctgctagtgtcacctatgtagccaccagaactgctgctggtggttacagtgatgacattaataagcaacatgataccaccaatgcctacggcgtaga

SEQ ID NO: 66520 - DNA, 245 bp, Glycine max
  Clone ID: 700837370H1
cacaactactacaagtacttccttacaatcaaaaccaacaacaactatggcaagttatcaaaagcactacgatgatcagggtcgcaaggttgacgagtatggcaacgttgagaagcaaaccgacgaatacggcaaccctgttcatgctgctagtgtcacctatgtagccaccagaactgctgctggtggttacagtgatgacattaataagcaacatgataccaccaatgcctacggcgtagaca

SEQ ID NO: 66521 - DNA, 249 bp, Glycine max
  Clone ID: 700837395H1
cacgagtatacattggttagttacatttactcttgtccttcatgttctgtgcttccttttcctggcctaagcactgcgacattgacttttttgctttggtgtttggcagaataatacaaagtttgcattgtctatcgaacctgaaaacgaggaacttcaatcctatgctgcccaagtagcttaccttcgaagtaaaggcctgcccacgattcccaccacactgaagatggaaaaggcttgtaatccatt

SEQ ID NO: 66522 - DNA, 246 bp, Glycine max
  Clone ID: 700837403H1
tcgctaccctacttcaaagggtgctataatattcggggatgcacctaacaacatgcgacagtttcaaaaccaagatattttccacgatttggccttcaccccattaaccatcaccctgcagggagagtacaacgtgagagtcaactcaataagaatcaaccagcacagtgtgttcccactgaacaagatatcatccaccatcgtagggtcgacctctggaggaaccatgattagcacctcaactcc

SEQ ID NO: 66523 - DNA, 244 bp, Glycine max
  Clone ID: 700837404H1
caactttggaccttaaagcgccattgagggatgagacccagcaacagccaccgccactgccacagacacagacacaggtgtatgaacagcaatatccccagccacagtcacagcagctgccgcaattttttcaaccacatacatcagccccgagctaggcctgaacatgatgaaggacaacttgtacaagtgttattaacaaggcacaagaggtaaaagatctgtaaagcggttaggaagtagt

SEQ ID NO: 66524 - DNA, 243 bp, Glycine max
  Clone ID: 700837406H1
ccctgttcctgtgtgtgtgagtgaccgagtgagtttgtttttctcagctgatatatatggcgcttgatcgctccattataagcaaaacgacgtggtacagcgtcgtattatggatgatggtggtgctggtgagagtgcacggtgcagccgcgaggccgaaccggaaggagtgggactcagtcataaagttaccgactgaaccggtggatgctgactcggatgaagtgggaacacgatgggcgg

SEQ ID NO: 66525 - DNA, 244 bp, Glycine max
  Clone ID: 700837410H1
cttccattccaccatgccttctaatgatctcaaacatcgggtcaccaccactacagcaaccaccaacgacgtcaataggaccagcagaggcaaacgaatgctgatggccaaacgcggccttaagtcactcgccatagccgttgtcctccctctctctctcaccgccttatcagcttacataggctcctcctcctccagtgcccattacgcttcgagaagccccttctggttcccaccctcgtgg

SEQ ID NO: 66526 - DNA, 239 bp, Glycine max
  Clone ID: 700837428H1
atactctctagagtaattgcggaatctgctagaattttctaataatggcgaaagacgttgagcaggtcacagagcaaggtgaatactccgcgaaggactaccatgaccctcctccggcaccgttgatcgacccagatgagctcacaaagtggtccttgtacagagccgccatagctgagttcatagcaacactcctttttctttacatcaccgtgttgaccattattggctacaagaga

SEQ ID NO: 66527 - DNA, 239 bp, Glycine max
  Clone ID: 700837443H1
ccctcgtctcctctcaatcaagtttgaagctgagaaataatcatggccggtggtgcgaatttcgtgcagagggttctctcttacgtggtgaatgaagtggttgtcaatgggcttgccaacagccctgcatttcagaggtttgcagtgaggacatcaaaaagaattgaagatatttctaacaaagctgttcagaagaggcaggagctagctgagcagatcaaggacatctcaaaaaatat

SEQ ID NO: 66528 - DNA, 238 bp, Glycine max
  Clone ID: 700837445H1
acgaagcggacacgtcctgtgtcgcgaaaaggaagtcaaagaggtagccactgatctcggcgtcgatggagaacggcaacggcctgtctcctgcgagcttggcctccaccgatctcgacatcgatggagaacggcaacgacgtttggaggtaggtgtagttgcggtggagaatggtggtgacatggttcctatagaggccccactccatacccttcgtcctcgccttcttcctcttcc

SEQ ID NO: 66529 - DNA, 239 bp, Glycine max
  Clone ID: 700837452H1
agctggttattggggtggagtgaagccagcagcaaccggcatggaacattatgacactgccttggcatatccagtgcagtcaccaggcgtgctaggaaaccaaccagacattgtcatggacagcttggctgtacatggccttggcctagtgcacccaaagaaggttttcaatttctacaacgagctccatgcttacttagcttcttgtggagtagatggagtgaaggttgatgtgcaga

SEQ ID NO: 66530 - DNA, 238 bp, Glycine max
  Clone ID: 700837458H1
gagaatttaccgaaaggctttcagagctgaatatgaattcccagaatggatttctccgcaggccaagaatcttatttcgaatctcctcgttgctgatcctggcaagaggtattccattcctgatataatgagggatccttggtttcaagttgggttcatgaggccaatcgcgttttctattaaggagtcttacgttgaagacaacattgatttcgacgatgtggagaacaaccaggag

SEQ ID NO: 66531 - DNA, 237 bp, Glycine max
  Clone ID: 700837462H1
atcccaggcgaggagaaagatggaggggaaggagcaggatgtgtcgttgggagcgaacaagttccccgagagacagccgattgggacggcggcgcagagccaagacgacggcaaggactaccaggagccggcgccggcgccgctggttgacccgacggagtttacgtcatggtcgttttacagagcagggatagcagagtttgtggccacttttctgtttctctacatcaccgtctt

SEQ ID NO: 66532 - DNA, 236 bp, Glycine max
  Clone ID: 700837463H1
atttgaagcttcaaataagatcaaggttttgatggccaccaatcggattgatatcctggatcaagccctccttagaccaggacggatagaccggaaaattgaatatccaaaccctaatgaagagtctcggctggatattttgaaaatccattctagaagaatgaatttaatgcgtggcattgatttgaagaagattgccgagaagatgaatggagcatctggtgctgaacttaagg

SEQ ID NO: 66533 - DNA, 244 bp, Glycine max
  Clone ID: 700837465H1
gaagaaaagagaagagaagaagaagatggaggtgagtttatcctcaacatcatgtatacccttaagctcgaagttgaagcataagcatggccttttccactctcaaattcccattcacacagcttcaaccaaaaccagaagaaccaaacctttgtccgttgttaacgcctccagacaaaccttgtcttccaattggctcgtttctccacacgatttttctgcatccaccgcttccccatggctt

SEQ ID NO: 66534 - DNA, 237 bp, Glycine max
  Clone ID: 700837474H1
gttttgtgggtggctcctgaagacaaggcgagtttatggtcacaacttcattatgtttcgtgtaataatctggaaatgcaagaagcttatcttgtcaatctcgtaaatgtgttacgagaactgtatttgcacagtccagaggaagctcgccaattgagaaggaaagctctctctcgtattgaatggctgcaaaaagctgatgtgcctaccatagcacagattgaagagttccattcg

SEQ ID NO: 66535 - DNA, 236 bp, Glycine max
  Clone ID: 700837476H1
gcagaccgagctagctagctagcaagcaagcacagagatggaggcaaagcgaggccatgccctcatgtgcttggcacgtgtttcactcttcctctgcgctctaaccctatccgctgctcacggaagcaccacggttcaagacatcgcgagaaagttgaaactcggggacaacgagcttctgcgcacggagaagaagttcaaggttttcatggagaattacgggaggagctactcca

SEQ ID NO: 66536 - DNA, 234 bp, Glycine max
  Clone ID: 700837479H1
gtggatccagccagagataggactagcttgctcaaaatatggaacctgaacaaatgctctggagttgttggtgtatttaactgccaaggtgctggatggtgcaagatagagaagaaaacccgcatccatgatacatctcctggtacactcaccgcctctgtctgcgcctctgatgttgacctcatcacacaagtagcaggtgctgaatggcttggagatacaattgtttatgct

SEQ ID NO: 66537 - DNA, 235 bp, Glycine max
  Clone ID: 700837486H1
gttcaaacgtcagagagctgcagaatcaaagttgttggaaataaaagagcgaaaggaacgacgtgggcgttctactaaagcagctgccctgtccacccctgttgaggcaggagaggaagaagtattggatgatgatggggaagaagaaagagaggcttggatcactaccatatctttggcaatctgtaaggcactagatatgctggatatgttgaagaaagaggaagagatgctt

SEQ ID NO: 66538 - DNA, 230 bp, Glycine max
  Clone ID: 700837501H1
caaaatcacatttcctttcatttcttcgttatttcctaatcccaatggctcaagcactatcaacttcatcactactactatcacaaaaaacagggtcctacgtcaaaccacagaacaatgtaattgtagcctgcatggcctcttttccatcaaggaaggaatttccaaggctaggaagggtgagagctcaggcttctggtgataacaaagacaactctgtggaagtacaa

SEQ ID NO: 66539 - DNA, 109 bp, Glycine max
  unsure (1)..(109): unsure at all n locations
  Clone ID: 700837506H1
ctaatctccccccttcacccntgcgtacancgngtccgcatcntaacttnccancttctctccagatngnccatgcnnccgcattgctncggctgtacantgangcagc

SEQ ID NO: 66540 - DNA, 223 bp, Glycine max
  Clone ID: 700837512H1
gctaaagaatcatatgaagtagtgcaaacagtatctgaagcatgggatcgacataattctgatgatataaggttctgtttgctggtactaatcaatgcttatataaggccggttccagggttgaagaacttgggagctaaaggtttttccaccctaaactgtatgttgaagaactgtggtcgtcaggtacttaattgcttgttggatcccaattgtaggaaag

SEQ ID NO: 66541 - DNA, 228 bp, Glycine max
  Clone ID: 700837515H1
gcttacaatgatcagttcagggaacttgtgcaaacagggaaagacattgaaagtgcatattgggaacttgtagtgaaggatatccaagatgcttgcagactatttgaaccaatctatgatcaaacagatggtggtgatgggtatgtttctgttgaagtatctcctaggctcgctgatgacactgagggaaccatagaagctgcaaaatggcttcataaagtggttgat

SEQ ID NO: 66542 - DNA, 227 bp, Glycine max
  Clone ID: 700837517H1
tgaccctgcttcccaattttactccacagctctccccgccaatcagcttcccggctccgaattcgataagcctctattgaatttaaactcccaggcttcggagtttttgcataggttccgtggctccactggccttgaggagacatgggatgagatacagcgtgatggggcggctgcccaaatgcgccaactgccaccggggattcaacagccgccgttggatggga

SEQ ID NO: 66543 - DNA, 225 bp, Glycine max
  Clone ID: 700837520H1
actagctttgtgaaacttcttttgcaggctgttctgggtacaattgcgattattcttggtgtgacaaagggagtagatgattggtaatcttcatgccaagagttgtaaagtttgctagaccagtgcatgtaaagttaatcagttgctggaaattatgtctgagttcggtttatgtattcattgaaaactgctaccatgtctaatatgtattgtttgatttattac

SEQ ID NO: 66544 - DNA, 225 bp, Glycine max
  Clone ID: 700837529H1
aagacccacgtcttttttgttgtcgtggcctcaacgcaacatcattatcactgtcactataaaaaccctacttggctcttttcttcacttgttcactttcttccaacctctaacctacctctttttcttctctctcaacaacttcaccttcttcctcctcgatcatgtctcacttcaagggtaagtaccatgatgagcttatcgccaatgctgcgtacattggca

SEQ ID NO: 66545 - DNA, 222 bp, Glycine max
  Clone ID: 700837552H1
tgctgattttatcatcaccagtacataccaggagattgcaggaacgaaaaatactgttggccagtatgagagccacgctggttttactcttcctgggctctatagggttgtccatggcattgatgtttttgatcccaagttcaatattgtctctcctggagctgatatgtcaatatatttcccctactctgaaaagcagaacagacttacagccctgcatgg

SEQ ID NO: 66546 - DNA, 223 bp, Glycine max
  Clone ID: 700837556H1
tgccttctctctccgttttcccatcactcccatcgcttcaaaaccctaacttgagccaacccaatttcttcaatttccgcttaccgtcgctctgtcaccgtcccctcgtcaaaagcactgcaacttttcaccgtagaatcctctgcaaagccttcagagattctggcgaggacatcaaggcggtgctcaagtccgacgacggtggtggcagcggcgacggcgg

SEQ ID NO: 66547 - DNA, 220 bp, Glycine max
  Clone ID: 700837558H1
aggagcgcgtggttgttatcgtgggcgacgagtctgctgcgcaggttgcgttgattagggttttggagagaacgatggatgaagaaactaagaattcgacagtgtcgtgtaaattggtggcccccagctatcaggttggatgtgttctcggccgtggaggcaagatcgtcgaaaagatccggcaagactctggggcccacattagggttttgcccaaaga

SEQ ID NO: 66548 - DNA, 225 bp, Glycine max
  Clone ID: 700837563H1
aagactttgggaattttttggaaagctctaacactttaaccatgattttaatattcaatcaacatccccatgataagtttggtctaagactagaaaaaggagcatcatcttctaagtcacaatttgtcttagacaaatgtgacttctatggtaagtctggaaatttcaagtttagatgcatccataagaagaaaaaaatgtctaagggtactaatgcctatgggc

SEQ ID NO: 66549 - DNA, 224 bp, Glycine max
  Clone ID: 700837565H1
cgcacggcggcggcgacagaggaaccacggcggagtccggcgacgcgtcggcggcggagggggagaaggtgttcaagggaagtgaggtgttcggtgatacgtcaccaaattatttaaagacgattttggccctggcgctgtggctcggaaccattcatttcaacgccgcgttggtgctcttcgcaatcttctttctctctctccacaaagcattcttacttttc

SEQ ID NO: 66550 - DNA, 223 bp, Glycine max
  Clone ID: 700837566H1
caagtttttggatgagaagcttcgtgcaggtaataagggtacttctgaagaggaactggaggctacacttgataaagtcctggtgttattcaggttcattcagggcaaggatgtatttgaagcattctataagaaagatcttgctaaaagactgcttttaggaaagagtgcttctattgacgctgagaaatctatgatctccaagttgaagactgagtgtggc

SEQ ID NO: 66551 - DNA, 221 bp, Glycine max
  Clone ID: 700837569H1
caagtacttccttacaatcaaaaccaacaacaactatggcaagttatcaaaagcactacgatgatcagggtcgcaaggttgacgagtatggcaacgttgagaagcaaaccgacgaatacggcaaccctgttcatgctgctagtgtcacctatgtagccaccagaactgctgctggtggttacagtgatgacattaataagcaacatgataccaccaatgcc

SEQ ID NO: 66552 - DNA, 220 bp, Glycine max
  Clone ID: 700837573H1
atttaacatatatatatccgtaattatcccttcatttttccatcttctttccatcgcgaggacagcaatatccactgcatttcccttttgggtgcagaatgggatcccttgatctgaaatggaattcatcgggatgcatggttttgaagaaggtagagtcaactaaaactaaaggggaagatatgtcttccctgtgtggtagttcagcctatctgtacaa

SEQ ID NO: 66553 - DNA, 224 bp, Glycine max
  Clone ID: 700837579H1
gcgaggagaaagatggaggggaaggagcaggatgtgtcgttgggagcgaacaagttccccgagagacagccgattgggacggcggcgcagagccaagacgacggcaaggactaccaggagccggcgccggcgccgctggttgacccgacggagtttacgtcatggtcgttttacagagcagggatagcagagtttgtggccacttttctgtttctctacatcac

SEQ ID NO: 66554 - DNA, 216 bp, Glycine max
  Clone ID: 700837590H1
ggagaggttggagcatttggtgaaggctgggttgaatgttgtggtgttggatagttctcaagggaactcaatttatcagttggagatggtgaagtatgtgaagagggtgtaccctgagcttgatgtgattggggggaatgttgtgactatgtaccaggctgagaatctgattcaggctggggttgatgggttgagggttggaatggggtctgggtc

SEQ ID NO: 66555 - DNA, 251 bp, Glycine max
  Clone ID: 700837603H1
ggctctttcacatgcagctctaaattgtctgaaaatacactggtttggaatgtctttctttgtgttatggacaagtttatatgtcatttttcagtggactattcatgctttcatctggatttggtggccatacccattccttgatgtgtcattgccctcctctccattatggtacttgttggttgcattgttacatattccatgttatggcctgtttaaactgattgtggatgtgaaatattatttcttgt

SEQ ID NO: 66556 - DNA, 248 bp, Glycine max
  Clone ID: 700837606H1
tcaaacttgagttcaaacactctcatcttcttattcttctgctttcactctctgactcaatcgttctaatccacaaaaaatgaccttaaattacaacattgccctcgccttctctgcggtgctcacgctgctcctctttcccctactgaccgtagggagctcgtggaggagcagccactagtcctcaaataccacaacgaccagctcctgaagggccgcatcaccgtcaatctcatctggtacggcac

SEQ ID NO: 66557 - DNA, 245 bp, Glycine max
  Clone ID: 700837609H1
gagatccagtagcatctgcatattgccgtctttatatggctcactgtgctcagaagctgccttcacatgatataggctatcttgttacatgtgtcaatgacatcagagttgttttgatgcaaatcttgtcagccaatgaaagaactcataaaaatgttaaactcaacaaaaaattgcaagtcagtctgatggaaccaaccattgagtatattatgaagtgtatatttactgggttgtctcagtat

SEQ ID NO: 66558 - DNA, 251 bp, Glycine max
  Clone ID: 700837616H1
gttttctggttgcggttggccaccttccattatacttgagggagattcttcaagggcacaagctaccttagaggctgaaattgcggctgcgtataatttgaattctggcatttgctgcatctgaatatctctgaaactttgtaagtcaacatggctttacagaacattggtgctgcaaacagtgatgatgccttctacaggtataagatgcctaggatgattaccaaaattgagggcagaggtaacggcat

SEQ ID NO: 66559 - DNA, 253 bp, Glycine max
  Clone ID: 700837617H1
ggctttcataagggacttgaggactgaattcaaaggtttggatgatgtctatgtgtggcatgccctttgtggctcgtggggtggtgtgaggccaggagccacacacttgaattccaaaataacaccttgcaaactctcccctggccttgatgggaccatgcaagatcttgctgtggttaaaatagtggaaggttccataggacttgttcatcctgatcaagctaatgacttgtacgattccatgcactcttat

SEQ ID NO: 66560 - DNA, 247 bp, Glycine max
  Clone ID: 700837619H1
cgctgatatatgtgaaactctatacataccagatctttagggcgttatcttatattcatcgttgtattggagtctgccatcgggatatcaagcctcaaaatctattggtcaatccacacactcaccaggttaaattatgtgactttggaagtgcaaaggttttggtaaaaggcgaaccaaatatatcatacatatgttctagatactatagagcacctgagctcatatttggcgcaactgaatatac

SEQ ID NO: 66561 - DNA, 244 bp, Glycine max
  Clone ID: 700837640H1
ccaactatggcggcccctgttgtagtgtctacctctgtatctgtgtgttccaactatggctatcatcgtcgtccatccctttccgctctctcttattattcgaactcaatctccaacgcaaacctaaaactgagttcgcaatgtttctccaacttgcttcgttcgaattcaaaagccccgatttattgtcgcaagtttgttgctcgcacttcaattggagagaatgagagtgagagtgagagtg

SEQ ID NO: 66562 - DNA, 245 bp, Glycine max
  Clone ID: 700837646H1
ctttgaacactcatcaccatggccaagcttgttctttccctttgtttccttcttttcagtggctgcttcgctctgagagagcaggcacagcaaaatgagtgccagatccaaaagctgaatgccctcaaaccggataaccgtatagagtcggaaggtgggttcattgagacctggaaccctaacaacaagccattccagtgtgccggtgttgccctctctcgctgcacccttaaccgcaatgccct

SEQ ID NO: 66563 - DNA, 250 bp, Glycine max
  Clone ID: 700837649H1
ggaaaaggttcacatcagtattgtggttattggccatgttgactctgggaagtccactaccactggccacctgatctacaagcttggaggcattgacaagcgtgttattgagagatttgagaaggaagctgctgagatgaacaagaggtctttcaagtatgcctgggtgcttgataagcttaaggctgagcgtgaaagaggaatcacaattgatattgccttgtggaagtttgaaaccaccaagtactat

SEQ ID NO: 66564 - DNA, 245 bp, Glycine max
  Clone ID: 700837652H1
cacacaactacaagaaagaacttccttataaccaaaaccaacaacaactatggcaagttatcagaagcactacgatgatcagggtcgcaaggtcgacgagtatggcaatgttgagaggcaaactgacgaatatggcaacccggttcatgccactagtgtcacttatgtagccaccaaaagtgttggtggctacaatgatgacgctaataagcaacatgatattactggtgtctatcccgagaaag

SEQ ID NO: 66565 - DNA, 242 bp, Glycine max
  Clone ID: 700837655H1
ggcacatcctggtgacaatgtgggattcaatgttaagaatgttgctgttaaggatttgaagcgtggttatgttgcctcaaactcaaaggatgaccctgcaaaggaggctgctaacttcacagcccaagtcatcatcatgaaccaccctggtcagattggaaatggctatgcccctgtcctcgactgccacacttctcacattgctgtcaagtttgctgaactcatgaccaagattgacaggc

SEQ ID NO: 66566 - DNA, 239 bp, Glycine max
  Clone ID: 700837657H1
gttgtattgaaattttcacaagaggaatttcttacagcttggtcaactcaggtgcgtcctgcaacaactctgttggctgatgggtgtccatatttgtatgctatggtgcatgatagttcagtgtctacaataccaggtgattttgtcattggtgttaagttgacaaccataaacaatatgtgtgcatatgggcttaatcctggtatttcaggttctcgtcttttgggcaccattcctca

SEQ ID NO: 66567 - DNA, 239 bp, Glycine max
  Clone ID: 700837673H1
gtgggtggctcctgaggacaaggcgagtttatggtcacaacttcattatgtttcgtgcaataacctggaaatgcaagaagcttatcttgtcaatctcgtaaatgtgttacgagaattgtatttgcacagtccagaggaagctcgccaattgagaaggaaagctctctctcgtattgaatggctgcaaaaagctgatgtgcctaccatagcacagattgaagagttccattcgatgcaga

SEQ ID NO: 66568 - DNA, 242 bp, Glycine max
  Clone ID: 700837677H1
agtttaccgtatgttattatagtttccaaaggcacgcagcgagtttaggcgcggcgggatcatcacgagattgcaaaatgaagttcaacattgcaaatcccaccactgggtgccagaagaagctggaaatcgatgacgacctgaagcttcgggcattttgggacaagaggatctcccaggaggtccttggtgacgccctgggtgaggagtttaaaggatatgttttcaaaatcactggtggg

SEQ ID NO: 66569 - DNA, 241 bp, Glycine max
  Clone ID: 700837684H1
tgccattttcctttgagtgcaagattaattaatgtctgattttatgtattggtgtgttgctgcagacataccctaatcctttgcaagacaaccctgcttattcagttgttaagcagtattttgtgcatgttgatgacagcgttcctcaaaaggtcgttgttcacaaagatggtgcaagaggggtacattttaggcgtgctgggcctcgtcaaaagatgaagttcaggctgctattgttact

SEQ ID NO: 66570 - DNA, 240 bp, Glycine max
  Clone ID: 700837687H1
aaacaaagaaaggaaataattgatctttgaaaatgcagggaggaaagaaagctggagagtccatcaaggaaacagctgcaaacattggtgcttctgccaaggctggcatggagaaaaccaaggccactgtccaggagaaggcagaaagaatgacggcacgtgatccgatgcaaaaggagttggcaacccagaagaaagaggcaaagatgagccaggcagagctggacaagcaggcggcgc

SEQ ID NO: 66571 - DNA, 247 bp, Glycine max
  Clone ID: 700837696H1
ccttggtaccgaagccatagcccttgggcgcgtaggagatgatttttggtgcactgatccctctggagatccaaatcacgtattggctccaagggtgtcacatggtgcactgtgcctacaacagcttgtggatggggaattttattcagccggattgggacatgttccagtccactcacccttgtgccgaattccatgcagcctctagggccatctctggtggaccagtttacgttagtgattgtgt

SEQ ID NO: 66572 - DNA, 54 bp, Glycine max
  unsure (1)..(54): unsure at all n locations
  Clone ID: 700837708H1
ccaatttaggngttaatnatttattctncattgcncnaattaaatagccttact

SEQ ID NO: 66573 - DNA, 248 bp, Glycine max
  Clone ID: 700837715H1
aaagactttctctttacaaattttgtaactttcaagactcagctaataaacatcaaaagatgtctctgattccaagtatttttggtggccgaaggagcaacgtgttcgatcctttctcccttgacgtgtgggaccctttcaaggattttcattttcccacttctctttctgctgaaaattctgcatctgtgaacactcgtgtggattggaaagaaaccccagaagcacacgtgttcaaggctgatatt

SEQ ID NO: 66574 - DNA, 253 bp, Glycine max
  Clone ID: 700837732H1
agggtcctagttggcatgactcaacacttcatgaaaagttattctgatcttctcatcaggacgtgccacaggcgcggcgtgcatgctatgggaggaatggcagcgcagattccaatcaaagaagatccagtggctaacgaggtagcactggaacttgtaaggaaggacaagcttagagaagtgaaggcagggcacgatggaacttgggctgcgcaccctggtctcattccagcctgcatggagattttcaaca

SEQ ID NO: 66575 - DNA, 240 bp, Glycine max
  Clone ID: 700837735H1
tagcgatgcggatgaggcgccactcgatgtttccatttgcctgcatgcctttggtattgtggggtgtggttcgtttagtggtgtcaagtcttgcgaacgtgagggtgcatgagtggtaatcgggatgtttttgttgcacggctccatgcttgcgcatgcaacgtgtgacatgcatccttttcattgtcaccttagccttcgtggcttaggtgctgacgattggttcctgtgttgcctacc

SEQ ID NO: 66576 - DNA, 240 bp, Glycine max
  Clone ID: 700837737H1
tcatcactacctctgcatttttctctcgctctctgccttccatcaccctcgccatttcccttcccaagatagtagaagatggcagacgctgaggatattcaacctcttgtttgtgacaatggaacaggaatggttaaggctggttttgctggagatgatgccccacgtgctgtgtttcccagcattgtaggtcgtcctcgtcacactggtgtgatggttggcatgggccaaaaagatgca

SEQ ID NO: 66577 - DNA, 238 bp, Glycine max
  Clone ID: 700837753H1
caagttacaagggtgctgaagctcctgaagataggaataaggaagtgaaccttgatgtggaccaatttattaaagacatggaatcaataatgatgcattcagacggtgaagttgccaacagtaatattgaagaaggatcgtcgtctgatctggactttgataattctgatgacagtgatattgttgaattggatgaggataatgaggacagagaggatattttcatgcggtcctattc

SEQ ID NO: 66578 - DNA, 245 bp, Glycine max
  Clone ID: 700837763H1
gatcaatgcatatcctagcgtggaccttgtgatggacaagcccaatggtcctgtttggagaatctctggtgaggacttgatggtgcaggcacaacctggggtcacgtgtttgggtgttatgaatggaggaatgcaacctagagctgaaattaccttaggggcacgtcagttggaagagaacctggtggtgttcgatcttgcaaggtcaagggttgggtttagcacctcatcactgcactcgcatg

SEQ ID NO: 66579 - DNA, 238 bp, Glycine max
  Clone ID: 700837768H1
ctttgtgtctttcatccatcttattacacctcagttttcctggctcccagaactttctttcatactctctgttgccttgtgccattcatcaatagttaaggtcttaaggacactaaatcttatggaggtgaccaaccttgtagtcttgccagcagttttggcattctttgtcctttgtctatatttcatcactaaagttgttagactcgggaaacatccaaaccttaatcttcctcct

SEQ ID NO: 66580 - DNA, 239 bp, Glycine max
  Clone ID: 700837776H1
ggttggaggaggagtcttcatatccctacactggggagagaggtgaatgcaagtttgatccagagaaaatagcagttaagatcacaaatttcaccaatatccctgctgatgagaaccaaattgccgcatatttagtaaaaaatggtccacttgctatgggcgtgaatgcaattttcatgcaaacatacattggtggtgtctcatgccctctcatatgtagcaagaaaaggctgaaccat

SEQ ID NO: 66581 - DNA, 238 bp, Glycine max
  Clone ID: 700837789H1
cggctgaataccaagcggagaagatgagtcaggagcagccacggcgtcccaaaggccaaaaccccatcaaatacggcgacgtttttgtcgtctccggcgaccttgcacagaagcccgtcgcaccggaagatgctgccatgatgcaaagcgcggaaactcgagtgctcggacaaacccaacccggcggagcagcttccgtcatgcaatctgccgccaccaggaatgaacaggctggcct

SEQ ID NO: 66582 - DNA, 240 bp, Glycine max
  Clone ID: 700837794H1
caaggttatcaatgacaggtttggcattgttgagggtttgatgaccactgttcattccatcaccgctacccagaagactgttgatggaccatcagccaaggactggagaggtggaagagctgcttcatttaacatcattcctagcagcactggagctgccaaggctgttgggaaagtcctccctgctttgaatggaaaattgactggtatggcattccgtgttcccaccgtggatgtctc

SEQ ID NO: 66583 - DNA, 247 bp, Glycine max
  Clone ID: 700837796H1
caactactacaagtacttccttacaatcaaaaccaacaacaactatggcaagttatcaaaagcactacgatgatcagggtcgcaaggttgacgagtatggcaacgttgagaagcaaaccgacgaatacggcaaccctgttcatgctgctagtgtcacctatgtagccaccagaactgctgctggtggttacagtgatgacattaataagcaacatgataccaccaatgcctacggcgtagacactgg

SEQ ID NO: 66584 - DNA, 230 bp, Glycine max
  unsure (1)..(230): unsure at all n locations
  Clone ID: 700837867H1
tntatatttccacattccangtgaaccttctagaactataatagaaagaaaccttccattccatggctcnnccgctcgaacataacggcgtttccatnagcggtgactcnnagagatccattcccacgccgtttctcaccaaaacttaccagctcgtcnncgatcacaccctcgacgatgttatttcgtggaacgattctggatcgtccttcatcgtctngaacaccacc

SEQ ID NO: 66585 - DNA, 239 bp, Glycine max
  unsure (1)..(239): unsure at all n locations
  Clone ID: 700837919H1
gtttcaatgcttgttctgaagaaatttacagggtntcagacagcttggaaggtaccggatgatcagcttcgggaggagctgcggntatctatatcagagtnggtgattcctgcatatcgctcgtttgtggganngtttaggattcagttacagggaaggcatgtgncggaagtacattaagtctacaccagaggatntagagacctatctnttagatttatttgncggatccccggctg

SEQ ID NO: 66586 - DNA, 260 bp, Glycine max
  Clone ID: 700838001H1
gtgggtgacttgaaacggcatgcggttcattatgacaggagtggcagatcaaagggtacagcagaagtagtattttcacgacgagctgatgctgtatctgctgtaaagagatacaacaacgttcaattagatgggaaaccaatgaagattgaaattgtgggaacaaacatttccacacctggtgtagctcctgctcctaacggagctattggaaattttaatggagttcctcgaagtggacaaggaagaggtggggcatt

SEQ ID NO: 66587 - DNA, 255 bp, Glycine max
  Clone ID: 700838004H1
gtgaaggatctggacgtgaagcggtacatgggtcggtggtacgagattgcgtgcttcccgtcgaggtttcaacccagtgacggcaccaacaccagagccacctacactctccgagatgacggcaccatcaacgttcttaacgagacttggagtggcggcaaaagaggtttcattgagggcactgcttataaggctgatcccaacagcgacgaggccaagttgaaggtcaagttctgggtgcctccctttttaccc

SEQ ID NO: 66588 - DNA, 254 bp, Glycine max
  Clone ID: 700838005H1
gttcattcccaggttgtgatggcagcagcaccagcagctaccttcgctattggaaccaccggttccctcggccaaagaggaagctcgcttcctcaatcaaagtcctttgggttgaaattcaactctctgaatcatttgaagagcttctgtggcctcaaggccatgtcatccgtgagatgtgagtcggaatcctccttcttcggtaacaaaaccggtgctgctctacgggcgtcttttgcatccaaagctcaaaa

SEQ ID NO: 66589 - DNA, 251 bp, Glycine max
  Clone ID: 700838011H1
cggcatttgattccaagagttttagaccagcatggattgagttctgagtttcttcagattcctgaggcaatggtgaagcttgttattcagagatatactagggaagctggtgtgcgaaacttggagaggaatctagctgccttggctcgagctgctgcagtaagagttttagagcaagaacaagtagttccattaaacaaagggatgcaaggacttgctacaccacttgtggaaaacagacttgctgatgg

SEQ ID NO: 66590 - DNA, 250 bp, Glycine max
  Clone ID: 700838013H1
ggtaggcaacatgggaacatcggtggcccttactatggaaccaacaccgcagacaccggtactggtcccagaagtggaaccacgggcggcaccggttatggaggcactggtggcactgattatggaacaactggtggcactggttatggaagtggaactgggtatggagtcaacactgggggtgcgcacactgaagcaggatataggaaggaacatcgtcagcatgaccaatctcatggtgatcagaacg

SEQ ID NO: 66591 - DNA, 253 bp, Glycine max
  Clone ID: 700838014H1
cacaaactcaacttgctcgacgccaccgatgccccccaatcctgggatgagattagcaaaacactccaagacctcaaatccccctccacctcaccccaacaacaacctcaacctccacaaaagaccaagtccttccacacggtggaagagctagacgccaagctcaaccccaagcccgagcccaagcccaatccagaattgaaaaagcccgctgatcagataattaacagtagcatagttaccgagccagtcc

SEQ ID NO: 66592 - DNA, 255 bp, Glycine max
  Clone ID: 700838019H1
ctctctcacatcacgtcacatcacatataaccatcttcttctttgaaaccttaaattgtgctcaaaaatactatatagttaattaaggttgtgtgaaaatgcgaatgagttgtaacggatgtcgtgttctgcgcaaagggtgtagcgaagattgtagtataagaccgtgtttgcaatggatcaagaacccggagtcacaagctaatgcaactgtttttcttgccaagttctatggtcgtgctggcctcatgaacc

SEQ ID NO: 66593 - DNA, 253 bp, Glycine max
  Clone ID: 700838021H1
ggttaagcctttaatttgggtggaagcaaatgttgaaaagcattcaaagagtcggattgagattatggtaaaagctaggagtcaatttaaggaacgtagcactgccacaaacgttgagattgagttgcctgtgcctgttgatgcaaccaatcctaatgttcgaacttcaatgggatctgcatcatatgcacccgaaaaagatgcgttaatctggaaaattagatccttccccggaggcaaggagtatatgtta

SEQ ID NO: 66594 - DNA, 255 bp, Glycine max
  Clone ID: 700838024H1
cacacaactactacaagtacttccttacaatcaaaaccaacaacaactatggcaagttatcaaaagcactacgatgatcagggtcgcaaggttgacgagtatggcaacgttgagaagcaaaccgacgaatacggcaaccctgttcatgctgctagtgtcacctatgtagccaccagaactgctgctggtggttacagtgatgacattaataagcaacatgataccaccaatgcctacggcgtagacactggtaga

SEQ ID NO: 66595 - DNA, 250 bp, Glycine max
  Clone ID: 700838030H1
attattttaggaacagcaatggtgaaaatgctgctattgtgaaaccaactgatgaggagccttatgcaccaaacaatcctaaaggttttgttggcaaagcccttggacaaccaggactgaaacgttcagtgagggttggggagacaggtttaagagaagttgcagcttaccttcttgaccatgatcattttgccaatgtgccctctactgcccttgtaaaggtcacacattctatttttaatattaatga

SEQ ID NO: 66596 - DNA, 209 bp, Glycine max
  Clone ID: 700838053H1
tcacaatttttattttttaatgatactattttgttattgttattgatggtatcatcatcgggaaaaagcagagaaatggatagggtgaagggtccatggagcccagaagaggacgaggccctgcgggcgctggttcaggcccacgggcctcgaaactggtcggtgataagcaagtccattccggggagatccgggaaatcgtgccgctt

SEQ ID NO: 66597 - DNA, 253 bp, Glycine max
  Clone ID: 700838055H1
cctttttctggttattaacagagtcataaaaaaccaaagttttctattctctgtagctcacatggtgggctaagaatatctgactttggggtggaaagtatggttggcaaggagagtttgagaactgaggtcttgaacttgagctttgagaagcttatgatggttgaatgtggtggaaatagtgggaaaggagtgaacattaaagctggtgtgatcacggagtggaaggatattccagttgagcttttgatgc

SEQ ID NO: 66598 - DNA, 248 bp, Glycine max
  Clone ID: 700838059H1
gaaacttcctcgtcgcaaaatttttgacaaacctaagacgcgctgcttcactattctccctatggagtttaatcttgtggttcgtcagaagtttttaaattttgtgaggttcattatgaagaaaagggacaagcttagttgtcaagttggaatcaacccatactccatggaatggactggtttggccaatagattactgagtaagggcaacgatattctgtgttgcgattatgctagttttgatggtt

SEQ ID NO: 66599 - DNA, 255 bp, Glycine max
  Clone ID: 700838064H1
accgttcagggattgaaaaaagaattcagctataacaagatacttaaagatgttaagaaagagttctgttgcaatggaacagttgttcaggacccagaactaggacaggttattcaacttcaaggtgatcagaggaagaatgtttctaccttcctggtccaggctggtatcgtgaagaaggagcatatcaagattcatggtttctgagcggttggagtctcaagtgtcaagtcttacgtgcctgcctatgtgttg

SEQ ID NO: 66600 - DNA, 250 bp, Glycine max
  Clone ID: 700838070H1
cagcttcaatcctcgaccacaccacccatcagcgacatgcttcctctttcccttctcaagactgcccaaggccaccctatgttggtggaactgaaaaatggggagacatataacgggcatttggttaattgcgatacatggatgaacatccatctccgagaagtcatttgtacatctaaagacggagatagattttggaggatgcctgaatgctatatacgaggcaatacaatcaagtaccttcgagttc

SEQ ID NO: 66601 - DNA, 130 bp, Glycine max
  Clone ID: 700838071H1
gctattgttcttggatgagcacaggggaaattcatttggattttataaaaaaatacaaaagaaatttacacacataacataataatgacatttattactcagatagtaatcactcatctttatgtgctta

SEQ ID NO: 66602 - DNA, 250 bp, Glycine max
  Clone ID: 700838073H1
aagaaagatgctatgtacaagctatagtacaatactacaactggtatagctacataaaaataaagaataataaataataactaagatggctattatgtcaacaagagaatccaacattccaatttcaaatattgtttactctttcataattaggaaaatgccaatacattattgcaggccttgattcttgatagatatagcagtcacagtggggcgtttctcctcttttactttccttctcatttttccc

SEQ ID NO: 66603 - DNA, 246 bp, Glycine max
  Clone ID: 700838075H1
gacggagcggacggaggaggacgagtgtttgatactggcgagtgatgggttgtgggatgtggtatcgaatgagaccgcatgtggggtggtgaggatgtgcctcaaggcgcagaagccgccggggtctccggggagtgacgtggcggctgacggttccgaccgtgcttgctccgatgcgtcgattctgttgaccaagttggcgctggcaaggcatagttcggataatgtgagcgtggtggtggttga

SEQ ID NO: 66604 - DNA, 247 bp, Glycine max
  Clone ID: 700838076H1
cggccaactgttccaaggaagtttgataaggacaagcagttcacatcagaaagaatgggaaggcaactgtcatctttggggcttgatcccagtttggcaattaagagaatgcacagcagatctgtctctagaggtcggaaaagggatagatcgcctgaaacaagaagtgctgatggtatggatactgatggtgacacacctagcaaaaaacagcgtctgagtagatcactgtcacggtccaggtcag

SEQ ID NO: 66605 - DNA, 252 bp, Glycine max
  Clone ID: 700838080H1
aggaaggcataattggcactccacagcttacggactcattagagataccggaaaatgtggaatttctgggtcaaaagattgaccttacacttttcaaaggcatccttacctctgtccaagacacagccacatcggtagtgaaaacaatttcaagtaggcctcccttgaagatcccaatttccaacagcaatgctcagtcctggttactcaccacatacctcgacgaagaattgcgtatctcaaggggcgatg

SEQ ID NO: 66606 - DNA, 248 bp, Glycine max
  Clone ID: 700838089H1
gcatttattagataaaaggtcaacacaggctctgcctgttgctttgatgattcatgataactcgtcggatcgcacggcctttgtgccggcgacgcatcattcaaatttctgccctatcaactttcgatggtaggatagtggcctaccatggtggtgacgggtgacggagaattagggttcgattccggagagggagcctgagaaacggctaccacatccaaggaaggcagcaggcgcgcaaattaccc

SEQ ID NO: 66607 - DNA, 246 bp, Glycine max
  Clone ID: 700838091H1
gcagcataagcatttcagaaggtagcacaagagagaagaagaaaggtcgcattgggaccaattctttcatccccttcttcagagagccaagtagcattggagactttcaaagggggatcaacaattactggcattaaggccttccaatcctcttaagcgatccaaaattccaccttatgtccctccaagagctaccttgtgatctggaggatcagagatttgtttagcatgcttcaagtgctcaag

SEQ ID NO: 66608 - DNA, 253 bp, Glycine max
  Clone ID: 700838096H1
agaggagaacacaaacagcagcgtcttggtttgtgagagagacagaggcacagagagaaaatggtttcggggtcaggaatctgcgcgaagagggtagttgtggacgcgcggcaccacatgctggggaggctggcatcgatcgtggcgaaggaacttctgaatgggcagaaggtggtggtggtgcgctgcgaggagatttgcatctccggtgggctcgtcaggcagaagatgaagtacttgcgtttcctccgca

SEQ ID NO: 66609 - DNA, 272 bp, Glycine max
  unsure (1)..(272): unsure at all n locations
  Clone ID: 700838102H1
tgttatcacctataaatactaatttgctgtctcctaagaatgttgagcatcctctttttcaggcttcttttggtgtctctccttctggaaggatgtcancaagaagtgttgaaccaatctctccaatgagtgctcgtttatctgcatttgctcagcgagagaaacagcancaacagctgcgcagtgttagttcaagagaccttggtgccaanagtccngcctcanttgttgggctcccctgcaaacccttggncaaagtggggttntnnttt

SEQ ID NO: 66610 - DNA, 267 bp, Glycine max
  Clone ID: 700838109H1
atgcagcctggtttcatgttgaaccaaccttattcttcccagcccctcaattacagtgccatgggaacccttttagctcaacagcaattcctggcaacaatggctaatttccaacaccttagtaatgtcaacatgcaagatgatggtgttgctcaaatggctggacccaatggaagatcacctttgccagacatatttcaaccaaattttcaaactcaaactcctagctcaatgatcaacacttcaaggaaagaagaaactaaagca

SEQ ID NO: 66611 - DNA, 161 bp, Glycine max
  Clone ID: 700838110H1
tgaagctccagaaagggaatttgtggttgcaatttagctgtgtgggtttgctttacaaaattgtttagtgaactttaattatgtgtttactttgttatgtttatatttgactcactaatatatttgtgttataaaggttgtccatgcctccggattctgtt

SEQ ID NO: 66612 - DNA, 266 bp, Glycine max
  Clone ID: 700838114H1
gtgatatcatttgtgtcactggatggactgccactccaatgcaggatgttcaggttacaattgattggtttatttcctctcaggaatgtgttcccaggacctattgtgttttaaatccacaaaatccttttgtgttaaataggtggatggggaaactgactttcccccagggcacttcccgaagtgttaaaaggatgcctctttctatagggggaggagctggtgcaaagaatgctattctcatgaatatgccaaatgctgttctt

SEQ ID NO: 66613 - DNA, 268 bp, Glycine max
  Clone ID: 700838115H1
cttcgagggtttgggtttctcttcctcccttggagaaaaagaagagccaccgctgcgacgccgttcgtgcatttttgaggtgccgctgtcatgtttgggcgtggtggaccaaggaggagtgataactccaaatattatgatattctcgggatttccaaaaatgccagtgaagatgaaatcaagaaggcctatagaaaggcggctatgaagaaccatccagataagggaggagatcctgaaaagtttaaggagttaggtcaagcatatg

SEQ ID NO: 66614 - DNA, 263 bp, Glycine max
  Clone ID: 700838123H1
gcggttgagaagttgagcattgcaaaagatgtgactgaattaattggcaaaactccattggtatatctcaaccgcatcgtggatggctgtgttgccaaagttgctgcgaactagaaatgatggaaccttgctccagtgtcaaagacaggatagggtatagcatgattgtagatgctgaggagaaaggactcatcacaccgggtgaaagtgtcctcattgagcctactagtggaaacactggcataggtttggcattcatggca

SEQ ID NO: 66615 - DNA, 264 bp, Glycine max
  Clone ID: 700838124H1
ccaacctctcaagtccaacctacccctttttcttctcccaccaacttcaccgtcttcttcctcgatcatgtctcacttcaagggcaagtaccatgatgagcttattgccaatgctgcttacattggcactcctggaaagggtattcttgctgctgatgagtcaacagggacaattggcaagcgtttggccagcatcagtgtagagaatgttgaatccaacaggcgtgctcttagggagctgcttttcaccgctcccggtgctct

SEQ ID NO: 66616 - DNA, 267 bp, Glycine max
  Clone ID: 700838125H1
caagaaaagaaaaaaagaagagttgagattccctttgaagaaaagatggcatcccataggcaaagctatgaagctggtcaaactaagggccgaactgaggaaaagacgaaccagacgatgggcaatattggagagaaggctcaagctgcaaaggagaagacccaggaaatggcccaagctgcaaaggagaagacccaacaaacagcccaagctgccaaggacaagacttgcgacacttcccaagcggcaaaggagaagacccaacag

SEQ ID NO: 66617 - DNA, 261 bp, Glycine max
  Clone ID: 700838138H1
gttgatatattgcgccactatgaggttatgtacttaattcatgagaagcatgaagaggaggttgtagctgtcaatgagaaaattcaagactttttgagggagaagaaaggtcaggtttggagattgaatgattggggtatgagaaggctagcttacaaaataaaaaaagctaacaatgcccactacatgttgataaactttgagttggatgccaaatatatcaacgatttcaagactctgttggaccaagatgaaagagtt

SEQ ID NO: 66618 - DNA, 263 bp, Glycine max
  Clone ID: 700838142H1
ccttgcagctatgtcagtggatactgcgaaaggtttagctgctgctgcagctggggagaatgccaaggagtacactgcaaggaagaaggtggaagctgagatggatttggaggccaaaagggaagctcaaaatcaggaatcgaaggagtggccatcagcaaaatccaccactgagagcattcaaagaggacaaggacaacaagaacagcatgagcaaggagaaaaatgggaacatggtgcacaaaggactaataagccacatg

SEQ ID NO: 66619 - DNA, 262 bp, Glycine max
  Clone ID: 700838145H1
ggtttgattaccaagcaagttatgagcaagatggcagaaatgataaacagtctttgtggtggtgaaaaaattgatgcgtgaaaggacacacctgctgttggcttgttgttcaaggatggcaatttgtaagaaagatgtttggagagttgaatgtggaatcccttctggatttccgctcacagttatttgtaatagcatttttaatgagatgctcattagatatagctatgaaaaattactgcgccaggctaaagctccaagt

SEQ ID NO: 66620 - DNA, 146 bp, Glycine max
  Clone ID: 700838146H1
gattttcaagaatgttgagaaaataagacttaaagagagtagttaaatgcttggtttataaaaaggctgagttttatgatgataggtacttttataaaaatataacggttggttatgaacctagagataatagaatggatgaaccg

SEQ ID NO: 66621 - DNA, 262 bp, Glycine max
  Clone ID: 700838151H1
caaaattgaactgtaattgtagtagtagacagtagcaccatgagccaggaacagctcaagaaacctcaaggggagcaggaccccatcaaatacggcgacgttttcaaagtctccgacgaactcgctttcaaacccatcgcgccaagagacgcagctctcatgcaagccacggagaaccaagcattgggccaaactcaaaaaggaggtcccgcctcggtgatgcaatccgccgcaaccgaaaacctccgcgccggcgtcgtgg

SEQ ID NO: 66622 - DNA, 260 bp, Glycine max
  Clone ID: 700838154H1
aacaaaactacccttttgcttttgctctttgttctttgccatggagtggccacaacaacaatggccttccatgatgatgagggtggtgataaaaagtcaccaaaaagtttgtttttgatgagcaactccacgagggttttcaagactgatgcaggggaaatgcgtgtgctgaaaagccatggtggtaggatattttataggcacatgcacattggcttcatctctatggaaccaaagtccttgtttgttcctcagtacct

SEQ ID NO: 66623 - DNA, 260 bp, Glycine max
  Clone ID: 700838158H1
gaaagcttcctggacatttgagtagggaagggttgattcttttctcgggagggcgtgccactgcccgtgacctggtcaagaaaaggttgaagaagttcaatgaagttttcgatgagatgtatgcgaacagacaagttggatcatgccagaacgagatctgagggagaagacatgccagcttatagtgcaagcggtggtgcctgtttaccgcagttacatgcagaattatggtcctttggttgagcaagatgctagctcta

SEQ ID NO: 66624 - DNA, 261 bp, Glycine max
  Clone ID: 700838159H1
gtgaagatgtgtggtatcaagcaagaaatgcatctttggaaactaatgccaatgccaagagagatgcagatggaattcgtcctccacagagaactgtgtcagcacaatcaagagacaacaaatttccatccttgagatcttataattctggcagtttagttgattttttctcagaaccagtccaagcttcagaaccacttcagaataaagcatttggcattcccagaccacctggtcctacaagatctgttagcatggacc

SEQ ID NO: 66625 - DNA, 257 bp, Glycine max
  Clone ID: 700838170H1
ctcggcacgacctacagctgcgtgggcgtgtggcaaaacgaccgcgtcgagatcatccccaacgaccaaggcaaccgaaccactccctcttatgtagccttcaccgacaccgagaggctcatcggagacgcggcgaagaaccaagtcgccatgaacccgcagaacaccgtcttcgacgccaagcgtttaatcggtcgcagattctcagactcttcagttcaaaacgacatgaagctgtggccgtttaaggtcgtggc

SEQ ID NO: 66626 - DNA, 257 bp, Glycine max
  Clone ID: 700838171H1
cgccgacctcgatgaactctctgataacgaggctgaaattcccgaggataacgatgtggatgccgcagacatggaagaggatgtcgatggcgaccttgccgacctagaaaacctaaactatgatgacttggacagtgtttccaagttgcagaaaacccagaggtacactgatgttatccagaaagtggaagaggcacttaataaaaaggagtctgaggtcttgtttcaggtagtggatatagaagatgatcctgaat

SEQ ID NO: 66627 - DNA, 257 bp, Glycine max
  Clone ID: 700838175H1
gttagctctgtatgatagtctttattccctgcatctgaagaaagatagtcctttgctgaaaataaagtatcagtgttttactctttttaaatacaaaacccaactaaacttcttcaccaatggtattggttaggtgcctccagatttccctgggggctgcagacccctacagattgtggtgctggtagatactttggaaattagtaacagttattttgatctgtgagctttcacaaattaaagacaatgtaattctc

SEQ ID NO: 66628 - DNA, 255 bp, Glycine max
  Clone ID: 700838186H1
gccgttagtgaggatgaacaagcccagtactatggcactgctattgaggttggccaattacatctaagtcatattgaaagagagctgaatcatgcacaattatgtactgtagacaatgaagtcagtgttgtccagttgattcatgcaaatgctgatggtgagaatatgcagctctgtgatccacacattgaggttgatgaatcagatctaggctatgcagcaggtgaagaaaataatgaggacccagatgatgtg

SEQ ID NO: 66629 - DNA, 255 bp, Glycine max
  Clone ID: 700838193H1
gactagttctagatcgcgagcaccgcatctgtggatgaaaaggctgagaaaggttcagttgagaaagaagatattgcttctgtccttaagattggttcagttactattaccccaaaacaggtggagactaaaccatctggcattagtgttgctaataaggaaccgcttgatgttatcacagtaggctcaatgcaagtcaaagttaatggatttgccgagtcttcgggtcttttgaagattgggagtatcccactt

SEQ ID NO: 66630 - DNA, 251 bp, Glycine max
  Clone ID: 700838238H1
acaagttgaatcaaacagtgaaagtaaaacattgtgcaattaatcatcaactgcaagtagccagtgcataagatcaatggcgtcaagacagcaattcaaggaagacagagccgaggcagctgcaaaactcgcagcgaaagacatcggcgacatcaacagaacaaacgagcgcgacgaggggtacgacttgcacgacgaagccaacttcaagcaagcacgagctgaagcagctgcaaagctggcggccaagg

SEQ ID NO: 66631 - DNA, 248 bp, Glycine max
  Clone ID: 700838245H1
gcgccactcgatgtttccatttgcctgcatgcctttggtattgtggggtgtggttcgtttagtggtgtcaagtcttgcgaacgtgagggtgcatgagtggtaatcgggatgtttttgttgcacggctccatgcttgcgcatgcaacgtgtgacatgcatccttttcattgtcaccttagccttcgtggcttaggtgctgacgattggttcctgtgttgcctacctaccaaacggtattcgtgtggcta

SEQ ID NO: 66632 - DNA, 242 bp, Glycine max
  Clone ID: 700838292H1
ttcagatttttccggtgtcactcctaagaaaaaggagattcagactccaaacccaatgctgactccttctgcaactcctggagctgcaggtctcactcctagaattggcatgacaccaacagagatggtttttcttttagcatgacaccaaagggaactcctcttagggatgagctacatattaatgaggacatgaatatgcatgacagcactaaacttgagctacagagacaggctgatat

SEQ ID NO: 66633 - DNA, 225 bp, Glycine max
  Clone ID: 700838310H1
tgccaggaacaggcctaatatgacacgttttagactatgtattatcgagcctcaagctcctgaccatcttacccatcaacctctggatgctggttttggagctattgtagagcattgcaaggatcttcagcgcctttccctttccgggcttcttactgaccgtgtttttgaatatattgggacttatggcaagaagcttgagatgctttctgtggctttcgcggg

SEQ ID NO: 66634 - DNA, 223 bp, Glycine max
  Clone ID: 700838325H1
gcatcgatgagtccaagttcaggactggtaataacaagaaccagaatcagaacgaagaccaggataagtgataatgtaacacccttcactagtatgtgtagtgtgttcttatgctagcttaaatgtgagtgtcaagtgttttaggaagtaggaaaagaataggttataaaaaataatgtttaggcaatagttatataggtcaaagtgtcatgtcatgtgtgtc

SEQ ID NO: 66635 - DNA, 223 bp, Glycine max
  Clone ID: 700838329H1
tgggtggatggggttggatattggtcctgattccatcaagacatttggtgaagcattggatacgactcagaccattatttggaatggaccaatgggtgtttttgagtttgataagtttgccacaggaacagaggctatagccaagaaactggcagagctgagtgggaagggagtgacaaccatcattggaggaggtgactccgttgccgctgtggagaaggtt

SEQ ID NO: 66636 - DNA, 226 bp, Glycine max
  Clone ID: 700838331H1
cgggaactggattcgctgaaggacgaaaagaccaaaattgagcacaaaatctctgcgcttgaagctcaactcagagagattaatctccaaaacgacgccgcacctcccaatgcttcttcttcttcatcgtaccccaccaacggattgacccaggacatgattcacagatacagtcgccaccttgtgctcccttcctttggtgttcaagggcaggcaaatctattga

SEQ ID NO: 66637 - DNA, 227 bp, Glycine max
  Clone ID: 700838333H1
aacagcatagcataaaatgcgaaatctttgttcccagttgcaaaacccttaaaccccttccacgccatgaagtcccttctcaacccaaagttctcagctttatctcccaaagcttctccttttgctctgttctcacttccttcttctcgattctccttccgcagcaacccgcgtcgaatccccaatcgtcttcttcgcctcaacccatcaccctgttcgtccaataa

SEQ ID NO: 66638 - DNA, 224 bp, Glycine max
  Clone ID: 700838334H1
gattattttattccctccattggccgtagtagcagcgttgtgtggcggtgacaaccatggccgactcatctcaagaccttgaccaactcctcgatagtgctttggatgattttcagtccttcaacctcaatcctccccctccaagtggggaagcaagtgcgaacaagaagaaggagagtccttctttggcgtcgggggtgcaaggattgggcatgggtttaccc

SEQ ID NO: 66639 - DNA, 224 bp, Glycine max
  Clone ID: 700838349H1
aacttgttgagaatggcaatataagagctgcactttctaccactgatgttattgagcttccaacacaagataaactaaaaaccgtgcttgacaaagtgaaagacttttttggagatgcaaaggaatcttttggaaagataacatcattgggcactactgaaacagaggagtcagaggaagacacaaaagaaaaagccaaggttaaaggatgaaactatagctgg

SEQ ID NO: 66640 - DNA, 221 bp, Glycine max
  Clone ID: 700838350H1
ctcatcttagattccattttgtctcttcattgcccccaaaataactttattttctctgaattattgcctacagcaactttgaataattctccttcgtatcaagtcttcctcatcttcaccacctttttgtaagtggatatttatgtgtctaagaacataaactaaaaaaccaaggcgagtgaaagaaaaaaaatgtcaggtgtgtctctagcagtgtctgg

SEQ ID NO: 66641 - DNA, 219 bp, Glycine max
  Clone ID: 700838353H1
aaaaaaaaaggacaagaaaaggctagggacaaagacaaccatggaggaaaaaaggacagcaatcacaaacaggcaaggattaaagaagaaaatgcacccattaattagcagcttaagcattggcggcgatggtgggattgccgggctttttgtgttcggtggagccttggcccttgcgggtttcatggcagttggttcttttgcgagcaaaaaacataa

SEQ ID NO: 66642 - DNA, 221 bp, Glycine max
  Clone ID: 700838359H1
cttcactcctcatggttattatggaaatcctgcatatggtgctgggttgtcttacccaggaagtcctatggcaaactctgttgtgtccacttctccagttggatctggaagtcctgttaggcacaatgaactgaatatgcattttgcttctggaatgaggaatttagctggggtcatgggaccttggcatgtagataatgagaacattgatgaaagttttg

SEQ ID NO: 66643 - DNA, 223 bp, Glycine max
  Clone ID: 700838363H1
tgcagggcgttgctataactcaagaaaattctttgctggataacactgcaagaattgagggttggttagctagatttccaatgtttgactgggtgggaggtagaacatcagagatgtctgcagtgggcctgcttccagcagcccttcagagcattgacataagagaaatgcttgctggtgcagcattaatggatgaggcgaataggagtactgtgataaggaa

SEQ ID NO: 66644 - DNA, 219 bp, Glycine max
  Clone ID: 700838368H1
caatcaccctcgcgccctcgctcttcccttcctggtggcgacaatgtcgactcctgctaggaagaggctgatgagagacttcaagaggctgcaacaagacccgcctgcagggatcagcggtgccccccaggataacaacataatgctgtggaatgctgtcatatttggtcctgatgatactccatgggatggaggcacgttcaagttgactctccagtt

SEQ ID NO: 66645 - DNA, 219 bp, Glycine max
  Clone ID: 700838372H1
ctcaactttgaaattcttaaaaccctaactggtccgaaccattggagccaccgtgcaatagttcctcctctcactctctccctcaacacaccattgattttggtttcagctttatttggaagagggttgtaacgctgacgtgaaatttttctgaagacaaagatgcaggcttgtacaacgatgagttctttgcagcaacaacctatttggaccaaaggg

SEQ ID NO: 66646 - DNA, 219 bp, Glycine max
  Clone ID: 700838373H1
aaaggaagttccatgcacagaagagttccctctgtcagcaatgaacccatatggacgaactaagcttatcattgaagaaatttgtcgtgatgtccaccgtgcagagccagattggaaaataatattgttaagatacttcaacccagtcggtgcacaccctagcggttgtattggggaggatccccgcggaattccaaacaatctcatgccatttgttca

SEQ ID NO: 66647 - DNA, 216 bp, Glycine max
  Clone ID: 700838386H1
aactactacaagtacttccttacaatcaaaaccaacaacaactatggcaagttatcaaaagcactacgatgatcagggtcgcaaggttgacgagtatggcaacgttgagaagcaaaccgacgaatacggcaaccctgttcatgctgctagtgtcacctatgtagccaccagaactgctgctggtggttacagtgatgacattaataagcaacatga

SEQ ID NO: 66648 - DNA, 218 bp, Glycine max
  Clone ID: 700838390H1
ctgtggagtacaagaacatcagcttcactgtgtgggatgttggtggtcaggacaagatccgtccactgtggaggcattatttccagaacactcagggtctcatttttgtggttgatagcaatgatagagatcgagtggttgaggcaagggatgagctgcacagaatgttgaatgaggatgaacttagagatgctgttttgcttgtttttgccaacaag

SEQ ID NO: 66649 - DNA, 218 bp, Glycine max
  Clone ID: 700838393H1
tgaaggtgctagtggagaaattgctcttacagcagctggtggattgaggcaaattcctggaataaccgagacctttgaaaatgctgcattgattggaattcattatggtggaaatttttatgaatttgtgccatggaatggtgttgttaactgggaagttactacttggggttattggtttatgtcagcagacaatggcaaaaatgtggttgaattag

SEQ ID NO: 66650 - DNA, 254 bp, Glycine max
  Clone ID: 700838413H1
cagcattctagtggtggctacgatggtgacactaataaacatcatggaactactggtggctataatgatgacaccaatagacatcatggaactaccggtgtctatggtatagacaccgataggcaacaacatgggactactggtggctatgccggtgacactggtaggcaacatgggaacatcggtggcccttactatggaaccaacaccgcagacaccggtactggtcccagaagtggaaccacgggcggcac

SEQ ID NO: 66651 - DNA, 257 bp, Glycine max
  Clone ID: 700838414H1
gctaacttcaacacctttaattttctaaaagtaattcagcggctgaataccaagcggagaagatgagtcaggagcagccacggcgtcccaaaggccaaaaccccatcaaatacggcgacgtttttgtcgtctccggcgaccttgcacagaagcccgtcgcaccggaagatgctgccatgatgcaaagcgcggaaactcgagtgctcggacaaacccaacccggcggagcagcttccgtcatgcaatctgccgccacc

SEQ ID NO: 66652 - DNA, 253 bp, Glycine max
  Clone ID: 700838419H1
gtcttacggcacgatcgctatatcttttctttttctttatctctcctctatagaaagaggggatgatacgtggcgtggtatacctgatcgtttggtcaacgagacgtacgtaagtcgacatagctccatttatctttttttttctttcacttagcccgcctctcccatgaccggaccaacccggatctgccctcgaaagtctctcttcattttgggagcagagcatgcaaaatcgagcaattaatcttataaa

SEQ ID NO: 66653 - DNA, 253 bp, Glycine max
  Clone ID: 700838428H1
caaaacagtaaagctaacttcaacacctttaattttctaaaagtaattcagcggctgaataccaagcggagaagatgagtcaggagcagccacggcgtcccaaaggccaaaaccccatcaaatacggcgacgtttttgtcgtctccggcgaccttgcacagaagcccgtcgcaccggaagatgctgccatgatgcaaagcgcggaaactcgagtgctcggacaaacccaacccggcggagcagcttccgtcat

SEQ ID NO: 66654 - DNA, 106 bp, Glycine max
  Clone ID: 700838449H1
cctagttccaacttggggggtagatagagcgagaaagtgaaaaacgaaaacgtaaacgaccccgttttagagagagaaagtgaactatataaaaatttctactttt

SEQ ID NO: 66655 - DNA, 254 bp, Glycine max
  Clone ID: 700838462H1
ggttgatctagattggcaaacaaagatggttcactccaacatgcctccaaagtcccccaaactctctctcccggataataacattccaatcccccttcgccagaacgacatcaccgcagcgtcgtctccaatctgcgctgcctacgacaactacctccgcctccctgagctcagagccctctgggcctccaacgacttccctaattgggccaacgagcccatcttaaagcccaccttacacgccctcgaaatca

SEQ ID NO: 66656 - DNA, 249 bp, Glycine max
  Clone ID: 700838467H1
cggtcacggacaagcgaagagtaaagaaagaagaaatgttggtgaggaagctgaaactgaaagcggttagtggggtccacttgagatggatgagcaccgtgatgtgtttcggagatggcagccagggtgccgttggatccccagtaggtgtgggactagacgcatacgaacccacacctgttaccgctcttccttccgacatcgttagcgtccacgccggacactaccattccctcgccctcacttccc

SEQ ID NO: 66657 - DNA, 247 bp, Glycine max
  Clone ID: 700838483H1
tggccagatttttttctaagaaacgaaaggcggtgacacttgtatgtggaagaaagtagcaccgtctcttctccactttagctaaactcccgaaacgcagctgcgccactcgtttctctggcctcgccgtgattgctaccactccgttcgcttcatccatgtgctgttgtatgggttgaacgaggaagataagaaattgcttcgggaatggagtgggacagcaattccgatctgagcggggacgaag

SEQ ID NO: 66658 - DNA, 244 bp, Glycine max
  Clone ID: 700838486H1
cacatgattattaccctagtctaagaggggactctaatgtgttgtatgaaagctttgcttgcagctggaagaagagttggtagcaaagaagaaagaggaagggaagaaaatgaatagcccaaagaaaggttttaaacagcttgtgaagcaaagtatgaaacctaggggaaaacatagtaataaagaagcatgaatgaattatgaccattgtagctgctcccatcccaactgtgccaacgttttc

SEQ ID NO: 66659 - DNA, 249 bp, Glycine max
  Clone ID: 700838514H1
ggcaaaatggatccgtaacctcgggaaaaggattggctctgagggctgggcacgggggtcccagtcccgaacccgtcggctgtcggtggactgctcgagctgcttccgcggcgagagcgggtcgtcgcgtgccggtcgggggacggattgggaacgggtccttcggggcctcttccccgggcgtcgaacagtcaactcagaactggtacggacaaggggaatccgactgtttaattaaaacaaagcatt

SEQ ID NO: 66660 - DNA, 249 bp, Glycine max
  Clone ID: 700838519H1
aaacagtaaagctaacttcaacacctttaattttctaaaagtaattcagcggctgaataccaagcggagaagatgagtcaggagcagccacggcgtcccaaaggccaaaaccccatcaaatacggcgacgtttttgtcgtctccggcgaccttgcacagaagcccgtcgcaccggaagatgctgccatgatgcaaagcgcggaaactcgagtgctcggacaaacccaacccggcggagcagcttccgtc

SEQ ID NO: 66661 - DNA, 249 bp, Glycine max
  Clone ID: 700838521H1
gagcaaatggagccatggcttatgcacagcagctgcgtatgagtcagggtcaaatcaggcagcaactatcccagcaaggttcacttaacactgcacaggttcaaggtttaccaaggtcatcatcccttgcttttatgagttctcagttgtctgggttgtctcagaatggacaacctgcaatgattaactctttaacacagcaacagtggcttaagcaaatgccagcaatgtctggccctgccgcaccat

SEQ ID NO: 66662 - DNA, 249 bp, Glycine max
  Clone ID: 700838525H1
caagaacatcagcttcactgtgtgggatgttggtggtcaggacaagatccgtccactgtggaggcattatttccagaacactcagggtctcatttttgtggttgatagcaatgatagagatcgagtggttgaggcaagggatgagctgcacagaatgttgaatgaggatgaacttagagatgctgttttgcttgtttttgccaacaagcaagatcttcctaatgcaatgaatgctgcagaaataactga

SEQ ID NO: 66663 - DNA, 248 bp, Glycine max
  Clone ID: 700838527H1
ctctcttttagtcttactcacaaacacttttttcactgcttccattacgaacatatatttattatatggctcctgaacttgtccccaccgttgtgaaatccagtgctgcgttcacgaaacccgcgacccttccaaggcgtgcctacgtgacattcctcgccggaaacggtgactacgtgaaaggggtggttggcctcgccaaagggttgcgaaaggtgaaaaccgcgtacccgttggtggtggctgtc

SEQ ID NO: 66664 - DNA, 247 bp, Glycine max
  Clone ID: 700838528H1
gtggctatgccggtgacactggtaggcaacatgggaacatcggtggcccttactatggaaccaacaccgcagacaccggtactggtcccagaagtggaaccacgggcggcaccggttatggaggcactggtggcactgattatggaacaactggtggcactggttatggaagtggaactgggtatggagtcaacactgggggtgcgcacactgaagcaggatataggaaggaacatcgtcagcatga

SEQ ID NO: 66665 - DNA, 250 bp, Glycine max
  Clone ID: 700838534H1
cacacaactactacaagtacttccttacaatcaaaaccaacaacaactatggcaagttatcaaaagcactacgatgatcagggtcgcaaggttgacgagtatggcaacgttgagaagcaaaccgacgaatacggcaaccctgttcatgctgctagtgtcacctatgtagccaccagaactgctgctggtggttacagtgatgacattaataagcaacatgataccaccaatgcctacggcgtagacactg

SEQ ID NO: 66666 - DNA, 246 bp, Glycine max
  Clone ID: 700838536H1
cgaggtcttctcgatttccttctctataacacaacgctctcttctcttgcaaccaaagtacttgttccagtgtctactctactcaaaaaggatttgggacatcatgtgcagtgattcgaaaagtaaactttcttccccaaccctcgtcgtcatggagaatagtaacattcagaagcagaatctggatggtctctacaactcggttttgcttgaattgtctgcatctgatgattatgaagctttcaa

SEQ ID NO: 66667 - DNA, 248 bp, Glycine max
  Clone ID: 700838537H1
gaagaaaacctaagcttagaattagaaacaaagaaaagaagaaaggaaagaattgatcgttgaaaatgcagggaggaaagaaagcgggagagtccattaaggaaacagctacaaacattggtgcttctgccaaggctggcatggagaagaccaaggccactgtccaagagaaggcagaaagaatgacagcacgtgatccggtgcaaaaggagttggcaacccaaaagaaagaggcaaagatgaaccag

SEQ ID NO: 66668 - DNA, 246 bp, Glycine max
  Clone ID: 700838538H1
ctaaggaaaatcggctacagaaattcaagcttccagaacctgtgctttgtattgggggcttcttgcagattgagcttttgggaaggatacaaagacaagaaatggatggtttattatacatttgtgtttctcatgttcaagttctgggaggttcattgtcacctccattcaatgtggatattctgcagccctctggaatgtttgtgttgaagagggaccagctggctgaccatcaacctgtagtga

SEQ ID NO: 66669 - DNA, 246 bp, Glycine max
  Clone ID: 700838543H1
agggtcgcaaggtcgacgagtatggcaatgttgagaggcaaactgacgaatatggcaacccggttcatgccactagtgtcacttatgtagccaccaaaagtgttggtggctacaatgatgacgctaataagcaacatgatattactggtgtctatcccgagaaagacaccggtagacatcattttggtcgtggttacgacggtgacactaacaagcaacatgatgctactggtgtttatcccggaa

SEQ ID NO: 66670 - DNA, 247 bp, Glycine max
  Clone ID: 700838544H1
gaaagaaatattcactgcaaatgctgatagaaacttggatttctattttaaaatatgaagagtaactccctgcagcagagctagacatctgtaatctctcaaaaacagaaatgaatatggttacagacactttgaggggtctgcttcctccctgcccatgggcccaaaatgctccaggatccgttcctcccttttatccttgctcctactgtcccatacccgtttccacgtaggcaaacgatagacg

SEQ ID NO: 66671 - DNA, 251 bp, Glycine max
  Clone ID: 700838547H1
ggcagagaaagcaagaccaatggaagaaacaaaggtggaagctaaaggaagagaaaaagatgtaaccaaagagggtggtgttgaggaacaaggaagaggaagaaaagaaaatgaacaatctagcttgaaagacatttccaagtacagagctgaagctcaacaaaattcattcaatgctactgaagctgctaaggaaagatacgagagggcaaaccaagcgacaagtgaagctgccaaagagagaaacaagc

SEQ ID NO: 66672 - DNA, 244 bp, Glycine max
  Clone ID: 700838551H1
gttgatttggagcctgccattaacaatgctgtttttcctggtctacaggggggtcctcataaccacacaattggaggactagcagtttgcttgaagtatgctcagtctccagaatttaaaaattatcaaaatcaggtggttgctaactgtagagctcttgctaagcgattaattgagcatggatataaactggtttctggtggtagtgacaatcacctggttcttgtcgatctaaggccatctg

SEQ ID NO: 66673 - DNA, 247 bp, Glycine max
  Clone ID: 700838557H1
cagaaccaaaattttccaaactcctcaactctcatcagatatcaaccttctctctctccaaactctcgcacctttctgctctgcccttcaatttattcacctctgacaccctcttaattctgcttccagttcctctgagtggtgagtatgatctcttctcactcccacaattcccacattatagtaatcctcatcacctgcttatttcgtcataaattctagatcaaactccacaccctgatcctcc

SEQ ID NO: 66674 - DNA, 245 bp, Glycine max
  Clone ID: 700838559H1
gaaaaagaaaaaagcgatcatagtttcacttcggccttatccagtttagggtttcggttctctaccctatctttcacgtatcgaaaccttaaatttacgatcaggtctgagcaatctggttggtagaacctttggtcttagtgagtcaagttttatgtctgaattagacgatcaaattcctactgccttcgatccttttgctgatgcaaatgctgatgactcgggtgctgggtcaaaggagtatg

SEQ ID NO: 66675 - DNA, 251 bp, Glycine max
  Clone ID: 700838569H1
gaggtctttcaagtatgcctgggtgctggacaaacttaaggctgagcgtgaaagaggaatcaccattgatattgctttgtggaagtttgaaacaacaaagtattattgcacagttattgatgcgcctggacatagggatttcattaagaatatgattactgggacatcccaagctgactgtgctgttcttatcattgattcgaccactggtggttttgaagctggtatttccaaggatggacagactcgtg

SEQ ID NO: 66676 - DNA, 246 bp, Glycine max
  Clone ID: 700838572H1
aaaagaggaggcaaatggagtggatgatgccaaatatcccggtggaagctatggagggggttacccaggtcatggcggtggcggttatcctggccatggcggtggcggttatcctggccatggcggtggtggtggctatcctggtcatggtggtggccaccctggtcatggtggcggctaccctggccgtggtggtggatactgtaggcatggctgttgcggtggccggacatacaacggaggttg

SEQ ID NO: 66677 - DNA, 248 bp, Glycine max
  Clone ID: 700838579H1
ttacggggaagtgcggctccgttaccgttaggatggttcccgcgccgagaggttcggggatcgtggcggctagggttcccaagaaggtgctgcagttcgcggggattgatgatgttttcacctcctccagaggatccaccaagaccctcggcaacttcgttaaggctacttttgattgcttgatgaaaacctatggattcctgacaccagaattctggaaggagactcgcttctccaaatctccattc

SEQ ID NO: 66678 - DNA, 254 bp, Glycine max
  Clone ID: 700838580H1
gagaaactttaagcagatgtctaatgttttgtgggtggctcctgaagacaaggcgagtttatggtcacaacttcattatgtttcgtgtaataatctggaaatgcaagaagcttatcttgtcaatctcgtaaatgtgttacgagaactgtatttgcacagtccagaggaagctcgccaattgagaaggaaagctctctctcgtattgaatggctgcaaaaagctgatgtgcctaccatagcacagattgaagagt

SEQ ID NO: 66679 - DNA, 253 bp, Glycine max
  Clone ID: 700838585H1
gttcgcatcgaggcagataaatcactgtatccagtgttattgtctaatggaaacctagctgaacaaggtgacttagaggatggcaggcattatgctgtttgggaggaccccttcaagaaaccttcttatctgtttgccttggttgccgggcaattgcagagcagagatgacacatttgttacccgttcagggaggaaggtgtcccttaggatatggacacctgcagatgatgtacctaagactgcacatgcta

SEQ ID NO: 66680 - DNA, 246 bp, Glycine max
  Clone ID: 700838588H1
aacctgacaagtcaaggaactggtcccactatttctgatggctgtgattcttcatctagtatgcctgcaggtttgccagaatcatcaaacacacatcctgttaagccgacttctaaggcaaatgctgaaaatactgttggagaatttaactcaaaacctagaattgggtcaagatctcttagtaatccaaaggagagaacatcacaggcagataagcaggccaaaaaacgattatctctgcctaac

SEQ ID NO: 66681 - DNA, 244 bp, Glycine max
  Clone ID: 700838589H1
tggcaatctctcaaaccataaataattctcagctgcaggggtggtacaacagatttcaaagggacgaagtggtggcacagtggaaaaaggtgaagggaaggatgtctctgcacgttcactgccacattagtggaggtcattttctcttggatatattagcaaggttaagatacttcatcttctgcaaggagctaccagtggtgttgaaggccgtcgttcacggcgatgaaaacctattcaacag

SEQ ID NO: 66682 - DNA, 244 bp, Glycine max
  Clone ID: 700838590H1
ggtgcctcttctctcgaagaagatcgtgaagaagaggctgaagaagttcaagaggcctcaaagtgacaggaagatttctgtgaagacaaactggcgcagaccaaagggtatcgattcccgtgttaggagaaagttcaagggatgcactttgatgccgaacattggttatgcttcagacaagaagacccgccactatctcccgaatggtttcaagaaatttgttgttcacaatgtgaaggatttg

SEQ ID NO: 66683 - DNA, 242 bp, Glycine max
  Clone ID: 700838593H1
aactgaggtcttgaacttgagctttgagaagcttatgatggttgaatgtggtggaaatagtgggaaaggagtgaacattaaagctggtgtgatcacggagtggaaggatattccagttgagcttttgatgcaaattttgtcacttgtggatgatcaaacggttatcatagcttctgaagtgtgtcgtgggtggagagaggcaatttgctttggccttactcggttatcactctcatggtgta

SEQ ID NO: 66684 - DNA, 260 bp, Glycine max
  Clone ID: 700838605H1
aactactacaagtacttccttacaatcaaaaccaacaacaactatggcaagttatcaaaagcactacgatgatcagggtcgcaaggttgacgagtatggcaacgttgagaagcaaaccgacgaatacggcaaccctgttcatgctgctagtgtcacctatgtagccaccagaactgctgctggtggttacagtgatgacattaataagcaacatgataccaccaatgcctacggcgtagacactggtagacagcattcta

SEQ ID NO: 66685 - DNA, 260 bp, Glycine max
  Clone ID: 700838607H1
agagcatttcgatgcatgtaagtggacaaaatcggaaccacattcctgggaattgatcttcccaatagaggtatgtggtcctaataatggttttgaaatgtggagttctgagtgggcaaatcaaacttcatggcacttgagtttccttattgacaatcccaaacagtctacagtttttgatattctcttgggaatttctcaagattttgaaattgctggtaatactcttatgccagctttttctgttccacaggctactg

SEQ ID NO: 66686 - DNA, 259 bp, Glycine max
  Clone ID: 700838608H1
gttcttgatcagtgtcaaaaccaaaagggtggttgcaaattgcaatggctaagcatgatgttgagggtggttccttcgctgcaaaggactaccatgatcctcctccagcaccattgattgatgctgaggaactcacacagtggtccttctacagggctttgattgctgagttcattgccacaatgctcttcctttacatcacagtgctcactgtgattggttacaagagccagagtgatgtaaaggctgggggtgatgt

SEQ ID NO: 66687 - DNA, 140 bp, Glycine max
  Clone ID: 700838609H1
tagcaattggtgcaacagtggctccatttgttcgggttcttgtatggatatgctttcctgttgcttatccaattagcaagttgttggattatttgctggggcatcgacatgaagcccttttccgcagagctgagttgaaa

SEQ ID NO: 66688 - DNA, 256 bp, Glycine max
  Clone ID: 700838611H1
atcaaagcatccatactgcttatgtgagagcaataagatccgctgagcactttgtatatattgagaatcagtattttttgggctcctcctatcattggccttcatataaaaacaatgcaggtagataaacttaattttccaatatcttcaactttataaggcattgctagtttttgcgttgttacaaaatcaaattctggcctttaggtaatgtacctatatatatgccacagacccagaagatataattgtgtat

SEQ ID NO: 66689 - DNA, 257 bp, Glycine max
  Clone ID: 700838622H1
tgcacgcgggtcttgcttctgaaggtggcagcaagctcaagatgttgatcacttatgttgataatctcccttctggggatgagaaaggactcttttatgcattagaccttggtggcacaaacttccgaacccttcgcgtgcatttaggtgggaaggagaaaggtgttgtcaaaatagagtctgatgaagtttccattcctcctcatttgatgactggttcttcacaagaattatttgattttatagcatctaaacta

SEQ ID NO: 66690 - DNA, 256 bp, Glycine max
  Clone ID: 700838627H1
ggcaagggttatatcaagcaggaattattttgcctgcatatcttaatgccactgctgaggatgagcagctgacttctgatcccgtggaagatctatgtcaacaagtttatattgctaggttcatatcaaatgccattggaaaaggaattgccagggcagagttggagacagagatggaagctcaactagaggcaaagaactttgagattgctcgacttttggatcgtctccactgttatgagaccatgaataggga

SEQ ID NO: 66691 - DNA, 256 bp, Glycine max
  Clone ID: 700838628H1
ttttgagggagacaacatgattgagaggtccacaaaccttgactggtacaagggtccaactctgcttgatgcacttgaccagattagtgagcccaagaggccctctgacaagcccctcaggcttccccttcaggatgtgtacaagattggaggtattggaactgtgccagtgggacgtgttgagaccggtgtcttgaagcctggaatggtggtgacttttgcaccaactggactgacaactgaagtcaagtctgtg

SEQ ID NO: 66692 - DNA, 147 bp, Glycine max
  Clone ID: 700838632H1
aatccgtgccctagcttcttcctcctccgccattgcagcagggcacacaaccttcgtcacaaacccaattcgcgagggatcggattcgccatcatggggaagaagaagaagagagtttcctcgaaggtgtggtgttattactgcgat

SEQ ID NO: 66693 - DNA, 256 bp, Glycine max
  Clone ID: 700838640H1
aatttcaagtgtctatatatacatttttcttcttttatcaaagcttgtgattagactagctacctttgtaccgtacccttgtattattgcatggtttaaggtttaattaattaatttgtagctgttgcttagaactggttttggcaaagagcttgatcttcaagagatttctttgattcttctttctagtgtaaagtcatgtcctattagctaggtacaaaatgatgaaaagaatgggccaccaacgacgacaaag

SEQ ID NO: 66694 - DNA, 254 bp, Glycine max
  Clone ID: 700838641H1
taaaaagtttgaagctgatgtttcacttgaggtaattgctatgagaacacctggttttagtggagcagatctggcaaacctgctgaatgaagctgctatattagctggtcggcgtggaaagacggcaatttcttccaaagagatcgatgattctattgataggattgtggctggaatggaaggaactgtgatgacagatggaaagagcaaaagcttagtggcatatcatgaagttgggcatgctatttgtggaa

SEQ ID NO: 66695 - DNA, 254 bp, Glycine max
  Clone ID: 700838644H1
gtacggtgggagaagggaaggtgagtagtaatggtcatggatgttgcaaatcagggccaggctatgcttccccactggaagccatttctggtcccagagagtctctcatttatgtaacctctgtctacacagggaccggaatagagaagccagactatttggcgacagtggatgtggatccaaactctccaacttattccaaagtcatccataggcttcctgttccttatttaggtgacgaattgcatcacaca

SEQ ID NO: 66696 - DNA, 255 bp, Glycine max
  Clone ID: 700838656H1
atctagataatcttcatctaaacataaaaatcactttcccctgctagattctcgctagtacaatcatagaatccgagtttttgtgggttgcattgttgtgagaagatgagaagagttggtggtgatgttttgaacgtggatttggctgctgcagtgaacaacctcttcaatcttcctgaaactatggagaagttcatgtttccttcttctcgtgctcatgatcaccaccatgaaaccagaggggtctctagcatc

SEQ ID NO: 66697 - DNA, 253 bp, Glycine max
  Clone ID: 700838657H1
cttgctgcatccctgatgatcatctatatggaatgggttggcaagacatttgcagctttcttgatttgggcaataataaagatgcttgatgcaagaaaaaagaagattcgtgagaaatgctacgagatagttatcagtagatccagtatggcttctgatcaatctacgatggagagcattgtctcggcccagcatggattgtacacaattcatgacatgatgcagatagcaaacatagcaatgctaaagatat

SEQ ID NO: 66698 - DNA, 254 bp, Glycine max
  Clone ID: 700838660H1
gtatccctgcaagttctgctgtagcagattccaaggtgaaggtgtcacgttaaagtttctttcatgtttgaacaggctactatccatttgggagcaactgagctgcttggagagtatttttcttcctctaggaaaaattacagaccctcaccacagagacttagttgtatgaacggttggccaccttccattatccttgaaggagattgttcaaggatacagactacctttgaggttgaaattgcggctgcata

SEQ ID NO: 66699 - DNA, 145 bp, Glycine max
  Clone ID: 700838664H1
ttcaaaccttgctctatactacacagtacacacactagaagaataatggcttccatcctccactactttttagccctctctctttcttgctcttttcttttcttcttatccgactcagtcacccctacaaaaccaataaaccttg

SEQ ID NO: 66700 - DNA, 140 bp, Glycine max
  Clone ID: 700838668H1
gaaaacctaagcttagaattagaaacaaagaaaagaagaaaggaaagaattgatcgttgaaaatgcagggaggaaagaaagcgggagagtccattaaggaaacagctacaaacattggtgcttctgccaaggctggcatg

SEQ ID NO: 66701 - DNA, 257 bp, Glycine max
  Clone ID: 700838678H1
ccctagctaggacgtgtttggagttggtttgagcgtattgaggcaatgacgcgaccttacggtgtgaaggggggccggaagcgaaagcacgccgaacccaaatacgacgaagaagaccaagaaacgcaaccaaaaaaagctgtggtggaggtggagcacaacaaagaagaagaacaacagcaacaaacaccagagggggatgaattgagcggtatcccaattacgcccagtgagaacaacaccaacaaacccaacgt

SEQ ID NO: 66702 - DNA, 262 bp, Glycine max
  Clone ID: 700838683H1
ctttagttttcaacccaaaaaacaaggtccttgccctctatgtgtttgtaggggccatcattggactttatgccccaatagcttatattttagagggaatatttgagggtgacaaagaagggatcaaagcagctgcaccccatgtttttctcttgtccagccaagtcttcatggaaggtgtggcattctctggcaggttctcaactccaatgagagcttttgtgcctgtcttttacaactcaaggaggattttcaccattgt

SEQ ID NO: 66703 - DNA, 250 bp, Glycine max
  Clone ID: 700838690H1
ctgagagcatatgctgctgcacaaggggtacagccggatcaaattattttcacagatgttgcaatgaagaatgaacacatcagacggagttctttagcagacttattccttgactcgcctttatgcaatgcacatacaacaggaacagatatactatgggcaggtttgccaatggttactctgcctcttgagaaaatggctactagggttgctgggtcactctgtcttgccactggactaggggaggaga

SEQ ID NO: 66704 - DNA, 251 bp, Glycine max
  Clone ID: 700838692H1
gctggtgcagtttggagagattcaggaaaaagttgtattgaaattttcacaagaggaatttcttacagcttggtcaactcaggtgcgtcctgcaacaactctgttggctgatgggtgtccatatttgtatgctatggtgcatgatagttcagtgtctacaataccaggtgattttgtcattggtgttaagttgacaaccataaacaatatgtgtgcatatgggctcaatcctggtatttcaggttctcgtc

SEQ ID NO: 66705 - DNA, 255 bp, Glycine max
  Clone ID: 700838693H1
ggtcctaataatggttttgaaatgtgagttctgagtgggcaaatcaaacttcatggcatttgagtttccttatgacaatcccaaacagtctacagtttttgatattctcttgggaatttctcaagattttgaaattgctggtaatactcttatgccagctttttctgttccacaggctactgccagatcttctgaaaatgcggaatcctctgcatgatctggaatttgtgttttctttcgcttgttcgtttgttt

SEQ ID NO: 66706 - DNA, 248 bp, Glycine max
  Clone ID: 700838706H1
caccaatggaaaactctactccatctccatgcatcaccatgaatttcacatttgctgtgtcaatcaaccctaaggctttatcatcagataatatttcttaagaactcagtatgcatgcacaactccacgataaatcgtcgaattaaacaacattcaacgacaactctgattgaggccttgttcgtggagaaattaagatggagataatttaccagtctcacatcgacagggagattgaatcgctcata

SEQ ID NO: 66707 - DNA, 246 bp, Glycine max
  Clone ID: 700838707H1
cacacacaactactacaagtacttccttacaatcaaaaccaacaacaactatggcaagttatcaaaagcactacgatgatcagggtcgcaaggttgacgagtatggcaacgttgagaagcaaaccgacgaatacggcaaccctgttcatgctgctagtgtcacctatgtagccaccagaactgctgctggtggttacagtgatgacattaataagcaacatgataccaccaatgcctacggcgtag

SEQ ID NO: 66708 - DNA, 245 bp, Glycine max
  Clone ID: 700838723H1
gtagacagtagcaccatgagccaggaacagctcaagaaacctcaaggggagcaggaccccatcaaatacggcgacgttttcaaagtctccgacgaactcgctttcaaacccatcgcgccaagagacgcagctctcatgcaagccacggagaaccaagcattgggccaaactcaaaaaggaggtcccgcctcggtgatgcaatccgccgcaaccgaaaacctccgcgccggcgtcgtgggccgcca

SEQ ID NO: 66709 - DNA, 241 bp, Glycine max
  Clone ID: 700838726H1
cattcctataaataccccctaattcataaccctctaagttccaatatttaatatatccaccttttggggagaccaccggagatatgtacggacggagtgattcttacgaatccgatttggcgcttctggattcgattcgccgccacttgctgggagagtccgaattgatattcggagccccgaatttcggttcgggtcggagctccagtttcagcagcttggactcgtgtttgagtgatga

SEQ ID NO: 66710 - DNA, 248 bp, Glycine max
  Clone ID: 700838736H1
ggccatccttagaaagaaggacgatgatcatttttcaccagtggattcttacttcaccgaaaataaagatgtggtgctgagatgttctgaatctccccaagcctctttaagggaaaggactgtgaaggttcttggtcttttaggtggaggccagccaaacagctctatgataaattcagagaaggctgtgaaaactgagaatgctactgttgctgagttgcctgacttgatagacactggtgattcaa

SEQ ID NO: 66711 - DNA, 249 bp, Glycine max
  Clone ID: 700838751H1
tgcaaaaaagactaaggattatgctgcgcagaagaccaaggactatgccagtggtggtgcgcagaagaccaaggactatgccagtggtgctgcgcagaagaccaaggactatgcaagtgatgctgcgcagaggaccaaggaccatgcaagtgatggtgctcaaaagagcaaagaatatgcgggtgatgtagcacagaatgccaaagattatgctcaaaagagcaaagattatgcgggtgatgctgtaca

SEQ ID NO: 66712 - DNA, 244 bp, Glycine max
  Clone ID: 700838762H1
gtttagttcgcacaaggttttaaaaaatggctgatgctgaggacattcaacctcttgttgttgataatggaactggaatggtcaaggcgggttttgcaggtgatgacgctcctagggccgtgttccccagtattattgggcgaccacgccataccggtgtaatggttgggatgggtcagaaggatgcttacgtgggtgatgaagctcaatcaaaaaggggtatactcaccttgaagtatcctat

SEQ ID NO: 66713 - DNA, 246 bp, Glycine max
  Clone ID: 700838783H1
caaaaatatgccactcccatgatgcctctagatgaagaaattctttctaaggttgcacaagatatggttgaggaatggtttgattgtgttgatgaggaagattcctttgaggaagtttctttaagtgcagcactcaatggtgttgagggtttggactatatggaaagaattcctcttgccacatctgagggttttcctcatgtgctttcgcgcaaaaatggtgaaaaaggcaaaaggagatttgtt

SEQ ID NO: 66714 - DNA, 243 bp, Glycine max
  Clone ID: 700838785H1
ctactacaagtacttccttacaatcaaaaccaacaacaactatggcaagttatcaaaagcactacgatgatcagggtcgcaaggttgacgagtatggcaacgttgagaagcaaaccgacgaatacggcaaccctgttcatgctgctagtgtcacctatgtagccaccagaactgctgctggtggttacagtgatgacattaataagcaacatgataccaccaatgcctacggcgtagacactg

SEQ ID NO: 66715 - DNA, 255 bp, Glycine max
  Clone ID: 700838807H1
gttgcaggatcttcatggtcgcaggatacgggtgaattatgctacagaaaggtcacgtccagggtttggtggtgatggtggatataggggcagtggtggcagcgatggctacaataggggtggaaactatggaggtggatataacagtggcagcgatggctacaataggggtggaaactatggaagtggcaattataatgttacaagcagctatagtgatggcaatgctgaaactagttacactagtggtgctaa

SEQ ID NO: 66716 - DNA, 256 bp, Glycine max
  Clone ID: 700838808H1
gaaccccgtcgcccagagtttcaccgagttctacgataaatgggtttggaagctcgaggagatcctccaccagctccttgaggtgtccaagcagagaacccaggtggtgaaaactgaacaagagctgcaggttttgatttccaaggtcacatcccatttgaaggaatattacactgtcaagtgggcttcggctcatgaagacgttctcgtgttcttctcgccaacgtggctgagtcctttggagaatgcttatttg

SEQ ID NO: 66717 - DNA, 263 bp, Glycine max
  Clone ID: 700838904H1
cccaaaacaatcaacaatagcttgctagctactcctgttgctgtgagaaccgttgatgtagatgctttgcaagcaagatttagagactccaacaataaaagccatgcttaacacctaccatgcctccaaactctcatcaaaccagtgtggttctagccttgtgcaaacaatagatgcacctttacctctcgtatggtccctcataaggcgctttgagtatccacaagggtacaagctctttgtgaagaagtgcaaccttcttg

SEQ ID NO: 66718 - DNA, 257 bp, Glycine max
  Clone ID: 700838923H1
cacacaactactacaagtacttccttacaatcaaaaccaacaacaactatggcaagttatcaaaagcactacgatgatcagggtcgcaaggttgacgactatggcaacgttgagaagcaaaccgacgaatacggcaaccctgttcatgctgctagtgtcacctatgtagccaccagaactgctgctggtggttacagtgatgacattaataagcaacatgataccaccaatgcctacggcgtagacactggtagaca

SEQ ID NO: 66719 - DNA, 256 bp, Glycine max
  Clone ID: 700838925H1
gcattgtatttggaacagttatgggaagtgttggggcattacatgcctttacttcacgagatgatgttgatttcttttctcatttggagatgcatatgaggcaggatcacccacctttgtgtggaagagaccacatggcatatagatctgcctattttcctgttaaggatgttattgatggggatctatgtgagcaatacccaacattgccaatggatttgcagagaaaaattgctgatgaattggacagaacccc

SEQ ID NO: 66720 - DNA, 258 bp, Glycine max
  Clone ID: 700838936H1
aagttatggtggatgactcagagaatgggaacttgtgggagggatgttcctctggagactcaattcatgcttattgagagcaaagagagtgaaactgatggggagaattctccaatcatctacactgtcttgcttcctctcctcgaaggtcaattccgagctgttcttcaaggcaatgacaagaacgagatagagatttgcctcgagagtggggataatgcagttgagactgaccaaggccttcacatggtttacatg

SEQ ID NO: 66721 - DNA, 254 bp, Glycine max
  Clone ID: 700838941H1
gtttcctttgtattatctttttcatctggacttgatcacgaaacataaggattgaattgtgaacctttgttttctgcagtgtaatgtttggaattgttttgtgtaaggtcttgcgttgcattgagccccgtgcatgatttggcgatgcctctctgggtttttgaattcttatattttcttttcgtttttatcttttgatgtttattatgagcatttaggattttagattttattctccatgacttccccttggg

SEQ ID NO: 66722 - DNA, 252 bp, Glycine max
  Clone ID: 700838943H1
ccgtttcgaaccgccgcgttatgaagccggcgtcaaagcgccctccatttaccattccgagagaggtccaacgacttcccaggtcctcgccgtcctcgccggcctcccggtcggtggcatcctgctcctcctggcgggattgaccctggcaggaaccctcaccggactggcagttgccacgccgctcttcgtcctcttcagcccggtgctggttccagccacggtcgccatcggcctggccgtggccgggtt

SEQ ID NO: 66723 - DNA, 252 bp, Glycine max
  Clone ID: 700838957H1
attgaagcctctgacatgtctgcattggaggctgtcataagctgtgatgaggaaaggttgagattggagaaagaagctgaagctttggcagcgcaggatgatggaggtggggaagctcttgaacgtatttatgaacgattggaagccattgatgcatctactgcagaaaagcgtgctgctgaaattttatttggtcttggtttcaacaagcagatgcaagcaaagaagacacgcgatttctctggtggttgg

SEQ ID NO: 66724 - DNA, 246 bp, Glycine max
  Clone ID: 700838961H1
cacacaactactacaagtacttccttacaatcaaaaccaacaacaactatggcaagttatcaaaagcactacgatgatcagggtcgcaaggttgacgagtatggcaacgttgagaagcaaaccgacgaatacggcaaccctgttcatgctgctagtgtcacctatgtagccaccagaactgctgctggtggttacagtgatgacattaataagcaacatgataccaccaatgcctacggcgtagac

SEQ ID NO: 66725 - DNA, 250 bp, Glycine max
  Clone ID: 700838972H1
tgggtattggagatcgtgttcgccatatttctctgtgggaccctctcatgcaccgcccaacctcatcataatagggtttctctctcaaccaccacaagtatctgtcccgccggctcccttctcgatttcgtcttagggtttccagattccacttgtccccttctcaattctcttggatccattgccgtcatcgagggagatgaagtttctttgcagaaggctctgaatatggttcacaagaataatcatg

SEQ ID NO: 66726 - DNA, 244 bp, Glycine max
  Clone ID: 700838978H1
ttctactctccccctctttctcattttccggtgacatggagtccaagtggggtggcgcccccgccagcatcatggcggcgaatttcgacgacttcaagtggatcgcctccatgttcgatcccggaaacgacgacgtcaagcccttctccgacgcagctttccaaaaccaggatgcagtaactgcattttcaacttgtggtggagtaacagatgatacccttgttcgttcccaaaacctcactcc

SEQ ID NO: 66727 - DNA, 246 bp, Glycine max
  Clone ID: 700838991H1
gctttctcttccttcataatttctcacctttcaaatctccattcagcttcattttctgcatagaaaaaacccttttctggagaaagaatatagtcttcagctggacaaggatcattcatcttgaaagaagagtttgtgtgtgacaatctttatagttctaaggagggtgcaagagagaactgaatttgctgtgatggcaactcgtagatatgcttttggaagagctgatgaggccactcatccaga

SEQ ID NO: 66728 - DNA, 255 bp, Glycine max
  Clone ID: 700839001H1
tgatgatattcgcacagccatacagaatgcaactggacctaaatcagcactgtttgttcctgaagtcccgtttgaagtgcttgtacgcaggcagatatctcgactattggatccaagtcttcagtgcgctaggtttatatatgacgagttaatgaaaatcagccatcactgtatggtcactgaattgcagcggttccctttcttgagaaagcgcatggatgaagttattgggaactttttacgagaaggcctaga

SEQ ID NO: 66729 - DNA, 245 bp, Glycine max
  Clone ID: 700839009H1
gttaacacatatacgctgatcaacaaggctgggaaagcagtgtatgtgaaatttcactggaagaccactagtggtataaagtgtctattggaggaagaggccattaaggtgggaggagccaaccacagccatgccactcaagacctccatgattcaattgctgctggtaactatcctgagtggaaactgtttgttcagacaatagatcctgagcacgaagacaaatttgactttgaccctcttga

SEQ ID NO: 66730 - DNA, 245 bp, Glycine max
  Clone ID: 700839010H1
accgaaacccttcttccattaccggcgaacgaagtcggtggcagaaaaggaacaacctcgattcccaaatcgtaaaatccgatgacgaccgctgcaagacccacatgggcacctgctaaaggtggcaatgaacaaggcggtactcgaattttcggtccctcacaaaagtactcttctagggacatcgcatcgcacaccactctcaagcccaggaaggaagggcaggacactcaggatgaattaaa

SEQ ID NO: 66731 - DNA, 243 bp, Glycine max
  Clone ID: 700839012H1
gaaagattccattatgctgggcccaaaatcaagattccaagagttcattaatgcacagactgaagatcagggcgaggaccaagggcatatttctatgccaagaaatagagagaaaacagtatctaattctcttgttacaaaggcaacttccttgctggaaaagaaatttggtcccttcgttgagtgggataatgttgaagtgttgaagaagcaaaatagaaaggcccgaacaactaatgatga

SEQ ID NO: 66732 - DNA, 240 bp, Glycine max
  Clone ID: 700839027H1
gagacaaagaatagatcctcaatacaatgaggttcaggctcagatggaaacaaatttgtttaaattgtctcttgatgatgttgaaactcctaaaggttccatgttggatcttaaaatttctcagtctaaaattgcacttcccaaaaacacagttggaggaaccattctgcgtagtgatctattggcaaattttttgacagagggcaattttagagcaagtgttgatttgcagcgcactca

SEQ ID NO: 66733 - DNA, 241 bp, Glycine max
  Clone ID: 700839030H1
ctcattcgattccttagcttcacatctccatggcgctgcaccggttactgaagaggaaaggaggcgtcgatgaacttaacgacgatttccctctcgcttctccggcaaccaagattcgccgtctcgttagtacttcctctctctattcttcgccatcaacaaccaaccaaacttgtttgtcattatttactaatcgattccgtttgttaccgtttcaggacgctgagttgccgccaatttt

SEQ ID NO: 66734 - DNA, 244 bp, Glycine max
  Clone ID: 700839032H1
cgtcgctccgcaccagtttcaccgcacgaatatcttgttgtttggagcgatccgagaaaaactctgtaaacatgttggtttaccaggacctccttacaggtgatgagcttctctctgactccttccgttacaaggaaattgagaatggaatgctgtgggaagttgaggggaagtgggttgttaaaggagcagttgatgtagacattggtgcaaacccttctgctgagggtggaggagaagatga

SEQ ID NO: 66735 - DNA, 242 bp, Glycine max
  Clone ID: 700839036H1
gtttctcaaggtctttgaaagagttgaattttcccatttcgtcagctccttccctttccttagcatagatttcaaaaaagaaatccatagcaatttcttgtgccaagggagtgattgttggattacctgtatcagcttcatcacatgcaggttttccatgaaagaccatttgctcactataagagtctttttttgtgtcacaggggggcaccttccatctttgagggcttgcagcttccggc

SEQ ID NO: 66736 - DNA, 238 bp, Glycine max
  Clone ID: 700839039H1
gttttgagggagacaacatgattgagaggtccacaaaccttgactggtacaagggtcctactctgctagatgcacttgaccagatctctgagcccaagaggccttctgacaagcccctcaggctaccccttcaggatgtgtacaagattggaggaattggaactgtgcctgtgggacgggttgagactggtgtcttgaagcctggaatggtggtgacttttgcaccaactggactgac

SEQ ID NO: 66737 - DNA, 238 bp, Glycine max
  Clone ID: 700839045H1
gaaatccgcagtgtctggatatcttactggtctcaggctgaccgttctctaggccaaaagatagcatctcgtctgagcatgaggccaaatatttaatgttgttgccaaccccagaatgattgttagagttgcagacgtgcaaagagtacgataaggatgtgattttcgatcaatttgaaagaacttatccatttcttgcaattttagttgtgtacccataactccatgcatgcaactc

SEQ ID NO: 66738 - DNA, 238 bp, Glycine max
  Clone ID: 700839046H1
cacaacttttatttatggctgtggcctaatttccttccttttccccaatcaaaattcaaaaccctaactatatccttcgattgattttttgttcattaatttgctgctagctattaaattgtgagagtcagagatgtcggaaaaattctcggcagcacttcggattggagatctcaacgatttcatcgctccttcgcaggcatgcatagtctccctcaaaggattgaaaaagaatgat

SEQ ID NO: 66739 - DNA, 237 bp, Glycine max
  Clone ID: 700839055H1
gaaaacctaagcttagaattagaaacaaagaaaagaagaaaggaaagaattgatcgttgaaaatgcagggaggaaagaaagcgggagagtccattaaggaaacagctacaaacattggtgcttctgccaaggctggcatggagaagaccaaggccactgtccaagagaaggcagaaagaatgacagcacgtgatccggtgcaaaaggagttggcaacccaaaagaaagaggcaaaga

SEQ ID NO: 66740 - DNA, 235 bp, Glycine max
  Clone ID: 700839060H1
gttgaaggaaatggctgaagcacaactacgagaccagcatggcaaccctgtcccactcaccgatcaatacggtaatccggttatcttaactgacgagcgcggtaatcccgtccaactcactggtgtcgctaccaccgctaccggcacagcaggttctgggtttgggtcctatggtaccggtgcttacggtggtggtgcaagtgcaaccaccgttgcagatcttttggcaacccaa

SEQ ID NO: 66741 - DNA, 236 bp, Glycine max
  Clone ID: 700839062H1
tggaatgccattgccatattctgaacgctttctactaactgtgaagcctctagcaaagcatgttcctccaatgttacatgagaaggacatgaattcacgagttttctatggaaacgattccatttatgtgctgcttagacttcatcagacattgtatgagaggatacaatcagcaaagattaactcatcatctgctgataggaaatggaaggcttcaagtgatacaagctccaccg

SEQ ID NO: 66742 - DNA, 239 bp, Glycine max
  Clone ID: 700839066H1
ctccctcaaacacccaacctccgccgtcaacggcgtcttgatcggtcgcatctccgcttccaacgacgtcgtcgagatcgccgatgccgtccctctcttccactctcacatcccccttcttccccaattggagatatctctcatcatgatagaggaatatttttctgctaaagggttgaacatagtgggctattttcacgcgaatgagagatctgatgacagtgagcttggtagtgtgg

SEQ ID NO: 66743 - DNA, 233 bp, Glycine max
  Clone ID: 700839068H1
gccctgtgtaactggtgccttgtcaaacgcggtcggattccgtgactggaaaaagcatgtccctttatcagcttctctctgtaaactaagcttcaattcaaatatagttgacatgaagatattatctcgatgtggttgtcagaaagttggaaatgaccaaagatgtttccgattatatgccctatttggaggaaaaaaggacaatagtgggaaaagtgatgatgctccttcta

SEQ ID NO: 66744 - DNA, 233 bp, Glycine max
  Clone ID: 700839069H1
gagaaaacaagaagtagtgagaagaagggagagaatggaggaaaaggcaaagctgagcagaagaagataggtatgaccgagacttggttgaagaagcaccgtcttctttacaatggagccactagacaccctcttattattagcattcgcgatggcaccatcaacactgcttccttcaaaacatggctcgcacaggattacttgttcgttcgggcgtttgtcccatttgtggc

SEQ ID NO: 66745 - DNA, 232 bp, Glycine max
  Clone ID: 700839070H1
atcgatatctttcatcgcctacggcaacgcttcatttgaatcaacactccttcctcttcctctctctcgtccattttagttcaactttgaataattctccttcgtatcaagtcttcctcatcttcaccacctttttgtaagtggatatttatgtgtctaagaacataaactaaaaaaccaaggcgagtgaaagaaaaaaaatgtcaggtgtgtctctagcagtgtctggtcc

SEQ ID NO: 66746 - DNA, 233 bp, Glycine max
  Clone ID: 700839078H1
ctctccctcttctccttttcctccataattataaaaaccgcacccaaacaccccccttcctctgccacccaaccaaatcctcgatctcgccgaacaaccccaccttttcaaaatccgattttccgatgccgaagaagcgaaagtctatcgccaccagtctcgacgaggtggatcgaaccctctacgcgtcgttttgcaccgccgccaactccctctcgcagctctacacgcac

SEQ ID NO: 66747 - DNA, 234 bp, Glycine max
  Clone ID: 700839080H1
caagtgtttcctgagtctgaacggaatcccacttaaaagtcgttctccttcctcttcgcagctgttatatagtactattttcatttcatatgtttatgcacctctatatatacatagacacatgtaaatggttgcaaaggaagataagataggtaccagctatcacatagtttatttaatccgttatatgccacctgatatataggcatattagctagttaggtaggtatagta

SEQ ID NO: 66748 - DNA, 236 bp, Glycine max
  Clone ID: 700839081H1
gtactaagctaaaccatttcttattccctcaaaatcaaaacctttttctttctagctatttcccttttcaaatcatgccacctaacatcaccaccgttgttgccaatgtcaccaccgagcaattacccaaggctcgtggaggaagtgggcgtgccttcgtgacctttcttgctgggaacggtgattacgtaaagggtgtcgtgggtttggccaaaggactgagaaaggccaaaagc

SEQ ID NO: 66749 - DNA, 232 bp, Glycine max
  Clone ID: 700839083H1
acacaactactacaagtacttccttacaatcaaaaccaacaacaactatggcaatttatcaaaagcactacgatgatcagggtcgcaaggttgacgagtatggcaacgttgagaagcaaaccgacgaatacggcaaccctgttcatgctgctagtgtcacctatgtagccaccagaactgctgctggtggttacagtgatgacattaataagcaacatgataccaccaatgc

SEQ ID NO: 66750 - DNA, 230 bp, Glycine max
  Clone ID: 700839084H1
cggttcatcagcgtgtgtctcagccatggcgtttccctacatggaagccgttgtcggatttatgatattaatgtacatttttgaaacttacttggatgtgcgacaacatagggccctcaaacttcctactcttccaaagactttagaaggtgttatcagccaagagaaatttgagaaatctagagcctatagtcttgataaaagccacttccattttgttcacgagtttg

SEQ ID NO: 66751 - DNA, 227 bp, Glycine max
  Clone ID: 700839086H1
ggtcgatggaacaatgtaggcaagggaagtcggcaaaatggatccgtaacctcgggaaaaggattggctctgagggctgggcacgggggtcccagtcccgaacccgtcggctgtcggtggactgctcgagctgcttccgcggcgagagcgggtcgtcgcgtgccggtcgggggacggattgggaacgggcccttcggggcctcttccccgggcgtcgaacagtcaac

SEQ ID NO: 66752 - DNA, 229 bp, Glycine max
  Clone ID: 700839089H1
gtcgaatgggagcattgcttttcctaatctctgctttactttctcggggactggacttggttcaaagtgacagggatgatcccagcctaccactggttactgcaccttttgggcatgcctcccaggaaattgtgaacctactgctctgtggggaggctgttcctaatgtgtttgatggaaggatggatttaggaggaggaatgtttgtgaaaggtatatccggatatgt

SEQ ID NO: 66753 - DNA, 229 bp, Glycine max
  Clone ID: 700839090H1
cacacacaactactacaagtacttccttacaatcaaaaccaacaacaactatggcaagttatcaaaagcactacgatgatcagggtcgcaaggttgacgagtatggcaacgttgagaagcaaaccgacgaatacggcaaccctgttcatgctgctagtgtcacctatgtagccaccagaactgctgctggtggttacagtgatgacattaataagcaacatgataccac

SEQ ID NO: 66754 - DNA, 229 bp, Glycine max
  Clone ID: 700839091H1
ctctctcaagggttccaaacacaaagccaccattcactgttggccaactcaagaaagccattccaccgcactgctttcagcgttccctcctcacttcattgtcctatgttgtttatgacctttcattggctttcattttctacattgccaccacctacttccacctcctccctcaccccttttccctcattgcatggccaatctattgggttctccaaggttgcattct

SEQ ID NO: 66755 - DNA, 232 bp, Glycine max
  Clone ID: 700839096H1
gggagcaatgaagatcattctctacaaaaggcggacgtgtacaagacactcagtggtcacagagctggtgaggctgccattgtctatgaacatggagctgatgttgaggcactaatgccaaaactacggcgatctgattactacacactgcctcgtatacatgaactggcggccaaggaaagagctgaaccaggattctgcagtcatgttaaggacttcgtggttggaaggc

SEQ ID NO: 66756 - DNA, 236 bp, Glycine max
  Clone ID: 700839106H1
gtttcgaatagattatcctaagtctttgggaatagtgctgcaatggcttcaagtcaggaggaggtgacccttttgggagctactggaagcccatttgtgtgcagggttcatattgccctcaagttgaagggagttcaatacaaatatgtcgaagaaaatttgaggaacaagagtgaactgcttctcaaatccaacccagttcacaagaaggttccagtgtttattcacaatgagaa

SEQ ID NO: 66757 - DNA, 237 bp, Glycine max
  Clone ID: 700839109H1
tcccatgctaatgtatacagagcgtaggcttgctttgagcactctaatttcttcaaagtaacagcaccggaggcacgacccggccagttaaggacaggagcgcatcgccggcagaagggacgagccgaccggtgcacaccggaggcggaccgatcgacccaacccaaggtccaactacgagctttttaactgcaacaacttaaatatacgctattggagctggaattaccgcggctg

SEQ ID NO: 66758 - DNA, 234 bp, Glycine max
  Clone ID: 700839110H1
gcaattttcgggatcctgagagcaatgctgattttgaggttcaggagaagttgtctctgctggagtggtttgcaaatgaatacaaacgcttcggttgcactcttgagtttgtcaccaataaatcacaagaaggctcacaattttgcagaggttttggtgggataggtgggatcttgcggtaccagctggatatgcgatcatttgatgatttctctgatgatggaggcgtgtacg

SEQ ID NO: 66759 - DNA, 235 bp, Glycine max
  Clone ID: 700839122H1
atgatatagaaagagagagaagaagaaaagaagaacaaagatgcaatcctcaaaggagaagatgaaaaacatggcaagtgctgccaaggaacaagtcgacatctataaagccaaaatagacgagaaggcagagaaagcaacggcaagaacagaagaggagagggtgatagcccatgagcacgcaaaggcaaaggaagctggagcaaagatggagctgcatgaagctaaagcaagg

SEQ ID NO: 66760 - DNA, 234 bp, Glycine max
  Clone ID: 700839124H1
tttcaatctctctacctaatttctgtctctctctctcctgtatttgtcttgattccaatgctccgcaaggtttcgagcatcgtagagaacagttttgccatattaggtgcatcttccatttaagataagctgcaacaaggtgtgcctgaatccattgagtctctaaggattgcaggcattaaagtatgggttctgactggagacaaacaagaaactgccatatccattggctac

SEQ ID NO: 66761 - DNA, 234 bp, Glycine max
  Clone ID: 700839125H1
gaaaacctaagcttagaattagaaacaaagaaaagaagaaaggaaagaattgatcgttgaaaatgcagggaggaaagaaagcgggagagtccattaaggaaacagctacaaacattggtgcttctgccaaggctggcatggagaagaccaaggccactgtccaagagaaggcagaaagaatgacagcacgtgatccggtgcaaaaggagttggcaacccaaaagaaagaggcaa

SEQ ID NO: 66762 - DNA, 232 bp, Glycine max; identical to SEQ ID NO: 66477
  Clone ID: 700839144H1

SEQ ID NO: 66763 - DNA, 235 bp, Glycine max
  Clone ID: 700839146H1
gttcttcgctgaactgaacgaggttctgacaagggagttagccgaggacggatactccggcgtggaagttagggttacgccgatgcgcaccgaaatcatcatcagagccaccagaacccaagccgttctcggtgagaagggaaggagaatcagggaacttacctcggtggttcagaagaggttcaagtttcccgagaacagtgttgaactttatgctgaaaaggtcaacaatagg

SEQ ID NO: 66764 - DNA, 97 bp, Glycine max
  Clone ID: 700839156H1
gtgccaatacatcatatgttgagagttgttgggacatgtaaagcctacgtggtggtggagcagggttgttcacttttggatttagaaattatttatt

SEQ ID NO: 66765 - DNA, 226 bp, Glycine max
  Clone ID: 700839175H1
gtttggggattttcgcccagaacatggtcagagcggcggagcatcaggcgctggaccccaccgccgtccacggcgtcacgcagttctccgatctcaccgaggacgagtttgagaagctctacactggcgtcaatggcggcttcccgtcatcgaataatgccgccggcggtattgcgccgccgttggaggtggacgggctgccggagaattttgattggagagagaa

SEQ ID NO: 66766 - DNA, 231 bp, Glycine max
  Clone ID: 700839179H1
gttgcagaccgagctagctagctagcaagcaagcacagagatggaggcaaagcgaggccatgccctcatgtgcttggcacgtgtttcactcttcctctgcgctctaaccctatccgctgctcacggaagcaccacggttcaagacatcgcgagaaagttgaaactcggggacaacgagcttctgcgcacggagaagaagttcaaggttttcatggagaattacgggaggag

SEQ ID NO: 66767 - DNA, 232 bp, Glycine max
  Clone ID: 700839180H1
ggagaggacggcccaacccaccagcctattgagacgcttgctcacttccgcgctctgcccaacatgatggtctggcgtccagctgacggaaacgagacttctgctgcatactacgtcgctctcacttcggagaagaccccatcgatcctcgcactcacccgccagaacctgccacagctcgagggctcaactatcgagaacggaatcaagggtggttacgttgcagttgagg

SEQ ID NO: 66768 - DNA, 226 bp, Glycine max
  Clone ID: 700839184H1
tgctccgtaatttctattctaccaaattttttctcaacagagaaaaaccacattggaactatacgcatagtgtttccaaccagcttcaattgcaaaggtcaagagcagacaaggtagaagataagctaaaagaagagcaagaaacacaacggatttctttcaaatcagaagtgaagaaggcggatggaaatgatgggattagcaaatactgttctgatgatgaaga

SEQ ID NO: 66769 - DNA, 225 bp, Glycine max
  Clone ID: 700839187H1
aaagaaaggggtggtggctgcttcgaaagcttaataatttgtttatttccagaacatcatagttttcgcagcagcaaactaacaaattactcatatcatataataagatggcccgttctctctcgcaagccaaacgtattggtgtccttgttgctcaatctatctccctaattcccgttcatcggcgaggttacgcagtggcatccgatgtatcggtaagagttg

SEQ ID NO: 66770 - DNA, 224 bp, Glycine max
  Clone ID: 700839189H1
ctctaagttcgttcctttcagcaatggatacaaagatctcgtcaattcattccttttcctcatatatattgtttttaacctaaaaccttaaaacccaataacagcttcccctttcccttctcaagactgcccaaggccaccccatgctggtggaactgaaaaatggggagacttataacgggcacttggttaattgtgatacatggatgaacatccatctccga

SEQ ID NO: 66771 - DNA, 258 bp, Glycine max
  Clone ID: 700839225H1
ctcagttacacagtgatatattaaagtcagaattatttgcaaattatgtttcaatatggccaacaaagttccaaaataaaaccaatgggataacacctcgaagatggctccaattttgcaaccctgagctaggcgggataatcaccaagtggttaaaaactgataaatgggtaaccaatcttgacttgttaacaggtcttcgacagtttgctgacaatgaagatctgcaagcagaatggctgtctgcaaagatggcta

SEQ ID NO: 66772 - DNA, 257 bp, Glycine max
  Clone ID: 700839228H1
caagactgagagcaactgaaccagcaacacttagcattccccatttggttacgtccttaaagacaggctctgaggctactcaggaagctgccttggatgcacttttcctgcttaggcaagcttggtcagcatgtccagcagaagtttcaagagctcagtcaatagcagctgcagatgctattcctttgctgcagtacttaatccagtctggcccacctcgctttcaggagaaggcagaatttttattgcagtgtttg

SEQ ID NO: 66773 - DNA, 256 bp, Glycine max
  Clone ID: 700839246H1
caaattctttgtcccacaaaagatggggttcactcccacaagtactgcaacatgctttctcataatagcacctctggttgtgttatggtgttggaagctactaaagtgggtgtggctgaggccaaagagattggagagagcattaagggcacagggccttcaggggaatccctacagcctcttgattggggacactaaggaaatgtacacagtgctcatgcaagctgccagatctcaacaatctacaagttctttt

SEQ ID NO: 66774 - DNA, 263 bp, Glycine max
  Clone ID: 700839248H1
caaccattctggcttcggcatccccagttttagaaaacgtcattgcgtccaaccgagtcgtcaaaatccacggcgttcccgacggcgccgtcacggccttcgtagcgttcctctactcctccaggtgcacggaggaggacatggacaagtacggaatccaccttctagcattgtcgcacgtgtattcggtgccgcagctgaagcagaggtgcatcaagggactggcccagcgcttgagcacggagaacgtggtggacgtgttg

SEQ ID NO: 66775 - DNA, 254 bp, Glycine max
  Clone ID: 700839260H1
caaagtataattgcaaaaagatggttttctcatcatctgcaaccgtttatggccaacctgaaaagataccgtgtgaggaggatttcaagttacaagctatgaatccctatggacggaccaagcttttcctggaagaaattgcccgagatattcagaaagctgaaccagaatggaagatcatattactgagatacttcaatccagttggggctcatgaaagtggcaaactcggtgaagatcccaagggcatccca

SEQ ID NO: 66776 - DNA, 253 bp, Glycine max
  Clone ID: 700839275H1
gagggaaggggcttgtggccggaaaaaccacggcagcgaacaaggacaaagacaaggataagaagaggcccgtctctcgttcatcccgtgctgggatccagtttcctgtgggacgtatccacaggcagttgaagcaaagggtgcaagcaaatggacgtgtgggggcgactgctgctgtgtacttggcctccattctggaatatctgactgctgaggtgctggagctggcagggaatgctagcaaagatcttaa

SEQ ID NO: 66777 - DNA, 263 bp, Glycine max
  Clone ID: 700839282H1
gaaacaaataactaagaatgaaagtgaaggtgatggggttcagcgtgatacccaaaatcagaagcagcagcgtttgcctgttctccgttcgagcctgccacgaactccctcatggaccttcctgcatctacgttggccccctccacaccgcaacccaagagaccctcgaagctctttactctcaggctcgtgatgcttattacagtggagaccctttgatacttgatgacatgtttgatagagtagagttgaagcttaagtgg

SEQ ID NO: 66778 - DNA, 252 bp, Glycine max
  Clone ID: 700839288H1
ccgacataccgtgaacatgcccatacgtgatcacagagattctggtaaacacgtgcagtgtttcaaaagttactaacggacacagatccaagcagttgcgacttgcgagatgcattcgacgaagagtagcaccagcgataatatcaatatcaatatcaaatcaaaagataaagaaatccatcgatgctaccataactaccgaaagaagagaaagcgtccttgccaagacgctgtggctcccaccacggaaga

SEQ ID NO: 66779 - DNA, 249 bp, Glycine max
  Clone ID: 700839343H1
gccaccacctgatcctgtggcagtgttacgtggccatcgagcttcggtcacagacatttcttttcatccctctaagccaatattattctccggttctgctgatggtgaagtgcggatttgggatacacttcagcatcggacagtgtcatcagcatggttacatagtgccgcacatggtattgttgctgttgctggtagttcttcccttggaaacaataaatttgtcagccagggtagggatggactgta

SEQ ID NO: 66780 - DNA, 253 bp, Glycine max
  Clone ID: 700839353H1
cgaaaccaaaacctccttcaaccacgctagttcaactcaaccaattacttcatattcatatatatggattcccctgcagtttcctctatccactttcacaacgcccatgtcttacccgaaccagacctttttatgcacactcccggtggtaaccgcattccagcgcacgcaaccattctggcttcggcatccccagttttagaaaacgtcattgcgtccaaccgagtcgtcaaaatccacggcgttccgacgg

SEQ ID NO: 66781 - DNA, 246 bp, Glycine max
  Clone ID: 700839376H1
gtcccacaattcctcttttcttgtgcaccttccttccttgttcaaaagggtcttcctagaaacactcaaggtgtggctgggttaggccatgcaccaatttctcttccaaaccaactcgcttcccactttggcctacaacgccaattcaccacttgcctttctcgctaccctacttcaaagggtgctataatattcggggatgcacctaacaacatgcgacagtttcaaaaccaagatatttccacg

SEQ ID NO: 66782 - DNA, 244 bp, Glycine max
  Clone ID: 700839396H1
attgtaataatttgtaaaaactatggctagcgatggcagcgaagagtttaggctagtgtcaccggcgttcagcaacgaggggaagttacctcggaactacactgacgagggccagggtgcgaaaaagaacatatcccctccgttggagtggtacaacctgccggaggggaccaagaccctcgccctcgtcgtggaggatatcgatggatccgattcagatgggcccatcatgccatggcccact

SEQ ID NO: 66783 - DNA, 238 bp, Glycine max
  Clone ID: 700839628H1
cgtctttgaagtttctaagatgacttctccctacattaaatgtacagtctctttcttcatagcatttggaaatttggctgatgacaccatcaattttgaggcttttccccataagctggtgcagtttggagagattcaggaaaaagttgtattgaaattttcacaagaggaatttcttacagcttggtcaactcaggtgcgtcctgcaacaactctgttggctgatgggtgccatatt

SEQ ID NO: 66784 - DNA, 237 bp, Glycine max
  Clone ID: 700839629H1
gctgaagatgctggaacaaagcttgaggcagcaaagagcgtttcatcaaatggggatgatggaacaggaggcttggaggccccagagagggttgccagaacgatctgtcaacattttgagagcctggcttttcgagcatttccttcatccgtacccaagcgatgcagataagcatctgttggcacgacagactgggctatcgagaaatcaggtatcaaactggttcattatgcgagg

SEQ ID NO: 66785 - DNA, 236 bp, Glycine max
  Clone ID: 700839651H1
cacacaactactacaagtacttccttacaatcaaaaccaacaacaactatggcaagttatcaaaagcactacgatgatcagggtcgcaaggttgacgagtatggcaacgttgagaagcaaaccgacgaatacggcaaccctgttcatgctgctagtgtcacctatgtagccaccagaactgctgctggtggttacagtgatgacattaataagcaacatgataccaccatgcctac

SEQ ID NO: 66786 - DNA, 234 bp, Glycine max
  Clone ID: 700839655H1
gttgacgcaatgtgatttctgcccagtgctctgaatgtcaaagtgaagaaattcaaccaagcgcgggtaaacggcgggagtaactatgactcttaaggtagccaaatgcctcgtcatctaattagtgacgcgcatgaatggattaacgagattcccactgtccctgtctactatccagcgaaaccacagccaagggaacgggcttggcggaatcagcggggaaagaaaccctgt

SEQ ID NO: 66787 - DNA, 235 bp, Glycine max
  Clone ID: 700839673H1
gcttagaattagaaacaaagaaaagaagaaaggaaagaattgatcgttgaaaatgcagggaggaaagaaagcgggagagtccattaaggaaacagctacaaacattggtgcttctgccaaggctggcatggagaagaccaaggccactgtccaagagaaggcagaaagaatgacagcacgtgatccggtgcaaaaggagttggcaacccaaaagaaagaggcaaagataaccagg

SEQ ID NO: 66788 - DNA, 258 bp, Glycine max
  Clone ID: 700839712H1
gatcgcagtgggtatagtgtggggcgccaccaacgctatcatgcgccggggtgcgctactctgggacgaagctctcaaatcctccgcaaagccaaatccgcactcaactctgtgccaaaagatgcgcatctccctcggaaactgggtgaagcttctctccatttggcaatactcgatccctttcctcatcaacctctctgcctccgccactttcttcgccatcctctccgacgccccgctctccctcgccgtccccgt

SEQ ID NO: 66789 - DNA, 263 bp, Glycine max
  Clone ID: 700839715H1
cacaactactacaagtacttccttacaatcaaaaccaacaacaactatggcaagttatcaaaagcactacgatgatcagggtcgcaaggttgacgagtatggcaacgttgagaagcaaaccgacgaatacggcaaccctgttcatgctgctagtgtcacctatgtagccaccagaactgctgctggtggttacagtgatgacattaataagcaacatgataccaccaatgcctacggcgtagacactggtagacagcattcta

SEQ ID NO: 66790 - DNA, 253 bp, Glycine max
  Clone ID: 700839720H1
cccagaaaacaaccccacacagcaatttcaaaatcgatatactgagccagataatcgtgactggcgtggaagatctggccaactttctggtaatgcagatgagaggtcttgggataatctcaaggagaatagggagtttggcaatactagtaatcgtcaagaccaactgaactctcagtttgcaaggacacaaatctcttctaaccaagggggaggacctactccgacactagtcaaggctgaggtgccatgg

SEQ ID NO: 66791 - DNA, 253 bp, Glycine max
  Clone ID: 700839721H1
caccgataggcaacaacatgggactactggtggctatgccggtgacactggtaggcaacatgggaacatcggtggcccttactatggaaccaacaccgcagacaccggtactggtcccagaagtggaaccacgggcggcaccggttatggaggcactggtggcactgattatggaacaactggtggcactggttatggaagtggaactgggtatggagtcaacactgggggtgcgcacactgaagcaggatat

SEQ ID NO: 66792 - DNA, 257 bp, Glycine max
  Clone ID: 700839724H1
ggcacaagttgaacttcgtgacgagcatgggaacccagttgaactaacagatgcatatgggaatccggtttggttaacggacgagaaaggcaacccggtgcacctcacggctgtggcaaccaatgcacacaaatctatgcttcagaatgacaccccacaagagcttcctcactccaagagttcaagctcgtctgaggatgaagggcatggagagaggatcaggaagggactgaaggataacatagaagaaaagttac

SEQ ID NO: 66793 - DNA, 255 bp, Glycine max
  Clone ID: 700839725H1
gcagttgcagaccgagctagctagctagcaagcaagcacagagatggaggcaaagcgaggccatgccctcatgtgcttggcacgtgtttcactcttcctctgcgctctaaccctatccgctgctcacggaagcaccacggttcaagacatcgcgagaaagttgaaactcggggacaacgagcttctgcgcacggagaagaagttcaaggttttcatggagaattacgggaggagctactccacagaggaggagta

SEQ ID NO: 66794 - DNA, 253 bp, Glycine max
  Clone ID: 700839741H1
cgttcatcggcgaggttacgcagtggcatccgatgtatcggtaagagttggattgggtaatattgggcgaaggaatggaatcgtgggaggtgtagaagagaagcctgatacaagagatggttcaaaagcctactcaactgattgggccccagacccagtaacaggttactataggcccattaaccacacccctgaaattgacccggtggagcttcggcataggttgctccgatcacctccactagagcctaga

SEQ ID NO: 66795 - DNA, 251 bp, Glycine max
  Clone ID: 700839753H1
ctctgtgaagaagctcaaagcgttaaactgcttcttcttcttcaatggcggcagaatcatctcgcagtagcgctaaacgcctctttatggaagaagacgacgacgaattctccaaaaagccaccagcaaaaagggttaggtttccaaagggaaagaaagtgaagccaggagatgaagtggtggtggacaaagcaaatgttgaggagggtgaagaagttgacttggtgaatgctaaaactgctaccaatgct

SEQ ID NO: 66796 - DNA, 252 bp, Glycine max
  Clone ID: 700839756H1
ttccattccagctcttaacaattacatgagacagagaaagggttgacggacagagaacccaccttttgttgtattgcagatccatccgctctgccaccaggtgaatggaaggaagtggcggtggcggtgcttcaccgtctgcaccggtgaagcagtatttgcacgatttctcgaagctgtttcagtactatctggataaatccactccacattccacgtacagatggattgggactttcgtgatagcatcca

SEQ ID NO: 66797 - DNA, 209 bp, Glycine max
  Clone ID: 700839760H1
ccaaatgctaatcgtgggagaaaaacatttcatggtgcaggtaggaaagggtggcgtccacccaagtgaaggttgttattatttattttgtgctctactgcacactgaactaaatttcttgagttgggccattttgcaaggaatgtactacacctgtaaatttcttgtaagtctctcttgaattttgaaatgaattcggttagttcctg

SEQ ID NO: 66798 - DNA, 257 bp, Glycine max
  Clone ID: 700839763H1
gttttaaatccacaaaatccttttgtgttaaataggtggatggggaaactgactttcccccagggcacttcccgaagtgttaaaagaatgcctctttctatagggggaggagctggtgcaaagaatgctattcttatgaatatgccaaatgctgttctttcaatgtggagatattttgttggagatctcgtctttgaagtttctaagatgacttctccctacattaaatgtacagtctctttcttcatagcatttgg

SEQ ID NO: 66799 - DNA, 250 bp, Glycine max
  Clone ID: 700839772H1
gcgcttcgcaagaaatcgcagttccaataatcgccgaaatcgatctctacaagtacgacccatgggaccttccaggaatggctttgtacggagagaaagagtggtattttttcacgccgagggaccgcaagtacccgaacggttcgcggccgaaccggtccgcggggaccggatactggaaggcaaccggagcggataaaccggttggcaaaccgaaacctgttgggatcaagaaagcattggtttttta

SEQ ID NO: 66800 - DNA, 249 bp, Glycine max
  Clone ID: 700839776H1
actacaagtacttccttacaatcaaaaccaacaacaactatggcaagttatcaaaagcactacgatgatcagggtcgcaaggttgacgagtatggcaacgttgagaagcaaaccgacgaatacggcaaccctgttcatgctgctagtgtcacctatgtagccaccagaactgctgctggtggttacagtgatgacattaataagcaacatgataccaccaatgcctacggcgtagacactggtagacag

SEQ ID NO: 66801 - DNA, 255 bp, Glycine max
  Clone ID: 700839779H1
gtattcgcagaactttgtttcccaatttccattgcctccgcttccacctcgcaaccatgatcatcccggagaagaaccgcaaggagatctgcaaatacctcttccaagagggagtttgcttcgcgaagaaggacttcaatttggccaagcaccctgagatcgacgtgccgaatctgcaggtgattaagctgatgcagagtttcaagtctcgcgagtacgtgagagaaacttttgcttggatgcactattactggt

SEQ ID NO: 66802 - DNA, 247 bp, Glycine max
  Clone ID: 700839781H1
cggcaaaggacatggatcggataaaagggccatggagtcctgaagaggacgaagcgttacggaggttggttcagacttacggccctaggaactggtccgttataagcaaatccattccgggtcggtctgggaaatcgtgccgcttgcggtggtgcaaccagctgtctccggaggtggagcgccggcctttcacggcggaggaagacgaggcgatcctgaaggctcacgccaggttcgggaacaagtg

SEQ ID NO: 66803 - DNA, 247 bp, Glycine max
  Clone ID: 700839785H1
cttatcttagctaccccatcacaacaaccacgatactatttctcatactctattaggcaaaaacaccaccaaatgggagaggaaaaggagcagcctaagaatgacaccgagaaaaagcccgaggaggtagcccccaagaaagacgacggacccatccctgtcgtttacaaactcgacttgcattgcgagggatgcgtcaagaagatcaaacgcacctgtcgccacttcgaaggtgtggaaaccgtta

SEQ ID NO: 66804 - DNA, 246 bp, Glycine max
  Clone ID: 700839786H1
gttgcgtttgagttggcgattccgaaatggaggacgacggttccaactcgatccgccgcatgtcaagccgaacgcgaaaagttgcgtccaaaatggccgccgcgcttgccagcgctgacaaccgcactcaggcggcacttgcacgcttggatgcattggagaatgacaatgcgggttttgaaatcgcagatgccaataatgatgacgatgacgcttctctagacgaggaggatcaatgtttatatg

SEQ ID NO: 66805 - DNA, 255 bp, Glycine max
  Clone ID: 700839812H1
aaagaagaaaagaatggtaacaatagctggtggtgtgagtctttcaagccctagcagggtatttgctaatgctaagggaatagactcagcacaaaaggcccaggccgtgaggtttccagctctgtcgaggcccattcaaaagtggcctggtttggtgaagacccggcccgttcgggcgacgccggagaagatatcggagaaggtagaggagagcataaagagcgcggaggaggcgtgctcgggaggcggcggtga

SEQ ID NO: 66806 - DNA, 131 bp, Glycine max
  Clone ID: 700839827H1
caaccatgtaaaaagtgatgatgacatggaaaatgtaaaaattatctttgctcatgatgtggatgcttccctgtgtggagaggctgctgcttcttgtaaattgattgatgtaataaagtgctcgctaacac

SEQ ID NO: 66807 - DNA, 254 bp, Glycine max
  Clone ID: 700839845H1
aagagattgggtgcaagacatgtgatgattatggcagcagatgttgtgaaggaagatgattgtaggagatttgttaacgaaaccataaatgtctttggccgtgtagatcatcttgtaaatacagtgagtttgggacatacattctgctttgaagaagctacagacacatcagttttccctgttctcctggatattaatttttgggggaatgtttatccaacatttgtggctcttccttaccttcatcaaagcaa

SEQ ID NO: 66808 - DNA, 251 bp, Glycine max
  Clone ID: 700839853H1
cagccaagtcgtaaaagggtttcaagggatggaaaacatgcagagcttctggcaattgggtgatgaactccgtgggcactcaaaagcatcggaggatcacaagtggttaatggttgcctcgaaactggccgaacagacaagattgaagggggagcgtgtgaacaaccttgatctttcaaagggacccattgaaacaaggtcaagggataaatttgggttccaggaagagaacaaatttgattctcttaact

SEQ ID NO: 66809 - DNA, 249 bp, Glycine max
  Clone ID: 700839854H1
gcagtgatagcaaagagaagatcatttcataatcagactcacctaactccgccatggctgctgttccctctactttcgctctaaccaaatctgcattgtccataaacaagctggaccactctctggtcaagatcaaaccatacagcttctctctgaatctaaaccgtctagggaggatggaaacatctttaaccagaaggcctctaacaattcaagccacatatagtgatggtggaaggcccagcagtg

SEQ ID NO: 66810 - DNA, 251 bp, Glycine max
  Clone ID: 700839868H1
gtggaattcatgatggggtacaggaacgacactttcgcggaggataatgcggttcgtgaagctgcgtcggggctagagagcgtcgagaaactcatcaagttgctgtcgcatactcaacaacaataccagacaacctcaaagtcttccatggaaaacatcgacaccgactacacagctgtcgctgacgtcgcggtttctaagttcaagaaggtcatttcgcttctgggccgcaccagaaccggtcacgcgcg

SEQ ID NO: 66811 - DNA, 253 bp, Glycine max
  Clone ID: 700839894H1
tgaacccacccccaaaaatgtcgtattgatatataccccagacacatttttaataaagacatcttcttagtcataattttctatacatatgctttgttctgttcctttcaatagtaatcagaccgaatgtaaatgtttctaaagagccttggggagtagaaatttaaaacacatcgttgaaaatgcatgctcacgtattaggacaacacgcccacattcgtctcacctcttttaattgtcgtaatgatgtgtg

SEQ ID NO: 66812 - DNA, 263 bp, Glycine max
  Clone ID: 700839922H1
gaagcattatccaccagcattgactgatgaagtgtggagattggagaagataggcaaggatgggtcattccataagaagctgaataatgcaggaatagtcacagttgaagaatttcttcggcttgtggttaaagatcaacaaaaattgcggaatatccttgggagtggtatgtcaaacaagatgtgggaggctcttttagaccatgcaaaaacatgtgttctaagtgggaagctctatgtttattatccagaagatgcaagaa

SEQ ID NO: 66813 - DNA, 259 bp, Glycine max
  Clone ID: 700839928H1
gtactctctgcaatgcagaaattgaaactggttctttgatccctaatcatgctcttagagctgcagcagccgctgtcaagcatgaggacgatcggaggttatttcgtaatgccgctctccgaaagcggcggaaagaaatgggtgaccaaatggattcaatgagaagagtgaatagggaaaatggagattttaatgctaccgatggacttcagcggggcgtacaatatccattttcggtaaatgagaaagttgttattaa

SEQ ID NO: 66814 - DNA, 237 bp, Glycine max
  Clone ID: 700839985H1
caaaaagtttacgttacaaatcgcataataaccgtcctaagtttattgagagaattttgcaagtgtgagaaacatggcatctcgtcaaaacaacaagcaagagcttgatgaaagagcaaggcaaggagagactgttgtcccgggtggaactggtggcaagagcctggaggctcagcaacaccttgctgaaggaaggagcaagggagggcaaacaaggaaggaacagctgggtacaga

SEQ ID NO: 66815 - DNA, 236 bp, Glycine max
  Clone ID: 700839986H1
gaccactgttcattccatcaccgctacccagaagactgttgatggaccatcagccaaggactggagaggtggaagagctgcttcatttaacatcattcctagcagcactggagctgccaaggctgttgggaaagtcctccctgctttgaatggaaaattgactggtatggcattccgtgttcccaccgtggatgtctctgttgttgacctcacagtgaggctggagaaagaagctt

SEQ ID NO: 66816 - DNA, 233 bp, Glycine max
  Clone ID: 700839990H1
gaaagagtgaggagagaattacagagcattttccaacacgattacacgaccgaatcaaaccctctctttctctccgaagctgcgtttaatatcttactcgccttagattgttcttctctttcattatactgttctcttttcgatttgagggaacagtacaagagtgtgaggatcggttaacccaactgcacaggtagtcactaaaataatggagtctcacgatgagactggat

SEQ ID NO: 66817 - DNA, 233 bp, Glycine max
  Clone ID: 700839991H1
tgcagaccgagctagctagctagcaagcaagcacagagatggaggcaaagcgaggccatgccctcatgtgcttggcacgtgtttcactcttcctctgcgctctaaccctatccgctgctcacggaagcaccacggttcaagacatcgcgagaaagttgaaactcggggacaacgagcttctgcgcacggagaagaagttcaaggttttcatggagaattacgggaggagctac

SEQ ID NO: 66818 - DNA, 233 bp, Glycine max
  Clone ID: 700839992H1
ctggaacaaggacaaagcatttaggaatgattatgaaaaaagaattttggcctcattggatatgcgacagttgagtcgggacggacggatgaggaacccggatgaaaagccaattctggaagaaccaaaacctgctgaagctgaagcattaccaaaaatggctgcaaaacagccaaaggaggaacctaagccttctccacaagaaactttgcctgctcagaaagaatccaaaa

SEQ ID NO: 66819 - DNA, 233 bp, Glycine max
  Clone ID: 700839994H1
ggatattgtcgtagggagtgtattggctcctggagctcaaagagctagtgaatgccgaatggctgcattttatgctggttttcctgaaactgtgcctgttaggactgttaataggcaatgttcatctgggctccaggctgttgctgatgtagctgctgctataagggctgggttctatgacattggtattggtgccggtttggaatctatgacaactaatccaatgggatggg

SEQ ID NO: 66820 - DNA, 224 bp, Glycine max
  Clone ID: 700840036H1
gaatagggtcacactcattttagtagagaagaataggaggacgatgcaagtgtaaatatcacttccttggttttgtctgctggttcttgacatcagatcgccagagcagctggggtaggcatagtgtgctttctctggattttgatatcattatccaaacaggtttgtattctgtttctcaccatctctcgtggctgggggtttctctccacttcactcctaga

SEQ ID NO: 66821 - DNA, 227 bp, Glycine max
  Clone ID: 700840040H1
cttctgcacctatgctttcctctaccaccagaaggagatgctctccgaccgcgttcgcatggacgcttacttcgacgccatttttcaaaacaaacgccacttcgctggcaagactgttttggatgtggggactggaagtggcattcttgctatatggtcggcacaagcgggtgcgaggaaggtgtatgcagtggaagcaaccaagatgtcagaacatgcgcgtgcac

SEQ ID NO: 66822 - DNA, 246 bp, Glycine max
  Clone ID: 700840059H1
tgatgctattttggcttacaaaaggggtctcgaaatcgaccctcacaacgagccccttaagtctggtttggcagatgcgcagaaggccttggccgcggcctccaggcctcgcccctcggcctctaaccccttcggtgatgctttctctgggcctgagatgtgggcccgtctcaccgcagaccccaccactagggcttacctccaacagcctgatttcgtgaagatgatgcaggatatccagagaga

SEQ ID NO: 66823 - DNA, 240 bp, Glycine max
  Clone ID: 700840073H1
ccaaaaagctcttttccttctaaatttgattccttagttcagcattctattattatatatggcttcttcaccttcctcagaaaacaaaaacctagagggagtagctggtggtgccggagagaaacccattccacttggtgagaacgttctgcagaagcatgctgcattctttgacttgaataaagatggtgtcatctacccatgggagacttttaaagggttgcgtgaaatcgggactgg

SEQ ID NO: 66824 - DNA, 232 bp, Glycine max
  Clone ID: 700840091H1
cacatatcgatatcttttgcttcgtctctttcatcgcctacgcttcatttgaatcaacactccttcctcttcctctttctcgtccattttagttcaatctttgaattctcctccttatcaagtcttcctcatcttccccacctttttgaaattttggtgtctaagaacataacctaaaagctcaaggtgagtgaaaagaagatgtcaggtgtgtctctagcagtgtctcatc

SEQ ID NO: 66825 - DNA, 232 bp, Glycine max
  Clone ID: 700840092H1
agaggatcagaggagttaccgtgatacattgttttcatttcctgtctctagaattttctatccgctcatccccctcacaaattagggtttttgcgaatcttttatcgtctgaaatcgaatccaacgtttcagccatggtttccgattcaatcgccgccgtaccgattccctccgccgcaaacaccaagaacccggggaagaagaagaggactaacaggtccgcgaaattgaa

SEQ ID NO: 66826 - DNA, 258 bp, Glycine max
  Clone ID: 700840121H1
cctctccctttcccccttttcatttcttcctcgattttccatttccataaccttagtcatcttcttctttcatctttctccctaacggtatcgagggaaaaatatggcggaagaacacagatgccaggcaccgccttctgcgccaacaattgcggtttctttggcagccctgccacgcagaatatgtgctccaagtgctaccgcgatttccagctcaaggagcagcaatcttccaacgccaagatggttctcaatcag

SEQ ID NO: 66827 - DNA, 254 bp, Glycine max
  Clone ID: 700840130H1
gtgcgtgaagctcctcaggaaccgtttcaaagccgtgaaggaaacagagggctggaaattcctcgagagccacgacccctggctcgaactcgacgttctccgcctcatgggcgaactcgaaaagaggaagagggggtgaggaagtggagggaggaggagaggttgtacgtgcagctgagcgaggcgatggagtgtttggagcacatatgcacggaggggtgtacggaggtggggccatacgaggtggaggttgg

SEQ ID NO: 66828 - DNA, 251 bp, Glycine max
  Clone ID: 700840143H1
aacatttttgagagggaaggagctcaaatgctgctatagggctacaattgatggattcagtgcaaccaatttccacgaatgttgtgacttcaagggcccatgtgtgataatcggctatacaaacaagtcttcaagtttggtgcatttaaccctgaagggtatagaagcacagatgactactacgacacatttgatgccttcctattttactggatagacaatgaaactactaaacccatcatgttgcccaa

SEQ ID NO: 66829 - DNA, 249 bp, Glycine max
  Clone ID: 700840145H1
cagtttggagagattcaggaaaaagttgtattgaaattttcacaagaggaatttcttacagcttggtcaactcaggtgcgtcctgcaacaactctattggctgatgggtgtccatatttgtatgctatgtgcatgatagttcagtgtctacaataccaggtgattttgtcattggtgttaagttgacaaccataaacaatatgtgtgtatatgggctcaatcctggtatttcaggttctcgtcttttgg

SEQ ID NO: 66830 - DNA, 252 bp, Glycine max
  Clone ID: 700840155H1
ggagcatttggtgaaggctgggttgaatgttgtagtgttggatagttctcaggggaactcaatttatcagttagagatggtgaagtatgtgaagagggtttaccctgagcttgatgtgattggggggaatttgtgactatgtaccaggctgagaatctgattcaggctggggttgatgggttgagggttggaatggggtctgggtccatttgtactactcaggaggtttgtgctgtggggcgtggtcaggca

SEQ ID NO: 66831 - DNA, 247 bp, Glycine max
  Clone ID: 700840160H1
ccagtccaagcatgcggacactgtctcctgcagctcagaagtttgtgaggaatgcgtttgccaagtcctcgtcttctgttgatgaaacacttcgagcaagttaccgcggttctactcctgctttggtactcctagaagtgttagtagaagtgtgtcaaggtttggtcgtgatgggagcttggcttccaggtctccatctgttagagagggctccaatcctcccttgtgatatgttgtaacatatttt

SEQ ID NO: 66832 - DNA, 248 bp, Glycine max
  Clone ID: 700840161H1
cgcctgaatgaggattctttcgttaaaaaatgtatatttgcggttagtccagcagatattccagccgttgccacatcaatcccctacaaatatatccagcgattagttgaggcacttgcagatctttagaaaactgcccacatttggaatttatacttagatggtctcaggagctctgcaaagcccatgggaattctattcagcagaactctagaaatctgttaccatcattaaaatctttgcagaaa

SEQ ID NO: 66833 - DNA, 253 bp, Glycine max
  Clone ID: 700840163H1
gtgctacagaggctgtgaagcaaacccttggcttgggcgagcatgatcaagacaaccgcagaaattactaatactataatttgaagtgctttcttgtagtagtggtttacgcagcatggctttttaaatagctgctattccctacactcctacctaaggagtgtactattatccgcagtttctattctctctagctactttcatgtatgttcaatgctatatatagccttgaattaatgtcaactatgttcta

SEQ ID NO: 66834 - DNA, 253 bp, Glycine max
  Clone ID: 700840172H1
agaaaccttaaaaacaacaacgtaggagtgttcggaaaagatggctaagcaggaagtggtggaagggttcaagttcgagcagaggcacgggaaagaacgcgtgagagtggcgcgcgtgtggaagacgagcaggggcagcacttcattgtggagtggcgcgtggggatcactctcttttcggattgcgtcaactcgtacctccgcgatgacaactctgacatcgttgctactgataccatgaaaaacaccgtgt

SEQ ID NO: 66835 - DNA, 252 bp, Glycine max
  Clone ID: 700840180H1
attatgttagcgtataaaatgagagccaaatccaaaccctaatttcctaccacaccgcacttcaccgcccctcgtttcttcacactctgccgtgctctttcggcgcaggtcaagagattcgcaatagaagtgagaaaaaaaaatgagtcgaggaagtgcaactgctgcgaagggcaagaagaagggtgcgacattcaccattgattgcgcgaaccggtggaggacaagatcatggacattgcgtctctcgag

SEQ ID NO: 66836 - DNA, 251 bp, Glycine max
  Clone ID: 700840187H1
gatgacgcggctgcagcgagggaagtgagagacaaatcagcctcaaagtcaccaggtatctacaattctgccactgctgacaacaaaaccggttccaaggtcggagagtacgcagattatggttctcgaaggcgaaagaaacaaaagatgcaacgaaggaaaaagctggagagtacacagattatgcttcgcagaaggcgaaggaaacgaaggacaagacaatggaaaaggctggagagtacactgattat

SEQ ID NO: 66837 - DNA, 272 bp, Glycine max
  Clone ID: 700840201H1
gcaatggctatagcaagttaacaaatgggatacactcaccattgttgaaagcagcagcagcacataatggaaataatgggttcaaatcttccaatagttccttaaatggtgtatatacaagtacaactaccaatggggtgtgttgatgggaggagctgttaatcaatcatctgggttctttccttttttgcttacaaatgtgggtttgatttttctccaatgacagttttgtccacggggttagcttgtacagtttctagtggacttttagc

SEQ ID NO: 66838 - DNA, 258 bp, Glycine max
  Clone ID: 700840245H1
ctgctacttcctactccaaccgcacttctgctccgcaattatcatgggcaaggtcaagatcggaatcaacggatttggaagaattggccgtttggtagccagagtggctctgcagagagacgatgttgaactcgttgccgttaacgaccctttcatcaccaccgattacatgacatacatgtttaaatacgacagtgttcatggacactggaagcatcacgatgtcaccgttaaggacgagaagacccttctcttcgg

SEQ ID NO: 66839 - DNA, 264 bp, Glycine max
  Clone ID: 700840249H1
ccaaaacagtaaagctaacttcaacacctttaattttctaaaagtaattcagcggctgaataccaagcggagaagatgagtcaggagcagccacggcgtcccaaaggccaaaaccccatcaaatacggcgacgtttttgtcgtctccggcgaccttgcacagaagcccgtcgcaccggaagatgctgccatgatgcaaagcgcggaaactcgagtgctcggacaaacccaacccggcggagcagcttccgtcatgcaatctgcc

SEQ ID NO: 66840 - DNA, 257 bp, Glycine max
  Clone ID: 700840252H1
ggacaaaaagcgcttttgagaagctggattcgatttatgggtcttttgataagccctctgagaagaagaaggggtacttgcttcccaggcccaagatggttaactctgatcttgccaggattattaattctgacgaggttcagtctgttgtgaggcccattaagaaggatgtgaagaaggccacgctgaagaagaaccctcttaagaacctgaactctatgctgaagctgaatccttatgccaagactgctaagagg

SEQ ID NO: 66841 - DNA, 257 bp, Glycine max
  Clone ID: 700840253H1
gagaggcttgcaagaagcttaagcagatagaacttgctgattgtgaaatatatgcttcttgtgaaccttgccccatgtgctttggtgcaatccacctttctcgaattaagaggttggtttatggagcgaaggccgaggcagcaattgctattgggtttgatgatttcattgccgatgcattgcgaggtactggattctatcagaaagcaacattggaaattaagagagctgatggtaatgaggccatcattgctgaa

SEQ ID NO: 66842 - DNA, 254 bp, Glycine max
  Clone ID: 700840273H1
gtttcatccgaacatcaacagcaatggtagcatttgtcttgatatccttaaggagcagtggagccctgcactcaccatctctaaggtactgctttctatctgctcattgctgactgatccaaatcctgatgatccacttgttccggaaatcgctcacatgtacaaaactgaccgggccaagtatgaggccactgcacgcagctggacccagaagtatgccatgggctgatttgtgtttagataatgtatattga

SEQ ID NO: 66843 - DNA, 256 bp, Glycine max
  Clone ID: 700840278H1
ggataacatcacagcaagtgaagtagctggtttcggagtgggtgctgtgctcctctgtgccactgttgctgccaccaaagtcgatgctttcttctcttcttctcagcgcagggatgtgcaagcgatgtggcaatcttaggcgattggcttgctcgacatgcaaaggaactgggtctatcagagaagggggaatacttggtattaaactcgtagaagatttgtttgaaacaattggtaatagtgaaccaaaggtgaa

SEQ ID NO: 66844 - DNA, 253 bp, Glycine max
  Clone ID: 700840288H1
gagaaactttaagcagatgtctaatgttttgtgggtggctcctgaggacaaggcgagtttatggtcacaacttcattatgtttcgtgtaataatctggaaatgcaagaagcttatcttgtcaatctcgtaaatgtgttacgagaactgtatttgcacagtccagaggaagctcgccaactgagaaggaaagctctctctcgtattgaatggctgcaaaaagctgatgtgcctaccatagcacagattgaagag

SEQ ID NO: 66845 - DNA, 265 bp, Glycine max
  Clone ID: 700840301H1
cggcgggatcggattcgctgaggagaagctgtctcatcgaacgacgtcgctttggtgtcctcggagatggagaagttcctgtgcgagttgttgctggattcctcgcagccaatttccgagcgtttcagagcgctcttctctctccgcaacctcaaaggccccgtccctcgcaacgcccttatttgcgccacaagggattcgtcgaatttgttggcgcacgaagctgcatttgcgttgggtcaaatgcaggatttggaagccatcc

SEQ ID NO: 66846 - DNA, 258 bp, Glycine max
  Clone ID: 700840326H1
cccaattgaagcatatattatctatctgttgtattataccattttttttctcaggaatatatatacacacaaaaataaagcttccagagatgtacaatacttgtgtaaagaaagagcaaagacaactgcttcaaataaataatgcaagggaatgacagcagagaatgagataaggggggaaattgttcctaggtttattattatttttggttagctgagttaatactacttactacagaaacaggtaaatgcttatgt

SEQ ID NO: 66847 - DNA, 257 bp, Glycine max
  Clone ID: 700840396H1
cacaaatctggaatatctgaatgttagcagtaactttagtgacatgacagagctacctgaaacacttggtgatctggtcaacttaagggagcttgacctcagcaacaaccaaatccgagctcttccttactcgttcggtaggcttgaaaaattgacaaagctcaacctggaccagaatccaatcatagttcccccaattgaggttgtaaatcaaggggctgaggctgtgaaggagttcatggccaagtggtggctcg

SEQ ID NO: 66848 - DNA, 240 bp, Glycine max
  Clone ID: 700840408H1
caagtacttccttacaatcaaaaccaacaacaactatggcaagttatcaaaagcactacgatgatcagggtcgcaaggttgacgagtatggcaacgttgagaagcaaaccgacgaatacggcaaccctgttcatgctgctagtgtcacctatgtagccaccagaactgctgctggtggttacagtgatgacattaataagcaacatgataccaccaatgcctacggcgtagacactggta

SEQ ID NO: 66849 - DNA, 98 bp, Glycine max
  Clone ID: 700840425H1
gaagtacttcaccaggacgacttgcttcgagttttgggcgagcggccgttcaaggctactgaactcaccaattatgatagatttaagcagggttttat

SEQ ID NO: 66850 - DNA, 241 bp, Glycine max
  unsure (1)..(241): unsure at all n locations
  Clone ID: 700840452H1
cgcgagtncgnatcgtatgcgagggtnacaagncntcaaaaatgcacngatcaccgtgntgtgnnatggntggatgatancntanttnggagggcatgannatcngcaagccgtactttagtggttcnaaattnaaaagcnttcgagcnggtcagaatatcaccagtacntatgatantgacnaaacgagtgcaacnttgcaattnagnaagttagcngattgtgattttctcaagagaaa

SEQ ID NO: 66851 - DNA, 239 bp, Glycine max
  Clone ID: 700840461H1
gttgaattaactgcttgcaagcatggcgaagagcaaggaagacataacctatgcaacatcacaagcaaggctttcagaagatgaagcagtgagagtggcctacgagcatggctcaccccttgaaggaggaaagattgctgactctcaaccagttgacttgttttcaagtgcacacaatatgccaaagagtggccaaacaacaatggattcaaacactagtgatcaatctcagatgcaac

SEQ ID NO: 66852 - DNA, 242 bp, Glycine max
  Clone ID: 700840496H1
gcagaaatactacatggcttcctcaagggaactggttcgtattgttagcatacagaagtctccaattatacatctttttggtgaatcaattgctggagcatccaccatcaggggttttggacaagaaaaaaggttcatgaagcggaacctctatcttcttgattgctttgcacgaccattcttctgcagtctttctgcaattgagtggctctgcctgcggatggagttactgtcaacctttg

SEQ ID NO: 66853 - DNA, 249 bp, Glycine max
  Clone ID: 700840602H1
gcccttcatcagagataacttgacaaataaaatcaccatgtctatcatcccaaacttgttcggtggtagacgaagcaacgtcttcgacccattctctctggacgtatgggaccctttcgaggggtttcctttttccacaggtcacgtgccttcctctggtggggaaagcagtgccatagccaacactcgcgtggactggaaggagactccggcggctcacgtgttcaacgttgatcttcccgggttgaa

SEQ ID NO: 66854 - DNA, 236 bp, Glycine max
  Clone ID: 700840614H1
gcaatccgtgtaccaggctttcactcaggtgtttgctcagcagctaccaaagcaagcacaggtgaaatctgtggcaccatttgggttatgcttcaactccaacaagatcaatgcatatcctagcgtggaccttgtgatggacaagcccaatggtcctgtttggagaatctctggtgaggacttgatggtgcaggcacaacctggggtcacgtgtttgggtgttatgaatggaggaa

SEQ ID NO: 66855 - DNA, 240 bp, Glycine max
  Clone ID: 700840620H1
gatttgtacggaaagagaatcttgaatagggatttggaaccggggttcttcgtgaaccacttcgttaaggatttggggatttgcttgaaggagtgtcagaatatggggattgctttgcctggcttggctctcgctcaacagctttatgtgtcgcttagggctcacggtgaaggtaatttgggcactcaggctcttattttggtccttgagcgactcaacaatgttactcttcctccctcc

SEQ ID NO: 66856 - DNA, 236 bp, Glycine max
  Clone ID: 700840624H1
ttgaggagttcggaaattttggatcatccacacactcagatttgtaatgaaggtcgtcagaatgcattatcagagatcttggagatattgacagtggtatgtgaaactcacaatttacctctggcccagacatggattccctgtaagcatcgaagtgttttggcccaaggtggtggtgtaaagaaaagttgttctagttttgatggtagatgcatggggaaagtttgcatgtctac

SEQ ID NO: 66857 - DNA, 109 bp, Glycine max
  Clone ID: 700840648H1
ctgattgacaaaagatttctcattggtaaatgggatggacacagacacatggatagggtgccagagttcatagctggtggttcatacgggacccctccttacaatgaaa

SEQ ID NO: 66858 - DNA, 231 bp, Glycine max
  Clone ID: 700840659H1
ttccaagtacagagctgaagctcaacaaaattcattcaatgctactgaagctgctaaggaaagatacgagagggcaaaccaagcgacaagtgaagctgccaaagagagaaacaagcaggcaaataaggaggcaacaaaggcaaaagatgtcacaagagaaatggatcaacaaggcaatcttaaaacagaaaatgagacacaggacaatgaccagaagggttatggtggagc

SEQ ID NO: 66859 - DNA, 231 bp, Glycine max
  Clone ID: 700840685H1
caatcatctatacgttctcatacacaatggctctctatgctcttgttttgttttatgtggcatgcaaggatctgcttcaaccattcaatccagtcccaaagtttattataataaaatctgttgtattcctaacttattggcagggtgtcttagttttccttgccgcaaagtcagaatttgttaaggatgcagatgaagctgctctacttcaagattttttcatttgcgttg

SEQ ID NO: 66860 - DNA, 229 bp, Glycine max
  Clone ID: 700840688H1
tgaaattttcacaagaggaatttcttacagcttggtcaactcaggtgcgtcctgcaacaactctgttggctgatgggtgtccatatttgtatgctatggtgcatgatagttcagtgtctacaataccaggtgattttgtcattggtgttaagttgacaaccataaacaatatgtgtgcatatgggctcaatcctggtatttcaggttctcgtcttttgggcaccattcc

SEQ ID NO: 66861 - DNA, 250 bp, Glycine max
  Clone ID: 700840710H1
gaagtccttccttctgaattaagagagttaatcttgggaaaagatggagttgagttgggtggttggatgcctttgtacagctgatgtgaaggatttcatgctaaagattcacactgttaattatgctgaggaagtttgcttcaatgacttcttatccttgggtgatactcaagatggtgagaatggggataattactctgtttcaactgctgataagttactgcctattagttctcaagatttggctgga

SEQ ID NO: 66862 - DNA, 251 bp, Glycine max
  Clone ID: 700840712H1
ttgttgggtttacaaggagcaggtaaagcttttccaaacaagattgtttttgatgataagcttgtgttggctaacacacaagaattctttgatggaaattttccagtggattcttggttaccaatttttgtgaattgtctttatcctgtaagtcaattaccttcagaagctgtcgttgtaaatgttacatgtggtagtggacgtggtggtttacccactactgcttggattagttctgcagttaacaatcg

SEQ ID NO: 66863 - DNA, 250 bp, Glycine max
  Clone ID: 700840717H1
gcctgatgggaacaccagggatgaaacttgttactttgtggaggctttgatcaggtgtaacctaagctctttagctgatgtctcagagaggatggccgtgcaaggtcgaaccaatcctatcaaccattaagcatgtctaggggagaatgaagttgggttcatacaaattatatgatccattgctctctgatcctagctcaagtgtggacattggttggagtattccttctatgttcccagaagttttgga

SEQ ID NO: 66864 - DNA, 250 bp, Glycine max
  Clone ID: 700840726H1
tcgcaagcaaaaagaaagaatcccaggcgaggagaaagatggaggggaaggagcaggatgtgtcgttgggagcgaacaagttccccgagagacagccgattgggacggcggcgcagagccaagacgacggcaaggactaccaggagccggcgccggcgccgctggttgacccgacggagtttacgtcatggtcgttttacagagcagggatagcagagtttgtggccacttttctgtttctctacatcac

SEQ ID NO: 66865 - DNA, 249 bp, Glycine max
  Clone ID: 700840746H1
cgagcattcgccaacatttgcaacagtggcgtttctgaggcctccatggaagaggcttgtttggcagcctgtgaaggctacaatgctgggctattgcatccatcaaacagaggctacagtgcttgattttgggttttgtacacaaaagctttaaagcccggttgatgatgtaatatttctctattgcattctgcctactggtttctgctgcttgtgtcaaattttctctaaactagagtagcccaatag

SEQ ID NO: 66866 - DNA, 241 bp, Glycine max
  Clone ID: 700840766H1
caaagtttcacttcagccttatccggtttagggtttcggtttttgacccaacctttgacgtatcgaaaccttaagtttcggatcaggtctgagcaatctggttggtagaacctttggtcttagagagtcaagttttatgtctgaattagacgatcaaattcctactgccttcgatccttttgctgatgcaaatgctgatgactcgggtgctgggtcaaaggagtatgtgcatattcgcgta

SEQ ID NO: 66867 - DNA, 243 bp, Glycine max
  unsure (1)..(243): unsure at all n locations
  Clone ID: 700840793H1
ccaggctcttatgttggtgaagttgtcaaantcatgggcaagaacaaagtccttgttaaggtccacccagaaggaaaatatgtcgttgatattgacaaaagtattgacattacaaagattactccatccactagagttgcacttcgcaacgacagttatgttcttcacttagttctgccaagtaaagttgatccattggtcaatctgatgaaagttgagaaggttcccgattctacttacgac

SEQ ID NO: 66868 - DNA, 135 bp, Glycine max
  unsure (1)..(135): unsure at all n locations
  Clone ID: 700840862H1
gcnaattgaactgtttgatcaaatggatgatgnacttgattagattgagatggatgaactatctgagaccagacattcnagagagggaatatagcaccagatgaagatgatcntataatcagnatgcattcacct

SEQ ID NO: 66869 - DNA, 210 bp, Glycine max
  Clone ID: 700840928H1
gtggagggagggtgccctccagggatggtcctaatcgacgacgggtggcaagccatttgtcacgacgaggaccccataacggaccaagagggtatgaagcgaacctccgcaggggagcaaatgccatgcaggttggtgaagttggaggaaaattacaagttcagacagtattgtagtggaaaggattctgagaagggtatgggtgccttt

SEQ ID NO: 66870 - DNA, 237 bp, Glycine max
  Clone ID: 700840953H1
ttggaactaaaatgcatggggggtacaagtatcgtcggaacctggatattttccttagaagtagaagcgagttggcagagccactatgttcttattcttctttgctcgtggaaaagaatgagaggaaatccaaattaagaacacgttctcttagtattcctgcattaggaaagcatcgttcagcagtgaatgatcccatcctttctggtgctcctcagaggtagcactacctacttt

SEQ ID NO: 66871 - DNA, 233 bp, Glycine max
  Clone ID: 700840991H1
gggaaatattggtccacttgtgatttgcaccaaggttaccaacagcattgctttgctcgatccatttaccttgagacactgtttcatagatgctgatcagtactggagaacatcctttaagtcgttacttactagcagacaattggtggaatatatagtgctggatgtggagactgtttcatctgaggtcactattggtggcacgaaatatcgtttagcagatgctcaggtgg

SEQ ID NO: 66872 - DNA, 247 bp, Glycine max
  Clone ID: 700841011H1
cagtttcaccgcacgaatatcttgttgtttggagcgatccgagaaaaactctgtaaacatgttggtttaccaggacctccttacaggtgatgagcttctctctgactccttccgttacaaggaaattgagaatggaatgctgtgggaagttgaggggaagtgggttgttaaaggagcagttgatgtagacattggtgcaaacccttctgctgagggtggaggagaagatgagggagttgatgatgca

SEQ ID NO: 66873 - DNA, 252 bp, Glycine max
  unsure (1)..(252): unsure at all n locations
  Clone ID: 700841015H1
aatccaccgatgctgagtcanactcggagtttccgtctcgggnaccgganntngatgacccttcagtanaatcctgcaaaccctattcatgangtgnnacncgctcngnnnngcgtntgtggtacgtccacatgactggaccgagtgtccgtacgcccaccccggggagaaggctcgccgccgtgatccccggaagtaccattactccggcacggcgtgccccgatttccgcaagggagttgcaagaagggt

SEQ ID NO: 66874 - DNA, 237 bp, Glycine max
  unsure (1)..(237): unsure at all n locations
  Clone ID: 700841043H1
agcaaagtccaggatttacaaggaccctgctttgcgctatgttttcttgatnnntaatgggaggtacattgttcagaagaccaaagatagtgaattgggaacccttttgggagatgattggatcagaaaacacgctgcaaaagttaggcaattccatgtgcactatcaaagatgctcgtggactaaggtattagggattttgaagcttgatagtaatggctcatcattgccccctaa

SEQ ID NO: 66875 - DNA, 247 bp, Glycine max
  Clone ID: 700841060H1
ctgcgttagagggggtgagagacataacccaggcttctcacctcataggagatatgacaggctcaaccattgatgaccctttatcagagacatacaagaaattgggctgctcaatttctgccttggacaaaagttcagatgattatgagatgattgtgaaataccttgaaaaaacttatgagccggtcaaagttggtgacattgaatatggggtgtcagtggaaaacatttttgcggttcaaacagg

SEQ ID NO: 66876 - DNA, 78 bp, Glycine max
  unsure (1)..(78): unsure at all n locations
  Clone ID: 700841176H1
cttttctctcnctagaatnctcaggatttngcggggcgagatngatgnagtagcccggcanccgggnatnggnaccct

SEQ ID NO: 66877 - DNA, 237 bp, Glycine max
  Clone ID: 700841209H1
tactgatcctaggcctttccctcatgctccttttggtctcctctgaggtggcatccacgaatacaaaagaggaggcaaatggagtggatgatgccaaatatcccggtggaagctatggagggggttaccaggtcatggcggtggcggttatcctggccatggcggtggcggttatcctggccatggcggtggtggtggctatcctggtcatggtggtggccaccctggtcatggtgg

SEQ ID NO: 66878 - DNA, 236 bp, Glycine max
  Clone ID: 700841236H1
gaaaatttgaagagtttgtttattgtgaaaaaaagaaaaatgcaggcagcaaagaaagccatagagacctttaaggaaaccgcagccaacattggcgcctctgccaagtctggcttggagaaaacaaggccactatccaagagaagaatgagaagatgaatgcagaagatcaaactcaaatggatatggctaccaagaggaaagaagagaagatcaaccaggctgagatggagaag

SEQ ID NO: 66879 - DNA, 237 bp, Glycine max
  Clone ID: 700841240H1
cacacaactactacaagtacttccttacaatcaaaaccaacaacaactatggcaagttatcaaaagcactacgatgatcagggtcgcaaggttgacgagtatggcaacgttgagaagcaaaccgacaatacggcaaccctgttcatgctgctagtgtcacctatgtagccaccagaactgctgctggtggttacagtgatgacattaataagcaacatgataccaccaatgcctacg

SEQ ID NO: 66880 - DNA, 235 bp, Glycine max
  Clone ID: 700841252H1
tacaagtacttccttacaatcaaaaccaacaacaactatggcaagttatcaaaagcactacgatgatcagggtcgcaaggttgacgagtatggcaacgttgagaagcaaaccgacgaatacggcaccctgttcatgctgctagtgtcacctatgtagccaccagaactgctgctggtggttacagtgatgacattaataagcaacatgataccaccaatgcctacggcgtagaca

SEQ ID NO: 66881 - DNA, 231 bp, Glycine max
  Clone ID: 700841289H1
ctaagcttagaattagaaacaaagaaaagaagaaaggaaagaattgatcgttgaaaatgcagggaggaaagaaagcgggagagtccattaaggaaacagctacaaacattggtgcttctgcaaggctggcatggagaagaccaaggccactgtccaagagaaggcagaaagaatgacagcacgtgatccggtgcaaaaggagttggcaacccaaaagaaagaggcaaagat

SEQ ID NO: 66882 - DNA, 269 bp, Glycine max
  Clone ID: 700841365H1
cacacaactactacaagtacttccttacaatcaaaaccaacaacaactatggcaagttatcaaaagcactacgatgatcagggtcgcaaggttgacgagtatggcaacgttgagaagcaaaccgacgaatacggcaaccctgttcatgctgctagtgtcacctatgtagccaccagaactgctgctggtggttacagtgatgacattaataagcaacatgataccaccaatgcctacggcgtagacactggtagacagcattctagtgg

SEQ ID NO: 66883 - DNA, 264 bp, Glycine max
  Clone ID: 700841368H1
ggttctgcttctggctttccccactgtatttggagctgaccatgaagttggtgacactggtggatgggccctaggggttaattacaacacctgggcctctgggaaaactttcagaattggtgacaatttggttttcaagtatgactctacccatcaagttgatgaggttgatgagagtggctacaacagctgcagctcaagcaacatcatcaagaactacaaggatggaaacaccaagattgaattgacttcaactggcaaaag

SEQ ID NO: 66884 - DNA, 261 bp, Glycine max
  Clone ID: 700841403H1
gcctatggtctcccaggaagaaaccttagtggaagcggcgctccgagttctgaacaccgccgacccgttcgagaaggcgcgactcggcgactcggtggcttcgcggtggctcaatggcgacatagcagaaccctacgacccttccggctccgatctcacgctccctgatcgccccgcaagactatcctctgtgaagttggtggcgccgagcttgatgccgaagctgggtagagcgggcagcttgcagagcaggatagccat

SEQ ID NO: 66885 - DNA, 64 bp, Glycine max
  Clone ID: 700841404H1
gaatgttggtacaatattctgattttgatcaaatgactcaatgaattaaataatgttccttttt

SEQ ID NO: 66886 - DNA, 260 bp, Glycine max
  Clone ID: 700841405H1
catcattttctctcttctctgcttcttcttgttcaaatcttaggagctgaggagaatcaatcgagagaaatatgtctggtatcgctcgtggacgccttgctgaggaacgaaagtcatggcgcaaaaaccatccacacggtttcgttgccaagcccgagactctacctgatggcaccgtaaatttgatggtctggcattgcactattcctggcaagaccgggactgattgggagggtggatatttcccactgacaatgcac

SEQ ID NO: 66887 - DNA, 261 bp, Glycine max
  Clone ID: 700841409H1
gccactcatactcattttgcgaaaccggctgaagtatgctctaacataccgtgaagtcattgctattctgatgcagcgacatgtccttgttgatggcaaagtcaggactgacaaaacataccctgctggttttatggatgttgtatcaatccctaaaacaaatgagaacttccgcctgctgtatgacaccaaaggtcgattccgtctccactcagtcagggatgacgaggctaagttcaagctttgcaaagttcgctcagt

SEQ ID NO: 66888 - DNA, 259 bp, Glycine max
  Clone ID: 700841410H1
ctccaactcaactaagttcaactatattcatagagcatcctctgaaggacttcctaatgagttggttgaagactcaaaatttgttcctttgaatgaggaggatcctatatatggtccacctgtaagtcatggccttattgttgttgggctttgaagcagatgaagctttgaagattcgacagcttttgaaagagttggatggtgaattcctaaaggtcatctattgtactgaagacatgattatgcgttcgctttggga

SEQ ID NO: 66889 - DNA, 260 bp, Glycine max
  Clone ID: 700841415H1
cgtatctattctttgcttttggttttggttgattgaaggccttcacggcattcgttgcggcattttaatcgatttatccaagcaggtaatccatttctaacagcagaacagagtcccaaagttgcagagacgttgaggcagagagaccattcctgctagagactgttgtccaaactttaagatcttggcatgttataaagggtagactgcaaaatggaggcattgaaagcatcttatggggatggatcttctgattcaga

SEQ ID NO: 66890 - DNA, 263 bp, Glycine max
  Clone ID: 700841416H1
ccaaaaaacaccatgatgcttggggagacccaccgcccaaatccaaccgtacacgtgccaccgtgggcgccggagatcttctcaccatacaccggcaatgccgattactctccgtactccatgcaagaagcacttagtgcacttcagcactacgaatccaccgatgctgagtcagactcggaggttccgtctcgggaaccggaagtcccggtggacgcttactcctgcgaccatttccgcatgttcgagttcaaggttcggag

SEQ ID NO: 66891 - DNA, 259 bp, Glycine max
  Clone ID: 700841424H1
gtttcaccgcacgaatatcttgttgtttggagcgatccgagaaaaactctgtaaacatgttggtttaccaggacctccttacaggtgatgagcttctctctgactccttccgttacaaggaaattgagaatggaatgctgtgggaagttgaggggaagtgggttgttaaaggagcagttgatgtagacattggtgcaaacccttctgctgagggtggaggagaagatgagggagttgatgatgcagctgttaaggttgt

SEQ ID NO: 66892 - DNA, 258 bp, Glycine max
  Clone ID: 700841426H1
atttgaagagtttgtttattgtgaaaaaaagaaaaatgcaggcagcaaagaaagccatagagacctttaaggaaaccgcagccaacattggcgcctctgccaagtctggcttggagaaaaccaaggccactatccaagagaagaatgagaagatgaatgcagaagatcaaactcaaatggatatggctaccaagaggaaagaagagaagatcaaccaggctgagatggagaagcagcaggcccgtaagtactacgccg

SEQ ID NO: 66893 - DNA, 255 bp, Glycine max
  Clone ID: 700841428H1
ggagaattggaggatccttgacttcttctctcactttccagaaagccttcacatgttcacctttttatttgatgatttgggtgttccacaagattacaggcatatggatggttttggagttaacacatacacactgatcaacaaggctgggaaagcagtgtatgtgaaatttcactggaagaccactagtggtataaagtgtctattggaggaagaggccattaaggtgggaggagccaaccacagccatgccac

SEQ ID NO: 66894 - DNA, 259 bp, Glycine max
  Clone ID: 700841431H1
ataagaactaagatggattggatcggagcgtaccgcggaggccagagaagcagggactggtgcgacccttcatcaccattcactgatttgtgggaccctcgtcgtgtcggtgacgctgatgatatcacctcctctctcgcccatgctcacgttgactggcgtgagactgataaagctcatatcttccgtgctgatcttccaggggtgaagaaagaggatctgaaggtgcaggtggaggagaataagatcctgcagataa

SEQ ID NO: 66895 - DNA, 258 bp, Glycine max
  Clone ID: 700841433H1
gagagagtgagtaatcgagaaagagaagaagcatatatatcaaaatggctgcagagatggagagggagtcattgataactgaagctcctaatgcaccagttactgcacagagaagggtcagaaatgacttagaaaattctctaccaaaaccatacttgccaagagcattgaaagctcctgatacgggtcacccaaatggaacagcaggccacaggcaccacaacttatctgttcttcagcagcattgtgctttttttg

SEQ ID NO: 66896 - DNA, 257 bp, Glycine max
  Clone ID: 700841434H1
gcttggaagaaaggctgtttaatggtcaagattgtgatgtctgggaatgcagcagtcaaaaggagtgattgggcctcattggtacaagtgtttttaacaaacagcaacagtacagagcattttgatgcatgtaagtggacaaaatcagaaccacattcctgggagttgatcttcccaatagaggtatgtggtcctaataatggttttgaaatgtggagttctgagtgggcaaatcaaacttcatggcatttgagttt

SEQ ID NO: 66897 - DNA, 258 bp, Glycine max
  Clone ID: 700841438H1
aaagaagggaatgcaggaagtgctgaaaatggtgaaaagcaatgaacaagttgttcctggagccaaatattgtgtcacaggttccacagggtatatcggttcatggctagtggaggctcttcttgaaaggggatgcacggttcatgccactgttagagatcctgcaaagtcattgcaccttctgtctctgtggaagggtggtgaccaattgagatttttccaagcggatttgcatgaagaaggaagcttcgatgaggc

SEQ ID NO: 66898 - DNA, 255 bp, Glycine max
  Clone ID: 700841441H1
ggcaatgtgtcttctttttctacagctatggctattccaaggaaagatttgtttggtccttgatatctgctgttgggatcttttgtcttggttctggtgccaccgttgttaatggagtacagaacttgtggattgcacagccccctgagaatatgcagtatgcagctttggtgatatgcggttcattcatcattgcaggtgcttctcttattgttgccatacaagctgtcaagaaaggtgcagctgcggagggaa

SEQ ID NO: 66899 - DNA, 256 bp, Glycine max
  Clone ID: 700841447H1
gaacactcatcaccatggccaagcttgttctttccctttgtttccttcttttcagtggctgcttcgctctgagagagcaggcacagcaaaatgagtgccagatccaaaagctgaatgccctcaaaccggataaccgtatagagtcggaaggtgggttcattgagacctggaaccctaacaacaagccattccagtgtgccggtgttgccctctctcgctgcacccttaaccgcaatgcccttcgtagaccttccta

SEQ ID NO: 66900 - DNA, 257 bp, Glycine max
  Clone ID: 700841449H1
ctagcttccaaaccctaacactcctcttcctcttcgatcatcacctctccacaatgccgccgaagttcgacccctcccagatagtcgacgtcttcgtccgcgttaccggcggcgaagtcggcgcggcgagttccctggccccgaagatcggtcccctcggtctctcccccaagaagatcggagaagacatcgccaaagaaaccgccaaggactggaagggcctccgcgtcaccgtcaagctcaccgttcagaatcgt

SEQ ID NO: 66901 - DNA, 257 bp, Glycine max
  Clone ID: 700841450H1
gttttaaatccacaaaatccttttgtgttaaataggtggatgggaaaactgactttcccccagggcacttcccgaagtgttaagagaatgcctctttctatagggggaggagctggtgcaaagaatgctattctcatgaatatgccaaatgctgttctttcaatgtggagatattttgttggagatctcgtctttgaagtttctaagatgacttctccctacattaaatgtacagtctctttcttcatagcatttgg

SEQ ID NO: 66902 - DNA, 255 bp, Glycine max
  Clone ID: 700841452H1
ctttgagatttttcagcaccccaccaaggttttgtccgaaaagcttgaatttttcgcctaccctttacaatgatctcttcattgagacaacctgttgtagggatcagtggttctgatcttcttttgaggcaaagacatgcaaccctaattaaggcaaggtcctttttaccctctttgtcaagagaaaagggtcaaagatctcttgtttcagttcaaaagccacttcacattgctgcttctcttggtgttggaaat

SEQ ID NO: 66903 - DNA, 255 bp, Glycine max
  Clone ID: 700841456H1
caaagaatcaaagaaaggggtggtggctgcttcgaaagcttaataatttgtttatttccagaacatcatagttttcgcagcagcaaactaacaaattactcatatcatataataagatggcccgttctctctcgcaagccaaacgtattggtgtccttgttgctcaatctatctccctaattcccgttcatcggcgaggttacgcagtggcatccgatgtatcggtaagagttggattgggtaatattgggcgaa

SEQ ID NO: 66904 - DNA, 251 bp, Glycine max
  Clone ID: 700841461H1
gttaaaagctaataatgtgttcacagcaccctgcgacacttcagttctgtatccacaaagtggaggcaacatccatgaattcacagctataactccatgtgctgtgcttgatgtccttgggccaccttattccaaagatgatggcagggattgctctttctatagagatcacccttatactgcttttccaactgcagatggagaaagtggtaaggtgaaagaagagaatgatagttacggatggttagaag

SEQ ID NO: 66905 - DNA, 253 bp, Glycine max
  Clone ID: 700841466H1
agtatatcctagtgttgaagtcggacaatgtggcaacagtccttgatccaaacatactaaatcatttgatgataaatgatattgaatattgcatggaggtgacaccaagcaattcgtttaatttaatgttacccacaacgaaatttaagcttcgggagattggtggagaccaagataaacacttgaaggacaatttcaaactcatcgatacaacaaacatgtgggtgagtttaagagccatcaagaggtttgt

SEQ ID NO: 66906 - DNA, 251 bp, Glycine max
  Clone ID: 700841486H1
ctcggtgccgtcgatttcgccgtccgcggtgtcatactcgtaccagggtggtggtgcgagcaagaagattgacattcccaatgggagggttggtgttatcattggaaagggtggtgagaccatcaagtaccttcagctgcagtctggtgccaaaattcaagtcactcgtgatatggacgctgatccgaattcggctactaggactgttgagcttatgggttctcctgatgctattgccacagctgagaagc

SEQ ID NO: 66907 - DNA, 248 bp, Glycine max
  Clone ID: 700841502H1
taaaaactcaatatcaaattctttgtcccacaaaagatggggttcactcccacaagtactgcaacatgctttctcataatagcacctctggttgtgctatggtgttggaagctactaaagtgggtgtggctgaggccaaagagattggagagagcattaagggcacagggccttcaggggaatccctacagcctcttgattggggacactaaggaaatgtacacagtgctcatgcaagctgccagatc

SEQ ID NO: 66908 - DNA, 242 bp, Glycine max
  Clone ID: 700841504H1
cacacaactactacaagtacttccttacaatcaaaaccaacaacaactatggcaagttatcaaaagcactacgatgatcagggtcgcaaggttgacgagtatggcaacgttgagaagcaaaccgacgaatacggcaaccctgttcatgctgctagtgtcacctatgtagccaccagaactgctgctggtggttacagtgatgacattaataagcaacatgataccaccaatgcctacggcgt

SEQ ID NO: 66909 - DNA, 239 bp, Glycine max
  Clone ID: 700841506H1
ggcagattcattagaagaaaatggcgggtggtggaaaggtttcgttcaaagtcacactcacctccgatccaaagttacccttcaaagtgtttagcgttccagaggcggcaccttttactgccgttctcaaattcgccgccgaagaattcaaagtcccgccccagaccagcgctatcatcaccaacgatggtgttggcataaatccccagcagagcgcaggcaatgtcttccttaagcat

SEQ ID NO: 66910 - DNA, 236 bp, Glycine max
  Clone ID: 700841507H1
gcacagagtgcagtatccaaggggcatgaaaatgccaccgctgagaatgggccatggataattacattagatgctcctagttttattgctgttatgcaacatgctcgcaaccgttctttgcgtgaagaaatctaccgtgcatatgtatcacgtgcatctagtggagatttggataatacaggaataattgatcaaattttaaagctaaggttggaaaaggccaagcttctaaacta

SEQ ID NO: 66911 - DNA, 236 bp, Glycine max
  Clone ID: 700841508H1
aatggctgaagcacaactacgagaccagcatggcaaccctgtcccactcaccgatcaatacggtaatccggttatcttaactgacgagcgcggtaatcccgtccaactcactggtgtcgctaccaccgctaccggcacagcaggttctgggtttgggtcctatggtaccggtgcttacggtggtggtgcaagtgcaaccaccgttgcagatcttttggcaacccaaccaaggagtg

SEQ ID NO: 66912 - DNA, 238 bp, Glycine max
  Clone ID: 700841514H1
caacatccaaatagtgtttgagttagtatcgttcttcagcgcttgttcttcgttcaacgtgtacctaatttacaccacggagctgttcccgacctgcgtgaggaactcggcgctgtcgatggcgaggctggcagtggtgctcggtggcacgttcagcccgttgctggtgagtgctgcaagagggaacaagtttatgtgttatggggtttttgggttggtgatagggtttagcggggtc

SEQ ID NO: 66913 - DNA, 239 bp, Glycine max
  Clone ID: 700841516H1
cttgaaaataggcttgagaagattttcagagaaatggataacttttatgaccaagtgattaaggagcatattgctgataactcttctgagaggtcaggagcagaacatgaagatgtagtcgatgtgcttcttcgagttcagaaggatccaaatcaagcaattgccatcactgatgaccaaatcaagggtgtactcgtggacatctttgtagcgggaactgacactgcttcggccacgat

SEQ ID NO: 66914 - DNA, 235 bp, Glycine max
  Clone ID: 700841521H1
caacaactctgttggctgatgggtgtccatatttgtatgctatggtgcatgatagttcagtgtctacaataccaggtgattttgtcattggtgttaagttgacaaccataaacaatatgtgtgcatatgggctcaatcctggtatttcaggttctcgtcctttgggcaccattcctcagtctatttcacagcaaactgtttggaatcaaatggcaacagtgagaacaccattgaa

SEQ ID NO: 66915 - DNA, 235 bp, Glycine max
  Clone ID: 700841526H1
caggggcaaaattgaggctgaactcagcaagatctgtgacgggattttgaacctccttgagtccaacctcatcccatccgccgcatctcccgagagtaaagtgttttaccttaaaatgaagggtgattaccacaggtaccttgccgagttcaagactggggcagagaggaaagaggcagcagagagtactttgcttgcttacaaatctgctcaggatattgctcttgctgacttg

SEQ ID NO: 66916 - DNA, 245 bp, Glycine max
  Clone ID: 700841533H1
ggctcaatgccacggtagtgtcaatcagcgggagaaatctctgcacagattctaacaaagttgatgggccattcaaagttgaagaagcagagactgtaaatgtgcctccactcccaacagaaaagttgcttgtgttgggagggaatgggtttgttggatcacacatttgtagagaagccttagaccgtgatttgtctgttgcgagtcttagcaggtctggtaggtcatccctgcatgattcctgg

SEQ ID NO: 66917 - DNA, 243 bp, Glycine max
  Clone ID: 700841534H1
gaaaaaacgaaaatgctgagaatcgccgcaagcgcaaagagaattgttcaaacggcgtcgttggaggcgccaccgttggggattagggttctgccgcgtctctaccacgagagggtggtggaccactacgacaacccccgcaacgttggatccttcgacaagaacgaccccaccgtcggaacgggtcttgttggtgcacccgcgtgtggcgacgtcatgaagctccagattaaggttgacgac

SEQ ID NO: 66918 - DNA, 236 bp, Glycine max
  Clone ID: 700841536H1
cgtcgatctagaatgtgtgtgggaattagggcttcacatagatatttgcttccagatggtgtagttctgaatgttagcagctctggggcaacttactttatggaacccaaagatgcaatagatctgaacaacttggaagttaggctttcaagctctgagaaggccgaggaaagtgtaattttgagtatgcttgcatctgaaatagcaaattcagaatcagatataaatcatttatt

SEQ ID NO: 66919 - DNA, 232 bp, Glycine max
  Clone ID: 700841539H1
ggccattgttcatcgtcttcgccaccctacagaagggaatgactatccgctggaggaaactgataagtttggaaaacagcaaactgggaagtttgttgtgttgcatctgcgttttgacaaagatatggcagctcattcagcctgtgattttggtgggggtaaagctgagaaacttgctctagcgaagtaccggcaggtgctttggcagggaagggtattgaactctcaattc

SEQ ID NO: 66920 - DNA, 234 bp, Glycine max
  Clone ID: 700841544H1
cagtttctcctcgttgttcttcgctttcctgttttcaatttcgattctttcgttaatttaataagatgtttgggagggcaccgaagaagagcgataatacgaggtactacgaaatcctcggcgtctccaagaacgcttcgcaggatgatctgaagaaggcttacaagaaagccgccattaagaatcaccccgacaagggcggtgatcccgagaagtttaaagagctggcgcaac

SEQ ID NO: 66921 - DNA, 238 bp, Glycine max
  Clone ID: 700841551H1
aaaacactcaagttaacttcaacacctttaattttctgaacgaaattcagccacagaatatcaaagggagcgaagatgagtcaggagcagccaaggcgcccccaaggccaagaccccatcaaatacggcgacgtttttgacgtctacggtgaccttgcacagatgcccattgcaccggaagatgctgccatgatgcaaagcgcggaagctcgagtactcggaaaaacccaacccggcg

SEQ ID NO: 66922 - DNA, 229 bp, Glycine max
  Clone ID: 700841555H1
ggtgatgataacttaattagtgttcatgaatatgtcaagccttactttagtggttctaaattgaaaagctttctagctggtcataatatcaccattactgatggtattgacaaaactagtgcaactttgcaatttagaaagttagcagattgtgattttctcaagagaaactttaagcagatgtctaatgttttgtgggtggctcctgaagacaaggcgagtttatggt

SEQ ID NO: 66923 - DNA, 241 bp, Glycine max
  Clone ID: 700841565H1
cagttctgaagcagacatgatcaagaaaatgcgtgccagtattgctttgcagcctttggcagcagccttattcgctaattcacctttcaaggaaggggttccaaatggttatctcaccataagaagccatagggtgggtcagatggacaaaagtcgcgctggcatactcccctttgttttttatgacacttttgggtttgagaagtatgttgattacgctcttgatgtgccaatgttgttt

SEQ ID NO: 66924 - DNA, 235 bp, Glycine max
  Clone ID: 700841567H1
gggttttggttttttttcattatcttcctcagtaagcaatgtcttctcccgcggagttttatcactctcttccgccaataacgaaggcatatggcaccgtttgcctgttggctaccgcaacttaccatcttggattatatcatccagcttacattgcactattctacgataaagtgttctacggttttcaggtttggaggttgttcacaaacttatttttccttggaccattctc

SEQ ID NO: 66925 - DNA, 228 bp, Glycine max
  Clone ID: 700841573H1
gggaaacaaaactacccttttgcttttgctctttgttctttgccatggagtggccacaacaacaatggccttccatgatgatgagggtggtgataaaaagtcaccaaaaagtttgtttttgatgagcaactccacgagggttttcaagactgatgcaggggaaatgcgtgtgctgaaaagccatggtggtaggatattttataggcacatgcacattggcttcatctc

SEQ ID NO: 66926 - DNA, 228 bp, Glycine max
  Clone ID: 700841574H1
ggaaattttggggagatagcaacttaaagagtaaattttggggtcggtcaattcagcttgatcctgttggcattttgactttggaatttgatgatggtgaagtatgccagtggagtaaggttacaacatcaatatacaatctcatattgggaaagctgtattgtgatcattatggtacaatgcgtatacagggaaatcaagactactcatgtaaactgaaattcaagg

SEQ ID NO: 66927 - DNA, 232 bp, Glycine max
  Clone ID: 700841578H1
ttcccggcaaacaaaaacaggtttttgtggtgttgaagatgttcaagaacacattccaatctggatttctttccattttatacagccttgggagtaaacctttgcagatatgggacaaagaagttgttgatggccacattaaacgactacaggatgaagacatacagtccaatgtactagaaataattggatcaaatattcagtccacatacattacttgcccagctgaccc

SEQ ID NO: 66928 - DNA, 232 bp, Glycine max
  Clone ID: 700841579H1
attaacctttctcattccccatctcctcaccttattcagccactgctaatttctagggttccgaaatggacgctggcggaaagatcaagaagggcgccggaggaagaaagggcggcggccctaagaagaagccggtttcaaggtccgtcaaggccggtctccaattccccgtcggaagaattggccgttatttgaagaaaggaaggtacgcccagcgtgtcggtaccggtgc

SEQ ID NO: 66929 - DNA, 231 bp, Glycine max
  Clone ID: 700841580H1
gtctttcttagctgatatggcggttgatcgctcccttacgaggtgctgtagcctcgtactgtggtcgtggatgttgctgaggatgatgatggcgcagggtgcagccgcgagggccaaccggaaggagtgggactcggtcataaagttaccggctgaaccggtcgatgctgactcggatcatgaagtgggaacacgatgggcggttcttgtggctggttcaaacggctatgg

SEQ ID NO: 66930 - DNA, 229 bp, Glycine max
  Clone ID: 700841584H1
ggccatataatttttttttatttgaaataatgtccgggatcatccacaagattgaggagaccctccatgtgggagggcacaagaaagaggagcacaaaggagaacaccatggtgagcacaaaggtgaacacaaaggagaacaccatggtgagcacaaaggtgaacacaaaggagaacaacaccatggggagcacaaggagggacttgtggataagatcaaggacaagat

SEQ ID NO: 66931 - DNA, 228 bp, Glycine max
  Clone ID: 700841585H1
aaaacactcaagttaacttcaacacctttaattttctgaacgaaattcagccacagaatatcaaagggagcgaagatgagtcaggagcagccaaggcgcccccaaggccaagaccccatcaaatacggcgacgtttttgacgtctacggtgaccttgcacagatgcccattgcaccggaagatgctgccatgatgcaaagcgcggaagctcgagtactcggaaaaacc

SEQ ID NO: 66932 - DNA, 225 bp, Glycine max
  Clone ID: 700841587H1
gcccaagctctaagggacaacagcatggcagggtacatgtcaagcaagaagaccatggagatcaaccctgagaacccaatcatggaggagctcaggaagcgtgctgatgcagacaagaatgacaaatccgtgaaggaccttgttctgttgctgtttgagactgctcttctcacttctggtttcagccttgacgagcccaacacttttggaaacaggatccacaga

SEQ ID NO: 66933 - DNA, 160 bp, Glycine max
  Clone ID: 700841603H1
gtctttgactatagtagagaagagaaattaaaacagatgggaagtttagaggaagacgagttggtacaaatggtgcaagattttatagaatccgaatcaacatcccccacaagttccacttcctcaaattgccacaccttaaaccaccgaactcaatatt

SEQ ID NO: 66934 - DNA, 139 bp, Glycine max
  Clone ID: 700841604H1
tgcagaatcaattttctctctcaatcgtctttcatggctcgtaccaagcaaaccgctcgcaaatccaccggtgggaaggctcctaggaagcaactcgccaccaaggctgcaagaaaatctgcacctaccaccggtggag

SEQ ID NO: 66935 - DNA, 249 bp, Glycine max
  Clone ID: 700841609H1
gggagattaatggttcggtgtcggatgagaggggtgatggactggtgtttggaagcactgaggctgccaataagttcctggaggatttggaattacatcaatcgcgtgatgctgagaggattgttactgactcggacgaagaagaggagtctgacgatgaaggagaaggcaaggagctgtttgatactgctacattggcagctcttttgaaagcggcatcgggtgcggaccaagatggcggcagcatca

SEQ ID NO: 66936 - DNA, 248 bp, Glycine max
  Clone ID: 700841615H1
gtctgcgtcggcatggcaacagaactgtatccgttatcaattctggtaatgcttggccagcagcaggtcgtggactggtacagtcatcaagtaatccttcacaatctaaactttcaacaaataatgtccttggactgtctcgtaacactgggcagatgaaaacagtaattaacagtggaccgtcatcatcaacttatgctggttctattcaggctacacagagaactgctcatggacaatttcctgct

SEQ ID NO: 66937 - DNA, 247 bp, Glycine max
  Clone ID: 700841620H1
agcaaaccgacgaatacggcaaccctgttcatgctgctagtgtcacctatgtagccaccagaactgctgctggtggttacagtgatgacattaataagcaacatgataccaccaatgcctacggcgtagacactggtagacagcattctagtggtggctacgatggtgacactaataaacatcatggaactactggtggctataatgatgacaccaatagacatcatggaactaccggtgtctatgg

SEQ ID NO: 66938 - DNA, 248 bp, Glycine max
  Clone ID: 700841622H1
cacacaactactacaagtacttccttacaatcaaaaccaacaacaactatggcaagttatcaaaagcactacgatgatcagggtcgcaaggttgacgagtatggcaacgttgagaagcaaaccgacgaatacggcaaccctgttcatgctgctagtgtcacctatgtagccaccagaactgctgctggtggttacagtgatgacattaataagcaacatgataccaccaatgcctacggcgtagacac

SEQ ID NO: 66939 - DNA, 247 bp, Glycine max
  Clone ID: 700841623H1
caagaagtagtgagaagaagggagagaatggaggaaaaggcaaaagctgagcagaagaagataggtatgaccgagacttggttgaagaagcaccgtcttctttacaatggagccactagacaccctcttattattagcattcgcgatggcaccatcaacactgcttccttcaaaacatggctcgcacaggattacttgttcgttcgggcgtttgtcccatttgtggctagtgtgctgataaaagcgt

SEQ ID NO: 66940 - DNA, 245 bp, Glycine max
  Clone ID: 700841626H1
ggcttgttcgccttcactctccgacattcacatcattcatcagagactggagcctgcgaagaaaagaataatttatggaggacggcgcaggaagaggtttggaatgccagaagactatggatgggaaggtgagtaacagtaatgggccagagaaggaaattccttcttgttgtctgaaggccaaggcttcaatccccgagtcagaggcaaaattccattccactgttgtttctgggtggttctca

SEQ ID NO: 66941 - DNA, 244 bp, Glycine max
  Clone ID: 700841629H1
gacgcgcatgaatggattaacgagattcccactgtccctgtctactatccagcgaaaccacagccaagggaacgggcttggcggaatcagcggggaaagaagaccctgttgagcttgactctagtccgactttgtgaaatgacttgagaggtgtaggataagtgggagctggaaacagcgaaagtgaaataccactacttttaacgttattttacttattccgtgaatcggaagcggggcactg

SEQ ID NO: 66942 - DNA, 246 bp, Glycine max
  Clone ID: 700841630H1
ctgaaacaaacatggcttcttccaccatcacctcctccttcctcacatcacacccttcatccctcttcaacaaatcatcatcttcatcattcccctccttccatgccacccccactctccgcccccacaggccacgcgcctccatgtccgcggcagcgccaccgccgccctacgacttcggctcgttccggttcgagccgattagggagtcgatcgtgtcgcgcgagatgacccgcaggtacatga

SEQ ID NO: 66943 - DNA, 247 bp, Glycine max
  Clone ID: 700841632H1
tgcggatgaggcgccactcgatgtttccatttgcctgcatgcctttggtattgtggggtgtggttcgtttagtggtgtcaagtcttgcgaacgtgagggtgcatgagtggtaatcgggatgtttttgttgcacggctccatgcttgcgcatgcaacgtgtgacatgcatccttttcattgtcaccttagccttcgtggcttaggtgctgacgattggttcctgtgttgcctacctaccaaacggtat

SEQ ID NO: 66944 - DNA, 244 bp, Glycine max
  Clone ID: 700841639H1
gaaagataaagcattccatagcctcccataaaaatgaagaatactatcttctctgctctctttctactttgtgccttcaccacctcatacctaccttcaaccaccgcggtggtcgataccgacggtgatattcttcagaatcctggcacatactttatcttgtccgtttttcgacccggcggcggagtagaattcgccgccactggaaacgaaacttgccctctcactgtcgtgcagactctct

SEQ ID NO: 66945 - DNA, 248 bp, Glycine max
  Clone ID: 700841643H1
acaaaacttccacttgagagaaaagtagtgtattaagactacaaattttcaatttttcaatggcgtcgaggcaacaaaaagaggatcgagctgaggcagctgcgaaagttgctgcgaaagaactcgaacaactcaaccgagaaaaagaccgtgatttcagtgttggtgttgcagaccaacaccaacaagaagaacatcagttagatcaacaaaagcgtggtgtaatcggatccatgttcaaggcggtg

SEQ ID NO: 66946 - DNA, 241 bp, Glycine max
  Clone ID: 700841644H1
gcacaaaacccttaagccgttaagcaccttcaacgccgccgtagtttgttattggtttggtttgatggagatggagggtgagaaacagcacaagtttgatgtggacctcggcaacctcatggctttcgattcctatcacaccttcccttctcaaccatctctttccagggaggacctcatcaaacagtgtttactgaaaggcactcacttggttcaagctatcgcagatgccctctttatc

SEQ ID NO: 66947 - DNA, 240 bp, Glycine max
  Clone ID: 700841645H1
gaaacggggaatcattgtctgcgtctgtaaattgtaaattgcatcatccctgaagctgaacctcaaaaccctagctgtccgcctgtctgcaacggcgtcgttatgatcagttgagaatccaaaggaatcgagtcgaatcatctgaccggcgacagttatgtacagagagcgaggaggcgtcggatccaaatcggaggtaacttccgttgatcggaagcgaatcaacgacgtcctcgataa

SEQ ID NO: 66948 - DNA, 110 bp, Glycine max
  Clone ID: 700841650H1
ctattcacttcctcaaccgatccatttttcttagtttttcgctttcctcagatggcaagtgggtttggggaatcaacagggaggtcacccccaagcccttcctacttcaa

SEQ ID NO: 66949 - DNA, 240 bp, Glycine max
  Clone ID: 700841655H1
gaagaaatgaaggttttctacaaagaaagactgaacgggtattatggcgttggagtctacattctttcaaattttctgtcttcatttccctttgtggcagtgatgtccattgctacggggacaataacctattatatggttaggtttcgcacagaattttcacattatgtgtatatctgtctggatcttattggctgcattgcggttgtggagagctccatgatgattatagcttcactg

SEQ ID NO: 66950 - DNA, 245 bp, Glycine max
  Clone ID: 700841659H1
cagcaatcaacacgtgaggttacactgtctggctttaggtctgggaaattcatgacattagttgccacaaatgtggcagctcgaggtcttgatattaatgatgttcagttaattatacagtgtgaacccccacgggatgtagaagcctatatccatcgttctggacgcacaggaagagcaggtaatactggggttgctgttatgctttatgacccaaaaagatcgaacatatctagaatagagag

SEQ ID NO: 66951 - DNA, 238 bp, Glycine max
  Clone ID: 700841661H1
caactactacaagtacttccttacaatcaaaaccaacaacaactatggcaagttatcaaaagcactacgatgatcagggtcgcaaggttgacgagtatggcaacgttgagaagcaaaccgacgaatacggcaaccctgttcatgctgctagtgtcacctatgtagccaccagaactgctgctggtggttacagtgatgacattaataagcaacatgataccaccaatgcctacggcgt

SEQ ID NO: 66952 - DNA, 137 bp, Glycine max
  Clone ID: 700841667H1
ctccggaaaaggtttttgagtactttgcatctgatcgtagttcagaaggagaagttttgatgaaaccagcagacctaatgcgagcagtggttcctgttttccctccttctgaatcccaccttgttagagatggatac

SEQ ID NO: 66953 - DNA, 239 bp, Glycine max
  Clone ID: 700841668H1
agaaaacctaagcttagaattagaaacaaagaaaagaagaaaggaaagaattgatcgttgaaaatgcagggaggaaagaaagcgggagagtccattaaggaaacagctacaaacattggtgcttctgccaaggctggcatggagaagaccaaggccactgtccaagagaaggcagaaagaatgacagcacgtgatccggtgcaaaaggagttggcaacccaaaagaaagaggcaaagat

SEQ ID NO: 66954 - DNA, 239 bp, Glycine max
  Clone ID: 700841669H1
tgagaaacaaagaaaggaaataattgatctttgaaaatgcagggaggaaagaaagctggagagtccatcaaggaaacagctgcaaacattggtgcttctgccaaggctggcatggagaaaaccaaggccactgtccaggagaaggcagaaagaatgacggcacgtgatccgatgcaaaaggagttggcaacccagaagaaagaggcaaagatgagccaggcagagctggacaagcaggc

SEQ ID NO: 66955 - DNA, 238 bp, Glycine max
  Clone ID: 700841671H1
cggtgtgggtgtttgaatctggtgaaggatgtcaattgttccaatcaaccagggtgatgccaacggctccaaccccttcgcttcgtggggtcaattcgtggattttcctctccctccttccatctccggcttcttccccggcttggaattcggattcggattcggatcatccgtgaacacacgtgtggactggagggagactcccagagcgcacgtgtggaagctggtgcttcccggc

SEQ ID NO: 66956 - DNA, 234 bp, Glycine max
  Clone ID: 700841674H1
ttcgcatgctctatgtagcttactctgcagttgggaagggtgtacttgaacaagagtgtaattgcagcgcacagatttattaatagtcttgtagatctgttggctttttcaggatgggcaagtgcaagggttgtggaaagttaggaagaatgaggccaagtcatatgagcgcgtatgaattttctctgatgctggctcctgttgtttctgtttgggattgcatagttcgcaaaa

SEQ ID NO: 66957 - DNA, 242 bp, Glycine max
  Clone ID: 700841675H1
gttaccatttgctcccagtacagagcttaaccgagcttcacaaagatgaatcgggaaaagttgatgaagatggccggttcggttagaactgggggaaagggtaccatgagaagaaagaagaaggctgtccacaagacaacaacaacagatgacaaaaggcttcagagcaccctgaagagaataggggtgaatgccatcccggctattgaggaggtcaatatctttaaggatgacgtagttat

SEQ ID NO: 66958 - DNA, 236 bp, Glycine max
  Clone ID: 700841676H1
gatggatttccagggattcctaaacgacttgcaggattgggaactttctagaaaggataaaacacgagcacaaaaggaaaatgttggcttcatcttcacagcttactggatccgtgggtgtggagaaggcatcaaaaggagataccatttcttttgatcgtgcaagaaattctccaggacagtatgatttgtcaagaattaatgatcctttcaatcgtgtgcatagtagttttgtt

SEQ ID NO: 66959 - DNA, 235 bp, Glycine max
  Clone ID: 700841678H1
gtgataaatcagattgttggatctgctccagggtttcctcatggagtaattgaccccattgaaataatttggcaatttcttccgtaggaacttggtcatctggcatcaagctttggtatttgtttccatgtggacctttgccttggtggctttgtattaccatttgctcgtgagcttgggtaccacattccaccttttgatttttctgttaaaggggtttcttcaatatcagtgg

SEQ ID NO: 66960 - DNA, 238 bp, Glycine max
  Clone ID: 700841680H1
aggccccctactgctggtcggcaaacggacggcgggcgcacgcgtcgcttctagcccggattctgacttagaggcgttcagtcataatccaacgcacggtagcttcgcgccactggcttttcaaccaagcgcgatgaccaattgtgcgaatcaacggttcctctcgtactaggttgaattactattgcgacactgtcatcagtagggtaaaactaacctgtctcacgacggtctaaac

SEQ ID NO: 66961 - DNA, 147 bp, Glycine max
  Clone ID: 700841688H1
gttgggtttacaaggagcaggtaaagcttttccaaacaagattgtttttgatgataagcttgtgttggctaacacacaagaattctttgatggaaattttccagtggattcttggttaccaatttttgtgaattgtctttatcctgt

SEQ ID NO: 66962 - DNA, 239 bp, Glycine max
  Clone ID: 700841691H1
gcagttctccgatctcaccgaggacgagtttgagaagctctacactggcgtcaatggcggcttcccgtcatcgaataatgccgccggcggtattgcgccgccgttggaggtggacgggctgccggagaattttgattggagagagaaaggagctgtcaccgaagttaagttacagggtagatgtggatcatgctgggctttcagcaccacaggatctatagaaggagccaattttcttg

SEQ ID NO: 66963 - DNA, 233 bp, Glycine max
  Clone ID: 700841692H1
cattggtccttaaacactcatcagtcatcaccatggccaagctagttttttccctttgttttctgcttttcagtggctgctgcttcgctttcagttccagagagcagcctcagcaaaacgagtgccagatccaaaaactcaatgccctcaaaccggataaccgtatagagtcagaaggagggctcattgagacatggaaccctaacaacaagccattccagtgtgccggtgtt

SEQ ID NO: 66964 - DNA, 235 bp, Glycine max
  Clone ID: 700841693H1
actactacaagtacttccttacaatcaaaaccaacaacaactatggcaagttatcaaaagcactacgatgatcagggtcgcaaggttgacgagtatggcaacgttgagaagcaaaccgacgaatacggcaaccctgttcatgctgctagtgtcacctatgtagccaccagaactgctgctggtggttacagtgatgacattaataagcaacatgataccaccaatgcctacggcg

SEQ ID NO: 66965 - DNA, 263 bp, Glycine max
  Clone ID: 700841703H1
caacaatggaggagctattcgtggcagttctatcgatgcttctcgtagcagcgttgatcccactctacctatggaaacgccgccaggattcgaaacctccccctccccaccgcgacgaagctcctcaggctccgcggagagaaacggtggcccgcgccaccgccactcgtcgcatgcgtcgccgacctaccgcgtctggagctagtacttcggcagatccacctgcgacgcaagaagaatctgctggtgagagtgacgatgaa

SEQ ID NO: 66966 - DNA, 258 bp, Glycine max
  Clone ID: 700841704H1
cacacaactactacaagtacttccttacaatcaaaaccaacaacaactatggcaagttatcaaaagcactacgatgatcagggtcgcaaggttgacgagtatggcaacgttgagaagcaaaccgacgaatacggcaaccctgttcatgctgctagtgtcacctatgtagccaccagaactgctgctggtggttacagtgatgacattaataagcaacatgataccaccaatgcctacggcgtagacactggtagacag

SEQ ID NO: 66967 - DNA, 256 bp, Glycine max
  Clone ID: 700841706H1
gcagaaatggcattgatgagaccatttgcacaatgagacttcgccaaaacattggtcagaattcatcacctgacatctacaaccctcaagctggtagcatcacaaccgccaccagccttgacttcccagccctctggcttctcaaactcagtgcccagtatggatcactccgcaagaatgctatgttcgtgccacactacaccctgaacgcgaacagcataatatacgcattgaatgggcgggcattggtacaagt

SEQ ID NO: 66968 - DNA, 262 bp, Glycine max
  Clone ID: 700841715H1
ctttaatttccccatcccctctagattttctctctaaatggttttccaaagatctctcacaatggcctttaatctcgtgcttttgttctgtttggttgcggtgatcaacaatgttgtcattccaactagtgctagacaactcatgatgactgcatcaccaaatgagaaagaagtgatgaatattggcactgaaaatagaggacatgatgaacatgatcatcaagcacaagtactagacgatccaacaagcaagaataacgtg

SEQ ID NO: 66969 - DNA, 266 bp, Glycine max
  Clone ID: 700841716H1
attatcttcagatagttcacatgcagtagaatggattggtgatgtagtacaactagtagatgagaaaaagtattaccaatcttgttgtattgatggagtaacatataggctgcagggtcatgctcttttccccaccagccatgggaaactaactccttctaaactccagtctatgtgggaagattgcaaaactgggttaaagtgggttaaggtgacaaactgctactttcctgatgatttgccagggaatattggtcatccgtgta

SEQ ID NO: 66970 - DNA, 268 bp, Glycine max
  Clone ID: 700841717H1
cacgatgtaaccttaactgataaaaccaacacaaccacacaactcaactccatctccacgctttctcaactgagtcttctctgcaacttcttctataaaaaaccatctttgttttgtttcttcacttgtttcctcgtccaccttctgacttctgagtaagtcgtcttcttcagcgagacacgatccagaaattgatgaaggcattcataatgttaaactctactcctacaaacaactaagaaatgccactgaaaagtttagtccagcc

SEQ ID NO: 66971 - DNA, 255 bp, Glycine max
  Clone ID: 700841720H1
ggagactccacaccagtaggccttatcaggaaaggcttttgaatatggcagaggctcggagggagattgtcaccgccttgaaatttcacagagcagcaatgaaagaagcaagtgaacagaagcagcaacaagcccaagaacagcagcaaaggccatcagtatctctccagccatcccagttcccaagttttgaccaagatggaaaatttaagtctaggagaaatcccagaatttacccagcatgcacaaccaaat

SEQ ID NO: 66972 - DNA, 253 bp, Glycine max
  Clone ID: 700841721H1
cacacaactactacaagtacttccttacaatcaaaaccaacaacaactatggcaagttatcaaaagcactacgatgatcagggtcgcaaggttgacgagtatggcaacgttgagaagcaaaccgacgaatacggcaaccctgttcatgctgctagtgtcacctatgtagccaccagaactgctgctggtggttacagtgatgacattaataagcaacatgataccaccaatgcctacggcgtagacactggta

SEQ ID NO: 66973 - DNA, 252 bp, Glycine max
  Clone ID: 700841725H1
agcggaggaggttgtcttctgccgccggttccgccgccgcaagcgaaggcggcggtgaagacggattacatgtacttcgacccgtcggattcaatcccgaagctgcacacggactcgagctgttcggagcacgtggtatcgccggaattcgcgagcgaggtgcagagcgagccaaagtggaaggagtgggagaaaagcctcgagtttccgtttaattacgtggatgccactctgaacaacagcaacagcttc

SEQ ID NO: 66974 - DNA, 252 bp, Glycine max
  Clone ID: 700841726H1
cacaactacaagaaagaacttccttataaccaaaaccaacaacaactatggcaagttatcagaagcactacgatgatcagggtcgcaaggtcgacgagtatggcaatgttgagaggcaaactgacgaatatggcaacccggttcatgccactagtgtcacttatgtagccaccaaaagtgttggtggctacaatgatgacgctaataagcaacatgatattactggtgtctatcccgagaaagacaccggta

SEQ ID NO: 66975 - DNA, 253 bp, Glycine max
  Clone ID: 700841727H1
tgaagagttaaggagagaaaacatcaacatcaaaccaaaccataaagatgaagcccattgacgacaaacaagagacagtgacgataagaacggtgagccacgacgaggaagggaaaaagagggtggagaagacagagcttagcactcacaacatcgacactataaggtacgtcgagaagaagctcatcaacaagggtgtccagcgacaggaccgccaccccgccgacggcatcggaatcagccggccaccgcc

SEQ ID NO: 66976 - DNA, 253 bp, Glycine max
  Clone ID: 700841738H1
gcttacaacaacgatggggacgacgagaccagctccgacctcgtccaacccgaacctgcttccagagaagacgacaacaagaataagaagaaaaagaagaaaaaggttgttaagtccgaagaaaaggaacagcctttggtcacggaggctaatggagaaaagaaggaggatcccaacgcgctttccaacttcaggatttcggaacccttgaggcaaaaattgaaggagaagggtatcgaatcactgtttccca

SEQ ID NO: 66977 - DNA, 250 bp, Glycine max
  Clone ID: 700841742H1
gtacttccttacaatcaaaaccaacaacaactatggcaagttatcaaaagcactacgatgatcagggtcgcaaggttgacgagtatggcaacgttgagaagcaaaccgacgaatacggcaaccctgttcatgctgctagtgtcacctatgtagccaccagaactgctgctggtggttacagtgatgacattaataagcaacatgataccaccaatgcctacggcgtagacactggtagacagcattctag

SEQ ID NO: 66978 - DNA, 250 bp, Glycine max
  Clone ID: 700841744H1
agaaaaaagataggtacaatgcttccatatgttcgctgcccatttcggaggtctatcaacagaggacttggaaacaggagatatcttcttgaaagcaatgacttttttgctcttagagatttgattgatctttccagaggagtctttgctgaatatccgtttttggaactggtctgataaatctctctctgccctatggattttcatgatggagccaatgtagtatcttcatgcacattgtgtatcgagg

SEQ ID NO: 66979 - DNA, 255 bp, Glycine max
  Clone ID: 700841746H1
gtgcaatggacatcggaacctatggctatcctacaccagcagtgaaaaagattgagtcttactatgatgtgccagagggagtggatattcggggaagatatgatgcagagtttgcaaaaatcctcacaaaagatgctttgaaattcgttgctgacttgcaacgtgagttcaggaaccatatcaagtatgcattagagtgcagaagagaagcaaagaagaagtacaatgaaggggctcttccagagtttgatcctg

SEQ ID NO: 66980 - DNA, 260 bp, Glycine max
  Clone ID: 700841747H1
cacaactacaagaaagaacttccttataaccaaaaccaacaacaactatggcaagttatcagaagcactacgatgatcagggtcgcaaggtcgacgagtatggcaatgttgagaggcaaactgacgaatatggcaacccggttcatgccactagtgtcacttatgtagccaccaaaagtgttggtggctacaatgatgacgctaataagcaacatgatattactggtgtctatcccgagaaagacaccggtagacatcat

SEQ ID NO: 66981 - DNA, 259 bp, Glycine max
  Clone ID: 700841763H1
atcatctgttccagaggtgcaattagctcagtatgttccagcacttgaaagactggctaccatgaggttgctgcagcaggtgtctaatgtgtaccaatctatgaagattgaaaccttatcggggatgatccccttctttgatttctctcaagtggaaaaggtttcggtagatgctgttaagcagaagtttgtatcgatgagagttgaccacatgaaaaatgctgtgattttttgcaaaaagagtcttgagtctgatggc

SEQ ID NO: 66982 - DNA, 266 bp, Glycine max
  Clone ID: 700841764H1
gccaaatccagttgaggctggacgaaccagtgcaattaaggagagtgctataacaataggagaggcattggaggccacggcacagacggtgggtcacaagccggtggatcagagtgatgcctcagcgattcaggcggcggaggttagagcaacgggaagtaacgttataacgccgggaggacttgcggctatggctcaatcagctgctgcttataatgctgactgcaagcatgaccaggacaaggtcaagcttgccgacgttctga

SEQ ID NO: 66983 - DNA, 243 bp, Glycine max
  Clone ID: 700841765H1
atccttttgtgtggggaattatggtaattgattttgagggtttgactactcatggattatgatggtatgagaaaaccttccaaaaacttatttcactctcgcttcttcctttttgggttctattgctgggattgggagttcttgaccgctctcctcctttttagttcttccccttaatcttctttcttcacaatttttatttccttccttattagacgtattagatcagattgaacaaaaggg

SEQ ID NO: 66984 - DNA, 249 bp, Glycine max
  Clone ID: 700841768H1
aaatttggctgatgacaccatcaattttgaggcttttccccacaagctggtgcagtttggagagattcaggaaaaagttgtattgaaattttcacaagaggaatttcttacagcttggtcaactcaggtgcgtcctgcaacaactctgttggctgatgggtgtccatatttgtatgctatggtgcatgatagttcagtgtctacaataccaggtgattttgtcattggtgttaagttgacaaccataaa

SEQ ID NO: 66985 - DNA, 249 bp, Glycine max
  Clone ID: 700841770H1
gttgcagaccgagctagctagctagcaagcaagcacagagatggaggcaaagcgaggccatgccctcatgtgcttggcacgtgtttcactcttcctctgcgctctaaccctatccgctgctcacggaagcaccacggttcaagacatcgcgagaaagttgaaactcggggacaacgagcttctgcgcacggagaagaagttcaaggttttcatggagaattacgggaggagctactccacagaggagga

SEQ ID NO: 66986 - DNA, 254 bp, Glycine max
  Clone ID: 700841782H1
cacaacaatgagtcgcaagagagacaggtcagcttacttttcccgccacgacgccgccaagcgccgcctccccttgccggagcccgcggaggaggagacgcctacgatgagaccggcgccgccgtccgcggtggtcgtgatgggcctcccccaggactgctccgtcctcgatctcaagtcccgattcgagatctacggcgccatctcccgcatccgcatcgaccgcgacgccgtcggatacatcacctaccgga

SEQ ID NO: 66987 - DNA, 253 bp, Glycine max
  Clone ID: 700841794H1
attgtttaagctcaaggggaaagtttttgagttgttcaaaatctccaatggaaatgatgaatgttctccccacaagggtgatgaggctcaagatgaacgagggttggccttgttcaaggaaaagattattggagtggttacatcgggtgggtttgaagataaaaggcctgcaaaactttctctccaggagcttctgcatttgctctctttgttcaatcaagctggcatttattttaatcaccgtggacgtcac

SEQ ID NO: 66988 - DNA, 250 bp, Glycine max
  Clone ID: 700841807H1
aatggctgaagcacaactacgagaccagcatggcaaccctgtcccactcaccgatcaatacggtaatccggttatcttaactgacgagcgcggtaatcccgtccaactcactggtgtcgctaccaccgctaccggcacagcaggttctgggtttgggtcctatggtaccggtgcttacggtggtggtgcaagtgcaaccaccgttgcaatcttttggcaacccaaccaaggagtggcagggaggctagag

SEQ ID NO: 66989 - DNA, 247 bp, Glycine max
  Clone ID: 700841809H1
aaacaaccttctttctttcaggttcttgatcagtgtcaaaaccaaaagggtggttgcaaattgcaatggctaagcatgatgttgagggtggttccttcgctgcaaaggactaccatgatcctcctccagcaccattgattgatgctgaggaactcacacagtggtccttctacagggctttgattgctgagttcattgccacaatgtcttcctttacatcacagtgctcactgtgattggttacaag

SEQ ID NO: 66990 - DNA, 251 bp, Glycine max
  Clone ID: 700841815H1
actactacaagtacttccttacaatcaaaaccaacaacaactatggcaagttatcaaaagcactacgatgatcagggtcgcaaggttgacgagtatggcaacgttgagaagcaaaccgacgaatacggcaaccctgttcatgctgctagtgtcacctatgtagccaccagaactgctgctggtggttacagtgatgacattaataagcacatgataccaccaatgcctacggcgtagacactggtagacag

SEQ ID NO: 66991 - DNA, 244 bp, Glycine max
  Clone ID: 700841825H1
ggatatttgtccctgatgggcatcctttgaaggctgcacccagagagcctttgagggttaatgttctgttccaacatatacaaaatatgctgtctggtgaaactgctgtaattgctgagacaggggactcctggtttaattgccaaaagctgaaattgccaaaggcatgtgggtatgagttccaaatgcaatatggttcaattgatggtctgttggtgctactctgggttatgctcaagccgtt

SEQ ID NO: 66992 - DNA, 244 bp, Glycine max
  Clone ID: 700841828H1
ttgtgcgaggaggttgggtcaggagtttcatgcttatgttgtgaaaactaaatcgtactctaagctggtgcccgttcagtcttctttgattgatatgtattgcaagtgtggggatatgatttcggcgagacgggttttttatggttcaaaggagaggaatgtggtttgttggactgctctgatgtcggggtatgctgcgaatggaaactagagcaggcgctgaggtccacgatttggatgcagc

SEQ ID NO: 66993 - DNA, 247 bp, Glycine max
  Clone ID: 700841830H1
agcgccgcctcaacatctcaactttcccttcgatctcattctcaggtgttgttgaagcttcctgtgttggcttggtatccctgcaagttctgctgtagcagattccaaggtgaaggtgtcacgttaaagtttctttcatgtttgaacaggctactatccatttgggagcaactgagctgcttggagagtattttttcttcctctagaaaaattacagaccctcaccacagagacttagttgtatgaa

SEQ ID NO: 66994 - DNA, 249 bp, Glycine max
  Clone ID: 700841837H1
gaagaggctagtggaggtgccgtacatggcgtccctggcccacacaatgactacactggtggcgaacaaggttgtggcggtgccggtggctgcgccgccggggcaatggatcggagccggagggtccatgatcgttgagtctgataagcaaaccggaaccgtacggaagcactacatagggatggtgactatgcttgacattgtggtcacattgctggtgataaccacttgagtggtgacgatgatgat

SEQ ID NO: 66995 - DNA, 244 bp, Glycine max
  Clone ID: 700841843H1
aaaacagtaaagctaacttcaacacctttaattttctaaaagtaattcagcggctgaataccaagcggagaagatgagtcaggagcagccacggcgtcccaaaggccaaaaccccatcaaatacggcgacgtttttgtcgtctccggcgaccttgcacagaagcccgtcgcaccggaagatgctgccatgatgcaaagcgcgaaactcgagtgctcggacaaacccaacccggcggagcagctt

SEQ ID NO: 66996 - DNA, 244 bp, Glycine max
  Clone ID: 700841844H1
gcatatatatcaaaatggctgcagagatggagagggagtcattgataactgaagctcctaatgcaccagttactgcacagagaagggtcagaaatgacttagaaaattctctaccaaaaccatacttgccaagagcattgaaagctcctgatacgggtcacccaaatggaacagcaggccacaggcaccacaacttatctgtcttcagcagcattgtgctttttttgatcaagatgacaatgga

SEQ ID NO: 66997 - DNA, 242 bp, Glycine max
  Clone ID: 700841845H1
gtcaagaatctaaagaagtatttcacatttgagattcaagttttggatgataagaatgtcagacgacgatttcgagcttcaaattttcaagtgtgctgtcactcgagtaaagccctacatttgcactatgccactgagaatggatgagggatggaatcaaatccagtttaacctggttgatttcaccaagagagcttatggactaattatgtggagacactgcgagtacaggtccatgcaaa

SEQ ID NO: 66998 - DNA, 245 bp, Glycine max
  Clone ID: 700841854H1
atttcgtgtcaacatgaattgatgtcttaccttattttatgatatacgctttgtttctatcaggaagttgtttagtttaacgaactgtgcttgttttttttttcgacaatgaaagaatgtaccactttaatttgttaggttaaatttaatccagatttacttaatcttaaggctaaatccagttccttaattgaacatacacttcacaaattagacgccacatattttactattttttaagacaa

SEQ ID NO: 66999 - DNA, 245 bp, Glycine max
  Clone ID: 700841869H1
ggaagaaagcgtggacagctgggaacactttgctatctgcacctcctcttccactactcgccatagttggcatcgtggtgttcttgctatgggtttcatcacaattaaacaccaactactcatccatgcaaatagccacaaccaacgtgaacttgttcctcttgtttttgcttcttgtgttgaccctcatagcccaaggaaccgcctcgtgcttcctgcagcaccaagcgtgacaagtttgtatg

SEQ ID NO: 67000 - DNA, 240 bp, Glycine max
  Clone ID: 700841873H1
cacaactactacaagtacttccttacaatcaaaaccaacaacaactatggcaagttatcaaaagcactacgatgatcagggtcgcaaggttgacgagtatggcaacgttgagaagcaaaccgacgaatacggcaaccctgttcatgctgctagtgtcacctatgtagccaccagaactgctgctggtggttacagtgagacattaataagcaacatgataccaccaatgcctacggcgta

SEQ ID NO: 67001 - DNA, 242 bp, Glycine max
  Clone ID: 700841878H1
atttccctacctctcccttcaagatgcagatcttcgtcaagaccctcaccggcaagaccatcacccttgaggtggaaagctctgacaccatcgacaacgtcaaggccaagatccaggacaaggaaggaatccccccggaccagcaacgtctcattttcgccggaaagcaacttgaggacggccgtacccttgctgactacacattcagaaggagagtactcttcacctcgtcctccgtctcc

SEQ ID NO: 67002 - DNA, 250 bp, Glycine max
  Clone ID: 700841882H1
tttgattaccaagcaagttatgagcaagatggcagaaatgataaacagtctttgtggtggtgatgaaaaattgatgcgtgaaaggacacacctgctgttggcttgttgttcaaggatggcaatttgtaagaaagatatttggagagttgaatgtggaatcccttctggatttccgctcacagttatttgcaatagcatttttaatggatgctcattagatatagctatgaaaaattattgcgccaggcta

SEQ ID NO: 67003 - DNA, 245 bp, Glycine max
  Clone ID: 700841884H1
cggatatctcggctcttgcatcgatgaagaacgtagcgaaatgcgatacttggtgtgaattgcagaatcccgtgaaccatcgagtctttgaacgcaagttgcgcccgaagccattaggccgagggcacgcctgcctgggtgtcacacatcgtttccccaacgcaaacatgtaacaatgttgctgcgcggggtgtatgctgactcccgcgagcacccgcctcgtggttggttgaaatctgggttca

SEQ ID NO: 67004 - DNA, 241 bp, Glycine max
  Clone ID: 700841885H1
gttgatcatgaaaaaatctctaccatttggtattcttatacattcggtatagtagtggggattgtttcatttgaagttatcataacacttcctttttttatacctttggtatccagtaggatacactctagtggaaatgtcactttactggtagaatgattatggctattttgattttataatgaattaattaatttgtttggtgaccatgaataaggagttgtggatccatgaatatgcg

SEQ ID NO: 67005 - DNA, 238 bp, Glycine max
  Clone ID: 700841893H1
ccagcactgagcttaaccgagcttcacaaagatgaatcgggaaaaattgatgaagatggccggttcggttagaactgggggaaagggcaccgtgagaagaaagaagaaggctgtccacaagacaacaaccacagatgacaaaaggcttcagagcaccctgaagagaataggggtgaatgccatcccggctattgaggggtcaatatctttaaggatgacgtattatccagtttctaaa

SEQ ID NO: 67006 - DNA, 250 bp, Glycine max
  Clone ID: 700841913H1
gtcatcatccgcagctgctgttattcgcaccgcaaacaaacagtgagccatggccgtcggaaagaacaagcgcatctccaaagggaaaaagggtggcaagaagaaggcagctgatccctttgccaagaaggattggtatgacattaaggccccttctctttttcaagtgaaaaatgttggcaaaaccctcgtctctcgtacgcagggtaccaagattgcttctgaaggacttaaacatagagtgtttgag

SEQ ID NO: 67007 - DNA, 244 bp, Glycine max
  Clone ID: 700841952H1
caacgcgcactctctctttttctctctgttttttgttctctcttcgcttaaaccctatcgttcttctcgttttcgccgattctcgccatgccgaaagctaaatccgacgccaaagccgccgatagcaggttgaagcggaagggcgctggtgctgggaggaagcaatcgaggaaagctgctaaggaccctaacaagccgaagagacctccaagcgctttcttcgttttcatgtccgagttcagag

SEQ ID NO: 67008 - DNA, 246 bp, Glycine max; identical to SEQ ID NO: 66707
  Clone ID: 700841953H1

SEQ ID NO: 67009 - DNA, 245 bp, Glycine max
  Clone ID: 700841954H1
gtgagaaacaaagaaaggaaataattgatctttgaaaatgcagggaggaaagaaagctggagagtccatcaaggaaacagctgcaaacattggtgcttctgccaaggctggcatggagaaaaccaaggccactgtccaggagaaggcagaaagaatgacggcacgtgatccgatgcaaaaggagttggcaacccagaagaaagaggcaaagatgagccaggcagagctggacaagcaggcggcgc

SEQ ID NO: 67010 - DNA, 250 bp, Glycine max
  Clone ID: 700842023H1
tgtaattgtagtagtagacagtagcaccatgagccaggaacagctcaagaaacctcaaggggagcaggaccccatcaaatacggcgacgttttcaaagtctccgacgaactcgctttcaaacccatcgcgccaagagacgcagctctcatgcaagccacggagaaccaagcattgggccaaactcaaaaaggaggtcccgcctcggtgatgcaatccgccgcaaccgaaaacctccgcgccggcgtcgtg

SEQ ID NO: 67011 - DNA, 185 bp, Glycine max
  Clone ID: 700842062H1
ttgaatgccggcaacgcagcctctctccctggcaaatgtggcgtcaacatcccttacaagatcagcacctccaccaactgcgccaccatcaagttctgaagggtggatctagtataaggaagaaactgcagggcagtttttcagtcgcaggatactatatatcataatgttgtaaaatttatatt

SEQ ID NO: 67012 - DNA, 250 bp, Glycine max
  unsure (1)..(250): unsure at all n locations
  Clone ID: 700842078H1
accctccattccatggctccgccgctcgaacacaacggcgtttccacgagcggtgactctcagagatccattcccacgccgtttctcaccaaaacctaccagctcgtcgacgatcacaccatcgacgatgtcatttcgtggaacgattctggatcgtccttnatcgtctgnaacaccacggggttcgcaanggattngcttcctaaatatttcaagcacaacaattctccagcttcgttcgcnaatcaaa

SEQ ID NO: 67013 - DNA, 246 bp, Glycine max
  Clone ID: 700842111H1
cagatattagtacccagaatgtcaatgtacagtatgcaacacctggccagcttggaactgggcatgcaatggtaccacctgtgtatccatatccagatccttactatagaagcatctttgctccctatgatacacaaccttatcccccgcaagcctatagtggacagccaatggtccatcttcagttaatgggaattcagcaagctggtgttcctctgccaactgatgcagttgaggagcctgtgt

SEQ ID NO: 67014 - DNA, 253 bp, Glycine max
  Clone ID: 700842115H1
gttttagccagttctcggaccaacttgcacggaattttaaggtgctagataaggcagatttaccagacaaggaacatttgttggcaactttgcaaacagaagaccagtgggcttggaatttagtgggcttgaattgccagatagttttggagagctcattacaagtggaattttaatcatccagttgcagcgtgtttataatatggtgtctcactttgtgcaagctagatttcaaatgggaactgaccatggc

SEQ ID NO: 67015 - DNA, 256 bp, Glycine max
  Clone ID: 700842117H1
gactattgagaaggtggttactaacttgggggcatctgatattgatgcacggctggaagagcttctgattgatggtattctttacgccttccaagagcagaccagtgacgacgctaatgtgatgcttaatgggtttggtgcagttgtaaactcacttgggcagagagtgaaaccatatcttcctcagatttgtggtactatcaagtggcgattgaacaacaagagtgcaaaggtgagacagcaagcagcagatctc

SEQ ID NO: 67016 - DNA, 247 bp, Glycine max
  Clone ID: 700842123H1
gtggtggaagagagggtaacacacagggagcgttcatcttattttggaaggcgcactgtgaagccagaaagcttctcctttctggatgatgaacctgacatttttgcagcacgccctggattagagccttttggcactgctagattctatcgccatgttccacatccttcccctgatggtcttgctgagataatgataattcgaggaagaataatgatggggggacgatttaattcacacgaccaat

SEQ ID NO: 67017 - DNA, 252 bp, Glycine max
  Clone ID: 700842130H1
caaaatcttatcttagcaatagctacccctatcacaacaatactctattaggcaaaaacaccaaatgggagaggaaaaagagcagcctaagaatgaaaccgagaagaagcccgaggaggccgccgcagcccccaagaaagacgacggacccatccctgtcgtttacaaactcgacttgcattgcgagggatgcgtcaagaagatcaaacgcacatgtcgccacttccaaggtgtggaaaccgttaaggcaga

SEQ ID NO: 67018 - DNA, 249 bp, Glycine max
  Clone ID: 700842135H1
gatggatattacttaggtggcacatttttgttttcctttcaagtgtctcccatctatccacatgaagcaccaaaggttaaatgcaagacaaaggtctatcatccaaatattgacttggaaggaaatgtttgtctcaacatcttacgagaagattggaaacctgtccttaatataaacactgtcatctatggcttgtatcatctcttcacggaaccaaattacgaggatccactgaatcatgatgctgct

SEQ ID NO: 67019 - DNA, 245 bp, Glycine max
  Clone ID: 700842154H1
caagaacgttgagaagaaggatcctaccggagccaaggtcaccaaggctgcccagaagaagaagtgaatcgtgcgggctggttcatcaggggatgttggttacaataaatgttggtttcttttctgtactcttgtgtcttcttttctaggtagcttgtttttcggacaaagtttgaagtctccaccatcatctcgcaactgttgttcccagaactgggttcttgatcgacggtggcaaaattgct

SEQ ID NO: 67020 - DNA, 243 bp, Glycine max
  Clone ID: 700842155H1
ctttttcttctcccaccaacttcaccgtcttcttcctcgatcatgtctcacttcaagggcaagtaccatgatgagcttattgccaatgctgcttacattggcactcctggaaagggtattcttgctgctgatgagtcaacagggacaattggcaagcgtttggccagcatcagtgtagagaatgttgaatccaacaggcgtgctcttagggagctgcttttcaccgctcccggtgctcttaaa

SEQ ID NO: 67021 - DNA, 240 bp, Glycine max
  Clone ID: 700842157H1
ctggagatgatgacacgcttgctgaagatcaagccttgctcaaaggatccaagtcaacatccaaattgtggaatcagttcaccatcttctccaaagatatgcaggagctcttgcatgaccaagtgtatgttataaatgttctagggtacatagcatacaattttgtcattggagcttactcatactggggcccaaaggcaggatacagcatttaccatatgaataatgctgacttgttat

SEQ ID NO: 67022 - DNA, 242 bp, Glycine max
  Clone ID: 700842176H1
caagcaaccaacacaaactgatttctcatttcgtagcatcaaccgctaactatccagatactaattttcgctttggtttggttcaattctgtccgcagacatggttttcaggccaatgagtggtaattggttagcactgttaagaaacagttatggaggtaaagccgcgtacgcaacctcaacagcaccaaagatgaaagcgtatgcagctgcggctgattacggacacaagcaacaacatg

SEQ ID NO: 67023 - DNA, 242 bp, Glycine max
  Clone ID: 700842186H1
ctaatacatcatggcagacgagacccagaacaagtatgagagctctgaggttgaggtccaggatcgtggtgtttttgactttctcggtaagaaaaaggatgaagaagacaagcctcatcctcaggaggaggtcatcgccaccgagtttcaaaaagtcactgtctcagaccaaggagagaacaagcacagcctcttagaaaagcttcaccgatctgacagcagctctagctcttcaagtgagg

SEQ ID NO: 67024 - DNA, 239 bp, Glycine max
  Clone ID: 700842187H1
gaaggaaatggctgaagcacaactacgagaccagcatggcaaccctgtcccactcaccgatcaatacggtaatccggttatcttaactgacgagcgcggtaatcccgtccaactcactggtgtcgctaccaccgctaccggcacagcaggttctgggtttgggtcctatggtaccggtgcttacggtggtggtgcaagtgcaaccaccgttgcagatcttttggcaacccaaccaagga

SEQ ID NO: 67025 - DNA, 238 bp, Glycine max
  Clone ID: 700842191H1
gaaacagaatggtttcatgttcttttattgattggttatttctttctgtttgtatctctttttccaattgtggtctcaatgagtttacaagattgaatggccaattctctgcatttaagcgacaactgcgctgaatgataaagatcccctacccccgttgcggggctccccttgccctttcttggttggtaaaccaaccagcgatttacaacaaacaagtctttcctctccctatggt

SEQ ID NO: 67026 - DNA, 150 bp, Glycine max
  Clone ID: 700842194H1
caaagaaaggaaataattgatctttgaaaatgcagggaggaaagaaagctggagagtccatcaaggaaacagctgcaaacattggtgcttctgccaaggctggcatggagaaaaccaaggccactgtccaggagaaggcagaaagaatga

SEQ ID NO: 67027 - DNA, 258 bp, Glycine max
  Clone ID: 700842214H1
cctgccagtagtcatatgcttgtctcaaagattaagccatgcatgtgtaagtatgaactaattcagactgtgaaactgcgaatggctcattaaatcagttatagtttgtttgatggtatctactactcggataaccgtagtaattctagagctaatacgtgcaacaaaccccgacttctggaagggatgcatttattagataaaaggtcaacacaggctctgcctgttgctttgatgattcatgataactcgtcggat

SEQ ID NO: 67028 - DNA, 151 bp, Glycine max
  Clone ID: 700842303H1
ggagcaagaacttaagtacctggaatttgtgcaattcgcgaccatccaggccctgatgcgctgcgccatcctctactcctacgccaaggagcgcgcgggtcctctgaagcccggcgtcaacaccgtcgaggaggccgtgaagaccgtcgtg

SEQ ID NO: 67029 - DNA, 251 bp, Glycine max
  Clone ID: 700842307H1
cgaacctcaacaacgctgaacgcagaaaggggaaaaaggggattagggtttaggaagcagcgacaacaatggatttcacagcggagaagaaggaatcagagagcaacaccgaaaatgctcatccaacaactttagattcttcttctcaattggcatcggcacttgattccagcaacaaagaaatcgaagaacgacaagctcgtgaactcaaagccggtcttcaccccctcaagcacaagtttgtcttctgg

SEQ ID NO: 67030 - DNA, 244 bp, Glycine max
  Clone ID: 700842312H1
gaaaccaagcctataaagataagcagtggcaaaaagccattggattttatacagaagctatcaaactctgtggtgacaatgcaacatattatagtaacagggctcaagcgtatctaggacttggaagttatcttcaagctgtggaggattgtacaaaagcaattagtcttgacaaaaaggtaactttcttcatagaacgttttgcttagaagtctatgtattttgccatcatacactgacaaaa

SEQ ID NO: 67031 - DNA, 250 bp, Glycine max
  Clone ID: 700842322H1
tcattttccaactacatttcttccaccaactcataaaatcctcatatctgttcccaaaagcttgtttgtgagaatggcttcgggtgaaaagaaattcccacctcaacaacaacaaacacagcctgggaaggagcatgctatgaatccagtaccccaattcactagccctgactacaagccttcaaataaacttcaaggaaagatagcattagtgcctgggggtgactctgggattggacgagcggtgtgt

SEQ ID NO: 67032 - DNA, 250 bp, Glycine max
  Clone ID: 700842340H1
gttgggttagcacatcttgtaaaaggttgctgcacagtgcttgagtcatgccacatggtttattgctctggtgtaacttcagttggagtagcaactgtggtttctagttgtcccaacataaaaaaggttcttgttgaaaagtggaaggttagccaacgtactcagcgtcgagtaggctcagtcatctcctacttgtgcatggacctctagatctccttcggtgtatatgtacacctccaagttttttttt

SEQ ID NO: 67033 - DNA, 243 bp, Glycine max
  Clone ID: 700842344H1
gatggcacaagttgaacttcgtgacgagcatgggaacccagttgaactaacagatgcatatgggaatccggtttggttaacggacgagaaaggcaacccggtgcacctcacggctgtggcaaccaatgcacacaaatctatgcttcagaatgacaccccacaagagcttcctcactccaagagttcaagctcgtctgaggatgaagggcatggagagaggatcaggaagggactgaaggataa

SEQ ID NO: 67034 - DNA, 213 bp, Glycine max
  Clone ID: 700842358H1
gggagatcgagaagtaaagcaatcaatactccgaattcggaagaacaatgtgaggcagtagctgatgaaactccaattgaagatgataccgaggtagcagagaaagtggaagatgttggagtggttgatgcagataatgttgagggtgagaaggaggggggaaaaggtgttggttctgttggattgtctgatgagacggatcgtaagtcgatg

SEQ ID NO: 67035 - DNA, 243 bp, Glycine max
  Clone ID: 700842360H1
cttctaactatcgatttctgctaaaatacacatactttggctaaccctatcttcaaatgcatcttcttagctttgattttcatccatgtctcttaggcatgttcagttgatcttaacatatctttgaaactttaatcataacaactatgttggacgctccttgtttttaggatccacgataggtgcaagcttccattgacgagttgaactcatatttgctaaatcttaacttttgaatttatt

SEQ ID NO: 67036 - DNA, 247 bp, Glycine max
  Clone ID: 700842363H1
ctggcattcactggcactatggctcaaggtctcacgccccagaactcacagcagggtattacaacacccggttccgtgatggctacatccccattgctcaaatgttggcacgccacggtgccatcttcaacttcacctgtattgagatgcgcgatcacgagcagccacaagatgccctttgtgcacccgagaagcttgtgaagcaagtggctctggcaacgcagaaggcacaggttccacttgctgg

SEQ ID NO: 67037 - DNA, 252 bp, Glycine max
  Clone ID: 700842366H1
ttgcattcgtacctccctttgttttcgctattgctgtgtctctcgaggattgtctcaattgagttggtgctgaatccgaggtttattttagctggtgtggaatcatttcaacattatctggaagaagactttcagatttttagtcaaatttaatacttaaagatggggttatacgagcatccagatgttgtgcagtggggtattaatctttttgacagtgaccctgcctatagtcctggatactacagtgac

SEQ ID NO: 67038 - DNA, 246 bp, Glycine max
  Clone ID: 700842373H1
gcgttgccattctcatcctcttctttctctctctaccattgccatggatccctacaagcaccggccatccagcgccttcaattctcccttctggactacaaattctggtgctcctatttggaacaacaactcctctttaaccgttggagctagaggtccaattctgctggaggattatcatcttgtggagaagcttgcaaattttgatagggaacgtatcccagaacgtgttgtccatgccagggg

SEQ ID NO: 67039 - DNA, 244 bp, Glycine max
  Clone ID: 700842374H1
cgtagacactggtagacagcattctagtggtggctacgatggtgacactaataaacatcatggaactactggtggctataatgatgacaccaatagacatcatggaactaccggtgtctatggtatagacaccgataggcaacaacatgggactactggtggctatgccggtgacactggtaggcaacatgggaacatcggtggcccttactatggaaccaacaccgcagacaccggtactggt

SEQ ID NO: 67040 - DNA, 249 bp, Glycine max
  Clone ID: 700842380H1
atcacacacaactactacaagtacttccttacaatcaaaaccaacaacaactatggcaagttatcaaaagcactacgatgatcagggtcgcaaggttgacgagtatggcaacgttgagaagcaaaccgacgaatacggcaaccctgttcatgctgctagtgtcacctatgtagccaccagaactgctgctggtggttacagtgatgacattaataagcaacatgataccaccaatgcctacggcgtaga

SEQ ID NO: 67041 - DNA, 248 bp, Glycine max
  Clone ID: 700842387H1
gacattgccttggcaattggagaaaactttgagaaatacctgttatatgcaatgcctatgcttcagagtgccgcagagctctctgctcatacatctggtgctgatgacgatatgacagaatacactaattctttgagaaatggaattctagaggcatactcagggatcttccaagggtttaaaggttccccaaagacccagcttctgatgccatatgctcctcatgtgctgcaattcttggatagttt

SEQ ID NO: 67042 - DNA, 243 bp, Glycine max
  Clone ID: 700842390H1
gccctccaaatgcctaggattattgatctaagccctcaacgactcttagaacttgtgcaatctctttcattttcacaacatatgatctttagtgcttcctaggatttctttttctctgcttaacctcctcattctccggtcgtaactcattcacgatgattgtgatttgttgtagggttggaggatcaagagcctaattatgtagtcccatttagtgacgatttcataatcacctagtgtgtg

SEQ ID NO: 67043 - DNA, 245 bp, Glycine max
  Clone ID: 700842393H1
gctgaagtacgttcacaacaaccccagcatgttcaagtccacgcaagcacaacacacacaccacaacaataccgttattaccaaggtggcgccaaaacacaacaccatggcggcgaaggtggcggcgttatgagcctcttcccggagatatccctcacgggctcccaactcctcgccctcctcgccggcgtccccctcggcggcatgttgctactcctctccggggtctcgctcatcgccagcct

SEQ ID NO: 67044 - DNA, 258 bp, Glycine max
  Clone ID: 700842458H1
gcactcttatcctctcaatttgaaatgcctattaccaacaacacttctcacactatgaccaacaacaggttttccggaatgatagaaacagtagcaatgtgtaagcaactttgttttggcggttctgcacttggactattcacgaaaattatcaagaaagttctatttgctctatttacttgcattctggcactaggagggtcaatagtaggaacaattgcaggaggcatcaaagggcagaccacagaagctggtttt

SEQ ID NO: 67045 - DNA, 243 bp, Glycine max
  unsure (1)..(243): unsure at all n locations
  Clone ID: 700842507H1
ccttaatcttctttcttcacaatttttatttccttccttattagacgtattagatcagattgaacaaaagggnnnnnnnnnnnnnnnnnnnnggggaataatagaaataagaaaagattagtgaggttgaaatgtcgcaacgatcggtgccggcgccgttcttgacgaagacgtatcagttggtggaggatcaggggacggaccaggtgatatcgtggggtgaaagtgggaacactttgtggt

SEQ ID NO: 67046 - DNA, 242 bp, Glycine max
  Clone ID: 700842528H1
caagtacttccttacaatcaaaaccaacaacaactatggcaagttatcaaaagcactacgatgatcagggtcgcaaggttgacgagtatggcaacgttgagaagcaaaccgacgaatacggcaaccctgttcatgctgctagtgtcacctatgtagccaccagaactgctgctggtggttacagtgatgacattaataagcaacatgataccaccaatgcctacggcgtagacactggtaga

SEQ ID NO: 67047 - DNA, 239 bp, Glycine max
  Clone ID: 700842590H1
gtttcacttgttgcccgatgctttcaaggggatcaagcagattggtgttatcggttggggatctcagggacctgcgcaggctcagaatctacgggactcacttgctgaagcaaagtctgatattgtggtcaagattggactcaggaagggttctcgttcctttgctgaagctcgtgcagctgggttttctgaggagaatgggactctaggtgatatatgggaaactgtctctggaagtg

SEQ ID NO: 67048 - DNA, 239 bp, Glycine max
  Clone ID: 700842602H1
atcttggttttatatagttagaactttgctaacttccaatagcaaggaatattagcatagattgagattaagaattctgagtaataacctaactaatctttttgataattgcagtgaaaatgttgggctacttggtctgacgcatatagggagccgaagagtagtgcaaatatcatgtggttatatgatcttcttctctatttttggtactctattccaactgaaacacatgtgggcag

SEQ ID NO: 67049 - DNA, 232 bp, Glycine max
  Clone ID: 700842609H1
cacaactacaagaaagaacttccttataaccaaaaccaacaacaactatggcaagttatcagaagcactacgatgatcagggtcgcaaggtcgacgagtatggcaatgttgagaggcaaactgacgaatatggcaacccggttcatgccactagtgtcacttatgtagccaccaaaagtgttggtggctacaatgatgacgctaataagcaacatgatattactggtgtcta

SEQ ID NO: 67050 - DNA, 239 bp, Glycine max
  Clone ID: 700842617H1
gcacaacaacttctccagcttcgttcgtcaactcaacacttatgtaatctaattattcttctctatcaattcctttcttttctctttttacatttttctgatttttcttaattttgcttgacttgtagggatttagaaaagttgtacctgaccgctgggagttctcgaacgagtattttcgaagaggcgaaaagcgtcttctctgcgaaatccagcgacggaagatcctctccgcatct

SEQ ID NO: 67051 - DNA, 231 bp, Glycine max
  Clone ID: 700842639H1
cagatatcggcgaagatgagggagaaaggtttcgatcgttctccaaccatgtgcaccgataagtggcgcaacctcttgaaggagttcaagaaggccaagcaccaggaccgagggagtggttccgccaagatgtcgtattacaaggagattgacgagatcctcagagagaggagcaagaatgtgcagtataaaagccctactcctccgcccaaggttgattcctttatgcag

SEQ ID NO: 67052 - DNA, 228 bp, Glycine max
  Clone ID: 700842642H1
gttgaggttaatcctgatggaagccgaaaatgggttggaggagaggttgtgcaagcactggcttatgatgtgccaattccaggttaccaaaccaagaacaccatcagtcttcgtctctgggaggcaaaagcgagtgctgaggatttcaatttatttttatttaatgatgggcaacatgatgctgcttcagtgcttcactcacgagctcaacagatttgtgcagtttta

SEQ ID NO: 67053 - DNA, 229 bp, Glycine max
  Clone ID: 700842644H1
caaaacagtaaagctaacttcaacacctttaattttctaaaagtaattcagcggctgaataccaagcggagaagatgagtcaggagcagccacggcgtcccaaaggccaaaaccccatcaaatacggcgacgtttttgtcgtctccggcgaccttgcacagaagcccgtcgcaccggaagatgctgccatgatgcaaagcgcggaaactcgagtgctcggacaaaccca

SEQ ID NO: 67054 - DNA, 235 bp, Glycine max
  Clone ID: 700842665H1
gaaaacctaagcttagaattagaaacaaagaaaagaagaaaggaaagaattgatcgttgaaaatgcagggaggaaagaaagcgggagagtccattaaggaaacagctacaaacattggtgcttctgccaaggctggcatggagaagaccaaggccactgtccaagagaaggcagaaagaatgacagcacgtgatccggtgcaaaaggagttggcaacccaaaagaaagaggcaaa

SEQ ID NO: 67055 - DNA, 229 bp, Glycine max
  Clone ID: 700842668H1
aaacaactctttctcttcttccttcgctcgttgttctccctcgcgtagatcgacaatggcggagacagagacgtttgctttccaggctgagatcaaccagctcctcagtctcatcatcaacaccttctactccaacaaggagattttccttcgtgaactcatcagcaacgcctccgatgctttggacaagattcgatttgagagtttgacagataagagcaagctcgat

SEQ ID NO: 67056 - DNA, 226 bp, Glycine max
  Clone ID: 700842676H1
ggctcctgaggacaaggcgagtttatggtcacaacttcattatgtttcgtgcaataacctggaaatgcaagaagcttatcttgtcaatctcgtaaatgtgttacgagaattgtatttgcacagtccagaggaagctcgccaattgagaaggaaagctctctctcgtattgaatggctgcaaaaagctgatgtgcctaccatagcacagattgaagagttccattcg

SEQ ID NO: 67057 - DNA, 253 bp, Glycine max
  Clone ID: 700842712H1
ccaaactctaagcaattattgtatacattctcttctctctcccttttctcatcacacactaacttgctttcgaggttttcttcttctttctcgaattttcacataccgaacttctcgtctttcacatctccaggtttgaaatgaatcctgagaagtttactcacaagactaatgaagctcttgcgtcggcccacgagctcgcgatgagttcaggccacgcgcaattgactcccatccacttggcccacgcgct

SEQ ID NO: 67058 - DNA, 219 bp, Glycine max
  Clone ID: 700842724H1
tataaaataagagactctgaagtctgaacacggtgctcacataatgttgaggagttttagcatgccctgcaatggaggctgtcaaggatttgtataacagtattttgggtatatttctttcataatttattttgcgattgttatgtgaaaatgttgtatgtgtttaactggatgtacatgttacgttattagtggtctatgtgatgttcattaagactg

SEQ ID NO: 67059 - DNA, 251 bp, Glycine max
  unsure (1)..(251): unsure at all n locations
  Clone ID: 700842727H1
gattcctgcgagtatgctcatggtgtttttgagtcctggctacatcccgcccaataccggacaaggctttgcaaggatgagacgggctgtgctagaaaagtatgcttctttgctcacaaacctgaagatcctacgccctgtgtatgcttccactgggtcggctatgnccatcaccaaaatcctattcagctagtggacttgacatgacagcgatgagtccattggctcttagttccacatnacnnacgact

SEQ ID NO: 67060 - DNA, 253 bp, Glycine max
  Clone ID: 700842746H1
ccctttcccccttttcatttcttcctcgattttccatttccataaccttagtcatcttcttctttcatctttctccctaacggtatcgagggaaaaatatggcggaagaacacagatgccaggcaccgcgcttctgcgccaacaattgcggtttctttggcagccctgccacgcagaatatgtgctccaagtgctaccgcgatttccagctcaaggagcagcaatcttccaacgccaagatggttctcaatca

SEQ ID NO: 67061 - DNA, 248 bp, Glycine max
  Clone ID: 700842760H1
gggttggggttggggttggggatgggggtaagcaacaacatcaccgcagtgctgaacttgatagctacgctggcctcaatcccgatcatagcctccggcatttggctggcatcgaagcccgacaacgagtgcgtggccaacttccggtggcccattgtcatcatcggcatcctcatcctcctcgtttccctggccggttttgtcggtgcctactggaacaaacagggtctcctcgccctctacctctt

SEQ ID NO: 67062 - DNA, 260 bp, Glycine max
  Clone ID: 700842781H1
ctcaatcatgtcttcagaaacaaaagcagaaacacaaactttgaccaccccctcttactcctcagatgttgacaatggtatagtgaaggatgtagtcctatggagaagaaagaaaataaatataagcgttcttgttgcggcaacagcggcatgggtgttgatggaagtgtttgaattcaacttcctcactctcatatcatgggtggccatactcggtcttgcttcaatattcctctatgccaatatgcttagacttttgg

SEQ ID NO: 67063 - DNA, 244 bp, Glycine max
  Clone ID: 700842805H1
gtgggtgtttgaatctggtgaaggatgtcaattgttccaatcaaccagggtgatgccaacggctccaaccccttcgcttcgtggggtcaattcgtggattttcctctccctccttccatctccggcttcttccccggcttggaattcggattcggattcggatcatccgtgaacacacgtgtggactggagggagactcccagagcgcacgtgtggaagctggtgcttcccggcttctccaacg

SEQ ID NO: 67064 - DNA, 248 bp, Glycine max
  Clone ID: 700842906H1
cgcaaagattcgctccaacattttaagaagccctgggctcatgagcatgaacctgttaaaaatcttctagatgctgttaataaaattaagccaacagtgttgattggaacatcgggacaaggaagaacttttactaaagaagtgattgaggcaatggcttctattaacaagagacctattattctttctctttccaaccctacgtcacagtcagaatgcactgctgaagaagcttacaagtggagcca

SEQ ID NO: 67065 - DNA, 246 bp, Glycine max
  Clone ID: 700842909H1
gtacggtgggagaagggaaggtgagtagtaatggtcatggatgttgcaaatcagggccaggctatgcttccccactggaagccatttctggtcccagagagtctctcatttatgtaacctctgtctacacagggaccggaatagagaagccagactatttggcgacagtggatgtggatccaaactctccaacttattccaaagtcatccataggcttcctgttccttatttaggtgacgaattgc

SEQ ID NO: 67066 - DNA, 244 bp, Glycine max
  Clone ID: 700842910H1
cacgaatatcttgttgtttggagcgatccgagaaaaactctgtaaacatgttggtttaccaggacctccttacaggtgatgagcttctctctgactccttccgttacaaggaaattgagaatggaatgctgtgggaagttgaggggaagtgggttgttaaaggagcagttgatgtagacattggtgcaaacccttctgctgagggtggaggagaagatgagggagttgatgatgcagctgttaa

SEQ ID NO: 67067 - DNA, 246 bp, Glycine max
  Clone ID: 700842935H1
ttctggttcttaagttgtgcgtcgtaaaagccacaccaattcccccatagaaatcagaaaacccaccgaacccttaccagcggatcgccgtgctgagtgtgaagcgaaggcatcatggggctgacgaatttcgtgctgacggtggcgggtgtaagcgccgtcgttcttctccttaggagtgacgtcagacaatctgcctccgtcttccggcgtaacgtcaagcacattcgcaactggctcgaagaa

SEQ ID NO: 67068 - DNA, 241 bp, Glycine max
  Clone ID: 700842944H1
tcacaacttcattatgtttcgtgtaataatctggaaatgcaagaagcttatcttgtcaatctcgtaaatgtgttacgagaattgtatttgcacagtccagaggaagctcgccaattgagaaggaaagctctctctcgtattgaatggctgcaaaaagctgatgtgcctaccatagcacagattgaagagtttcattcgatgcagaggatgatgaatgctcctgattcaaatgataatattg

SEQ ID NO: 67069 - DNA, 242 bp, Glycine max
  Clone ID: 700842947H1
accgcagtacagggaaggaattgacaacctgttagtgctcttgattggaggaattcccattgccatgccaactgtgttgtctgtcactatggctattggttcccacaggctttctcagcagggtgccatcacaaaaagaatgacagctattgaggaaatggcagggatggatgtcctatgcagtgacaaaactgggactctcaccttaaataagttgagtgttgacaggaacttgattgagg

SEQ ID NO: 67070 - DNA, 249 bp, Glycine max
  Clone ID: 700842949H1
tatgtgtaaaatctagtatgactgaactgattgttctttcttttctagtaaaacttaagcctgtttgatgttgtgttttagaggttattttctttatgatcccctaattacaagttttcaccccattatgatcctatataatctcaagtttaacaacattgtgtaattgtaactgaatcccttcttggcatggctctcacttgtgaaaaccttttcctttctaaatccctttgagagtgttggcctctg

SEQ ID NO: 67071 - DNA, 255 bp, Glycine max
  unsure (1)..(255): unsure at all n locations
  Clone ID: 700842951H1
angggtantgggttgtncgacgtcaggagcagggntcntcctaangcttttgtntanatactgtgtgtgtgctcnccgncatancagtncgangtgtttcatggcggcngttgnctccagtggctaccatggntgaccaggcgtncttcgtagnagcccaaacgtagttcaagtttggncnntgnnagcgagaagcaaaagctcaggccnatgtntaatccgcagccatcgaagcgcagagtactccacatggct

SEQ ID NO: 67072 - DNA, 247 bp, Glycine max
  Clone ID: 700842964H1
attagtaacttgttgagagttgctgcttggaagaaaggctgtttaatggttaaaattgtgatgtctgggaatgcagcagtcaaaaggagtgattgggcctcattggtacaagtgtttttaacaaacagcaacagtacagagcatttcgatgcatgtaagtggacaaaatcggaaccacattcctgggaattgatcttcccaatagaggtatgtggtcctaataatggttttgaaatgtggagttctg

SEQ ID NO: 67073 - DNA, 242 bp, Glycine max
  Clone ID: 700842968H1
aacactcaagttaacttcaacacctttaattttctgaacgaaattcagccacagaatatcaaagggagcgaagatgagtcaggagcagccaaggcgcccccaaggccaagaccccatcaaatacggcgacgtttttgacgtctacggtgaccttgcacagatgcccattgcaccggaagatgctgccatgatgcaaagcgcggaagctcgagtactcggaaaaacccaacccggcggagttc

SEQ ID NO: 67074 - DNA, 238 bp, Glycine max
  Clone ID: 700842971H1
ggagaagggaaggtgagtagtaatggtcatggatgttgcaaatcagggccaggctatgcttccccactggaagccatttctggtcccagagagtctctcatttatgtaacctctgtctactcagggaccggaatagagaagccagactatttggcgacagtggatgtggatccaaactctccaacttattccaaagtcatccataggcttcctgttccttatttaggtgacgaattgc

SEQ ID NO: 67075 - DNA, 240 bp, Glycine max
  Clone ID: 700842979H1
tacaagtacttccttacaatcaaaaccaacaacaactatggcaagttatcaaaagcactacgatgatcagggtcgcaaggttgacgagtatggcaacgttgagaagcaaaccgacgaatacggcaaccctgttcatgctgctagtgtcacctatgtagccaccagaactgctgctggtggttacagtgatgacattaataagcaacatgataccaccaatgcctacggcgtagacactgg

SEQ ID NO: 67076 - DNA, 245 bp, Glycine max
  Clone ID: 700842981H1
cttttattttagggttttgaaatttgtgatctcaccggtggatcgcttccggtctcgtttcaggtatcgagggaaaaatatggcggaagaacacagatgccaggcaccgcgcttctgcgccaacaattgcggtttctttggcagccctgccacgcagaatatgtgctccaagtgctaccgcgatttccagctcaaggagcagcaatcttccaacgccaagatggttctcaatcagtcgctggttc

SEQ ID NO: 67077 - DNA, 242 bp, Glycine max
  unsure (1)..(242): unsure at all n locations
  Clone ID: 700842983H1
gccaaatgtgccggctcttcatttaccaggaagcaatcttcaatctagtacgattgaggtcttccctaagtgctcgngacattccaccagaagacntgaanatgatgtctgancttgatggncagcagcagcaccatctgaatgacttganctgttacntacagcctcgccccggtgccagttcagtgagtagatcaggtcggtccaagaccctnactcnatcaaatctggnananntnttt

SEQ ID NO: 67078 - DNA, 233 bp, Glycine max
  Clone ID: 700842992H1
tgatgatctactggctcctgttttgaaggctgtaattgagaaaaccaatgtgaacccaagtgaagttggggatattgttgtaggtagtgtattggctcctggagctcaaagagctagtgaatgccgaatggctgcattttatgctggttttcccgaaactgtgcctgttaggaccgttaataggcaatgttcatctgggctccaggctgtcgctgatgtagctgctgctataa

SEQ ID NO: 67079 - DNA, 236 bp, Glycine max
  Clone ID: 700842993H1
catggcttcctccaccgctttcttcacacccctccatgatttcactcaagccagaacaaccccatcaccccctttgcctttcatcaaatcctcctttgcttcctccaagtcaaccttttttcaccctgccctttccctacaaacctcttccaactttcccaggctttttggaaagcctaagtttttctctgttcatgcaagggctgccacagaaaaaaccatttatgattttactg

SEQ ID NO: 67080 - DNA, 237 bp, Glycine max
  unsure (1)..(237): unsure at all n locations
  Clone ID: 700843027H1
aaaccctccattccatggctccgccgctcgaacacaacggcgtttccacgagcggtgactctnagagatccattcccacgccgtttctcaccaaaacctaccagctcgtcgacgtcacaccatcgacgatgtcatttcgtggaacgattctggatcgtccttcatcgtctggaacaccaccgctttcgccaaggatttgcttcctaaatatttcaagcacaacaacttctccagttc

SEQ ID NO: 67081 - DNA, 240 bp, Glycine max
  Clone ID: 700843038H1
gtggtgtcatcatgtgagaagaagaagaaaagcgtggtgggtgcagaaaagaagaagagtgatagtgggcgagctcgtaaaaacgtgtacagaggaatcaggcaaaggccatggggcaagtgggccgcggagataagggacccacacaagggtgttcgtgtctggctcggcaccttccccaccgccgaagaagccgcccaagcctacgacgacgccgccatacgcatccgcggcgacaag

SEQ ID NO: 67082 - DNA, 138 bp, Glycine max
  Clone ID: 700843040H1
cgagtaccttgatggtttagtttggggaccttttttgttaactcgttcagattggattttacaattttgtgttgtcaaactttttcttatgggaatattttttttgaaatcttacttctatatgctttggtgttgact

SEQ ID NO: 67083 - DNA, 238 bp, Glycine max
  Clone ID: 700843046H1
cacacaactactacaagtacttccttacaatcaaaaccaacaacaactatggcaagttatcaaaagcactacgatgatcagggtcgcaaggttgacgagtatggcaacgttgagagcaaaccgacgaatacggcaaccctgttcatgctgctagtgtcacctatgtagccaccagaactgctgctggtggttacagtgatgacattaataagcaacatgataccaccaatgcctacgg

SEQ ID NO: 67084 - DNA, 242 bp, Glycine max
  Clone ID: 700843050H1
cacacaactactacaagtacttccttacaatcaaaaccaacaacaactatggcaagttatcaaaagcactacgatgatcagggtcgcaaggttgacgagtatggcaacgttgagaagcaaaccgacgaatacggcaaccctgttcatgctgctagtgtcacctatgtagccaccagaactgctgctggtggttacagtgatgacattaataagcaacatgataccaccaatgcctacgggta

SEQ ID NO: 67085 - DNA, 237 bp, Glycine max
  Clone ID: 700843052H1
gaagaagctctggcaccagctcactctcaagctcgagcagtttgtggctctcgccgtcttccaggctggtgatgctttaatacaattatatcacaatttcatcacagacttgagacgaaaatcaaccttctcaagcttgcacattttgctgttatagtttctcggcagtattctgaaaaagaagctgctgttggttatcttggaggggtcattcagaaacttcaagacactagggag

SEQ ID NO: 67086 - DNA, 232 bp, Glycine max
  Clone ID: 700843072H1
cgccttagattgttcttctctttcattatactgttctcttttcgatttgagggaacagtacaagagtgtgaggatcggttaacccaactgcacaggtagtcactaaataatggagtctcacgatgagactggatgccaggctcctgaacgccccattctttgcattaataattgtggcttctttggaagagcagctaccatgaacatgtgttccaagtgttacaaggacatg

SEQ ID NO: 67087 - DNA, 243 bp, Glycine max
  Clone ID: 700843108H1
ctgatcctattgtgttggccttcgggatcggagtaatgattaacagggacagtcgggggcattcgtatttcatagtcagaggtgaaattcttggatttatgaaagacgaacaactgcgaaagcatttgccaaggatgttttcattaatcaagaacgaaagttgggggctcgaagacgatcagataccgtcctagtctcaaccataaacgatgccgaccagggatcagcggatgttgcttttag

SEQ ID NO: 67088 - DNA, 233 bp, Glycine max
  Clone ID: 700843127H1
gaggaattttagtggacaaaactggagattggatcacacttatacaaaattctccaattagtaacttgttgagagttgctgcttggaagaaaggctgtttaatggttaaaattgtgatgtctgggaatgcagcagtcaaaaggagtgattgggcctcattggtacaagtgtttttaacaaacagcaacagtacagagcatttcgatgcatgtaagtggacaaaatcggaacca

SEQ ID NO: 67089 - DNA, 233 bp, Glycine max
  unsure (1)..(233): unsure at all n locations
  Clone ID: 700843129H1
ctctctctcttcttatatttccacattccacgtgaaccttctagaactataatagaaagaaaccctccattccatggctccgccgctcgaacacaacggcgtttccacgagcggtgactctcagagatccattcccacgccgtttctcaccaaaacctaccagctcgtcgacgatnacaccatcgacgatgtcatttcgtggaagattctggatcgtccttcatcgtctggaa

SEQ ID NO: 67090 - DNA, 236 bp, Glycine max
  Clone ID: 700843131H1
gaggccttgtgtggcttccaatttgtgctgactcacttggatagccgtcagcttcttattaaatcaaatcccggggaagttgtgaagcctgattcatacaaggctataaatgatgagggaatgcccatgtatcagaggccattcatgaaggggaaactttacattcacttcactgtggagtttccagattctctaaaccctgatcaagttaaggccttggaggctgttctgccacc

SEQ ID NO: 67091 - DNA, 143 bp, Glycine max
  Clone ID: 700843142H1
ctgggatataattttatgaccttgtgttaacccatacatcttttggggtttctcaggctttggccgtgcgatagattaactcagattgaccttttccatccctctctttttaactctttaatgccatgaaaaatttacttttt

SEQ ID NO: 67092 - DNA, 232 bp, Glycine max
  Clone ID: 700843150H1
cacacaactactacaagtacttccttacaatcaaaaccaacaacaactatggcaagttatcaaaagcactacgatgatcagggtcgcaaggttgacgagtatggcaacgttgagaagcaaaccgacgaatacggcaaccctgttcatgctgctagtgtcacctatgtagccaccagaactgctgctggtggttacagtgatgacattaataagcaacatgataccaccaatg

SEQ ID NO: 67093 - DNA, 211 bp, Glycine max
  Clone ID: 700843188H1
caccattgtgttgagacacactctctttctttcttgttattctctttctctttcatcatttggcttaaaacacacacacaaaaggtggccaaaatgagcagtgtctgtgccaagcagcacaagttttacccctctcaccaactcctttctccaaagaaaaccctcagagaaattgacatccctccaaggaagctcctcactcgccgtgccg

SEQ ID NO: 67094 - DNA, 210 bp, Glycine max
  Clone ID: 700843195H1
gggttttggtgtttgttgttgaatcgtgaaaatgttcagaaaccagtacgacacggacgtgaccacatggagccctgcggggaggctgttccaggtggagtacgctatggaggcggtgaagcagggctcggcggcgatagggctccgatcgaagacccacgtggtcctcgcatgcgtcaacaaggccaactccgaactctcctcgcacca

SEQ ID NO: 67095 - DNA, 168 bp, Glycine max
  Clone ID: 700843209H1
ttcattgccaagggtaaagaagacgctcttgttaccaagaatcttgttcctggtgaagctgtttacaatgagaaaaggattaccgttcagaacgaagacggttccaaagatgagtacagagtttggaatcctttccgctcgaagttggctgctgccatccttggtgga

SEQ ID NO: 67096 - DNA, 144 bp, Glycine max
  Clone ID: 700843260H1
gtctcattttatcctaccggccacttttttcattactaatgcttatgctagagtctctggaggacattgtaaaattttgcatactcatctgattataaattgcatttgatattgatatgaaataacttgtataaggttcattct

SEQ ID NO: 67097 - DNA, 227 bp, Glycine max
  Clone ID: 700843304H1
atcatatcacaatgtgtggcatacttgctgtgcttggttgctctgattcatctcaagccaaaagggtccgcgtccttgagctttctcgcagattgaagcaccgtggtcctgactggagtgggctccaccaatatggtgataactatttggctcatcaacggttagccatagttgatccagcttctggtgatcaacccctcttcaatgaagacaaaactgttgttgtt

SEQ ID NO: 67098 - DNA, 226 bp, Glycine max
  Clone ID: 700843307H1
cggaaacagaacagggactcactctcttcgcagcggcactctcggtggctttcatcttctcggggtgagttgtcaagatgtacacatcgaggaagaaaattcacaaggataaggatgctgagccaactgaatttgaggaatcagttggacaggcattgtttgatctagaaaataccaacaatgagctgaaaagtgatctgaaagatttatacataaactcagctgt

SEQ ID NO: 67099 - DNA, 226 bp, Glycine max
  Clone ID: 700843337H1
ggaaccatgattagcacctcaactcctcacatggttctccagcaatccgtgtaccaggctttcactcaggtgtttgctcagcagctaccaaagcaagcacaggtgaaatctgtggcaccatttgggttatgcttcaactccaacaagatcaatgcatatcctagcgtggaccttgtgatggacaagcccaatggtcctgtttggagaatctctggtgaggacttga

SEQ ID NO: 67100 - DNA, 224 bp, Glycine max
  Clone ID: 700843339H1
gggccacactcacatggtcaaggagttccatcttcacctgctgctgggactccttcaagcgtagaatcaccaaccaaattctctggaaatactaatcagggtttagtgaagaaattgaaagggtttgatgagcttgcaatgtcaataggcaattgcaatgctgagagtgctgagcgaggagctgaaaacaggctgtcacagagtgtggatactgagggttccag

SEQ ID NO: 67101 - DNA, 227 bp, Glycine max
  Clone ID: 700843349H1
cttcgccaacagcgcgagattacggagaggcttcgagatcctcgaggtcttcgcagaggttccttggcgggtcctgctctcccctctaacggtgctcgccaacgaccctttattcgtcctgttactggagacaggaatgattctgaagatcaacctcctgctaaacgtcgactttcatctgctgtcgttaaggtggatgatggggagttgcctgaagatgctggtgc

SEQ ID NO: 67102 - DNA, 221 bp, Glycine max
  Clone ID: 700843356H1
gtgaatataggaatataagaactaagatggattggatcggagcgtaccgcggaggccagagaagcagggactggtgcgacccttcatcaccattcactgatttgtgggaccctcgtcgtgtcggtgacgctgatgatatcacctcctctctcgcccatgctcacgttgactggcgtgagactgataaagctcatatcttccgtgctgatcttccaggggtg

SEQ ID NO: 67103 - DNA, 222 bp, Glycine max
  unsure (1)..(222): unsure at all n locations
  Clone ID: 700843378H1
tttctnttctctttttacatttttctgatttttcttaattttgcttgacttgtagggatttagaaaagncgtacctgaccgctgggagttctcgaacgagtattttcgaagaggcgaaaagcgtcttctctgcgaaatccagcganggaagatcctctccgcatctcctccgccggcgggngnaactgccaccgtggcngttccgtngncgctgccgntatc

SEQ ID NO: 67104 - DNA, 225 bp, Glycine max
  Clone ID: 700843382H1
ttgggccaataccaagggtgaccctcacagatcctgagcaaatcaaagatgtactcaacaagatttatgactttggaaagcctgatatgaatccgcatgttaggttactagctcctggtcttgtaagccatgagggagaaaagtggagcaagcacagaaagataatcaaccccgcattcaatttagaaaagttgaagaatatgttaccactattcatcaaatgtt

SEQ ID NO: 67105 - DNA, 220 bp, Glycine max
  Clone ID: 700843387H1
gtatatgtatggcatgcactagctggttattggggtggagtgaagccagcagcaaccggcatggaacattatgacactgccttggcatatccagtgcagtcaccaggcgtgctaggaaaccaaccagacattgtcatggacagcttggctgtacatggccttggcctagtgcacccaaagaaggttttcaatttctacaacgagctccatgcttacttag

SEQ ID NO: 67106 - DNA, 219 bp, Glycine max
  Clone ID: 700843392H1
cacgactggagaccgttgggttgttcttcgagaccctctctgactcgcctggttgactcgctcgagtttaggggtttctgattcgcccgcggacggatctcaattttgtctcaggaaaagcaaagggcatcatatcaccatgaaggcactaattcttgttggagggtttggaacaaggttgaggccattgacactcagtgttcccaagcctcttgttga

SEQ ID NO: 67107 - DNA, 260 bp, Glycine max
  Clone ID: 700843416H1
gtgattctcatgctaaactatttgaggaacaggaagccccagggtccagatcatttttcacagagattattgcttctatctcagacataaaatttgggaaggatggaagatacatactaagtcgtgattacatgactttaaagttgtgggacattaatatggattcaggccccgttgcaactttccaggttcatgagtatttgagacccaagctttgtgatttatatgaaaatgattcaatcttcgataagttcgaatgt

SEQ ID NO: 67108 - DNA, 258 bp, Glycine max
  Clone ID: 700843448H1
atgaaactgcatgtaaattttgttgcttcatctcattttgcatttgaaagttgtcaactttctgacgggctttgcagaagcgggatcaatcggaataaactatggaagaattgcgaacgacctacctacaccggcgaaagtggtggagcttcttaagagtcaggggctgaaccgtgtgaagctctacgacaccgacgccaccgtcttaaccgcgtttgccaactcaggaatgaaggtggtggttgccatgccaaacga

SEQ ID NO: 67109 - DNA, 146 bp, Glycine max
  Clone ID: 700862720H1
caaacctaagacgcgctgcttcactattctccctatggagtttaatcttgtggtccgtcagaagtttttaaattttgtgaggttcattatgaagaaaagggacaagcttagttgtcagttggaatcaacccatactccatggaatg

SEQ ID NO: 67110 - DNA, 204 bp, Glycine max
  Clone ID: 700862730H1
ctctcatcagattctatgaagtacaaccaaaagttgcggcaattagcttttaatttccagaaaaatgcagtgttagcacgccgtctattgagtggagagttggagccttcaaaaatattaaatatgacacccaatgaattaaagttcaggagggtttggttgctgaggaaaaaaccaaggagcctgacgagacccagcacttgc

SEQ ID NO: 67111 - DNA, 274 bp, Glycine max
  Clone ID: 700862756H1
cagaagcctcttttaatttccaccccctctagattttctctctaactggttttccttagatctctcacaatgacctttaatcttatgcttttgttctgtttggttgcagtgatcaacaatgttgttgttccaactagtgcaagacaactcatgagtaccaccactacttcaccagacgagaaagaagtgatgatgaatattggcactgcaaatagagggcatgatgaaaaacatgatcatcaagtacaagtagatgatccaacaagcaagaact

SEQ ID NO: 67112 - DNA, 143 bp, Glycine max
  Clone ID: 700862768H1
gaaagaacttccttataaccaaaaccaacaacaactatggcaagttatcagaagcactacgatgatcagggtcgcaaggtcgacgagtatggcaatgttgagaggcaaactgacgaatatggcaacccggttcatgccactag

SEQ ID NO: 67113 - DNA, 273 bp, Glycine max
  Clone ID: 700862772H1
ctccttctcaatacccaaatggttcgctcccatggcgtcaccctcattaatcgccttgctcgtcgatctttctgtcacgccaacgattctgtttatcaagcacttttccaaaggggttataggacattgaactctgggccttgcaatccatctagagttgttggtagctttgcatccaatgctggagatggcgttaatttgaagaaatggttgctgttgggagcggcaaataaatattggggaccgtctagatcaattcatggctcggcatca

SEQ ID NO: 67114 - DNA, 141 bp, Glycine max
  Clone ID: 700862775H1
atagtgcaggaatagtcacagttgaagactttcttcggcttgtggttaaagatcaacaaagattgcggaatatccttgggagtggtatgtcaaacaagatgtgggaggctcttttagaccatgcaaaaacatgtgttctaa

SEQ ID NO: 67115 - DNA, 272 bp, Glycine max
  Clone ID: 700862776H1
gcagcaacaaacaagaggggtttgccttgtgccgtttgtgttgttttcgggacgaagaagaagatggtgtcaggttctggaatctgcgcaaagcgggtggtggtggacgcgcgccaccacatgctgggtcgtctagcctccatcgtggcgaaggagcttctgaacggccagaaagtggtggtcgttcgctgtgaagagatttgcatctcgggcgggctggtgaggcagaagatgaaatacttgaggttccttcgcaaacgcatgaacaccaa

SEQ ID NO: 67116 - DNA, 278 bp, Glycine max
  Clone ID: 700862780H1
gaaaaagttgtattgaaattttcacaagaggaatttcttacagcttggtcaactcaggtgcgtcctgcaacaactctgttggctgatgggtgtccatatttgtatgctatggtgcatgatagttcagtgtctacaataccaggtgattttgtcattggtgttaagttgacaaccataaacaatatgtgtgcatatgggctcaatcctggtatttcaggttctcgtcttttgggcaccattcctcagtctatttcacagcaaactgtttggaatcaaat

SEQ ID NO: 67117 - DNA, 283 bp, Glycine max
  Clone ID: 700862856H1
aatggcacaggaggaaattctgtcttctagtgcaagtgatttcagaactgcaatggtgagtaaaaatagcaagcctcaagctactgcaatgcatgtgggagctatagaaattatcattgatagtttcgcaagtcctgactgcaacatagttggtgcaatgcttttggttgatacttatcataccaatcctgaaaatgcagttcgtagtatttttgttgcgcctttcagaggcggaaggcccattcgggtggttacatttccgaataccattgtgcagattgaa

SEQ ID NO: 67118 - DNA, 269 bp, Glycine max
  Clone ID: 700862884H1
ggaggaagtggcaaagtgatcaatagcaaacctgaggacagaatatttatatactactctgatcatggaggtccgggagttcttgggatgccaaacatgccatacctttatgctatggactttattgaagtcttgaagaagaaacatgcatctggaggttacaagaagatggtcatatacgtggaagcttgtgaaagtgggagcatgtttgagggtataatgcctaaggatctgcagatttatgtcacaactgcatccaatgcacaaga

SEQ ID NO: 67119 - DNA, 351 bp, Glycine max
  Clone ID: 700764204H1
caagtacttccttacaatcaaaaccaacaacaactatggcaagttatcaaaagcactacgatgatcagggtcgcaaggttgacgagtatggcaacgttgagaagcaaaccgacgaatacggcaaccctgttcatgctgctagtgtcacctatgtagccaccagaactgctgctggtggttacagtgatgacattaataagcaacatgataccaccaatgcctacggcgtagacactggtagacagcattctagtggtggctacgatggtgacactaataaacatcatggaactactggtggctataatgatgacaccaatagacatcatggaactaccggtgtctatggta

SEQ ID NO: 67120 - DNA, 294 bp, Glycine max
  Clone ID: 700764207H1
tgcttgtgtactataaccaaattggagcaacacctttttgtatctgatcctagaatcacaagcctagctacccattttctaccttctcatgatcttaggtgtttggttgtgaaaaatgacgagggtgactcgtgattttggtgatacgatgcaaagagaggctgtgccagcggtttcttctgatgtggtgtttgcttctgctcggtttcctaattacaaaattggagcaaataatcagataatggagacaaaggatgacccaaaagtgctatcaatgaaggaggttgttgcacg

SEQ ID NO: 67121 - DNA, 289 bp, Glycine max
  Clone ID: 700764227H1
gaactgaatgcccagaagcaggaaatgatgcaattagaatatgacaagggaaaatggaataatttgttggaatatcttcggtctctggatcctgatatggtgactgaattgtcccggccttcatcattagaagtggaggatataattcaccaacttgttcagaacatattgagaagattctttgtggatgatgctagctctagttttatggaacaatcagtggaaggaaacgtagacaatcgcacagacagtgatgagcttagtaatacagtagccacttctcgtgatt

SEQ ID NO: 67122 - DNA, 283 bp, Glycine max
  unsure (1)..(283): unsure at all n locations
  Clone ID: 700764248H1
cgcctgtgnttaatttcccaaaatctcaacttcaatgctanggtgaatcagtgtactgcacatcttccaacttgctaagccaatgcaaacagtgggcagagtccactggacaggttcacatcagtagtagcatggagcatatctaccacacgccccacatcttttggtgttgctccttataattccactcttggagagacccaccatgtttccaagggcaatctcaacgtcctagttgagcaggtttcactcaatcctccagtatctgccctccatgcaacag

SEQ ID NO: 67123 - DNA, 335 bp, Glycine max
  Clone ID: 700764256H1
gcagcagcagcagcaagcatatattgaagtacgactaacaccgtctatatatagagagagctatgggacaagtaacacggacacggagacataattcttcacacaaacgttgtcttgggacaccttgtgcaatgtgcataaatatcccatttctcttattcacctgatttctatgaacttcaataataattctgataccctttgacgtaaatagatcaacagcgtgccaaaggagcaagcttttgtgtgatggagcagaaacacgtgttgttttcagcattgagtgttggggttgggctgggtgtgggacttggattgagcacaggacaagctgt

SEQ ID NO: 67124 - DNA, 235 bp, Glycine max
  Clone ID: 700839666H1
ctcgagccgaatcggctcgaggcagattaaaagggatggaattaccaagcttgttattcttccactttatccacaattttcaatatcaaccagtggctcaagcctacgtctactggagagtatattccgagaggatgagtatctagtcaacatgcagcacacagtaataccatcatggtatcaacgtgaaggatacataaaggccatggcaaatttgattgagaaagagttgaga

SEQ ID NO: 67125 - DNA, 279 bp, Glycine max
  Clone ID: 700862858H1
atccctaatgcgccttctgcgttcaattctcagagctacgttggtctcagagcgccactgaggaccttcaacttttcttctcctcaagctgccaaaattcctcgctcccaacgccttttcgtcgtcagagcctccgattcggagttcgaagccgccgttgtcgccggtaaggttccgccggcgcctcccgtgccgcccagaccggcggctccggttggaacaccggtggttccttcacttccacttcaccggcgtcctcgtcggaaccggaagtcgccg

SEQ ID NO: 67126 - DNA, 262 bp, Glycine max
  Clone ID: 700842232H1
caggctgcttctttccccattgctaaagagggaaagtctggtgtttctctcaggtacaccacaatgttcggtgtttcattgtcggatactctcaaatctgacgctcagcttttcctcattgacatgcaaagaaacaccaacaccttggctggacatgtgccacccaaggctaaccttggtgacttgaggggactagctggaggcttgaatgggctaaacacttcagccatgatagatggaggatcctttgatggcaccaagg

SEQ ID NO: 67127 - DNA, 251 bp, Glycine max
  Clone ID: 700838406H1
gcttctttccccattgctaaagagggaaagtctggtgtttctctcaggtacaccacaatgttcggtgtttcattgtcggatactctcaaatcagacttcagcttttcctcattgacatgcaaaagggaattccaacaaaaaattggccctttgagggttcagtcagtggcaacaaccactccaggagtcaccaaggcttcaccagaaggcaagaaaactttgaggaaaggcagtgttattgtcactgggct

SEQ ID NO: 67128 - DNA, 238 bp, Glycine max
  Clone ID: 700837427H1
ctttttcttctcccaccaacttcaccgtcttcttcctcgatcatgtctcacttcaagggcaagtaccatgatgagcttattgccaatgctgcttacattggcactcctggaaagggtattcttgctgctgatgagtcaacagggacaattggcaagcgtttggccagcatcagtgtagagaatgttgaatccaacaggcgtgctcttagggagctgcttttcaccgctcccggtgctc

SEQ ID NO: 67129 - DNA, 234 bp, Glycine max
  Clone ID: 700839033H1
gagtcaacagggacaattggcaagcgtttggccagcatcagtgtagagaacattgaatccaacaggcgagctcttagggagctgcttttcactgctcctggtgttcttcaatatctcagtggtgtcatcctctttgaggaaaccctctaccagaggacagctgcaggcaagccctttgtgaatgtcttgaaggaagctggtgtgcttcctggcatcaaggttgacaagggcaca

SEQ ID NO: 67130 - DNA, 218 bp, Glycine max
  Clone ID: 700838355H1
tgcagggcgttgctataactcaagaaaattctttgctggataagactgcaagaattgacggttggttagctagatttccaatgtttgactgggtgggaggtagaacatcagagatgtctgcagtgggcctgcttccagcagcccttcagagcattgacataagagaaatgcttgctggtgcagcattaatggatgaggcgaataggagtactgtgata

SEQ ID NO: 67131 - DNA, 254 bp, Glycine max
  Clone ID: 700837007H1
ggagccagttcttccaggttgctttctacgggccaaagctattggactcatgcctatgattgatcagggtgagaaagatgacaagataattgctgtctgtgctgatgatcctgagtataggcattacaatgatatcaaggaccttcctcctcaccgtttagctgaaattcgtcgtttctttgaagattacaagaagaatgagaacaaggaagttgcagtgaacgactttcttcctgcttcagctgcctatgaag

SEQ ID NO: 67132 - DNA, 243 bp, Glycine max
  Clone ID: 700841855H1
cagattcagatttatattggaatctggatattttgtcttctcaagtgcatgcgcgattgtgcactgtgtaactcccatttgatacactcaatgaagatgcacttgagaagacaaaatatccagattcagatttatattggaagaaatttgaggataaataccacttttcatgccaatttactgctgacctaatagccatgaaaatgcgtgttttatcatcaccagtacataccaggagattgc

SEQ ID NO: 67133 - DNA, 235 bp, Glycine max
  Clone ID: 700839148H1
gtttattgaaagacaagtcaaagcccataattttctccatggcaaggctagacagagtaaaaaacataactggattggtagaaagctttggtaagaacagcaaattgagggaactggtcaaccttgtcatagtagctggttatattgatgtaaagaagtccagtgacagagaagaaattgcagaaattgagaagatgcatgagctcatgaaaaagtataacttagttggtgattt

SEQ ID NO: 67134 - DNA, 251 bp, Glycine max
  Clone ID: 700838540H1
gctacttgccatggtggtccggctgagatcattgagcatggtatatcaggattccacattgatccttatcaccctgatcaagcttcacagctattagttgaatttttccaaaagagcaaggaggacccaagccattggaagaaaatatctgatggtggtcttcaaagaatttatgaaaggtacacgtggaagatttattccgaaaggcttatgactttggcgggagtttatagtttctggaaatacgtttc

SEQ ID NO: 67135 - DNA, 246 bp, Glycine max
  Clone ID: 700840271H1
atttgatgactggttcttcacaagaattatttgattttatagcatctaaactagcaaaattcgttagttctgagcctgaagagttacaccctccccctggcagacaaagggaattgggttttaccttctcatttccagtgaggcaaacatcaattgcatctgggaatataataaagtggactaaaggtttcaatcttgaggatgcggttggagaagatgtggtgggtgaactgaccaagtccttag

SEQ ID NO: 67136 - DNA, 230 bp, Glycine max
  Clone ID: 700836390H1
cacttccttccgcaaatggcttctcacgacagcatctccgcttctccaacctccgcttctgattccgtcttcaatcacctcgttagttctcccgaagatcctatcctcggggtaactgtcgcttataacaaagatccaagtccagttaagctcaacttgggagttggtgcttaccgaactgaggtaggaaaacctcttgttttgaatgtagtgaggcgagttgaacagca

SEQ ID NO: 67137 - DNA, 244 bp, Glycine max
  Clone ID: 700840778H1
ctcaaggacatcgtcggaatccccacctccacaaaaacccacgaacaagccctctccctcgggatccccctctccgatctcgacgcccaccccgccatcgatctcgccatcgacggcgccgacgaggtcgatcccttcctcaacctcgtcaagggccgtggcggctccctcctccgagaaaaaatggtcgaaggcgcatgcaagaagttcatcgtcatcgttgatgagtccaagctcgtaaact

SEQ ID NO: 67138 - DNA, 251 bp, Glycine max
  Clone ID: 700838733H1
ggagaaattaaaccaaccatactacaccagacactcctcctaaccttcaataattctcttctcacccttataaaaagaaactcattttaactcagactttgcatttcaccttatctatctatcttttctaacatggctgctgggactggactctttgcagagattttggatggagatgtgtacaagtactatgctgatggagaatggaagaaatctgcttctgggaaaagtgttgccatcatcaaccccac

SEQ ID NO: 67139 - DNA, 232 bp, Glycine max
  Clone ID: 700840885H1
aacggatttggaagaactggccgtttggtagccagagtggctctgcagagagacgatgttgagctcgttgccgttaacgaccctttcatcaccaccgattacatgacatacatgtttaaataccacagtgttcttggacactgcaagcatcacgctgtcaccgttcaggacgagaacacccttctcttaggtgacaagccactcactatttttggacacagaaaccctgaag

SEQ ID NO: 67140 - DNA, 231 bp, Glycine max
  Clone ID: 700840645H1
gctacttcctactccaaccgcacttctgctccgcaattatcatgggcaaggtcaagatcggaatcaacggatttggaagaattggccgtttggtagccagagtggctctgcagagagacgatgttgaactcgttgccgttaacgaccctttcatcaccaccgattacatgacatacatgtttaaatacgacagtgttcatggacactggaagcatcacgatgtcaccgtta

SEQ ID NO: 67141 - DNA, 252 bp, Glycine max
  Clone ID: 700841465H1
acaacttctgctacttcctactccaaccgcacttctgctccgcaattatcatgggcaaggtcaagatcggaatcaacggatttggaagaattggccgtttggtagccagagtggctctgcagagagacgatgttgaactcgttgccgttaacgaccctttcatcaccaccgattacatgacatacatgtttaaatacgacagtgttcatggacactggaagcatcacgatgtcaccgttaaggacgagaaga

SEQ ID NO: 67142 - DNA, 250 bp, Glycine max
  Clone ID: 700838427H1
caacaacttctgctacttcctactccaaccgcacttctgctccgcaattatcatgggcaaggtcaagatcggaatcaacggatttggaagaattggccgtttggtagccagagtggctctgcagagagacgatgttgaactcgttgccgttaacgaccctttcatcaccaccgattacatgacatacatgtttaaatacgacagtgttcatggacactggaagcatcacgatgtcaccgttaaggacgag

SEQ ID NO: 67143 - DNA, 241 bp, Glycine max
  Clone ID: 700839971H1
ccgcacttctgctccgcaattatcatgggcaaggtcaagatcggaatcaacggatttggaagaattggccgtttggtagccagagtggctctgcagagagacgatgttgaactcgttgccgttaacgaccctttcatcaccaccgattacatgacatacatgtttaaatacgacagtgttcatggacactggaagcatcacgatgtcaccgttaaggacgagaagacccttctcttcggtg

SEQ ID NO: 67144 - DNA, 246 bp, Glycine max
  Clone ID: 700841935H1
tgctgccatggccacccacgcggctcttgcttctacaaggatcccttcaaacacaaggttcccatccaaggcctctcactctttcccaacccaatgcgccttaaagagacttgaggtgacagaattctctgggcttagatccacttcatgtgtcacatatgctaacagtgctagagaatcttccttttttgatcttgtagcttcccaactcactcccaagaccaatggatcaactcctgtgagggg

SEQ ID NO: 67145 - DNA, 253 bp, Glycine max
  Clone ID: 700841881H1
attccgtgttcccaccgtggatgtctctgttgttgacctcacagtgaggctggagaaagaagcttcctacgatgaaattaaaaatgctatcaaggaggaatcagagggcaagttgaagggaattcttggttacactgaagatgatgtggtctccactgactttatcggcgatagcagatcaagtatttttgatgcaaaggctggaattgattgaataagaactttgtgaagcttgtttcttggtacgacaacg

SEQ ID NO: 67146 - DNA, 245 bp, Glycine max
  Clone ID: 700841638H1
ttttgttgagaagagagaatggctgtggcgtcgtcatcatcccttatcacgttgaaggtgaaaccttgcattttcgggtctcctcggagatccgcggtggttcggaattgtgcgaagtcaacggcggggacaatatcgatcagttggagcctggacagctggagggcgaagaaggcgcttcagcttccggagtacccagatgcgaatgaattggacctagtcctccaaaccctctcttcttttcc

SEQ ID NO: 67147 - DNA, 233 bp, Glycine max
  Clone ID: 700862842H1
acaactctacaagtacttcctatcaatcacaaccaacaacaactatggcaagttatcaaaatcactacgatgatcagggtcgcaaggttgacgagtatggcaacgttgagaagcaaaccgtcgaatacggcaaccctgtccatgctgctagtgtcacctatgtagccaccagaactgctgctggtggttacagtgatgacattgataagcaacatgatccaccaatgcctacg

SEQ ID NO: 67148 - DNA, 262 bp, Glycine max
  Clone ID: 700862843H1
aaaagactttctctttacaaattttgtaactttcaagactcagctaataaacatcaaaagatgtctctgattccaagtatttttggtggccgaagagcaacgtgttcgatcctttctcccttgacgtgtgggaccctttcaaggattttcattttcccacttctctttctgctgaaaattctgcatctgtgaacactcgtgtggattggaaagaaaccccagaagcacacgtgttcaaggctgatattccagggctgaagaa

SEQ ID NO: 67149 - DNA, 284 bp, Glycine max
  Clone ID: 700862844H1
cacacacaactactaccaatacttccttacaatcaaaaccaacaacaactatggcaagttatcaaaagcactacgatgatcaaggtcgcaaggttgacgagtatggcaacgttgagaagcaaaccgacgaatacggcaaccctgttcatgctgctagtgtcacctatgtagccaccagaactgctgctggtggttacagtgatgacattaataagcaacatgataccaccaatgcctacggcgtagacactggtagacagcattctagtggtggctacgatggt

SEQ ID NO: 67150 - DNA, 268 bp, Glycine max
  Clone ID: 700862845H1
gtgcggtttcctttgttggtgttgctgggaactgttttcctggcatcagtttgtgtctcattaaaggtgagagaggatgagaataaccctttcctacttgagaagctctaacagcttccaaactctctttgagaaccaaaacggtcgcattcgtctcctccagagattcaacaaacgctccccacaacttgagaaccttcgagactaccggattgtccagtttcagtcaaaacccaacacaatccttctcccccaccatgctgacgcc

SEQ ID NO: 67151 - DNA, 234 bp, Glycine max
  Clone ID: 700862846H1
cgacgaatacggcaaccctgttcatgctgctagtgtcacctatgtagccaccagaactgctgctggtggttacagtgatgacattaataagcaacatgataccccccattgcctacggcgtagacactggtagacagcattctagtggtggctacgatggtgacactaataaagctcatggaactactggtgggcataatgatgacaccataggcatcatggaactaccggtgt

SEQ ID NO: 67152 - DNA, 114 bp, Glycine max
  Clone ID: 700862847H1
gttgaagggtttgaactacgaggaattccgaaggctcaagaggcagaaaatgaggaaatcgctgaagcactgcatctgtgacgtcacgcccagtcctccgaggcgcgataacga

SEQ ID NO: 67153 - DNA, 280 bp, Glycine max
  unsure (1)..(280): unsure at all n locations
  Clone ID: 700862848H1
ctcaactttcccttcgatctcattctcaggtgttgttgaagcttcctgtgttggcttggtatccctgcaagttctgctgtagcagattccaaggtgaaggtgtcacgttaaagtttctttcatgtttgaacaggctactatccatttgggagcaactgagctgcttggagagtatttttcttcgtcgatccccnatnacaccccctcaccacanagacttagttatatgaacggttggccaccttccatgatccttgaaggagattgttcagggatacgg

SEQ ID NO: 67154 - DNA, 281 bp, Glycine max
  Clone ID: 700862849H1
gaattctccagagagaagaagaaacttaatcgatcatcacttcacttcactaatacatcatggcagacgagacccagaacaagtatgagagctctgaggttgaggtccaggatcgtggtgtttttgactttctcggtaagaaaaaggatgaagaagacaagcctcatcctcaggaggaggtcatcgccaccgagtttcaaaaagtcactgtctcagaccaaggagagaacaagcacagcctcttagaaaagcttcaccgatctgacagcagctctagctct

SEQ ID NO: 67155 - DNA, 266 bp, Glycine max
  Clone ID: 700862850H1
tatagaaagagagagaagaagaaaagaagaacaaagatgcaatcctcaaaggagaagatgaaaaacatggcaagtgctgccaaggaacaagtcgacatctataaagccaaaatagacgagaaggcagagaaagcaacggcaagaacagaagaggagagggtgatagcccatgagcacgcaaaggcaaaggaagctggagcaaagatggagctgcatgaagctaaagccaggcatgcagcagagaagctaagcggcaaccaatcaca

SEQ ID NO: 67156 - DNA, 267 bp, Glycine max
  Clone ID: 700862851H1
ctttgtttgcttctcaagtctctcgaagcctctttctctctcttcgagaagctatctgtgtttggcgttactaagtctccaacaagcaaagtacatggttgatttggaaatccaggtccccaccccattcgacccgtttgccgaggcgagagaatcggatgcccccggagcaaaggagtatgtgcatattcgaattcagcagaggaatgggaagaagagtctgaccacagtgcaagggctgaagaaggagttcagcgacgagaagat

SEQ ID NO: 67157 - DNA, 281 bp, Glycine max
  Clone ID: 700862853H1
gtagctttttgatgagtacaagatagattacattattcacggggatgatccttgtgttcttccggatggaactgatgcttatgctcatgctaagaaggctggtcgatataagcagataaagcgtactgaaggggtttccagcactgatattgttggtcgcatgcttctctgtgtaagagaaaggtctattactgaataaaatcataatcattcttctttacaaagacaattcagcgatggccatagtccgaagtttgaagctggtgcatctgctgcaactg

SEQ ID NO: 67158 - DNA, 271 bp, Glycine max
  Clone ID: 700862854H1
cttccttaccaccacgtcgacaccaccctacgctccctcgctcgccaagccgagggcttcggtcgcttcgctatcggaggcctccacggtccccttcaccccgtcacatctctcgcagatgatggaccggggtcactgcgtgacgcgtgtcgcagaaaagaacctttgtggattgtgttcgaagtttccggcaccattcaactctcctcgtacttgaacgtgtcgtctcacaagaccatcgatggtcgtggccagaggatcaaactcagcg

SEQ ID NO: 67159 - DNA, 158 bp, Glycine max
  Clone ID: 700862855H1
gcatggtgtcttcctcccaacacattctggtcaccggtggtgccggtttcattggcacccacaccgtcgttcagcttctcaaagctggcttcagcgtttcaataatcgacaatttcgataactccgtcatggaagcagtggaccgcgtccgcaaattg

SEQ ID NO: 67160 - DNA, 281 bp, Glycine max
  Clone ID: 700862857H1
agcgcgagccgggcggacggtcgtcggtgcagatcttggtggtagtagcaaatattcaaatgcgaactttgaaggccgaagaggggaaaggttccatgtgaacggcacttgcacatgggttagtcgatcctaagggacgggggaagcccgtctgatagcgctctgtgcgcgtactccgaaagggaatcgggttaaaattcctgaaccgggacgtggcggctgacggcaacgttagggagtccggagacgtcggcgggggccccggaaagagttatcttttc

SEQ ID NO: 67161 - DNA, 282 bp, Glycine max
  Clone ID: 700862859H1
caaaaccaacaacaactatggcaagttatcaaaagcactacgatgatcagggtcgcaaggttgacgagtatggcaacgttgagaagcaaaccgacgaatacggcaaccctgttcatgctgctagtgtcacctatgtagccaccagaactgctgctggtggttacagtgatgacattaataagcaacatgataccaccaatgcctacggcgtagacactggtagacagcattctagtggtggctacgatggtgacactaataaacatcatggaactactggtg

SEQ ID NO: 67162 - DNA, 273 bp, Glycine max
  Clone ID: 700862860H1
gatccaaaagctgaatgccctcaaaccggataaccgtatagagtcggaaggtgggttcattgagacctggaaccctaacaacaagccattccagtgtgccggtgttgccctctctcgctgcacccttaaccgcaatgcccttcgtagaccttcctacaccaacggtccccaggaaatctacatacaacaaggtaatggtatttttggcatgatattcccgggttgtcctagcacttatcaagagccgcaagtatctcagcaacgaagacgaag

SEQ ID NO: 67163 - DNA, 123 bp, Glycine max
  Clone ID: 700862861H1
gtacttccttacaatcaaaaccaacaacaactatggcaagttatcaaaagcactacgatgatcagggtcgcaaggttgacgagtatggcaccgttgagaagcgaaccgacgattacggcaacc

SEQ ID NO: 67164 - DNA, 290 bp, Glycine max
  Clone ID: 700862864H1
caaagaaaagggtggtagctgcttcgaaagcttagtaatttgtgtatttccagaacatcatagttttcgcagcagcaaactaacaaattactcatatcatataataagatgggccgttctctctcgcaagccaaacgtattggtgtccttgttgctcaatctatctccctaattcccgttcatcggcgaggtaacgcagtggcatccgatgtatcggaaagatttggagtgggtaatgttgggcaaagaaatggcctcgtgggaggtttagaagagacgcctgataaaag

SEQ ID NO: 67165 - DNA, 149 bp, Glycine max
  Clone ID: 700862865H1
tgtacacttgttccttttggtttgcagaaaggaacatggaagctgtgtgtgctttttctgttggcacacttcacatcccaacagcacatgaaacatcaaactcctttaggaaatccatattcttgagcaaccaagtggcttcaccagtt

SEQ ID NO: 67166 - DNA, 275 bp, Glycine max
  Clone ID: 700862866H1
ctgtgaatgggatattctcttgtggtgcagagatgaatttgcagctgcaacgagacattgagtttccgaagaggtttaatctttctccttcaatgaagtccttgttgaagagaaatgttgctatgtttgctgctggttttagggcaaactccaagcaattgcaggcacaggtgaaggtcgttcccggccggagtacagtgcctagtttggattcttcggctgtatctgggacagaagtcccggctgagcagtccggaggaaattcacagcatctt

SEQ ID NO: 67167 - DNA, 273 bp, Glycine max
  Clone ID: 700862867H1
ccaaatccgtgttctgatgcatggagtttggaatttctgaagcgtaccggatttcattgtgatatcatttgtgtcactggatggactgccactccaatgcaggatgttcaggttacaattgattggtttatttcctctcaggaatgtgttcccaggacctattgtgttttaaatccacaaaatccttttgtgttaaataggtggatggggaaactgaatttcccccagggcacttcccgaaatgttaaaagaatgcctctttcgataggggga

SEQ ID NO: 67168 - DNA, 273 bp, Glycine max
  Clone ID: 700862868H1
cagagactaacgatgaactcaacaagcagttggctcttttgaaagatggtggtggcaaatctgagagggtagagtcacttgagaggcagctaagggaatccgatttacagctgcagcaagcagtagcatctgctgaagctagtcaagagaagcaaagtatgctgtattccacaattaaagatatggagcatgtgataaaggatcttaagtcaaaggtttctaaagctgagagtcgggctgacagtgcagaggagaaatgcatcatattatctg

SEQ ID NO: 67169 - DNA, 250 bp, Glycine max
  Clone ID: 700862869H1
ctcgagccgaatcggctcgagctgcccctctttttggacccaaggacggcttcggccggtcagtccgggcggaagacattgacaggtggggagtttggctggggcggcacatctgttaaaagataacgcgagtgtcctaagatgagctcaacgagaacagagatctcgtgtggaacaaaagggtaaaagctcgttgattctgatttccagtacgaatacgaacgtgaaaggtggcctacgatccttagtc

SEQ ID NO: 67170 - DNA, 244 bp, Glycine max
  unsure (1)..(244): unsure at all n locations
  Clone ID: 700862870H1
cacgtattacaaaatgcaataattttacttcttcggtgctactttaacaaataggataagcgacgtctgggggctgtaattgtagctatttnagtagaagtcttaaaggcggcaaaggaatcgtcaattatagattcgaacagttcaaatgccagtcaagaaaaagtgaccagcctaatatataaagaattgaggacatgcgtaaatactgtctcacttctgcatgttataatgcataccagtg

SEQ ID NO: 67171 - DNA, 236 bp, Glycine max
  Clone ID: 700862871H1
caagaaagaacttccttataaccaaaaccaacaacaactatggcaagttatcagaagcactacgatgatcagggtcgcaaggtcgacgagtatggcaatgttgagaggccaactgacgaatatggcaacccggttcatgccactagtgtcacttatgtagccaccaaaagtgttggtggctacaatgatgacgctaataagcaacatgatattactggtgtccatcccgagaaaga

SEQ ID NO: 67172 - DNA, 271 bp, Glycine max
  Clone ID: 700862872H1
ctaactcttagagagaaaaaaaaatggctgatacaggtggaggagatgcagtgagaccagtggtaatatgtgataacaagtgtggctgcacacttccatgcactggtggttccacttgcaggtgcacaagtgctggcactgccacaggagggggtgatcacgtgacatgctcgtgcggagagcactgtggttgcaatccatgctcatgtcccaagattgcggctgctgaaagtggttgcagatgtggcacagattgtgcatgtgcctcctg

SEQ ID NO: 67173 - DNA, 278 bp, Glycine max
  Clone ID: 700862873H1
attgaaatcgaattgggtgcgaagtgaaatgttgcaaaccctaggaggcgtaatccctcgcttcgtgagtcgctcatggctccgaaacctgacggtgcgtgcaatggcattctcttcctcctcctccgattatggagaccagtcacgtggtggccttccccgcttctactccgaaactcttcctccttccaagggtagtgttaaccgcgtgcaaggtgatgaattctggcatatgacaagagttttgaggttaaccaccaatgatagggtacagttct

SEQ ID NO: 67174 - DNA, 243 bp, Glycine max
  Clone ID: 700862874H1
tcgtattccttacaatcatcaccaacaacaactatggcaagttatcaaaagcactacgatgatcagggtcgcaaggttgacgagtatggcaacgttgagaagcaaaccgacgaatacggcaagcctgttcatgctgctagtgtcagctatgtagccaccagaactgctgctggtggttacagtgatgacattacataagcaacatgcttccaccaatgactacggcgtagacactggttggca

SEQ ID NO: 67175 - DNA, 279 bp, Glycine max
  Clone ID: 700862876H1
ataattccttcacttgcagaacttagttctctgttgcatcatcatcatcttcattagtgttagccctaaacttcaccttcaaccatgaccacagtgccaccacacagtgtccaagtgcacacaacaacacaccgctacgaagccggcgtcgtcccgccggctcgttttgaggcgccgcgttacgaagccggcatcaaggcgccctcttccatttaccattccgagagaggtccgacgacctctcaggttctcgcaattgtcgccggccttccggtcggc

SEQ ID NO: 67176 - DNA, 254 bp, Glycine max
  Clone ID: 700862877H1
cctaagtgagatacaaagaaaggaaataattgatctttgaaaatgcagggaggaaagaaagctggagagtccatcaaggaaacagctgcaaacattggtgcttctgccaaggctggcatggagaaaaccaaggccactgtccaggagaaggcagaaagaatgacggcacgtgatccgattgcaaaggagttggcacccagaagaaagaggcaaaatgacccagcaaacttgacaagcaggggcggtcacataac

SEQ ID NO: 67177 - DNA, 232 bp, Glycine max
  Clone ID: 700862878H1
ctagttctagatcgcgagcgggaaataattgatctttgaaaatgcagggaggatagaaagctggagagtccatcatggtaacagctgcaaacattggtgcttctgccaaggctggcatggagaaaaccaaggccactgtccaggagatggcagaaagtatgacggcacgtgatccgatgcaaaaggagttggcaacccagatgacagaggcaaagataagccaggcaaagct

SEQ ID NO: 67178 - DNA, 101 bp, Glycine max
  Clone ID: 700862879H1
tgtcgatctagtgattaatgttggtgctgcaatttcgtctggtgatgttccattaaatgcagtgcagcttcttatgggtgaatcttatcatgggatactct

SEQ ID NO: 67179 - DNA, 188 bp, Glycine max
  Clone ID: 700862881H1
ttttcttaccatcaattcttgttctgtgtgtgtaggtgtgttcttttctgtatttaaatcaagttatcttgtttattttgcagagtatggatatatcaaatcctgcagccttagtcaatgcggaactgttgcaattctatgttggaagaagggtaggatcgtgggggaggttgtgcgatctgatgggg

SEQ ID NO: 67180 - DNA, 271 bp, Glycine max
  Clone ID: 700862882H1
caaaaacaaaacaaaacagtgtctttgattacgagagagagagaacaaaacaatcaacacaatggcttctgagcaaatgcctcgcagagagaacaacagcaatagggtgatagagagagaggttcacgttgagacacacagaaaagagtccctccctgataagggaagggttgtgatagagagtgagaagaaggagaaagagagagagttggcttctgatagagccaggtctggaaatatagttaaggaggacaaagaggttggaagaggc

SEQ ID NO: 67181 - DNA, 273 bp, Glycine max
  Clone ID: 700862885H1
aaacaatccagcctggaggagatttctaagcacagagctgaagctcaacaaaaagcaatgagttcaattgaaggtgctaaggagagatacgagagagctaaacaagaagcaagtaaagcttccaaagagagaaacattcaagcaaataagagggctgaagaagaaaggaagaaagcagaaagtggtaagggtgttcatgtggataagtttgaaagagagaaaggatcagtgctgaaagcagaactcgagagaagaccagagaggtagagggaa

SEQ ID NO: 67182 - DNA, 270 bp, Glycine max
  Clone ID: 700862887H1
catggcctctcttctccgcttcaacggcgtctccctctttcccttaccttcccaacccacacgtgaccccatcctccccaaaccgtcacgcctcgtaacggtgcgcgcggaggtgaaagagacctccgcacccgccgccgccacatcctccgacgaaaagatccgcgacatcctccgcaaccgtgactacgacaagaaattcgggttcagcgtggagatcgagtccttgacgatcccaatagggctctcagaagaaaccattggtctgat

SEQ ID NO: 67183 - DNA, 230 bp, Glycine max
  Clone ID: 700862888H1
ataacaagcacaattacagtgactccgcttggttcctcttcttcgatcttcggtttgattctgcgtttgttcacatcatggccaccgcttcagtggcatttaagtccagggaggaccaccgcaagcagattgagttggaggtagcgcgtaaagcggggcttgcgccagctgaactcgatgaagatggaaaggacatcaatcctaaaatcccccataaaaggcctccggcc

SEQ ID NO: 67184 - DNA, 260 bp, Glycine max
  Clone ID: 700862889H1
gcttcttcttcttcttctctgcatcatcacaatggctgaagtacgttcacaacaaccccagcatgttcaagtccacgcaagcacaacacacacaccacaacaataccgttattaccaaggtggcgccaaaacacaacaccatggcggcgaaagtggcggcgttatgagcctcttcccggagatatccctcacgggctcccaactcctcgccctcctcgccggcgtcaccctcggcggcatgttgctactcctctccgggg

SEQ ID NO: 67185 - DNA, 254 bp, Glycine max
  unsure (1)..(254): unsure at all n locations
  Clone ID: 700862890H1
acaaaaacttaaatcaaaatacttaatagcatggcgatacatttatacaaaacttctaccccaagcacacgcaatggagccgtagacagtcaagtanaatccaatccacgaaatcatttgatctatggacagcatcgttgtggtaaaggccgtaatgcccagaggaatcattaccgaaggcatagaagggggaggtcataagcgtctataccgtaaaattgattttcgacggaatgaaaaaacttatatggaag

SEQ ID NO: 67186 - DNA, 272 bp, Glycine max
  Clone ID: 700862891H1
cacacaactactacaagtacttccttacaatcaaaaccaacaacaactatggcaagttatcaaaagcactacgatgatcagggtcgcaaggttgacgagtatggcaacgttgagaagcaaaccgacgaatacggcaaccctgttcatgctgctagtgtcacctatgtagccaccagaactgctgctggtggttacagtgatgacattaataagcaacatgataccaccaatgcctacggcgtagacactggtagacagcattctagtggtgg

SEQ ID NO: 67187 - DNA, 196 bp, Glycine max
  Clone ID: 700862894H1
aatatttcgtatgtctacttgttcttggtggtgttcgtgtgttgtgctttcaaagaaagttgatttattttgtgaaacgatgaatcgcattaccagtaatgcattcacccttggatattttattaatccccaccttagggttgtactacaccaaatgtgggaccttaaggaacttttcaaaattttggtttcgggg

SEQ ID NO: 67188 - DNA, 152 bp, Glycine max
  Clone ID: 700862895H1
tcgagaactactacaagtacttccttacaatcaaaaccaacaacaactatggcaagttatcaaaagcactacgatgatcagggtcgcaaggttgacgagtatggcaacgttgagaagcaaaccgacgaatacggcaaccctgttcatgctgc

SEQ ID NO: 67189 - DNA, 258 bp, Glycine max
  Clone ID: 700862896H1
ctgcaattcactctgtacaattcttcgttcgttctctgcagttatatcctttttgagcttcaatggcggacgctgaaaccttcgctttccaggctgagatcaaccagcttctaagtctcatcatcaacacattctacagcaacaaggagattttcttgcgtgaactcatcagcaatgcttctgatgctttggataaaattcgatccgagagcttaaccgacaagagcaagctcgatgctcaaccagagcccttcattc

SEQ ID NO: 67190 - DNA, 144 bp, Glycine max
  Clone ID: 700862701H1
ggtaccgaaagtcaaagaaaggaattagccaaccaacttacaggtcatgttttacctcttagtctgcaaatgtatggttgcagagtgattcaaaaggccttggaggtggttgatgtggatcagcagggtcaaatggtgtctgag

SEQ ID NO: 67191 - DNA, 140 bp, Glycine max
  Clone ID: 700862703H1
agaagaagaaaaaagcagcaagtaacggaaatggcggttctcagaatggtaactcaatgcactatgggaccctggttggggaagtgaaagctaatttgaagaaaggtattggagcgaatgaattgctgtcccatctttca

SEQ ID NO: 67192 - DNA, 93 bp, Glycine max
  Clone ID: 700862704H1
ctcgagccgaatcggctcgaggcaaaatggtggtaagcaaacctactgtatgtgactctagcccaacggaaagaagataggagagctagactg

SEQ ID NO: 67193 - DNA, 232 bp, Glycine max; identical to SEQ ID NO: 67092
  Clone ID: 700862705H1

SEQ ID NO: 67194 - DNA, 148 bp, Glycine max
  Clone ID: 700862706H1
acacggtcaaaaagaaaatcgttttccttgagaaaatacggacacagagacagagagagggagagagagaaggaaatgggaagcacaaagtttctattgttggtgatggtgtttctcgcagtgtgcgtggggacatgcaggccttggg

SEQ ID NO: 67195 - DNA, 273 bp, Glycine max
  Clone ID: 700862708H1
atattttttttggttaattaattcataatcacctccttaaaaggaaaacatgaattttgtatatgtaatcacattttaaaatagcgtaatcatatattaattactgatgaaaaaaatgataattgtaaaacttaagtgattttctccctatttttttgttgtcatctcatcttgagttgttttgactttcaccagcaagaagtaaaacttatctttattaagcaaactatcacacacatcttgattcctgaatatttgttagcttgttttata

SEQ ID NO: 67196 - DNA, 239 bp, Glycine max
  unsure (1)..(239): unsure at all n locations
  Clone ID: 700862709H1
taattgtttaaacctaattctcatttcttcatcgttcgattcttctcctcctaaaggtacgtctctggtttcctctctctcttgttcattcttttcgtaatagcaaccttattagccttcgtttattgatttttctcctaattacacttcaattttgtcgatttgtgtttgttacgtcaatctgtatatcttntatgatcgcgtcgaatccgaaacttttcattcgcctatctgattcc

SEQ ID NO: 67197 - DNA, 275 bp, Glycine max
  Clone ID: 700862711H1
ccggtcccacatcatgttgggcgtccatctcaaaccatggtagaagtggtgattatgggagcacagaaatgaaacatagggtggaaggtgatgccaaaggcaatcaatatcctgagcgagaatctctaccatttaaggaaaactctcatgaagctcaagacatggtgaaatttcgatttgataatggtgaaaaagagcacgaaagcaatgctggagggactgaaacaaaagaactgactgaattgaaagacagacataatagcagaaacttgatc

SEQ ID NO: 67198 - DNA, 284 bp, Glycine max
  Clone ID: 700862712H1
aactactacaagtacttccttacaatcaaaacccaacaacaactatgggcaagttatcaaaaagcactaacgcatgatcaggggtcgcaagggttgacgagtatggcaacgttgagaagcaaaccgacgaatacggcaaccctgttcatgctgctagtgtcacctatgtagccaccagaactgctgctggtggttacagtgatgacattaataagcaacatgataccaccaatgcctacggcgtagacactggtagacagcattctagtggtggctacgatggt

SEQ ID NO: 67199 - DNA, 279 bp, Glycine max
  Clone ID: 700862713H1
agaaagtaggatacaaccctgacaagattccttttgttcctatctctggttttgagggagacaacatgattgagaggtccacaaaccttgactggtacaagggtccaactctgcttgatgcacttgaccagattagtgagcccaagaggccctctgacaagcccctcaggcttccccttcaggatgtgtacaagattggaggtattggaactgtgccagtgggacgtgttgagaccggtgtcttgaagcctggaatggtggtgacttttgcaccaactg

SEQ ID NO: 67200 - DNA, 275 bp, Glycine max
  unsure (1)..(275): unsure at all n locations
  Clone ID: 700862714H1
gcggttgctccatcacctaatcacttcnccacttcccctgtaaatcacgtttagttcgcacaaggttttaaaaaatggctgatgctgaggacattcaacctcttgttgttgataatggaactggaatggtcaaggcgggttttgcaggtgatgacgctcctagggccgtgttccccagtattattgggcgaccacgccataccggtgtaatggttgggatgggtcagaaggatgcttacgtgggtgatgagctcaatcaaaaaggggtatactca

SEQ ID NO: 67201 - DNA, 284 bp, Glycine max
  Clone ID: 700862717H1
agaaaatctctaagttaggaaacatagatttctaggaaatgattgatagattatcgatccaactatccttattaaggaaagaaatcaaagaaaattttttgagttgtaattgatttgatgttttatccacttaacatgcgttgtagtatcggctcctagtcctttacaatcaacttcggcatatgaaattactcttacaaaaatttatttaaaaataaaataaaatgaaaaagattattaaaaaaattatgaatattattttttgaagtatactctaagagata

SEQ ID NO: 67202 - DNA, 233 bp, Glycine max
  Clone ID: 700862718H1
gcgaattttcaccgatagttttagatttgtagcgtagcttgtttgttcctccccttcctcctcgttctgtttcagtgattattaatgcgtgttgcggttgctgcagtggtgcgagcgggcacccgtaactgggcccggtgggcttcgagtggggcgtcgagcccaagcctttcgatatggcggcggaagaaggagatggggaaggaagggctggtggtggccaaagagctgaa

SEQ ID NO: 67203 - DNA, 134 bp, Glycine max
  Clone ID: 700862719H1
gaggagtaacaaagaatggattgtattccttggtcggacagacaattattgttgattctacaaatgttgtaactgatgataacacaaagttatggcaccacagattgacacatatctgtcaaaaagggttggaa

SEQ ID NO: 67204 - DNA, 248 bp, Glycine max
  Clone ID: 700862721H1
tgcaggaaatggatttcttcttcttgattctgagtttaatgtgaagggaaggtgggagaaaccgggtcacagcccactatttgggtatgacttttggtaccaaccacgtcacaataccatgattagcacatcatggggtgctcctagtgcttttacaaaaggttttaacttacagcatctctctgatggattatacgggaggcatctccatgtatatagctggcctgggggcgaactgagacaaacat

SEQ ID NO: 67205 - DNA, 87 bp, Glycine max
  Clone ID: 700862722H1
ttagaaagaaaaaaacttaaatcaaaatacttaatagcatggcgatacatttatacaaaacttctaccccaagcacacgcaatggag

SEQ ID NO: 67206 - DNA, 153 bp, Glycine max
  Clone ID: 700862725H1
gctctgtgtgcaacgacgccgtttcgacctcctttcttcactctttggcgagcaagcaagcaagtaacaatggcgactcgcgacggcggcatgaagtcgacgtcaataaacggcgttaagatgtacacgatagcgtcgcagcaaccctcactc

SEQ ID NO: 67207 - DNA, 271 bp, Glycine max
  Clone ID: 700862726H1
ccgcaccagtttcaccgcacgaatatcttgttgtttggagcgatccgagaaaaactctgtaaacatgttggtttaccaggacctccttacaggtgatgagcttctctctgactccttccgttacaaggaaattgagaatggaatgctgtgggaagttgaggggaagtgggttgttaaaggagcagttgatgtagacattggtgcaaacccttctgctgagggtggaggagaagatgagggagttgatgatgcagctgtaagggttgcagac

SEQ ID NO: 67208 - DNA, 277 bp, Glycine max
  Clone ID: 700862727H1
gttgaagagaagaagggttttggggaaaaggctgaactcgagggaataacaagagtggtggtgggaagagagtgcagcaaagaggagaaacaaggaagaacaagagagaaagtagaggcagagaaagcaagatcaatggagaaaactagagatgaagctaaaggaagagaacaagctgaaaccaaaggtcaaaccaagaagggtggtggtgaggaacagggaagaagaagagaagaaataggagaagaaaataaacaatccagcctcgaagagattt

SEQ ID NO: 67209 - DNA, 275 bp, Glycine max
  Clone ID: 700862728H1
gtcttatgacaaatgcctacaattatttgctcgagtctggtgggttggaggaggagtcttcatatccctacactggggagagaggtgaatgcaagtttgatccagagaaaatagcagttaagatcacaaatttcaccaatatccctgctgatgagaaccaaattgccgcatatttagtaaaaaatggtccacttgctatgggcgtgaatgcaattttcatgcaaacatacattggtggtgtctcatgccctctcatatgtagcaagaaaaggctg

SEQ ID NO: 67210 - DNA, 277 bp, Glycine max
  Clone ID: 700862729H1
ccaaaccacaccgaaacctccaaaaccctagcacgccaccgtccatggcgacgacacgatccgcgccgctcctcaagcacctcctcacccgtctcaacccttctcgctccgtcacgtacatgccccgtcccggcgacggcacccctcgcggcgtgacgctgatcccgggcgacggaatcgggcctctagtaaccggcgcggtggagcaggtgatggaggcgatgcacgcgccgctgtacttcgagaagtacgaggtgcacggcgaatgaaggcggtg

SEQ ID NO: 67211 - DNA, 278 bp, Glycine max
  Clone ID: 700862731H1
gccaattattatagaaattaattccagaagatgagaaggttgggaacttaatctaccagaattacttcttgatgtaacgttaatgatttttttctatttataattattctaatttacacctgcaactactaatatgttctaactttggtcccccgcatgaaagagcataatttatctattttctctctcaaatctctttgtagagctaaaatagtaaattgcattaagaatagaaatgtataacaaggtaatcaaatatcaacatatccttggccata

SEQ ID NO: 67212 - DNA, 282 bp, Glycine max
  Clone ID: 700862732H1
gtaggctctcagagaaggaaaatgttgatgggccttatagtttggtcttggagcctaaagggttagccttgtactacaagagcaagaattctcctaagccaattctctattggttttcttctgattggttcaccattcaacgagggtccttggaaaatgtcaccttcacatctgatccagaaacttttgaacttggatttgattaccatgtggccaattcttcatctggtggcaatagaatccttggcaggccagtgaacaatagcaccataacatatctca

SEQ ID NO: 67213 - DNA, 280 bp, Glycine max
  Clone ID: 700862733H1
cggctcgagtcttcaccttcgtctttctttcatttcaattctttgtggttcagaaactctgtacacgttaatcaagcccaacctcacctcacctcacctcacaggttttagttgttaattaaatatatagatagaaatccaaggaagaagatgaagcagtttgccgtccaaaacgtcgtcgctccatcccacgatgagattagcgtggtttgccccaagccccgccgcctcggcctcttcaacttccccgtgaacgatccccctgttagaccttctactg

SEQ ID NO: 67214 - DNA, 280 bp, Glycine max
  Clone ID: 700862734H1
gtggaaactcggttgaactcgaaatggcgaaacttgaagcgaagctaggaatgatcgtggactcggtggggcagttcttctccggcaaagaccatcttccttattgtgactctgacgtcgtcgctgtatgtatcatcttcatattctcttttagggtttcaaatctcacaatttctcttttcaatcaattatgtatgtgtttaagtgtttgagattgcaattgaatgttgtgttgtgtgtgacactgcgctggcagggatgtgaaagagaggtattggag

SEQ ID NO: 67215 - DNA, 205 bp, Glycine max
  unsure (1)..(205): unsure at all n locations
  Clone ID: 700862735H1
ctttcccgtgaaaagggaccatggaggcaaattcaggtgccagcgaccgaatttcgagaatcgccggccacctccgcccccagagagaggatgatgtttgtttgaagcgtagcgcnttgccgtgcaaaaggtggggtctccggattcaaggtggccatattgggtgccgcaggaggcatagggcaacctctggcgatgttgatga

SEQ ID NO: 67216 - DNA, 244 bp, Glycine max
  Clone ID: 700862736H1
ctgggctttcagcaccacaggatctatagaaggagccaattttcatgccaccggaaagctcgtcagtcttagtgaacaacagctccttgactgtgacaacaagtgtgacataacagaaaagacttcatgtgacaatgggtgtaatggaggtcttatgacaaatgcctacaattatttgctcgagtctggtgggttggaggaggagtcttcatatccctacactggggagagaggtgaatgcaag

SEQ ID NO: 67217 - DNA, 261 bp, Glycine max
  Clone ID: 700862737H1
aaaatttcgataagaaaagttcccaacttcagctaagagaaaatgtctctgattccaaactttttcggtggccgtaggagcaatgtgtttgatcctttctcccttgaagtgtgggatcccttcaaggattttcattttccctcttctgtttctgctgaaaatttagcatttgtaagcactcgtgtggattggaaggagactccagaagcgcacgtgttgaaggcagatattccagggctgaagaaggaggaagtgaaggtg

SEQ ID NO: 67218 - DNA, 253 bp, Glycine max
  Clone ID: 700862738H1
ggctcgagaaaaaaaagtgcttggcttgcgataccataagaaaaactacctattatacagtgagtgaatgagtgaccctttgatttgaagaagatgggagatatgggtcagaaggcccaagaagctaaggagaacacgaaaggggcggcccattctgcaaaccagaaagcccaagaaaagagtggtcaaactaaagaaaaggcctctgagataggcagtccaccaaggaagcggccagggtgtaatggggttt

SEQ ID NO: 67219 - DNA, 229 bp, Glycine max
  Clone ID: 700862739H1
tatctggagagggtctaagtaccagtgctttccttcctgtttatggaggtcttcttcaagctcagggtcagtatcctggggaaatgagattcagcttttcgtgcaagaataagtggggaacaagaatcacaccaatggtacaatggcctgacaaatcattttctttgggtcttgctcaagccttggcctggaagcgatctggtcaaggtgagccactgtcaatcatgtg

SEQ ID NO: 67220 - DNA, 276 bp, Glycine max
  Clone ID: 700862740H1
ctggccagaaaaataagatcactatcaccaatgacaagggtagattgtcaaaggaagatattgagaagatggttcaagaggctgagaagtacaagtctgaggatgaagagcacaagaagaaggttgaggccaaaaacgctttggaaaactatgcatacaacatgaggaacaccgtgaaggatgacaagattggtgagaaacttgacccggctgacaagaagaagattgaggatgcaattgagcaagcaatccagtggttagacagcaaccagcttg

SEQ ID NO: 67221 - DNA, 273 bp, Glycine max
  Clone ID: 700862741H1
cacacaactactacaagtacttccttacaatcaaaaccaacaacaactatggcaagttatcaaaagcactacgatgatcagggtcgcaaggttgacgagtatggcaacgttgagaagcaaaccgacgaatacggcaaccctgttcatgctgctagtgtcacctatgtagccaccagaacgctgcttgtggttaccgtgatgacattaataagcaacatgataccaccaatgctacggcgtagacactggtagacagcattctagtggtggcta

SEQ ID NO: 67222 - DNA, 87 bp, Glycine max
  Clone ID: 700862742H1
aagattttaggcttatagtgaagttttgatatggcccttgagatacctgtgtggttgtctctttgatcaatcgcaaccatgaaaagg

SEQ ID NO: 67223 - DNA, 273 bp, Glycine max
  Clone ID: 700862743H1
aacatcacacacaactactacaagtacttccttacaatcaaaaccaacaacaactatggcaagttatcaaaagcactacgatgatcagggtcgcaaggttgacgagtatggcaacgttgagaagcaaaccgacgaatacggcaaccctgttcatgctgctagtgtcacctatgtagccaccagaactgctgctggtggttacagtgatgacattaataagcaacatgataccaccaatgcctacggcgtagacactggtagacagcattctag

SEQ ID NO: 67224 - DNA, 272 bp, Glycine max
  Clone ID: 700862744H1
caagaaggagttcatagaagcccttaaattgttggaggaacagctgggagacaagacttattttggaggagacaatctaggttttgtggatatagcgcttgttccattctacacttggttcaaagcctatgagacttttggcaccctcaacatagagagtgagtgccccaagtttattgcttgggccaagaggtgccttcagaaagaaagcgttgccaagtctcttcctgatcagcaaaaggtttatgagttcattatggatctaagaaaga

SEQ ID NO: 67225 - DNA, 276 bp, Glycine max
  Clone ID: 700862745H1
cacacaacaaacatatctcttcctcttctgtccctcaatggaaggatcaggatccggtgtggttacagtctacggcaacggcgccatcaccgagaccaagaagtccctcttctccgtcaaagtcggcctagcccagatgctccgcggcggcgtcatcatggacgtcgtcgacgccgagcaggcccgcatcgcggaggaggccggtgcctgcgcggtgatggccctggagcgtgtccccgccgacatccgggcccagggcggcgtggcccgcatgag

SEQ ID NO: 67226 - DNA, 271 bp, Glycine max
  Clone ID: 700862746H1
tctcaattgtactaccaaaattgtactcaacatggctgttcccagtggctcgagtggtggagaggcgtcaattgttgcggaattggtggaagtggaggagtcttcatatccctacactggggagagaggtgaatgcaagtttgatccagagaaaatagcagttaagatcacaaatttcaccaatatccctgctgatgagaaccaaattgccgcatatttagtaaaaaatggtccacttgcatgggcgtgaatgcaattttcatgcaaacat

SEQ ID NO: 67227 - DNA, 88 bp, Glycine max
  Clone ID: 700862747H1
actagttctagatcgcgagcggccgccctttttttttttttttttttttttaaaattccccccaaagggcaatttttggggtaaaatg

SEQ ID NO: 67228 - DNA, 280 bp, Glycine max
  Clone ID: 700862748H1
tagggtttctatcgcaaaccctccctacctccaaccaggtcgcgtgcaaagggatttcgaagcttcggaagaaaaaaatgaaacctgttttctgtggaaacctggatttcgacgcgcgtcaatctgacgtggagaggctcttcagaagatacggcaaagttgatagagttgacatgaaatccggattggattacttggaaagttggaatgtccatgctcttcttggatggatgtgcttctctgcatttcttttctagaatgtgcctcagcttctccttct

SEQ ID NO: 67229 - DNA, 280 bp, Glycine max
  Clone ID: 700862749H1
cttcaactctgcttcccctggcaaccttcttcttagttctctccgcttcttatctccagattgctggggcgaaagcacaaccgttgactagtctcaagcttaactctccgatccttcaggagtctattgctaaagagatcaatgaaaatcctgaggcaggatgggaggctgctataaatcctcatttctccaattatacagttgaacaatttaagcgccttcttggagtcaaaccaacgcctaagaaggaactgagaagtacacctgctatatctcaccc

SEQ ID NO: 67230 - DNA, 144 bp, Glycine max
  Clone ID: 700862750H1
aattgacaatcccaaacagtcaacagttttcgatattctcttgggaatttctcaagattttgaaattgctggtaatactcttatgccagctttttctgttccacaggctactgccagatcttctgaaaatgcggaatcctctgc

SEQ ID NO: 67231 - DNA, 141 bp, Glycine max
  Clone ID: 700862751H1
gcaagcttttcattggaggcctttcatatggagttgatgaccagtctcttaaggatgcattttctggctttggagatgtggttgatgcaaaagttataactgatagagacagtggaagatcaaggggatttggatttgtca

SEQ ID NO: 67232 - DNA, 144 bp, Glycine max
  Clone ID: 700862752H1
aaaagaggaaaaaaaaaaaacgaaaatgctgagaatcgccgcaagcgcaaagagaattgttcaaacggcgtcgttggaggcgccaccgttggggattagggttctgccgcgtctctaccacgagagggtggtggaccactacga

SEQ ID NO: 67233 - DNA, 241 bp, Glycine max
  Clone ID: 700862753H1
gttcactggttagtatgttgaataattcagagtagatgccaaaataaatattagaggcttgtacaatgtgtcatacggcacacatggaactatatataaataaataaatacagaggctttatattcgcaacactgaggaggagggagtattcaggagtaaatagtaaatgaagattatcaggtagtaaggtcttgcatcagcaaatagagggagagcttattcaccagtagaagtgaagac

SEQ ID NO: 67234 - DNA, 133 bp, Glycine max
  Clone ID: 700862754H1
ggaaagggagtgttaagtgatttattagataatcgaaaacagaaaatcttgagaactattcgaaactcagaagaattacgggaaggggccattgaacagctggaaaaagcccaagcccgcttaaggaaagtcg

SEQ ID NO: 67235 - DNA, 273 bp, Glycine max
  Clone ID: 700862755H1
acctaacgcagcatcgctattctcttcattccatggctttgcccaaccagcaaaccgtggattaccctagtttcaaactcgttatcgtcggcgatggtggcacaggaaagacaacctttgtgaaaaggcatctcaccggagaattcgagaagaaatatgagccaaccatcggtgtggaggttcacccattggattttttcacaaactgtggaaagattcgattttactgctgggatactgctggacaggagaaatttggtggcctcagagatg

SEQ ID NO: 67236 - DNA, 256 bp, Glycine max
  Clone ID: 700862758H1
cactaccatatctttggcaatctgtaaggcactagatatgctggatatgttgaagaaagaggaagagatgctttctgctgtaaaggatagacaatccaaggatggggataaggagttctctaaggatgttcttgatgaacgtgccaagaaagcagaagcttggcatcgtgattctgcagttcgtgcacagtacactaggccatcaccaccaatcacatgtgccactttcgcccaagatgttctagaaggaagagca

SEQ ID NO: 67237 - DNA, 275 bp, Glycine max
  Clone ID: 700862760H1
aaacaaattagcggaacgttgaattgaacaagaagagagaagaatgatgatgaatgttttagggttgagtctggtgttaacttcactggcagcagcaggaatattctctcccaatcccagaacagagaagcatggagccagcaccattgtcaaagaagggcatcgagttgtggtggttgaatacgaccaaggtggccatcagaaaaccaaaatctcaatatccccagagcaacccacgcatcaccatgatcatgatgatgatttgatcaaagaag

SEQ ID NO: 67238 - DNA, 273 bp, Glycine max
  Clone ID: 700862761H1
cacatacacaacacaacacaacctcatcaatttgtgtggcaaagaatttagatagccttgctctcaaatccaaccctctcagactgagcagagacacacacacacatcctaatcacaaagcgttggccatggcaaacatgattgtggcttccaccaaacctctggttccagtctgcaccagttcccgttcccccacacccaaagtccccattctccaaatttcactccccaaagccccaaccttgaaactgaaactccgatttcaaagcccca

SEQ ID NO: 67239 - DNA, 280 bp, Glycine max
  Clone ID: 700862765H1
gttataagtttccttctttcaacagagataattcctctatgcttgcgaaccatggaaatgggcagtgagctatccaaaacagttgcaacatttattgttcaaaaaattctgttggacgatgtgggcttggactacatttgtactacagcggagcgcttttttgcggtaggtcgagttctggggaacatggtggcagctctagctgagcaaccttcatctcgtctattgaagcatatcattcgatgctatcttcgcctgtcagataatccaagggcttgtg

SEQ ID NO: 67240 - DNA, 144 bp, Glycine max
  Clone ID: 700862767H1
gaaaagatggcatcccataggcaaagctatgaagctggtcaaactaagggccgaactgaggaaaagacgaaccagacgatgggcaatattggagagaaggctcaagctgcaaaggagaagacccaggaaatagcccaagctgca

SEQ ID NO: 67241 - DNA, 142 bp, Glycine max
  Clone ID: 700862769H1
atgccaagggtaagcagagcagtaggttcagttgatgcatgaagtgtattttttggatcatgatttttcctttcatttatagcaatttcaattcagttaaaaaaaaaaaaaaaaaaaaaaaaaaaggggggccgccgctaat

SEQ ID NO: 67242 - DNA, 236 bp, Glycine max
  Clone ID: 700862770H1
ggtgtgggtccggaacatagctttttgaaagatttagggcgtgctgaatatcatagcatcacagatgaagaagcattggaagcttttaagagagtttcgcgacttgaaggcataattccagctctggaaacatctcatgcgttggcatatctagagaaagtgtgtccaacccttcctaatggagccaaggttgtggttaacttcagtggcggggtgataagatttcaactgctatc

SEQ ID NO: 67243 - DNA, 141 bp, Glycine max
  Clone ID: 700862771H1
ctgtccaatcgttcagtggaatatgttttctaccttcttgatctgcatatgaatttcttccttttttatttttgaagaaaaccattgatttttttcttcttcttaaatgtatgtaccaaaccaatatgttgtatttatgtg

SEQ ID NO: 67244 - DNA, 266 bp, Glycine max
  Clone ID: 700862774H1
aaatgggaaatgccctacctttgaccgatatgcccttaggcacggcaatacataacatagaaatcacactcggaaagggtggacaattagctagagcagcaggtgctgtagcgaaactaattgcaaaagaggggaaatcggccacattaaaattaccctcggggggtccgctttagatcccaaaactctgctcggcaacagtcggacaagtgggaaatgttggagtaaaccagaaaaatttaggtagagccggatctaaatgttgg

SEQ ID NO: 67245 - DNA, 269 bp, Glycine max
  Clone ID: 700862777H1
tggtgagaagaacgaatcgaaaaaagaaagatcatggcgatggcaaacttggctcgacggaagggttacgccgtcgttttgtcgtcgaggtcgtcgctttgtctgacaaggtggagggggttcgcgtccggatctgacgaaaacgacgtcgtggtcatcggcggcggtcccggcggctacgtggcggccattaaagcggcgcagctgggtctgaaaaccacttgcatcgaaaaacgtggcactctcggcggtacctgcctcagtcggat

SEQ ID NO: 67246 - DNA, 266 bp, Glycine max
  Clone ID: 700862778H1
tgtgaatcgcgtaactctctcaactcaactggatccgggtcacaaccgtcttgaaattaagaccaactgggtcattgatcacaatctcaattggtagcacaacatcaagggaaagtgaaaaagaaaggtatatttgatcagggatatggcaactcgaagatatgagtttggaaggatgaatgaggctagccacccagactccatcagagctgccttggctgaattcctccagcacttgtcttgctgagaagtctgcctgcttcgac

SEQ ID NO: 67247 - DNA, 270 bp, Glycine max
  Clone ID: 700862779H1
aaccaaaacagtaaagctaacttcaacacctttaattttctaaaagtaattcagcggctgaataccaagcggagaagatgagtcaggagcagccacggcgtcccaaaggccaaaaccccatcaaatacggcgacgtttttgtcgtctccggcgacctcgcacagaagcccgtcgcaccggaagatgctgccatgatgcaaagcgcggaaactcgagtgctcggacaaacccaacccggcggagcagcttccgtcatgcaatctgccgcca

SEQ ID NO: 67248 - DNA, 276 bp, Glycine max
  Clone ID: 700862781H1
cttcttccactcaccaccacgacgaagacgaggacaacttctccggttacggcggctactcctccttcaccggaggattctccgccgacggcgatgtcgccgtcgaccactccgccgccgcgtcgccggagatctacggcttcactgatccgaatcccgcttactctcagtctcccttcgaatcggccaccgtagagaacggaaacgaaaacggaaacggctatggccaaggcgacagcgacggcgacggcgtttttatctccgatggtccggtgc

SEQ ID NO: 67249 - DNA, 234 bp, Glycine max
  Clone ID: 700862782H1
tgcagaccgagctagctagctagcaagcaagcacagagatggaggcaaagcgaggccatgccctcatgtgcttggcacgtgtttcactcttcctctgcgctctaaccctatccgctgctcacggaagcaccacggttcaagacatcgcgagaaagttgaaactcggggacaacgagcttctgcgcacggagaagaagttcaaggttttcatggagaattacgggaggagctact

SEQ ID NO: 67250 - DNA, 260 bp, Glycine max
  Clone ID: 700862783H1
ggtccctcaaacaagtttacaaagttgagcctagatgcttctgaggctgaaagcttgaagaatttacataaaattggtaatggggatgattctgcaccgaagttatctgatcgagaaccccaaaaggcacctaatgggcatgctgtaatcatggtaaaggaaatattgctcgaggccttatcaactctgggaatctatgttttcttaatgcaaccatgcaggctctctggtacagctcacctttcgttcatcttttacag

SEQ ID NO: 67251 - DNA, 185 bp, Glycine max
  Clone ID: 700862784H1
cggctcgagcggctcgagcggctcgagatcaatccaacgatggtgtaaactgatctctcctcatttaattaccttaactatgaaaaggactgtaataatgcagtacatctaatcggtgtacatgattgcaggcattgaagtcaggccagcttcctgcagatttattgttggataatgttgatgaa

SEQ ID NO: 67252 - DNA, 268 bp, Glycine max
  unsure (1)..(268): unsure at all n locations
  Clone ID: 700862785H1
gcaacataaaaaaaaaaaattagaaagaaaaatgatgctcggagaacaccatcgcgggaatccgacggtcctcgtgccaccgtggccagcccacgacgatccgacggctgagatgtactccgcgttcttaacaaacgacgtcaatgctggtgagtactctccgtaccatcttcaagaagcactaacggcgctgcagcgttttctgccgtcaaacgaaacggacgcagactcggaccccgngggggctcaacccgacgcggcggtggac

SEQ ID NO: 67253 - DNA, 197 bp, Glycine max
  Clone ID: 700862786H1
cttagtgatacacagtgccagcctgaatcacagcttaagttcataacagaggcctggttacagatagttgaatgcaggagggtgctgaaatggacatattcatatgggtactatttaccggagcatgaacatgctaaaaaacagttctttgagtacttacaaggtgaggcagaatctggtttggagagacttcatca

SEQ ID NO: 67254 - DNA, 268 bp, Glycine max
  Clone ID: 700862787H1
acaaagtcatacatcattacattaacttttatgtatttctaaaagtcatacatcattacattaagttttatgtatttctaaagtcttaagacttaagaggaccttttttatgtgtcccgcttttctttttttctttttccaattctgtcattgtaaagcagtgaataccgtatccttaattttataaatggattgaattttaaaaaaaaaaaaaaaaaaaataaaataaaaataatactgaaaaagagaaatttggtggactcagaga

SEQ ID NO: 67255 - DNA, 269 bp, Glycine max
  Clone ID: 700862788H1
gaaatgcagaaatatattctgtgtaattaactggatccctaattacaaattttgactttcattggcttcattagcttgtcaaatacactaaactactactctaacagttatagacttgtacaatttaacaatgtacactgactatatgtacactaaaaagtatttattgtctatgtcacagtagcaagatgtgcactaataagtctcattgcatcaaataatttccgtagatgcctatatgaacatgctgattgacacctggtgcttgt

SEQ ID NO: 67256 - DNA, 138 bp, Glycine max
  Clone ID: 700862789H1
ctagaagtgttggatgcatttctatttctaactaattattgtgcttattattattgttgagaaagaaaagaatggcaaagttaataaaattctttgagttgaacacaggggccaagattccttctgttgggttaggca

SEQ ID NO: 67257 - DNA, 196 bp, Glycine max
  Clone ID: 700862790H1
caaacaagtttttattcatttgaaacatctttttttccgaatacaagaaaaaattcatttcaatttcaattatttctataagataaaatcgatatagatagattttatcttatagaaataattgaaaaatacattcaattatgtcttcgcgtatcaaatattttcttttcatatcgatgcgtacgatatttttcca

SEQ ID NO: 67258 - DNA, 271 bp, Glycine max
  Clone ID: 700862791H1
taaacaacgaccatgaaactaatgacagcaacaacaacgtttgatgtctctgccacttgcttccgtgcccctcctccttcgtgctcaatgaatccatgccacaccagtttttcagttataaactccctgaatcctcacaagggacgacggataagcgttgctgttccacccaagtttccaaacttccggagggaagcatctctgcaggggaatttggaggctattagagtcccaacttcggtgcctgtgcgtgtagcatacgagcttcttc

SEQ ID NO: 67259 - DNA, 232 bp, Glycine max
  Clone ID: 700862792H1
caacaatcggattttcggcgagacataatcaaaggatctatacgtgctcaaaggcgtaaaacagttacttggaaattttttcaaaaaagggtgcattcccccctttttttggataaaattgaaaaacctttattcttttcttttgatagtttcaaatcaatgaaaatattttttatgttcaaaatttggatgcgaaaaaaggaagaatttgaaatttctagttatacagagg

SEQ ID NO: 67260 - DNA, 266 bp, Glycine max
  Clone ID: 700862793H1
caagtttgacagcaacacaacaagctgtaattctggcatattgtcttctaattgaaaagagctcccgacatgatgaattgcaacgatgggacatggccccttacattgaggcaattgattcccagcatttgttttacttcactatacggtgtttatgcgatgttttacgtattcgatgggagttatctcgtagccgaactaaggagcgtgccttactgatgatggataacttggttaaacatgttaagaatttctccagcaatagc

SEQ ID NO: 67261 - DNA, 254 bp, Glycine max
  Clone ID: 700862794H1
gacaaccgcagaaattactaatactataatttgaagtgctttcttgtagtagtggtttacgcagcatggctttttaaataagctgctattccctacactcctacctaaggagtgtactattatccgcagtttctattctctctagctactttcatgtatgttcaatgctatatatagccttgaattaatgtcaactatgttctaattaatgctatagcttcggttggtgttaaaaaaaaaaaaaaaaaggggcg

SEQ ID NO: 67262 - DNA, 267 bp, Glycine max
  Clone ID: 700862795H1
ctcgagccggcaacattattcgagtacgtagcttaacaatattttaagcaattgctgctacaatgatagcgcggtttcctttgttgccgttgctgttgctgggaattgtttttctagcatcagtttctgtctcattacaggtgaagccgccgagtcaccacgagtgcctccagagttgcgagagtgaaacgtatccatacaagcggaaagcatgcaagcttagttgcaagttcgttcctgagcacggggagcaacaacatgaagaag

SEQ ID NO: 67263 - DNA, 279 bp, Glycine max
  unsure (1)..(279): unsure at all n locations
  Clone ID: 700862796H1
gagggganagatacgacgttggggaagcttggggagctgaaggactctgcggctgatgcggcgaagagggcagtgggttacttgagcggcaagacagaggaaaccaaagagaaagtctcggagacggcagaggcgacggctaataaggcggcggagatgaaggaggccaccagggagaaggctgccgggactgcggaggcggccaagaacaaggccgcagaggtaaaggacagagctgcagaaaccgcggaggcggccaagaacaagactgccgagact

SEQ ID NO: 67264 - DNA, 293 bp, Glycine max
  Clone ID: 700862801H1
gcagcaaccagcaccgccaccaccgagtggtgtccacaaaattgaatgttacgaaatggaagacgtgaagccggagtatacggcggcggattgcctgtacttcgaggcttccgactcggtgccgcggctgcacacgacggagtcgagctgttcggagcaggtggtgtcggcggagtttgcgagcgaggtgcagagcgagcggaagaggcagggcaacagcgagttttcgtataattacatggatcccactctcggaaataatcagatgtcgccgctccaggatatcttcatgc

SEQ ID NO: 67265 - DNA, 295 bp, Glycine max
  Clone ID: 700862802H1
gtcacggacgatggagtgggcggcgagggcggacacctccgcggcattcccagaaaactcgtgattgcggcggtgggcggattcgccaaaacggtgtcgtctttcctcaacaccgccgatgttcacaacggcgacactctcctccgcctcgtccgctccagaccccaccgcgtccccctcattaccgttagcaatcacatgtccactttggatgatccggttatgtgggggttcaagggttttcctatcttcgacaccaacttagctcgctgggttctcgctgccgaagatattt

SEQ ID NO: 67266 - DNA, 258 bp, Glycine max
  Clone ID: 700862803H1
cacagcgggaattggaggccaaaaaaccatctcaacctcaggaagctgaagagaggccatcagaaggaattggcgaaactgtgaggcagtatgcacaaaaaccaaagccaagtgaaagaaaccctcagaaggagggaaccgaaagcatcgtgtttacagcaataggcgaaacagtaagcagtgccggtgagaaggtaaagaaaccgtttaaaaacactatgggaggagaatgtgaaggaggagaaggaaaagaagagg

SEQ ID NO: 67267 - DNA, 298 bp, Glycine max
  unsure (1)..(298): unsure at all n locations
  Clone ID: 700862805H1
gtaattgtagtagtagacagtagcaccatgagccaggaacagctcaagaaacctcaaggggagcaggaccccatcaaatacggcgacgttttcaaagtctccgacgaactcgctttcaaacccatcgcgccaagagacgcagctctcatgcaagccacggagaaccaagcattgggccaaactcaaaaaggaggtcccgcctcggtgatgcaatccgccgcaaccgaaaacctccgcgccggcgtcgtgggccgccaagacatctccgacgtggcgangaacgaaagcgtgagcgtga

SEQ ID NO: 67268 - DNA, 295 bp, Glycine max
  Clone ID: 700862806H1
gaacatgcccatacgtgatcacagagattctggtaaacacgtgcagtgtttcaaaagttactaacggacacagatccaagcagttgcgacttgcgagatgcattcgacgaagagtagcaccagcgataatatcaatatcaatatcaaatcaaaagataaagaaatccatcgatgctaccataactaccgaaagaagagaaagcgtccttgccaagacgctgtggctcccaccacggaagacgacaactgctgcaccaaggccgccgccgcatcacacggtttcatatccgttata

SEQ ID NO: 67269 - DNA, 287 bp, Glycine max
  Clone ID: 700862807H1
cttatgcaactatagtgaggctaagagattggtccataattaatcaaaatgttggctatattccacaaagcttttgctcatccacctgaagagctcaacagccctgcatcttacaaaggttccaagaagcctaaggttcccgaggaaactctcaaagatttcctttcccaccatcctcacaacacttgctctatgagctttggtgatgctgctgttctagcttatgtccgtcctgatcaatctttctctcgtcatcaaaggctgttttgtgggatcgatgacatata

SEQ ID NO: 67270 - DNA, 302 bp, Glycine max
  Clone ID: 700862808H1
gtcatcgactaagaaagacattggagaattaagtgtggcttagttactaagtttgttacggtaaagaaaaaaaattcagcaacaaatacaatgggctctcttatggcaggatgggactctctgatcttagatcctgaatcagctacaattgagaggaatcgatcactcaccaaagaagaaattgatgcttactggcgagcaaagaaggagacagagttagaacacctcagagctatttccaaactatctgagactattcagacccgaaaatgcgaggattcagagaattctcataagtcaag

SEQ ID NO: 67271 - DNA, 285 bp, Glycine max
  Clone ID: 700862811H1
caacaacaacttccatttgatgtttggttccccttgtgatttggcatcctttgatttcaaggaggatatgcaaggaggagtagtagggatggatgctcttcagaaacagcctgatatctctatttggtaccagtgaaaatgacagcttaaagcttgaaacctcctcatcatcttcatctatcatggactcttttattttccttctaaaagggttggcacccccctaatcatgtgaagttcctttggccgaaaaagggtttcactgctattttcttgcaatgtaat

SEQ ID NO: 67272 - DNA, 265 bp, Glycine max
  Clone ID: 700862812H1
gtaattgtgaagaagggtgagaatgatttaccaggattgactgatgctgagaagccaaggatgagaggcccaaagagagcatccaaaatccgtaaactgttcaacctgtccaaggaggatgatgttaggacgtatgtcaacacctaccgtcgtagatcacgacaaaagctgggataagggtgagcaaagctcctaagatgacaagtattggtcacccctcttacgctccaacgaaagcgggcaataattgctgataaaaagaggg

SEQ ID NO: 67273 - DNA, 277 bp, Glycine max
  Clone ID: 700862814H1
tggggtttgaagaagccggtggtgtctccttgcttgttctcgatcgacccgatattgtaaaatataataacttttttatatcgtgatcaagatgcgccgagggagagccaccgccgccgtcgtggatccgacggcggagcaggcgaaggagacgcggttccgcggcgtcaggaagcggccgtgggggcgattcgcggcggagattcgagatccgtggaagaagcagcgcgtgtggctggggacgttcgattccgccgaggatgccgcgcgggcttac

SEQ ID NO: 67274 - DNA, 286 bp, Glycine max
  Clone ID: 700862816H1
aataattgacacagacaatttgaagagtttgtttattgtgaaaaaaagaaaaatgcaggcagcaaagaaagccatagagacctttaaggaaaccgcagccaacattggcgcctctgccaagtctggcttggagaaaaccaaggccactatccaagagcagaatgaaaagatgaatgcagaagatcaaactcaaatggatatggctaccaagaggaaagaagaaaagatcaccaggctgagatggagaagcagcacgcccataagtactacgccgctgcaaaacaat

SEQ ID NO: 67275 - DNA, 180 bp, Glycine max
  Clone ID: 700862817H1
cgttctagatgttgatgatattcctagaatcgttaatgaagcgtttttcttagccacttcgggtagacctggccctgtgttaattgatatacccaaagatattcagcaacagtttgcgattcctaattgggatcaaccaattaggtacctggtacatgtctaggtgctaagtccccaatg

SEQ ID NO: 67276 - DNA, 282 bp, Glycine max
  Clone ID: 700862818H1
tgcgttcttcttcttcttcctttctctgcttgcagttgcagaggtaggaggggggcggtgattgtgttgtgtgctttagaggatgaaagatttcaattcggatctattcgacccgggaacggtgatggactcttcctcctccgattactctcgcagtgcttcctcttccgacgccgatttcgggttcgctttcaatgacagtaatttctccgacaggatcctccgaatcgagatcatgggggacccgtcgaagccgacccgattcgaggttgcatcatatcg

SEQ ID NO: 67277 - DNA, 289 bp, Glycine max
  Clone ID: 700862819H1
aaaacattgggcctggcatcacttatgtcaaaggctgggatgcatttgcctgccaagaaaaatccaaaacttccttggtttgaccttatccttgcagatattggagatcaccagtcccttgaacaaaatctctcaacttttagcgggcacatatcacgtatttgtaagattttggaagtggcctcaacacaatcacttgttctcattgatgaaattggtggtggaactgatccttcagaaggtgttgctctttctgccagtatcttacaatatttgaaggatcgtgtta

SEQ ID NO: 67278 - DNA, 288 bp, Glycine max
  Clone ID: 700862820H1
gtttggagaacatctgccatggtctccagatggaggcagtacatgactcgccctgcatcacagtttttttctaatcaagcagttatttccaatgacatgtcatcatattatacaattggatctggaaagctgcaggactcaatgattgccgagggatcctccctggaaaaagatactaatttgctgcaagagggtttgggtgcaacacatggttctgctagcagatttgactcatgttcctctttaaagaagataatgaaaaaacacaaagtaatggagccttaagtg

SEQ ID NO: 67279 - DNA, 282 bp, Glycine max
  Clone ID: 700862821H1
ccaaaccctgccgatccaaaaccgagagtgatttgcacacgaaaagaaccggccataccgagttcgttgacaagacttccgaggccgttaaaccgattagtttggaggctccgaaggtggatgcaactgcttcatcggaaaacccttccgctgctgcatccactgaccaaaatgaagaaatggttgttcctgaagtggacaaaaagctgcttgaggaacttgaatccatggggttttcaacggcacgggcaacgcgggcgcttcattactctggtaatgctg

SEQ ID NO: 67280 - DNA, 271 bp, Glycine max
  Clone ID: 700862822H1
gaacgattactcctctcccaacagacacaggagctgtccttatcctcatttagccccagttcatgaagaagttaaagcaccagatctcaatggctactacagttgtgatgatagtgctctagcagttgagaaagtgattgaaagtgatcactttcaccttaatcgagagcagccattgcaaactaataatatagggaatatttcttgtagaacagattcaggaggtacttatgtcaacagttggttcagcattgttaaggaaaaaatagag

SEQ ID NO: 67281 - DNA, 108 bp, Glycine max
  Clone ID: 700862823H1
accactgttcagtatgctggagagaaatcagcacaagccaaagatgctacggtaggatcaatggagaaaactacaaaggatgctaaaggaagagaaaaagcaggaacc

SEQ ID NO: 67282 - DNA, 293 bp, Glycine max
  Clone ID: 700862824H1
tttctctctagaatccatggcagccattggtctgaatggcgtaaaggttgggacgacgtcgtctcaggcgtaccttgaaggcaaggcagtgaaggagacgagagcgttgatggctgaactgtgtcgccatttctacacccttggatgggtgacagggacaggtggcagcatctccatgaaggtccacgatgactccatccccaggcctcaacagctcatactcatggccccttctggtgttcagaaagaaagaatggagccagaggacatgtatgtgttatcacacagtgggt

SEQ ID NO: 67283 - DNA, 291 bp, Glycine max
  Clone ID: 700862825H1
ggtttggttacttgctcgaatttcctcgaatcgcttaatttgtatttgattagttaaaccgcaacgcggaatctcttttctcgaactggctaactctcaggcaagtggttcggacgctgattccagcaacaagcggctggtgctcgcactgtatgacgccctaaactccggcgactccgacgccgtcgtcaagatcgtcgccgccgacctcgagtggtggttccatggtccgccctcacaccagtttttgatgcgcatgctcaccggcgactccgctgccgacaactcctt

SEQ ID NO: 67284 - DNA, 289 bp, Glycine max
  Clone ID: 700862826H1
aaacaacagagtttatttctttttggttccttggttcacgctggctgcaaggcttgtgtttggtgggagcagcttctcaccgtgacgctgctctacgaagacgacgacaacctcgtgtgacaacatcaaataatgggaaaaggaaacatggaactcgagacaaacaaggtctatgactacgaggatgcacgaggggacgttgaagtcccagataccgctcatcagataagcactgattcatggtttcaagtggcttttatcctcacaaccggaatcaacagtgcctttg

SEQ ID NO: 67285 - DNA, 253 bp, Glycine max
  Clone ID: 700862827H1
agtaattatgctagcgcaggaggaagcaagacgtcttggtcacaattttgttggaacagagcaaattctattgggtcttatcggcgaaggaactggtattgctgctaaggtgctaaagtcaatggggatcaacctcaaagatgcacgagtggaagtagaaaaaataattggacagggtagtggatttgtggctgttgaaattccgtttactccccgggcaaagcgtgttttagaactttcactggaggaagct

SEQ ID NO: 67286 - DNA, 284 bp, Glycine max
  Clone ID: 700862828H1
aaaaaaagaaaaatgcaggcagcaaagaaagccatagagacctttaaggaaaccgcagccaacattggcgcctctgccaagtctggcttggagaaaaccaaggccactatccaagagaagaatgagaagatgaatgcagaagatcaaactcaaatggatatggctaccaagaggaaagaagagaagatcaaccaggctgagatggagaagcagcaggcccgtaagtactacgccgctgcaaaacaatacgccatggctgagcacatggcaaagggcaaccacga

SEQ ID NO: 67287 - DNA, 274 bp, Glycine max
  Clone ID: 700862829H1
acagttttctgtgtcaccggaactcgtttctttcaaaacacttcaaacatctcgaacgctctctttccggcaactaggttaaagttcatcaatggcaggtcgcggcaaaaccctaggatctagcgccgccaagaaggctaacctcaaggggcaccaaggcgggcttcaatttcccggcgggcgtatcgcccgtttcctcaaggccggaaaatacgctgagcgtgtcggcgccggcgcccctgtctaactcggcgccgtactcgaatatctcgcg

SEQ ID NO: 67288 - DNA, 271 bp, Glycine max
  Clone ID: 700862830H1
tggctctctacaagccgtttcttccgattctctcttctatgaagacaagtccaaagatcttgctgtgaagaagaagatcgagaaacatagggagagggtgctccgatgtgatagcctgctacagaaaaatcagtttgttaagccagtgccatcttctattctgaagaagtgttctaaaaaccgtaatgtggcctctaaatccaatttgaaagtggccaatcaggatggtgagaaggatgattctgccatttttgatctatgggatgataaa

SEQ ID NO: 67289 - DNA, 213 bp, Glycine max
  Clone ID: 700862831H1
cagaaccgaagccatggcggatcggttcttccccaacccgatgcccgagttcgtacccgaaacgacgccgtccactcctcaggaagaagacgaagccctcacagtgggcgactcgctcccgaagcctcctcgccatgcccaacgcgtaactcttggagtgtctaaaacgcgctgttctcgacctcaaggacgccttgttgatagaaagggggg

SEQ ID NO: 67290 - DNA, 194 bp, Glycine max
  Clone ID: 700862833H1
tgcagaccgagctagctagctagcaagcaagcacagagatggaggcaaagcgaggccatgccctcatgtgcttggcacgtgtttcactcttcctctgcgctctaaccctatccgctgctcacggaagcaccacggttcaagacatcgcgagaaagttgaaactcggggacaacgagcttctgcgcacggagaag

SEQ ID NO: 67291 - DNA, 242 bp, Glycine max
  Clone ID: 700862834H1
aaatatcatggcttcgagggtggtttcggttttggtgatagcgatgatgttgtttgccatgaactgtaactgcactagtgttggccacatgccttcaaccaaagaggacggtcacgattttcaggcggctaaagccaagacaacacaaactgcgaacaaggccatggaaacctggtaaagatggggaagaagccgcagagtcatggacagaatgggctaaagagacactcactgaaggtctt

SEQ ID NO: 67292 - DNA, 250 bp, Glycine max
  Clone ID: 700862835H1
ctcagatcctctctcgcatcttccccaaaaccctaaccctagcccccttcctcttccgctccctcaccaccgccccctctcgtccttccctccccgcgctctccttcctccgccgtatctccgttgcagccaacccctccctccgccgcgtcctcctcccaaacgccccctccctccgcgcactctccacacgggccaccacctcctccctcaacgaccccaacccaaattggtccaaacgtcccccgaa

SEQ ID NO: 67293 - DNA, 270 bp, Glycine max
  Clone ID: 700862836H1
aaagaaaggaaataattgatctttgaaaatgcagggaggaaagaaagctggagagtccatcaaggaaacagctgcaaacattggtgcttctgccaaggctggcatggagaaaaccaaggccactgtccaggagaaggcagaaagaatgacggcacgtgatccgatgcaaaaggagttggcaacccagaagaaagaggcaaagatgagccaggcatagctggacaagcaggcggcgcgtcagcataacacggcggcgaacaggctgccacg

SEQ ID NO: 67294 - DNA, 232 bp, Glycine max
  Clone ID: 700862837H1
agaacctaagtgagaaacaaagaaaggaaataattgatctttgaaaatgcagggaggaaagaaagctggagagtccatcaaggaaacagctgcaaacattggtgcttctgccaaggctggcatggagaaaaccaaggccactgtccaggagaaggcagaaagaatgacggcacgatgatccgatgcaaaaggagttaggcaacccagaagaaaagagggcaaagatgaagcc

SEQ ID NO: 67295 - DNA, 286 bp, Glycine max
  Clone ID: 700862838H1
agttatgagaacttgattggaaaaggtggtcacgctgaagtgtacaaaggctacttacccgatggtcaggttatagctgtaaagaggctaatgaagaatgaaaaggatgctgcagacagagctggtgatttcttgacggagcttgggatcatagcacacataaaccacccaaatgcgacgcgccttgttggttttggggttgattgtggcctatactttgtcctacagcttgctccacatggcagtctttcttctttgcttgttggttctgaatgcttggactgga

SEQ ID NO: 67296 - DNA, 177 bp, Glycine max
  Clone ID: 700862839H1
taaaaatgcacattgcagagaaaggagaaggccctgtggtgttgtttctccacggcttccccgaactctggcactgttggcacaaccagattgtggctcttggttccctcggataccatgcggtggcaccagatctccgaggctacggtgacaccgatgcaccaccttcaatagaca

SEQ ID NO: 67297 - DNA, 288 bp, Glycine max
  Clone ID: 700862840H1
tagggtttctatcgcaaaccctccctacctccaaccaggtcgcgtgcaaagggatttcgaagcttcggaagaaaaaaatgaaacctgttttctgtggaaacctggatttcgacgcgcgtcaatctgacgtggagaggctcttcagaagatacggcaaagttgatagagtggacatgaaatccggattggattacttggaaagttggaatgtccatgctcttcttggatggatgtgcttctctgcatttcttttctagaatgtgcctcagcttctccttcttgtatttt

SEQ ID NO: 67298 - DNA, 250 bp, Glycine max
  Clone ID: 700862841H1
aaatcaatctaacttgacttataatgtaacagcaccaaatttggatggtggaccagatactccttcatttggtcactcaggcatagacaaaaattccttggagaaactgagggaagcatcagctgctgaagctgaggcaacgggtgctgtctggcaaggctggtgcagtctatatcaagtaatccaactgaagcaacatctctggcaattgagaactcacaagctggagatacagtttcagatggaagtg

SEQ ID NO: 67299 - DNA, 250 bp, Glycine max
  Clone ID: 700843445H1
gttgtagcactgaataccaaagagtatgctggtgatgctaccaagagaagcaaagaggcttctaatgatcatgccaatgacatggctcagaagaccaaagactacgccagtgacactgctcagagaaccaaggaaaaactccaagacattgcatctgaagctggtcaatacagtgcagagaaagctagagaaatgaaggatgcagcagcagagaaggcaagtgacatagcaaaggctgcaaagcaaaaat

SEQ ID NO: 67300 - DNA, 252 bp, Glycine max
  Clone ID: 700843446H1
gtgaaagggttggtggagggagggtgccctccagggatggtcctaatcgacgacgggtggcaagccatttgtcacgacgaggaccccataacggaccaagagggtatgaagcgaacctccgcaggggagcaaatgccatgcaggttggtgaagttggaggaaaattacaagttcagacagtattgtagtggaaaggattctgagaagggtatgggtgcctttgttagggacttgaaggaacagtttaggagc

SEQ ID NO: 67301 - DNA, 115 bp, Glycine max
  Clone ID: 700843447H1
gttaaattctcaaaggcaccaatttcattgctcagagttcccaaattctccccaagagataaaatgtctctaatcccaaacttcttcggtggccggagaaacaatgtgttcgatc

SEQ ID NO: 67302 - DNA, 109 bp, Glycine max
  Clone ID: 700843449H1
caacaatcggattttcggcgagacataatccaagtaactgttatatgcacttgagcacgtatagatcctttgattatgtctcgccgaaaatccgattgttgggaataac

SEQ ID NO: 67303 - DNA, 250 bp, Glycine max
  Clone ID: 700843450H1
gtaaaatcaaaagcacttcgccatctcccaaacccaccaagcccaaagcctcgtcttcccttcataggacaccttcatctcttaaaagacaaacttctccactacgcactcatcgacctctccaaaaaacatggtcccttattctctctctactttggctccatgccaaccgttgttgcctccacaccagaattgttcaagctcttcctccaaacgcacgtggcaacttccttcaacacaaggttccaaa

SEQ ID NO: 67304 - DNA, 246 bp, Glycine max
  Clone ID: 700843451H1
gttataatacctcgtcatgacacacctgtgcttatagttaacgttaaacattttgtgcgtgtcgtttaaaatttagctaatagcaggaagctattttactaggtacaggtttaaaccaacaagatcacgaagcagatgttggactacggttgaggcacgtaaatcaacaggtgggctgaattgtattttcagggaggaaggccactgtgtaggttgtgaagcctcgtgctgacatggttcatgaat

SEQ ID NO: 67305 - DNA, 217 bp, Glycine max
  Clone ID: 700843452H1
caggaaatgagacacaagacattggccaaaagggttatggtggagcaaaggataccattggtagagtggacaacattactacaccacttgctaaaaaggctcaagttgctggtagcaccactgctcagtatgctggagagaaatcagcacaagccaaagatgctactgtggaaactggcaagagtactgcaaaagatgccccagatttgaaggacac

SEQ ID NO: 67306 - DNA, 243 bp, Glycine max
  Clone ID: 700843453H1
ttgaatccgagtttttgtgggttgcattgttgtgagaagatgagaagagttggagttgatgttttgaacgtggatttggctgctgcagtgaacaacctcttcaatcttcctgaaactatggagaagttcatgtttccttcttctcgtgctcatgatcaccaccatgaaaccagaggggtctctagcatcattccagtggacattttggacactcccaaggagtatacattctttatggatgtt

SEQ ID NO: 67307 - DNA, 245 bp, Glycine max
  Clone ID: 700843454H1
gttttgtgggtggctcctgaggataaggcgagtttatggtcacaacttcattatgtttcgtgtaataatctggaaatgcaagaagcttatcttgtcaatctcgtaaatgtgttacgagaattgtatttgcacagtccagaggaagctcgccaattgagaaggaaagctctctctcgtattgaatggctgcaaaaagctgatgtgcctaccatagcacagattgaagagttccattcgatgcagag

SEQ ID NO: 67308 - DNA, 245 bp, Glycine max
  Clone ID: 700843455H1
gtaggaagaaaaaaagagaaagaagatcaaggcagtgtcacatgaatggtccttggtgaacaagcagaagcctatttggatgaggaagcctgaggagatcacaaaagaggagtattctgctttctacaagagtcttaccaatgactgggaagagcatttggctgtcaagcacttctctgttgagggtcagttggagtttaaggctatactctttgttcccaagagggcaccttttgacctctttg

SEQ ID NO: 67309 - DNA, 247 bp, Glycine max
  Clone ID: 700843457H1
ttaggaaataattgatctttgaaaatgcagggaggaaagaaagctggagagtccatcaaggaaacagctgcaaacattggtgcttctgccaaggctggcatggagaaaaccaaggccactgtccaggagaaggcagaaagaatgacggcacgtgatccgatgcaaaaggagttggcaacccagaagaaagaggcaaagatgagccaggcagagctggacaagcaggcggcgcgtcagcataacacgg

SEQ ID NO: 67310 - DNA, 247 bp, Glycine max
  Clone ID: 700843458H1
ggaactctttgatataatatagaaagagacagagagagagagacagacaagaagaacaaagatgcaatcttcaaaggagaagctgaaaaacatgaccagtgctgccaaggagcaagtcgacatctataaagcaaaaatagacgagaagacagagaaagcaacggcaagaacagaagaggagagggtgattacccatgaacgtgcaaaggcaaaggaagctgaagcaaagatggagctgcatgaagca

SEQ ID NO: 67311 - DNA, 104 bp, Glycine max
  Clone ID: 700843459H1
gtaaaacaaaaaaaaaaaaaaaaacaaaaaccaacaacaaaaaacaaaaaaaaaacaaaaaaaaaaaaggaagggggcgccccaccaggggggccgcccccccc

SEQ ID NO: 67312 - DNA, 246 bp, Glycine max
  Clone ID: 700843460H1
tttagaagtttggaacagtgaaatgtcgtaattgtttagtactgtaacctgtagattgataaggatgctttcttgctgttataggccatctttatttagaaattagaacttccatttgtcttttggttgctttcaatgatctcattattaatttaactcttgtatatctaagtccaatacttttaatgtcatgtttggccaagattgtagtaagttcttgaagagcattcactaagttgattgttg

SEQ ID NO: 67313 - DNA, 247 bp, Glycine max
  Clone ID: 700843461H1
gggtagcatgctggaccatatcaaacatcacagctgggaacaaaaagcagattcaggatgtaattgaggctagtataattgctcctttagtccatttgcttcaaaatgctgagtttgatatcaagaaagaggctgcttgggcaatctcaaatgctacttctggtggatctcatgaacaaatcaagttcctggtaagtcaagggtgtattaggcccttgtgtgatcttctcatatgtcctgatcctag

SEQ ID NO: 67314 - DNA, 251 bp, Glycine max
  Clone ID: 700843462H1
gtgagatacaaagaaaggtaataattgatctttgaaaatgcagggaggaaagaaagctggagagtccatcaaggaaacagctgcaaacattggtgcttctgccaaggctggcatggagaaaaccaaggccactgtccaggagaaggcagaaagaatgacggcacgtgatccgatgcaaaaggagttggcaacccagaagaaagaggcaaagatgagccaggcagagctggacaagcaggcggcgcgtcaca

SEQ ID NO: 67315 - DNA, 244 bp, Glycine max
  Clone ID: 700843463H1
cattaatgtgtgtttgtcacgagacccatagtgctgccaaattatagtaactctctttctctatctgaagaagaagaagttctgaagaagcatgtgtggaggtgctatcatctcagacttcattggtgtgaagcgtggccgcaacctcgccgcgcaggaactgtggtccgagcttgaccctttctctgacctccttggcttcgataccaccaccaccaccaccaaccaaccaccccttccagac

SEQ ID NO: 67316 - DNA, 256 bp, Glycine max
  Clone ID: 700843464H1
cagaaattgtagtgaaagcgataattctagtactagtataataactagtacgaatgatacaaatgatagtgattccactataggagaaagttctaataatctcgatgaaagtcaaaaatataagcatttgtggcttgaatgcgaaaattgttatggattaaattataaaaaattttttaaattaaaaatgaatatttgtgaatactgtggatatcatttgaaaatgggcagttcagatagaatcgaacttttgatt

SEQ ID NO: 67317 - DNA, 109 bp, Glycine max
  Clone ID: 700843465H1
gtgaaacaaagaaaggaaataattgatctttgaaaatgcagggaggaaagaaagctggagagtccatcaaggaaacagctgcaaacattggtgcttctgccaaggctgg

SEQ ID NO: 67318 - DNA, 240 bp, Glycine max
  Clone ID: 700843466H1
cggcaccaagtttataatttatgatacacagcctccctataacaatgctcagctgtctcctccaggccgaagccgtaggttttattcaaaaaaggtttctccaaaggtccctagtggcagctacaatattgcccagatcacctatgagttgaatgtccttggtactaggggcccgcgcagaatgaactgcaccatgcactcaatccctatgtcagcccttgagcctggttgcactgtccc

SEQ ID NO: 67319 - DNA, 240 bp, Glycine max
  Clone ID: 700843467H1
gccaaatgcctcgtcatctaattagtgacgcgcatgaatggattatcgagattcccactgtccctgtctactttccagcgaaaccacagccaagggaacgggcttggcggaatcagcggggaaagaagaccctgttgagcttgactctagtccgactttgtgaaatgacttgagaggtgtaggataagtgggagctggaaacagcgaaagtgaaataccactacttttaacgttatttta

SEQ ID NO: 67320 - DNA, 246 bp, Glycine max
  Clone ID: 700843468H1
ggagcttgagggcaggtcttatagatgcaagttctgcagaactcacttggcccttgcagatgatctcatctccagggcctttcattgccggagggggaaagcatacctattcaataatgccgtgaacttcacatattggaacaccagaagaaaggatgatgctttcaggattacatactgacgcagatattttttgctgttgctgcggtcaaataattggctggaaatatgaatctgcacacgaga

SEQ ID NO: 67321 - DNA, 247 bp, Glycine max
  Clone ID: 700843469H1
ttgaagaaaacctaagcttagaattagaaacaaagaaaagaagaaaggaaagaattgatcgttgaaaatgcagggaggaaagaaagcgggagagtccattaaggaaacagctacaaacattggtgcttctgccaaggctggcatggagaagaccaaggccactgtccaagagaaggcagaaagaatgacagcacgtgatccggtgcaaaaggagttggcaacccaaaagaaagaggcaaagatgaac

SEQ ID NO: 67322 - DNA, 110 bp, Glycine max
  Clone ID: 700843470H1
ggaaataattgatctttgaaaatgcagggaggaaagaaagctggagagtccatcaaggaaacagctgcaaacattggtgcttctgccaaggctggcatggagaaaaccaa

SEQ ID NO: 67323 - DNA, 244 bp, Glycine max
  Clone ID: 700843472H1
tacgaatatcttgttgtttggagcgatccgagaaaaactctgtaaacatgttggtttaccaggacctccttacaggtgatgagcttctctctgactccttccgttacaaggaaattgagaatggaatgctgtgggaagttgaggggaagtgggttgttaaaggagcagttgatgtagacattggtgcaaacccttctgctgagggtggaggagacgatgagggagttgatgatgcagctgttaa

SEQ ID NO: 67324 - DNA, 120 bp, Glycine max
  Clone ID: 700843473H1
ggccactatcaggcagctttgttgttctgtgctttacttttggttttgatagacggtggtatgtctctgtatggattttgattgtttcaagttttaatttaattgactgtagttttgaat

SEQ ID NO: 67325 - DNA, 245 bp, Glycine max
  Clone ID: 700843474H1
ttaaaagtttacgttacaaatcgcataataaccgtcctaagtttattgagagaattttgcaagtgtgagatacatggcatctcgtcaaaacaacaagcaagagcttgatgaaagagcaaggcaaggagagactgttgtcccgggtggaactggtggcaagagcctggaggctcagcaacaccttgctgaaggaaggagcaagggagggcaaacaaggaaggaacagctgggtacagaagggtacc

SEQ ID NO: 67326 - DNA, 244 bp, Glycine max
  Clone ID: 700843475H1
ggaaaggggctaaactattggtgcttatatgcttttcatttgctgtaactaattacagatatgcaatttggaatttactcaaaacattttgttttaggaatgtgtacgagctttcataacagaaagcacagatggagatattcttgaactacaaattcaggatccttttcatagattgttactgcatggagtttgtgagttctacaatctggcgtcggatacagtgtcaggttataatggcgtg

SEQ ID NO: 67327 - DNA, 246 bp, Glycine max
  Clone ID: 700843476H1
ttgagacccatagtgctgccaaattatagtaactctctttctctatctgaagaagaagaagttctgaagaagcatgtgtggaggtgctatcatctcagacttcattggtgtgaagcgtggccgcaacctcgccgcgcaggaactgtggtccgagcttgaccctttctctgacctccttggcttcgataccaccaccaccaccaccaaccaaccaccccttccagacaaaaaagtggtgtcatcatg

SEQ ID NO: 67328 - DNA, 246 bp, Glycine max
  Clone ID: 700843477H1
atcgacagagccggcggttcccgtggcggtttgagaatggccgacaagtacaacctgaagaaccccgccgtgaagcggatcctccaggaggttaaggagatgcagtccaacccttccgacgatttcatgagcctccctctcgaggaaaatatatttgagtggcaatttgcgattagagggcctcgtgatacggaatttgagggtggtatttatcatggaaggatccagttgccttcagagtatcca

SEQ ID NO: 67329 - DNA, 249 bp, Glycine max
  Clone ID: 700843478H1
cggagatttctaagcacagagctgaagctcaacaaaaagcaatgagttcaattgaaggtgctaaggagagatacgagagagcaaaacaagaggcaagtaaagcttccaaagagagaaacattcaagcaaataagagggctgaagaagaaagaagaaaagcagaaagtggtaggggtgttcatggtgataagtttgaagagaagaaggattcagtgctgaaagcagaactcgagagaagaacaaagaggt

SEQ ID NO: 67330 - DNA, 251 bp, Glycine max
  Clone ID: 700843479H1
tacagccaagtcgtaaaagggtttcaagggatggaaaacatgcagagcttctggcaattgggtgatgaactccgtgggcactcaaaagcatcggaggatcacaagtggttaatggttgcctcgaaactggccgaacagacaagattgaagggggagcgtgtgaacaaccttgatctttcaaagggacccattgaaacaaggtcaagggataaatttgggttccaggaagagaacaaatttgattctcttaa

SEQ ID NO: 67331 - DNA, 254 bp, Glycine max
  Clone ID: 700843480H1
tggactcataagagtagtaactaagaaaaaaaaaggtttctgatttatttagttcggcacttccgatcatttctccgcggcggcgcaaccgattcccccgccgcatatggccaaaggtcgaaaattaacgaccagccggagcgaacgttttttgggaacctacgcctatagccaaggctccgccgccttgaacccatcggagctccgggaagaagatgtctggggcgccggagatgacgccggcgatcgcgagt

SEQ ID NO: 67332 - DNA, 240 bp, Glycine max
  Clone ID: 700843481H1
gtagacccaccaacgcacgaaagccgggatctttcagaaaatggattcctattcgaagggtgcataaccgcatggataagctcacactaacccgtcaatttgggatccaattcggttccttaggaggtatcgggaaggaattttggaatgtaataatatcgattcatacagatacagaagaaagggttctctattgattcaaacgctctacctacgagatagggatagagaaagaggaaa

SEQ ID NO: 67333 - DNA, 244 bp, Glycine max
  Clone ID: 700843482H1
gataacttaattagtgttcatgaatatgtcaagccttactttagtggttctacattgaaaagctttctagctggtcataatatcaccattactgatggtattgacacaactagtgcaactttgcaatttagccagttagcagcttgtgattttctcacgagaaactttcagcagctgtctaatgttttgtgggtagctcctgaggcacaaggcgagtttatggtcacaacttcattatgtttcg

SEQ ID NO: 67334 - DNA, 247 bp, Glycine max
  Clone ID: 700843483H1
gttacggtaggatcaatggagaaaactacaaaggatgctaaaggaagagaaaaagcaggaaccaaaggtcaaacaaagaagggtggtggtgaggaacaaggaaaaagaagagaagaaacaggagaagaaaaaccgcacaaaacaaaaacaaaacaaaacagtgtctttgattacgagagagagagaacaaaacaatcaacacaatggcttctgagcaaatgcctcgcagagagaacaacagcaatag

SEQ ID NO: 67335 - DNA, 105 bp, Glycine max
  Clone ID: 700843484H1
tatatattagggtagtggctcacttgatttccctgtctgttgctttgttcaaattatgtattttgaaccatgacaaaggatagaaaaaaaaatgctgtttatagt

SEQ ID NO: 67336 - DNA, 245 bp, Glycine max
  Clone ID: 700843485H1
actacaagtacttccttacaatcaaaaccaacaacaactatggcaagttatcaaaagcactacgatgatcagggtcgcaaggttgacgagtatggcaacgttgagaagcaaaccgacgaatacggcaaccctgttcatgctgctagtgtcacctatgtagccaccagaactgctgctggtggttacagtgatgacattaataagcaacatgataccaccaatgcctacggcgtagacactggtag

SEQ ID NO: 67337 - DNA, 246 bp, Glycine max
  Clone ID: 700843486H1
tgaacctaagtgagatacaaagaaaggaaataattgatctttgaaaatgcagggaggaaagaaagctggagagtccatcaaggaaacagctgcaaacattggtgcttctgccaaggctggcatggagaaaaccaaggccactgtccaggagaaggcagaaagaatgacggcacgtgatccgatgcaaaaggagttggcaacccagaagaaagaggcaaagatgagccaggcagagctggacaagca

SEQ ID NO: 67338 - DNA, 245 bp, Glycine max
  Clone ID: 700843487H1
gttgaaggcggcgtgagaagcatgttggacatcaacctattcagagaggagaagggccacaaccctgaattcatccgcgaatcccagcgccgtcgtttcgccagcgtcgaagtcgtcgacgaggtcatcaatctcgacaaagaatggcgaaagcgtcaattcgagttggagaatctccgcaaagaatttaacaagatcaacaaggaagtctccaaactcaagcgtgctggcgaggatgcaactaa

SEQ ID NO: 67339 - DNA, 243 bp, Glycine max
  Clone ID: 700843488H1
ttaccaacaacaactatggcaagttatcaaaagcactacgatgatcaggtccgcaaggttgacgagtatggcaacgttgagaagcaaaccgacgaatacggcaaccctgttcatgctgctagtgtcacctatgtagccaccagaactgctgctggtggttacagtgatgacattaataagcaacatgataccaccaatgcctacggcgtagacactggtagacagcattctagtggtggctac

SEQ ID NO: 67340 - DNA, 245 bp, Glycine max
  Clone ID: 700843489H1
ttagacacagattcttaccaaataaacaaacaaaaaaacacacacacacacactttccattttctgtggttcttcttctcacttctctaatcttctcccccctctgttactccccgcttctctgaatccctttctgttaatcatctgtctttcacctcgtgattccaaaaagattcaaactttgaaaatttttctcgaaagccaggtgttttcagaatcgagatccagtttctttttatcctttt

SEQ ID NO: 67341 - DNA, 238 bp, Glycine max
  Clone ID: 700843490H1
gtcttcttctcttgcggcgagggtttagcgcacttcttctagatttaaggaagatgggtaaggaaaaggttcacatcagtattgtggtcattggccatgtcgactctgggaaatccactaccactggtcacctgatttacaagcttggaggcattgacaagcgtgttattgagaggtttgagaaggaagctgctgagatgaacaagaggtctttcaagtatgcctgggtgctggacaa

SEQ ID NO: 67342 - DNA, 241 bp, Glycine max
  Clone ID: 700843491H1
ttcacaactactacaagtacttccttacaatcaaaaccaacaacaactatggcaagttatcaaaagcactacgatgatcagggtcgcaaggttgacgagtatggcaacgttgagaagcaaaccgacgaatacggcaaccctgttcatgctgctagtgtcacctatgtagccaccagaactgctgctggtggttacagtgatgacattaataagcaacatgataccaccaatgcctacggcg

SEQ ID NO: 67343 - DNA, 242 bp, Glycine max
  Clone ID: 700843492H1
gacgtcggcgggggccccggaaagagttatcttttctgtttaacagcctgcccaccctggaaacggctcagccggaggtagggtccagcggctggaagagcaccgcacgtcgcgtggtgtccggtgcgcccccggcggcccttgaaaatccggaggaccgagtgcctcccacgcccggtcgtactcataaccgcatcaggtctccaaggtgaacagcctctggtcgatggaacaatgtaggc

SEQ ID NO: 67344 - DNA, 248 bp, Glycine max
  Clone ID: 700843493H1
aaagttcctaacctcactctcttgcaagaggctgtacacgagcgaaggagaggccgcacgtgcgatccttccgaagcttctggtggttcagccgcgcgtgcgcccggagaagctgttgcaggcgaactgcaacgaagctctgtgcctcgcgaactccctcgaagaccagcgcgatggctacttccacaccgatttcttcccaaaaccgttgccacctcacgtcctcgtccagaaccgcctcccacgcg

SEQ ID NO: 67345 - DNA, 249 bp, Glycine max
  Clone ID: 700843494H1
ctcgagccgctcctggattgacatcagtgtcgcctcttaataatgcaggacaatgggccaatttacagcagcagaaacaaccattgttccccgctgctgttggtcagtctattgcacaacaatttacacccctattaggtggagcagcaaataatcagccatggaatgtaccttctgcacccacagtgcaagggcatccaagcacaccaatgccacatacgtacccttatgcttcaaagcctgccaatg

SEQ ID NO: 67346 - DNA, 250 bp, Glycine max
  Clone ID: 700843495H1
gtagggagagatctataccaagtcagcagaggataaaagatctgtggttgtcaacagaacccaattatcagaaaagaagacagattaagagctatagccaattttgacttcacttgcaattttaaacactttcagcattttttttccttagaaaatagtaatgaatgtgtatgatgatatgtgagcctggacttaaaaatctggctctccgttacattatgaaactatatatggcttttggataaatttt

SEQ ID NO: 67347 - DNA, 113 bp, Glycine max
  Clone ID: 700843496H1
ttaaaacaaaataaaaaaataaataaaaaactaaaataaaaaaacaaaaacaaaaattacaattattgggcctccccccttttctagcccccttcccccctgtgttttttttc

SEQ ID NO: 67348 - DNA, 223 bp, Glycine max
  Clone ID: 700843155H1
gcgtgataccgacataccgtgaacatgcccatacgtgatcacagagattctggtaaacacgtgcagtgtttcaaaagttactaacggacacagatccaagcagttgcgacttgcgagatgcattcgacgaagagtagcaccagcgataatatcaatatcaatatcaaatcaaaagataaagaaatccatcgatgctaccataactaccgaaagaagagaaagc

SEQ ID NO: 67349 - DNA, 223 bp, Glycine max
  Clone ID: 700843156H1
ttttgaaccaattatattttgaaaccatgaatattatgcctctttgttttcattgctgtcttccccccttcctccaattcaaaaaactggttatagttgtggtccttgaggattattatctcataaggttaggaaatcttatatacatgctgttttacagggaatgagtgatctgctatctccaatattgtttgtgatggatgatgaatcagaggcattttgg

SEQ ID NO: 67350 - DNA, 218 bp, Glycine max
  Clone ID: 700843157H1
ttcagatggaggtgattagaaatagaggcattcctgctgatgttcttgcaagcgagctcatgaatttgaaaaacatgttgctcatgaaagcctcaaggatcaaattcctgctgttgacaagttgtattctactaaggttaataagtttgcaaaaattatgaaccttagacaaagtgttgttggtgatcttaaacttcttactgatgggaagttgtatg

SEQ ID NO: 67351 - DNA, 219 bp, Glycine max
  Clone ID: 700843158H1
acaaaattgaactgtaattgtagtagtagacagtagcaccatgagccaggaacagctcaagaaacctcaaggggagcaggaccccatcaaatacggcgacgttttcaaagtctccgacgaactcgctttcaaacccatcgcgccaagagacgcagctctcatgcaagccacggagaaccaagcattgggccaaactcaaaaaggaggtcccgcctcggt

SEQ ID NO: 67352 - DNA, 218 bp, Glycine max
  Clone ID: 700843160H1
tggaggagctagtgtggcttagtcgctaaatttgttacgataaagaaattaattcagcaacaaatacaatgggttctcttatggcaggatgggactctctgatcttggatcctgaatcagctacaatagagaggaatcgatcactcaccaaagaagaaattaatgcttactggagagtaaagaaggagacagagttagaacacctcagagctatgtcc

SEQ ID NO: 67353 - DNA, 219 bp, Glycine max
  Clone ID: 700843161H1
actagcgatactgataagagagataccaacaagataagaaaaatagaagagttgagattccctttgaagaaaagatggcatcccataggcacagctatgaagctggtcagactaagggccgaactgaggagaagacgaaccagacgatgggcaatattggagagaaggctcaagctgcaaaggagaagacccaggacatggcccaagctgcaaaggaga

SEQ ID NO: 67354 - DNA, 222 bp, Glycine max
  Clone ID: 700843162H1
gctctcttctctcttccatctcctcggttaaactgaaccaattcaatattcccagctagttcttcattgaagaagctatggactttcttaactttatgcttaacttgttggtccctccaggcagtatgctcaccttggctttctcatggccagcactttgcttcctcaatgtttgtgagtggctttataatagtatatatggtgaggatatcgataataaag

SEQ ID NO: 67355 - DNA, 223 bp, Glycine max
  Clone ID: 700843163H1
gaaatccatcgatgctaccataactaccgaaagaagagaaagcgtccttgccaagacgctgtggctcccaccacggaagacgacaactgctgcaccaaggccgccgccgcatcacacggtttcatatccgttatagggcggcggcgcgtgatggaggatgcagtgaaggtggttaccggtttggtggcggcggaacaacactgtggcggttacgatttcttcg

SEQ ID NO: 67356 - DNA, 219 bp, Glycine max
  Clone ID: 700843165H1
aaaaaagaagaagaagaagaagagaggaaagtagtagaagaatacagggcagagctgcagccaacaccacccatggctgaatccgtttcagtggacatggagatgatctttctcggcggaaaggaacatcatattcaaactggctgtggttctgtatctgtaatagtctgtggggatcaagaaaaaccagctctgatcacttatccagatatagcgcta

SEQ ID NO: 67357 - DNA, 226 bp, Glycine max
  Clone ID: 700843166H1
aggttatgcaatattaattatttaggtacctaataaagtttgaagatggcacaagttgaactgcgagatgagcatgggaacccagttgaactcacagatgcatatgggaatccggtttggttaacggacgagaaaggcaaaccggtgcacctcaccggtgtggcaaccactgcacacaaatgtttgcaagagaatgacacaccacaagagcttcctcactccaaga

SEQ ID NO: 67358 - DNA, 223 bp, Glycine max
  unsure (1)..(223): unsure at all n locations
  Clone ID: 700843167H1
caaacacttaatttctcatctcatcatttctaattctacctctttgctcntgcactaacaatccaagatgaataccaacaacgacaccgaaaaaaaccaatcatttccagaagcacaaggagcatcatcatcatcatcttctccacccaatgttgggactgagaattggggaactcacataatgggcacccctgctgttccaagcagccacccagataacaaa

SEQ ID NO: 67359 - DNA, 219 bp, Glycine max
  Clone ID: 700843168H1
ctccaaccagaagcttgggtttgtcactctgtcttcaagattacaaactgaggagcaagaaatcaattgtggagatgaagttcaatgggaaagccaagggccagtggaatagagggcaaaagctgatgatgaatgggagcaagaaaacgtaacacgagatgaagaattagagagaagaaaactggtggctcaagggcaaaagacgaatagaggaaagca

SEQ ID NO: 67360 - DNA, 219 bp, Glycine max
  Clone ID: 700843169H1
gagcaatgcatcattgattccacccccacctggtttcagggctacttagatagaccttatatgggttctttagaggatgatgttagagataactctaattcacgatacagaagaagtagtgaacctggatttggaagaggacatggtggcaattcctggagggcagttccaaactggaattcaccagtaccaaatggatttgttcccttcccccctggg

SEQ ID NO: 67361 - DNA, 217 bp, Glycine max
  Clone ID: 700843170H1
atggcagaagatctggtgctggatactgcaatcagagactgggtgtgatccctctctctgtggttatggttctcattggggtgctccgttattttgtttctaagcttatgcactcttctcaaacccctgacgccaaaattgttaaagaagggcaagtgatcgttagagctcggaatttacgtgctgcggcgaattttattccttccaaggcttttcg

SEQ ID NO: 67362 - DNA, 216 bp, Glycine max
  Clone ID: 700843171H1
caagtacttccttacaatcaaaaccaacaacaactgatggcaagttatcaaaagcactacgatgatcagggtcgcaaggttgacgagtatggcaacgttgagaagcaaaccgacgaatacggcaaccctgttcatgctgctagtgtcacctatgtagccaccagaactgctgctggtggttacagtgatgacattaataagcaacatgataccacc

SEQ ID NO: 67363 - DNA, 216 bp, Glycine max
  Clone ID: 700843172H1
acaggaatctaatcctattgtggtggctttcgggatcggagtaatgaactacgaatacacccgactgtccctgttaatcattactccgatcccgaaggccaacacaataggatcagaataatgattaacagggacagtcggtggcattcgtatttcatagtcagaggtgaaattcttagatttatgaaagacgaacaactgcgaaacatttgccaa

SEQ ID NO: 67364 - DNA, 211 bp, Glycine max
  Clone ID: 700843173H1
gttggtgttagtcttggtgtagtgtagctagggagggatatatatctgagtaagatggcatcagagcttgaattgcccccaggcttcagattccatccaacggacgaggtgctggtgttgcactatctctgccgcaaatgcgcgtcgcagccaatcgccgttcccatcatcgccgaaatcgacctctacaaatacgacccctggggactta

SEQ ID NO: 67365 - DNA, 211 bp, Glycine max
  Clone ID: 700843175H1
ttataaccaaaaccaacaacaactatggcaagttatcagaagcactacgatgatcagggtcgcaaggtcgacgagtatggcaatgttgagaggcaaactgacgaatatggcaacccggttcatgccactagtgtcacttatgtagccaccaaaagtgttggtggctacaatgatgacgctaataagcaacatgatattactggtgtctatc

SEQ ID NO: 67366 - DNA, 213 bp, Glycine max
  Clone ID: 700843176H1
gcaatttgtaagaaagatgtttggagagttgaatgtggaatccttctggatttccgctcacagttatttgtaatagcatttttaatgagatgctcattagatatagctatgaaaaattactgcgccaggctaaagctccaagtatgtttttacaatccttcaaaaattttgtttctttgtgtgtgtatggtgatgataacttaattagtgttc

SEQ ID NO: 67367 - DNA, 214 bp, Glycine max
  Clone ID: 700843177H1
gcgtcacgcagttctccgatctcaccgaggacgagtttgagaagctctacactggcgtcaatggcggcttcccgtcatcgaataatgccgccggcggtattgcgccgccgttggaggtggacgggctgccggagaattttgattggagagagaatagagctgtcaccgaagttaagttacagggtagatgtggatcatgctgggctttcagcac

SEQ ID NO: 67368 - DNA, 216 bp, Glycine max
  Clone ID: 700843178H1
aaacaaattagcggaacgttgaattgaacaagaagagagaagaatgatgatgaatgttttagggttgagtctggtgttaacttcactggcagcagcaggaatattctctcccaatcccagaacagagaagcatggagccagcaccattgtcaaagaagggcatcgagttgtggtggttgaatgacgaccaaggtggccatcagaaaaccaaaatct

SEQ ID NO: 67369 - DNA, 215 bp, Glycine max
  Clone ID: 700843179H1
aaagactgagaagaggggttgaattaactgcttgcaagcatggcgaagagcaaggaagacataacctatgcaacatcacaagcaaggctttcagaagatgaagcagtgagagtggcctacgagcatggctcaccccttgaaggaggaaagattgctgactctcaaccagttgacttgttttcaagtgcacacaatatgccaaagagtggccaaac

SEQ ID NO: 67370 - DNA, 214 bp, Glycine max
  Clone ID: 700843180H1
atcggcatagcgtaccatggccatgggattgacctcacaactcctcctttctttgttcatcagtacccttcttcttcttcttccctcttccctttcacaatctaaccagttttgtgacgctggaacttcatccaagctgttgatcaagggcggcaccgttgtgaatgctcaccaccaacaggttgccgatgtctatgtcgaagatggtatcatt

SEQ ID NO: 67371 - DNA, 218 bp, Glycine max
  Clone ID: 700843181H1
ctcaatggaaatcacttgtgggttaactgtgagcagcagtactcatccaaaacgtaccaagcacccttctgccactccacccaatgctctagagccaacacccaccaatgcctcagttgccccgcggcatcaaggccagggtgccacaaaaacacgtgtggcctcatgtccactaatcccatcacccaacaaaccggtttaggtgaactaggagaaga

SEQ ID NO: 67372 - DNA, 216 bp, Glycine max
  Clone ID: 700843182H1
ggcgtcgtttcttcaatcgtttctggatccgaagaagaatggttcgccgctcagcacatgaaatccctctccaaacgcctccgcaaatatgggctccgatacgacgatttgtacgatccttactacgatctggatgtgaaggaggcgctgaatcggcttccgaaagatgtggtggacgctcgccacgcgcgtcttaaacgcgccatcgatctttcc

SEQ ID NO: 67373 - DNA, 215 bp, Glycine max
  Clone ID: 700843183H1
aagaatattgatattggagagtttgctgcaagtcatcttctggaactggacccaaagattcagtaacctatgttctgctttcaaatatgtatgcagtaactgggaaatggggttgtagggatcagacaaggcaaatgatgaaagatagaggtgttaaaaaagagcctggtcttagctggatagaggttaataactcagttcatgcattttttggt

SEQ ID NO: 67374 - DNA, 215 bp, Glycine max
  Clone ID: 700843184H1
gagatttcgtaagagaagcaatgcccaaaagtacaagaaatgtctttcttggtcaacaaccaaccacaactcaatcgaatgaattcttcaagactcctacatgaagggactctctttctgttcggagggaatcattctttctcaatcaatcatgcctcaactggataaatatttctttttgatactcgtgattttttgactatttatatcgtata

SEQ ID NO: 67375 - DNA, 210 bp, Glycine max
  Clone ID: 700843186H1
tttgttgaattcttcactgcaggagacttgattctcgagactacggtattgtctaatcctgatgcaagtcttgggttgaaagaacttttccaaaatcatgatatgagtgataaagtcctaagagcacatttttctgaagcgttacaattgtccaagcctacttgttcagatactgctcagatgatacctttagcagggggaatgatccaa

SEQ ID NO: 67376 - DNA, 207 bp, Glycine max
  Clone ID: 700843187H1
agccgaaaccgaatcgcgttcacgtttagtaaaaagttcttagattctctcgtttgtgcgttccagaaagcacaagaggaacacaaggaacgatgatgggttcaacggggagggtggcgaactcgggttccttccgccacagcttcgcggagaagaaggagaggctgctctccatgaagggcggcggttactcccaaatagggatag

SEQ ID NO: 67377 - DNA, 203 bp, Glycine max
  Clone ID: 700843191H1
acgatattggccaactgttatttgatcgtgttctgtgtgatgtcccatgcagtggagatggtacccttcgtaaggcacctgatctctggaggaaatggaacacagggatgggacatggtcttcacagcctacaagttttaattgctatgcgaggtttatctctacttaaaattggtggaagaatggtgtactcaacatgctca

SEQ ID NO: 67378 - DNA, 209 bp, Glycine max
  Clone ID: 700843193H1
aaagaaaggaaataattgatctttgaaaatgcagggaggaaagaaagctggagagtccatcaaggaaacagctgcaaacattggtgcttctgccaaggctggcatggagaaaaccaaggccactgtccaggagaaggcagaaagaatgacggcacgtgatccgatgcaaaaggagttggcaacccagaagaaagaggcaaagatgagcc

SEQ ID NO: 67379 - DNA, 207 bp, Glycine max
  Clone ID: 700843194H1
gtactcggaaaaacccaacccggcggagcttcttccgtcatgcaatccgccgccacaaggaatgaacaggctggtcttgtcggtcaccaggacgtcaccgacatcaccggcgaccatggcgtcacagtcacagaaactacattccatggaagacgcataataaccgaggctgttggtggccaggtagtggaacagtatgtggagcca

SEQ ID NO: 67380 - DNA, 211 bp, Glycine max
  Clone ID: 700843196H1
caaacacaagtacacaacacaacagcaacatatggcgtctgaacaattggctcgcagagagaacaccaccaccgagaaggagattcacgttgagaaacacagggttcccaagatggccacccacttcgagcaccttgcggagcagctaaagaatctgacatcaccgctgggaaggatactccgcaggtagcatagaagccttgcaagctgg

SEQ ID NO: 67381 - DNA, 214 bp, Glycine max
  Clone ID: 700843201H1
gcccaatgagctaagtgttttctacaagtttttgtatatctcacttggccttgctgggtttcttttggtcatgatcatagttcagaagcaagtgcatttctcacaaagtgagtatggtgtcagtgctggggttgtgctcttcttactatttcttcctcttgctgttgtgtttgttgaacaatataagatcagagagagtcaaaagctagcattc

SEQ ID NO: 67382 - DNA, 190 bp, Glycine max
  Clone ID: 700843202H1
acttccaattccacgaagcagtggaatgggagtacaaatctaaagttgccggcaaaatgcatgcttgtgggcacgacgcacatgtggctatgcttatcggcgctgccaagattttgaaaactcgagagcatttattaaagggaactgtaattctgttattccagccagcagaggaagctggtaatggagc

SEQ ID NO: 67383 - DNA, 284 bp, Glycine max
  Clone ID: 700843203H1
agctcgtgaatccggctcgaggaagatattgaattttgattctagcaagcagagcttttgtcaattttctattgaccttctcggtggaggaattttagtggacaaaactggagattggatcacacttatacaaaattctccaattagtaacttgttgagagttgctgcttggaagaaaggctgtttaatggttaaaattgtgatgtctgggaatgcagcagtcaaaaggagtgattgggcctcattggtacaagtgtttttaacaaacagcaacagtacagagc

SEQ ID NO: 67384 - DNA, 216 bp, Glycine max
  Clone ID: 700843204H1
tgactttgcaaagaagttggcttctctagctgatctctatgtgaatgatgcatttggcactgcccacagagctcatgcttctacagaaggagttgccaaatacttgaagccctctgttgcaggattcctaatgcagaaggagcttgattatctagttggggctgtgtcaaaccccaagagacaatttgctgatattgtcggtggatcgaaggtgtc

SEQ ID NO: 67385 - DNA, 197 bp, Glycine max
  Clone ID: 700843207H1
aacacgagatgctgttggcttgacatcaagttacactccaactccattgttggaatctggtttgcaaaaagacagagggttaattgtggagtattttggaaggatgtcttacgttgctcataacattaatcagccccaagagaaagatttgttggagggaaatttttcctttgacattaaatctcgctctagattgg

SEQ ID NO: 67386 - DNA, 231 bp, Glycine max
  Clone ID: 700843210H1
ctgacgagagataccccttattcagggtcaccgctgttagggttagggttagggttagggtttttccgcacattctttctctagcaatcttcttctaccactttcccctcattctctctcttagtctcttcaattgtaagttttttgcgctagggtttcctctgctatctcttgtactcgaagctcgtccctttttccggatctcgatctatggatatccgcaagagggga

SEQ ID NO: 67387 - DNA, 232 bp, Glycine max
  Clone ID: 700843211H1
gaaaacctaagcttagaattagaaacaaagaaaagaagaaaggaaagaattgatcgttgaaaatgcagggaggaaagaaagcgggagagtccattaaggaaacagctacaaacattggtgcttctgccaaggctggcatggagaagaccaaggccactgtccaagagaaggcagaaagaatgacagcacgtgatccggtgacaaaggtattggcaccccaaaagaaagaggc

SEQ ID NO: 67388 - DNA, 261 bp, Glycine max
  Clone ID: 700843212H1
ttggattgggtttgcagcagaagcagcgaaggatatggcgattcttccttctcttgcagttccttcaactcccatttctcggctgtttcaatgccaaccctgtcaattccatagatgcacagaactatatcttcctcatcaaacatattatactcgaactacatcaattaaagtatcaatggcagaccaaaatgagccgagtgaggttaatatgcagattgggatcatgagggagaaacttaaagaaacactgccagtctc

SEQ ID NO: 67389 - DNA, 274 bp, Glycine max
  Clone ID: 700843213H1
ttcggctagaggagcgactgcgtaaagctacccgttctgtccgttctgttgttctctaggcacgattacttctaattgaagaatatggagatgactttcatatgtacaagcttgtaagacaagaaagtgcaactgagatatgatatgccctaccactgattgagtaagcctgaagatggcacatttgtggagtaagatttcgttcataaaggacaattaggtcttgccatacaatagatttgacccagcaggcctgtttgaagattattaactt

SEQ ID NO: 67390 - DNA, 222 bp, Glycine max
  Clone ID: 700843214H1
cggctagggttttagcgcagcttcttctagatttaaggaagatgggtaaggaaaaggttcacatcagtattgtggttattggccatgttgactctgggaagtccactaccactggccacctgatctacaagcttggaggcattgacaagcgcgttattgagagatttgagaaggaagctgctgagatgaccaagaggtctttcaggtaacgctgggtgcttg

SEQ ID NO: 67391 - DNA, 166 bp, Glycine max
  Clone ID: 700843216H1
cgagcgaatcggctcaggtaattctagagctaatacgagtaacaaaccccgacttctggaagggatgcatttattagataaaaggtcaacacaggctctgctgttgctttgatgattcatgataactcgtcggatcgcacggcctttgtgccggcgacgcatcatt

SEQ ID NO: 67392 - DNA, 173 bp, Glycine max
  Clone ID: 700843217H1
gctcgaggtccttccctcaacaaaagcccaagcccaagcccaactcctgacccggcccaccaatccattcaccattccctcccgcagcccagcccaccgccccccgccgcgcctccccaccatccgcgccgcaattccccgcacaaagaaagaggcaacggtggagactgtgc

SEQ ID NO: 67393 - DNA, 146 bp, Glycine max
  Clone ID: 700843218H1
cagcacaagccaaagatgctacggtaggatcaatggagaaaactacaaaggatgctaaaggaagataaaaagcaggaaccaaaggtcaaacaaagaagggtggtggtgaggaacaaggaaaaagaagagaagaaacaggagaagaa

SEQ ID NO: 67394 - DNA, 149 bp, Glycine max
  Clone ID: 700843219H1
gctcgagtgaagagcatctactccgagcagtcatttgtgcgggtttgtttcctggacatatcctctgttgtgaacaaagataagtcaatagcgctgaaaacaatggaggatggtcaggttcttttgtattctagctctgtaaatgattc

SEQ ID NO: 67395 - DNA, 218 bp, Glycine max
  Clone ID: 700843220H1
gtcagagagcaagatgtcagcattgaatatgatgcatgtacaattccaaatgattgtggttcattggttgttgccaaggttggaaatcacaaacaaattgttggtttccatgttgctggaagcaaaggaagactgggatatgcttcattgataccatatgttgagccagttgttcaagctcaaagtgctgaagtttactttgacttcttccctgtgga

SEQ ID NO: 67396 - DNA, 187 bp, Glycine max
  Clone ID: 700843221H1
gctcacaatacggctcgaggtcctcttctcctcccacaggacgaggtgaatacagaaacaatgggaatcaggacgaacatcctagtggacttcctcgtccatatggtggtggacgaggacgtggtcgtggccgaggttcttataataatagaggagacaactccaataatgaaagacaggactctgg

SEQ ID NO: 67397 - DNA, 239 bp, Glycine max
  Clone ID: 700843223H1
gtcaaggtcctgaatctcacagagacagagagaatgagtacggtgggagaagggaaggtgagtagtaatggtcatggatgttgcaaatcagggccaggctatgcttccccactggaagccatttctggtcccagagagtctctcatttatgtaacctctgtctacacagggaccggaatagagaagccagattatttggcgacagtggatgtggatccaaactctccgaattatcccaa

SEQ ID NO: 67398 - DNA, 243 bp, Glycine max
  Clone ID: 700843225H1
acaaaattgaactgtaattgtagtagtagacagtagcaccatgagccaggaacagctcaagaaacctcaaggggagcaggaccccatcaaatacggcgacgttttcaaagtctccgacgaactcgctttcaaacccatcgcgccaagagacgcagctctcatgcaagccacggagaaccaagcattgggccaaactcaaaaaggaggtcccgctcggtgatgcaatcgccgaaacgaaaactc

SEQ ID NO: 67399 - DNA, 253 bp, Glycine max
  Clone ID: 700843226H1
gtttgccttgtgccgtttgtgttgttttcgggacgaagaagaagatggtgtcaggttctggacatctgcgcaaagcgggtggtggtggacgcgcgccaccacatgctgggtcgtctagcctccatcgtggcgaaggagcttctgaacggccagaaagtggtggtcgttcgctgtgaagagatttgcatctcgggcgggctggtgaggcagaagatgaaatacttgaggttccttcgcaaacgcatgaacacca

SEQ ID NO: 67400 - DNA, 243 bp, Glycine max
  Clone ID: 700843227H1
tgagaaaacaagaagtagtgagaagaagggagagaatggaggaaaaggcaaaagctgagcagaagaagataggtatgaccgagacttggttgaagaagcaccgtcttctttacaatggagccactagacaccctcttattattagcattcgcgatggcaccatcaacactgcttccttcaaaacatggctcgcacaggattacttgttcgttcgggcgtttgcccctttgtggctagtgtgct

SEQ ID NO: 67401 - DNA, 254 bp, Glycine max
  Clone ID: 700843228H1
taggcactgtggcagaagtcctaggagtgtaaaacagagacgcaaaatgaagacgatcttgtcgtctgagaccatgaatattcccgacggcgtgagcatcaaggttcacgctaaggttatcgaggttgagggccctcgtggaaaactcgtgcgagacttccaccatctgaacttggacttccaacttattaccgacgatggcggtaaaaggaagctcaagattgattcttggtttggttctcgtaaaacctccg

SEQ ID NO: 67402 - DNA, 266 bp, Glycine max
  Clone ID: 700843229H1
ttcggctcgaggtgtctccaaacttattggttcacctcctggatatgttggttacactgaaggtggtcaattgaccgaggcagttcggcgtcgtccttacactgttgtactgtttgatgagattgagaaagcccatcctgatgtgttcaacatgatgcttcagatcctggaagatggaagactaacagacagtaagggcagaacagtggatttccagaacacacttcttataatgacatcaatgttggaagcatgtgattgagaag

SEQ ID NO: 67403 - DNA, 264 bp, Glycine max
  Clone ID: 700843230H1
tcggctcgaggatctgtacagtcgtaatttcaatatgtttggtgtgcacacaacttgcgtttctgctggccgtttacctgctatattgattattaaatggccatttccaccagtggacacgggttgtattcatgttgtaatctaatctaggaagtgcttgcatatgtggctttggatgtgaaccaagtatatgtaattaattatgttagctgcttttaacagcttggatatatagatggtttgattaaaaaaaaaaacaaaggg

SEQ ID NO: 67404 - DNA, 252 bp, Glycine max
  Clone ID: 700843231H1
agaacatggaagtcctcagcagccacagtccctcttcgaacgaccccttcgatttcaatcgtgcaaggatttccccctatctcagcgctccttcttctcccaagcgttttggccaattttattacctaagcgccccctcaagcccttctaaagattttgatcttgcggctcacgatgatgatgccttcgcctttttcgttactggggaatccaagagccctcgatccgcggcagagcttttcgacggcggca

SEQ ID NO: 67405 - DNA, 179 bp, Glycine max
  Clone ID: 700843233H1
gttattttagttggcttagttgtggctgctgcaggggcataccttgtgtacaaatacagaataaggtcatatatggattctgaaatcagagccatcatggcacagtatatgcgcttggacagccaaggagaagttgtaaatcacgtgcacgaagaaagagcgtgaattgtcagtctctt

SEQ ID NO: 67406 - DNA, 239 bp, Glycine max
  Clone ID: 700843234H1
gacaaattagcggaacgttgaattgaacaagaagagagaagaatgatgatgaatgttttagggttgagtctggtgttaacttcactggcagcagcaggaatattctctcccaatcccagaacagagaagcatggagccagcaccagtgtcaaagaagggcatcgagttgtggtggttgaatacgaccaaggtggtcatcagaaaaccaagtctcaatatcccagagcaacccagcatca

SEQ ID NO: 67407 - DNA, 249 bp, Glycine max
  Clone ID: 700843235H1
tacacaactactacaagtacttccttacaatcaaaaccaacaacaactatggcaagttatcaaaagcactacgatgatcagggtcgcaaggttgacgagtatggcaacgttgagaagcaaaccgacgaatacggcaaccctgttcatgctgctagtgtcacctatgtagccaccagaactgctgctggtggttacagtgatgacattaataagcaacatgataccaccaatgcctacggcgtagacact

SEQ ID NO: 67408 - DNA, 239 bp, Glycine max
  Clone ID: 700843237H1
cgagagaagcttttgatgaagaagcaattgaaggaagaaaaaaagcgacggaaaatgttgaagaaaatggcagaatcagcaaaagatctaccaagtgaccatagtgaaaatgtggaagaagaaagtggtggtgcagcttctgttcctgttcccatgccagatttggccctgctgcttcttttgattctgataaccccatccaccggtatcgttatcttgcattcgtcatcaaatcagtg

SEQ ID NO: 67409 - DNA, 240 bp, Glycine max
  Clone ID: 700843238H1
gtgacatcaccgctgggaaggatactccgcagggtagcatagaagccttgcaagctggagagagggtcaaagatcatgcaggaaaagccatgggagatattggtggacgtgggaaagccagagagactcacgagctgggtgcacactttgaatccctggctgacaaagtaactgaccatgcagcagccaatgtagttggaaacaaagagagtcaaagagacctcgtggtggtgtcggtga

SEQ ID NO: 67410 - DNA, 258 bp, Glycine max
  Clone ID: 700843239H1
attcggctcgagacaaaactacccttttgcttttgctctttgttctttgccatggagtggccacaacaacaatggccttccatgatgatgagggtggtgataaaaagtcaccaaaaagtttgtttttgatgagcaactccacgagggttttcaagactgatgcaggggaaatgcgtgtgctgaaaagccatggtggtaggatattttataggcacatgcacattggcttcatctctatggaaccaaagtacttgtttg

SEQ ID NO: 67411 - DNA, 234 bp, Glycine max
  Clone ID: 700843240H1
attcgttcttttgctgaggcctctatggcaactgctttagagaaaaagtggccactttatcttagcaccaaaaatacaattctgaagaaatatgatggaagattcaaggacatatttcaagaagtttatgaggcaagctggaaatcaaagtttgaggctgctggtatatggtatgagcatcgactcattgatgatatggtggcgtatgcaacttaagagtgaaggaggttatgt

SEQ ID NO: 67412 - DNA, 241 bp, Glycine max
  Clone ID: 700843241H1
gataagtactactataatagtataactaaggaaggagtaagggtgatggtggttctgatctgacttttggcggtgtgggagtcacgagagcagcaaggggaagtcacaagagtcacaagaatggagagaggttcgggcaagctgagcaggaagaaaagtggtggtggaaacggacaggttctagacggttctaatattatggagttggttggaaaccagcaagttttcaccacttcgtgga

SEQ ID NO: 67413 - DNA, 233 bp, Glycine max
  Clone ID: 700843242H1
gacaggttcatcatcataaccttcaatgaaaagaaatggctgaggcaagcattggcagcaaaagcagcagatggtctttacagggaatgacagctctcgtcaccggtggatccaaaggaatcggatatgctatcgtggaggagttggcacagcttggagccactgtgcacacttgcgctcggaacgaagctgaactcaatgaatccttaaatgaatggaacacaaaaggatac

SEQ ID NO: 67414 - DNA, 190 bp, Glycine max
  Clone ID: 700843243H1
agagaaggccaaagactacactcttcaggctgcggagaaggccaagagtgcgggtggcacaacggcgagttacgtcggagagaaagcggtgcaggccaaggatgtcgccgtggagagtgggaagagtgcggctgggtatgctgccaaggtggctgctgatttgagggacaaggccaccgcggtggggtgg

SEQ ID NO: 67415 - DNA, 226 bp, Glycine max
  Clone ID: 700843244H1
ggagaggttggagcatttggtgaaggctgggttgaatgttgtagtgttggatagttctcaggggaactcaatttatcagttagagatggtgaagtatgtgaagagggtttaccctgagcttgatgtgattggggggaatgttgtgactatgtaccaggctgagaatctgattcaggctggggttgatgggttgagggttggaatggggtctgggtccatttgtact

SEQ ID NO: 67416 - DNA, 248 bp, Glycine max
  Clone ID: 700843245H1
gtcgaagcatctttctttctcttcctgcagaagctatccgtgttacttgttcccaagtctccaacaagcaaagtacatggttgatttggaaatccaggtccccagcgcattcgactcgtttgccgaggcgagagaatcagatgcccccggggcaaaggagtatgtgcacatacgaattcagcagaggaatggaaagaagagtctgacaacagtgcaagggctgaagaaggagttcagctacgagaaga

SEQ ID NO: 67417 - DNA, 217 bp, Glycine max
  Clone ID: 700843246H1
taagaatttccgtttgatgtgattctgaaccagcggagagatctcacgggtttattttacgttatgttgcgctgtggtggctgctgctgttggagcttttcttcatgttctgtggaacattgggggttttctcaccacgttggcttccattggaagcatggtttggttgctatctacaccccctgttgaagagcaaaagaggttgtctctgttgatg

SEQ ID NO: 67418 - DNA, 190 bp, Glycine max
  Clone ID: 700843248H1
ttaacagtaaagctaacttcaacacctttaattttctaaaagtaattcagcggctgaataccaagcggagaagatgagtcaggagcagccacggcgtcccaaaggccaaaaccccatcaaatacggcgacgtttttgtcgtctccggcgaccttgcacagaagcccgtcgcaccggaagatgctgccatg

SEQ ID NO: 67419 - DNA, 181 bp, Glycine max
  Clone ID: 700843249H1
gtgcttggcacgtgtttcactcttcctctgcgctctaaccctatccgctgctcacggaagcaccacggttcaagacatcgcgagaaagttgaaactcggggacaacgagcttctgcgcacggagaagaagttcaaggttttcatggagaattacgggaggagctactccacagaggaggag

SEQ ID NO: 67420 - DNA, 154 bp, Glycine max
  Clone ID: 700843250H1
tgaaatgcgatacttggtgtgaattgcagaatcccgtgaaccatcgagtctttgaacgcaagttgcgcccgaagccattaggccgagggcacgcctgcctgggtgtcacacatcgtttaaaaaaaaaaaaaaaaaaataaaacccaaaaaataa

SEQ ID NO: 67421 - DNA, 168 bp, Glycine max
  Clone ID: 700843254H1
tggtacccaccatgccgtggattcacccaaatcctagttggaatctacgaggagctgaaaagcagagtccctcaattggagattgtgtatgtgtcctctgatgaaaacttggatgcctttaatagcttctatggaaacatgccgtggcttgcaattccgttctccgat

SEQ ID NO: 67422 - DNA, 188 bp, Glycine max
  Clone ID: 700843255H1
atctaattaaaccagctttcatcagggtgtgggtgatttattgtaagctttttcttattatcttcgattgtgtttacacgtgtgtgttaaaggtggcgaatcctaaagagaagggaaatgaggttgatgacaataaggaattgatattattccatgaagggataatgaacaaccctacattgtcaagg

SEQ ID NO: 67423 - DNA, 233 bp, Glycine max
  Clone ID: 700843257H1
gtgagaaacaaagaaaggaaataattgatctttgaaaatgcagggaggaaagaaagctggagagtccatcaaggaaacagctgcaaacattggtgcttctgccaaggctggcatggagaaaaccaaggccactgtccaggagaaggcagaaagaatgacggcacgtgatccgatgcaaaaggagttggcaacccagaagaaagaggcaaagatgagccaggcagagctggaca

SEQ ID NO: 67424 - DNA, 235 bp, Glycine max
  Clone ID: 700843258H1
ttaccccaatccttttaccgattaacatcttagaagatttcacaaaacccttatctcttagttttcgacttttcggaaatatattagctgatgaattagtagttgttgttcttgtttctttagtacctttagtagttcctatacctgtcatgttccttggattattcacaagcggtattcaagctctcatttttgctactttagctgcggcttatataggtgaatccatggaagg

SEQ ID NO: 67425 - DNA, 237 bp, Glycine max
  Clone ID: 700843259H1
tgcatgtgtggaataaacactatggtttctgctgcaatggtgcctcaaccacaaacaacacctacaaagaattatgcttcttattagctatgcacttaaggaaatctaaataaatatttttcattctaggtgatgtatcatgtatgtaccaaaatattttggtacgtaagtcttttaaaaagtttgcatctcctctttggttttccttagttctgaaagttatctcctaagaagaca

SEQ ID NO: 67426 - DNA, 240 bp, Glycine max
  Clone ID: 700843261H1
gccttctcttcttcttctctctctcatggtcttgtagcggaaccgttctcgcttctcggagaacatggcctccatctcctccgctgaactcaattacctcgtttatcgctaccttcaagaatcaggtttcacgcatgctgcttttacttttggttatgaagctggtattaacaaatgctccattgatggaacatttggtgccgtcagtgctcttgttacatttgttcagaagggtctaca

SEQ ID NO: 67427 - DNA, 244 bp, Glycine max
  Clone ID: 700843262H1
gaccagcaaccccaccttgcatgcattcaagtacttcttctttgtaaccaaactaaaacctcttgatttattgtttcatttaatcaaatagtagtaataatatcaccaccgcaccgacatggagtagaagtagctcttcattcaaagagtaacgcctctccagagactagtacttcattttgcaccattgatatctcaaatggctcgtgcttcgactaactggctatcgttctctctctccccc

SEQ ID NO: 67428 - DNA, 173 bp, Glycine max
  Clone ID: 700843263H1
tacggtcagcaaggctatgctgtgacaaaggacaccatttcaagtgcagcgaaaaccgcttcggagaaaactgcgccagtggcagagaaggccaaagactacactcttcaggctgcggagaaggccaagagtgcgggtggcacaacggcgagttacgtcgcggagaaagcggt

SEQ ID NO: 67429 - DNA, 228 bp, Glycine max
  Clone ID: 700843266H1
tctaatattgcgaagataaggaggcatgtccgccagtcaaaatgcttgcaggacaagatgacagcaaaggaaagtgcaatttggttgggggtattaagtcgagaagaagctctcattaggcagcctagtagtgataatggtacatctggaataactggagtgccacctggtgttcctgttgagaataagcaagcagctactagtagtgctagcaactatgatgttgat

SEQ ID NO: 67430 - DNA, 219 bp, Glycine max
  Clone ID: 700843269H1
tccctcttccgtgcacagcttgaacacaccgcgtttcggagagagacgtcgcaatggggaggaggcctgcaaggtgttatcggcagataaaaaacaagccataccccaaatcacgcttttgccgtggtgttcctgatcctaagatcagaatttatgatgttggtatgaagaagaaaggtgttgatgagtttccttctgtgttcatcggttagctgggaa

SEQ ID NO: 67431 - DNA, 152 bp, Glycine max
  Clone ID: 700843270H1
ttgcaaacacaaacacagacccttcccttccttcctccctccctcattcccttcttcaatttcatcaacacaaccatcaatttcatcaaccatcgcataataatagtattatcatgatagccgtggcccgaaaggacatggaccggataaag

SEQ ID NO: 67432 - DNA, 138 bp, Glycine max
  Clone ID: 700843272H1
ggggtggtggctgcttcgcaagcttactaatttgtttatttccagaacatcatagttttcgcagcagcaaactaacaaattactcatatcatataataagatggcccgttctctctcgcaagccaaacgtattggtgt

SEQ ID NO: 67433 - DNA, 218 bp, Glycine max
  Clone ID: 700843273H1
cgagagaaagagagagagagagagaaaaatggctgatacaagtggaggagatgcagtgagaccggtggtaatatgtgataacaagtgtggctgcacagttccatgcactggtggttccacttgcaggtgcacaagtgtcggcatgacaactggaggcggtgatcacgtgacatgctcgtgcggagagtactgtgggtgcaatccatgctcatgtccca

SEQ ID NO: 67434 - DNA, 229 bp, Glycine max
  Clone ID: 700843274H1
tggcagttggaatcacctggagtcgctcaaaaaagaattccaaatgaggtttctggctggtcatccagagcatgaagggttggtcaagccagtgagttcactctctccaagcttctgtgattccttatcagatacaccattgtgcttggttttaggcagtgaaggaagtggcctttcagaaaaatccctgcagacatgtgagcttgtgagcattgcaatgactggagaa

SEQ ID NO: 67435 - DNA, 227 bp, Glycine max
  Clone ID: 700843275H1
ctcaccgaagatctcgccagaaagtacttccaacaactcatcagcgacgtcgacttctgtcacagccgcggcgtcacccaccgcgacctcaagccggagaatctcctcttagaccaaaacgaagacctcaaagtctccgacttcggactctccacgctgccggagcaggccgcgccgacggcatgctcgtaaccccgtgtgggaccctgcttacgttgcacccgagg

SEQ ID NO: 67436 - DNA, 231 bp, Glycine max
  Clone ID: 700843279H1
ctttgttcactcttcttctcttgcggctagggttttagcgcacttcttctagatttaaggaagatgggtaaggaaaaggttcacatcagtattgtggtcattggccatgtcgactctgggaaatccactaccactggtcacctgatttacaagcttggaggcattgacaagcgtgttattgagaggtttgagaaggaagctgctgagatgaacaagaggctttcaagtatg

SEQ ID NO: 67437 - DNA, 225 bp, Glycine max
  Clone ID: 700843281H1
gtgagagagattgtgaagtagaaatcggtgcaagaaattctccactttatctaaaaaaattcggtgagtttgtgaagacaaaaaatcactagctactcaaaaatggccacagtaggaaggaacgttgcagctcctttgctgtttcttaacttgatcatgtattttattgttcttggcttagctagttggtgcctcaacaggttcatcaatggccagacttaccac

SEQ ID NO: 67438 - DNA, 227 bp, Glycine max
  Clone ID: 700843282H1
ttttgaagaaaagatggcatcccataggcaaagctatgaagctggtcaaactaagggccgaactgaggaaaagacgaaccagacgatgggcaatattggagagaaggctcaagctgcaaaggagaagacccaggaaatggcccaagctgcaaaggagaagacccaacaaacagcccaagctgccaaggacaagacttgcgacacttcccaagcggcaaaggagaaga

SEQ ID NO: 67439 - DNA, 124 bp, Glycine max
  Clone ID: 700843284H1
atcaaatatgcagtatttacagacaacagtattcggttattggggaaaaatcaatatacttttaatgtcgaatcgggattaactaggacagaaatcaagcattgggtcgaactcttctttgatg

SEQ ID NO: 67440 - DNA, 144 bp, Glycine max
  Clone ID: 700843285H1
atagttacctgtttgcgatctcattacaatctccccagtttctaatctcagctaagaaaaaccaaaagatgtctctgattccaggtttcttcggtgcccgaaggagcaacgtcttcgatctattctcactcgacatttgggatc

SEQ ID NO: 67441 - DNA, 218 bp, Glycine max
  Clone ID: 700843287H1
ttcaaaccttgctctatactacacagtacacacactagaagaataatggcttccatcctccactactttttagccctctctctttcttgctcttttcttttcttcttatccgactcagtcacccctacaaaaccaataaaccttgttgttctacccgttcaaaatgatggttccacagggctccattgggccaacctccacaaaagaacccctctaat

SEQ ID NO: 67442 - DNA, 103 bp, Glycine max
  Clone ID: 700843288H1
cacaagctggtgcagtttggagagattcaggaaaaagttgtattgaacattttcacaagaggactttcttacagcttggtcaactcaggagcgtcctgcaaca

SEQ ID NO: 67443 - DNA, 223 bp, Glycine max
  Clone ID: 700843289H1
agataatcaacattttttttctatcaattcacacgacaaaatttagcagagttcaaaacaccaaccaagtaaagtaaagaagggaagatgtcactgataccaagtttcttcggtggtcgaaggagcaatgttttcgaccctttctcgctcgacgtatgggaccccttcaaggatttgtctttcccttctgctgaagattcagttttcttgaaaacacgagtgg

SEQ ID NO: 67444 - DNA, 218 bp, Glycine max
  Clone ID: 700843290H1
gaaatgttgagtgcaatcatttgtcaaacagtgggcaagatgagttggatagaacagagtctccagaagctgcttcaaattctagtgtgattacatctgttggttcttctgaagatactggatctgtaacagtggcaggatgtgttgaggaaagcaccgggggtgttgaaatgatgaacaatggctggtttgaggatagcacttatgggaatgattct

SEQ ID NO: 67445 - DNA, 173 bp, Glycine max
  Clone ID: 700843291H1
gaggaagaagccattaaattgatgatatggaacaacagtgaacccagtttcagcttaagagcaaaccgtgcaagaggtttttcaagagatgaccttgtgacacagcttaatgcattgaaggtcccacacaaactttcaccgcatttggatgaatttgttcgtatcaaaactgg

SEQ ID NO: 67446 - DNA, 224 bp, Glycine max
  Clone ID: 700843292H1
gcggcatcgttgtattgttcttacacatctttctctctctcactttcggtttctaaaccaaaaccctactcgagatcacaatcggatcgtaaacaaacagagaccagccatggacggtgattcctcttggagtgctcgactctcttccgcttccaggcgctaccaatccgctcttcaatctcgatcagacatgttcatgggttttgatgaaaatgatggggacg

SEQ ID NO: 67447 - DNA, 212 bp, Glycine max
  Clone ID: 700843293H1
tgttgttcctcgtcgtcaatttcgaatattgaaaggttttagttgttgatttggatcaagtctctagtcaacctttgaaattcttattccagttttcaaatatatagagccatgagttttgtttttcgaggaacaagagcagatattgaaaatgggtttccagggtttatacctgagaggcgagcattgcgggttcatgcaaaacgtctagt

SEQ ID NO: 67448 - DNA, 229 bp, Glycine max
  Clone ID: 700843294H1
taaagaggcttctgaatatgctagtgatgcggctcagaggaccaaagagtatgctggtgatgccaccaagagaagcaaagaggcttctgatcatgccaatgacatggctcggaagaccaaagactacgccagtgacactgctcagagaaccaaggaaaaactccaagacattgcatctgaggctggtcaatacagtacagagaaggccagagaaatgaaggatgcagca

SEQ ID NO: 67449 - DNA, 131 bp, Glycine max
  Clone ID: 700843295H1
cacagcagccgcgagctctcaaacacactctgctgttttccaaaaccctaatttctagaaaggtacggttttgcagagcctcgtcctcctctcacggtttcttctttttatcttctcacctttcttcttcc

SEQ ID NO: 67450 - DNA, 118 bp, Glycine max
  Clone ID: 700843296H1
gatcaccatttcacctattttggtctctctctctctctctctctcgcatcacaatttcatcaaaaccttttaagtcttcatagttttccttctatctttctttgtgaaaaaacaaaaa

SEQ ID NO: 67451 - DNA, 230 bp, Glycine max
  Clone ID: 700843301H1
tactactacaagtacttccttacaatcaaaaccaacaacaactatggcaagttatcaaaagcactacgatgatcagggtcgcaaggttgacgagtatggcaacgttgagaagcaaaccgacgaatacggcaaccctgttcatgctgctagtgtcacctatgtagccaccagaactgctgctggtggttacagtgatgacattaataagcaacatgataccaccaatgcct

SEQ ID NO: 67452 - DNA, 234 bp, Glycine max
  Clone ID: 700843302H1
gaagcatttgttacatttatgtaaccaaaggaaaatcaaaagtacgcaggaggtgaagctcggtaggcgaaatttcaacatgcaacgcagtgagaagcatgcgactaaaggagaagaaggtgaaggatttgatggttgacaagaagaggctagtggaggtgccgtacatggcgtccctggcccacacaatgactacactggtggcgaacaaggttgtggcggtgccggtggctg

SEQ ID NO: 67453 - DNA, 230 bp, Glycine max
  Clone ID: 700843303H1
tcacacaactactacaagtacttccttacaatcaaaaccaacaacaactatggcaagttatcaaaagcactacgatgatcagggtcgcaaggttgacgagtatggcaacgttgagaagcaaaccgacgaatacggcaaccctgttcatgctgctagtgtcacctatgtagccaccagaactgctgctggtggttacagtgatgacattaataagcaacatgataccacca

SEQ ID NO: 67454 - DNA, 225 bp, Glycine max
  Clone ID: 700843305H1
gttaagttcaagattggttgaaggatatttgatactcttctatcacggagttttgggacaccaatgatggaggctgaaatttccttgagaaagcaaatcgttttcgtggacatttgtgtggttttactatatttttcgccgccttgatattctctcttgtcatgatatttgaactaggattatttttagggggactgatagatagcttcatagatgatttaatac

SEQ ID NO: 67455 - DNA, 226 bp, Glycine max
  Clone ID: 700843306H1
ttccaaccttccctgttagatcgatgggtgatttaagagttaagaaaaagaaaggaagcaacaagaagaagcatgggtctgtgtctgtcaccgccatcaaatttcttcctaaggatttgcaagtggagatttttgccaaggtggccactcgctccgtatttgaccactgcatgattaaactatgttgcaaagaatttcttcgcgcagcgaggataattacgtgtac

SEQ ID NO: 67456 - DNA, 225 bp, Glycine max
  Clone ID: 700843308H1
aagagagagaaacccatttctagagagagaaactcgcagtcgcagacatgtcttccttcgatgccttcgccgacgacttgaacgtcaactcttcttccactcgccagcacgatcatgacgaggacaacttctctggctacggcggctactcctccttcaccggaggattctccgccgacggagatgtcgccgtcgatcactccgccgccgcgtcgccggagatct

SEQ ID NO: 67457 - DNA, 226 bp, Glycine max
  Clone ID: 700843309H1
ctatgatagctcagtggccatggttcccttcggaccttactggaagttcgtgaggaagctcatcatgaacgaccttctcaacgccaccactgtaaacaagttgaggcctttgaggacccaacagatccgcaagttccttagggttatggcccaaggcgcagaggcacagaagccccttgacttgaccgaggagcttctgaaatggaccaacagcaccatctccatg

SEQ ID NO: 67458 - DNA, 223 bp, Glycine max
  Clone ID: 700843311H1
tagctccaagcatgtttttacaatccttcaaaaattttgtttctttgtgtgtgtatggtgatgataacttaattagtgttcatgaatatgtcaagccttactttagtggttctaaattgaaaagctttctagctggtcataatatcaccattactgatggtattgacaaaactagtgcaactttgcaatttagaaagttagcagattgtgattttctcaagag

SEQ ID NO: 67459 - DNA, 225 bp, Glycine max
  Clone ID: 700843312H1
aacgatgtgggacgcttcgatgaagaagagggtgtcgtcaatgtggagcgccgcaagaaataaaataaaacgtcgtctatgatacaaatatagacgcagtttatattatagtatattatcatgatgtatgttgtttactttttggtttgcttctttacaaaaaatgtgtatgtgtatggttttgaagattggttctagactcgtgggaaccatttcagcaataaa

SEQ ID NO: 67460 - DNA, 223 bp, Glycine max
  Clone ID: 700843313H1
ttcagattgagatttgccaggaagaaaataaaattttggacaaaatgcatagacagaaggtggcagaggttgaaaagctcacccaaactgttagagaactagaagaggctgtccttgcaggtggtgcagctgcaaatgcagtgagggattatcagcggaaagttcaagaaatgaatgaagaaagaaaaactctagacagggagttggcccgtgccaaggtaac

SEQ ID NO: 67461 - DNA, 225 bp, Glycine max
  Clone ID: 700843314H1
atttttatttcctctgcatctcatattatactttttaaaagagttactgtttgtatgggactaatcagttactgtctttgacaaaacttagatacaatactatagttactttagttactgtctctaatcagaattggaattttacctcagtaatctatataataaaatctccattaaaagattttgcggattacaaaggtaaaacttcaattctgattagagaac

SEQ ID NO: 67462 - DNA, 226 bp, Glycine max
  Clone ID: 700843315H1
caaccagatagacacagtgaacgcgaagatggggcaaacatcaccgagcaagacctcttgcagataccaagaggagcccgcaccatcgaaggtctcagattgaacacaagggtgggaattcagtacgtggcggcgtggctcaccggaagcggttcggtgcctctatacaacctcatggaggatgatgccactgctgagatcagcagggtgcagaattggcagtggc

SEQ ID NO: 67463 - DNA, 231 bp, Glycine max
  Clone ID: 700843316H1
tgagaaacaaagaaaggaaataattgatctttgaaaagtaagaggagagaaagatggagaagcaacaacaacaagcaccatctaaggaaacaaaggcacagagtgatgaatcagttaaagaaagcagcactgaagggcttccaatggaggatagtccctatgtgaaatacaaggatttggaggattataagcgtcagggttatggtacacaaggtcatcaagaaccaaaga

SEQ ID NO: 67464 - DNA, 228 bp, Glycine max
  Clone ID: 700843317H1
ttaaaccaaaacagtaaagctaacttcaacacctttaattttctaaaagtaattcagcggctgaataccaagcggagaagatgagtcaggagcagccacggcgtcccaaaggccaaaaccccatcaaatacggcgacgtttttgtcgtctccggcgaccttgcacagaagcccgtcgcaccggaagatgctgccatgatgcaaagcgcggaaactcgagtgctcggac

SEQ ID NO: 67465 - DNA, 228 bp, Glycine max
  Clone ID: 700843318H1
ttagtggataacttttctgaggctacaagtattcctgctttcttcatttccttcatttttctgcccttagcaaccaattcaagtgaagcagtgtcagctataatttttgctagtcgtgataagaggcaaactgcctcattaactttctctgagctatatggagcagtgacaatgaataatgtgctttgcctatcagttttcttggcccttgtctatgcgaggggattg

SEQ ID NO: 67466 - DNA, 226 bp, Glycine max
  Clone ID: 700843319H1
cacaacacaatccaaaaaacacaacattctggagatgtgaatgacggtgatacctttcgtgcgttttcttttctgtcttcaccccaaaatcacactctctctctctagaaaatggcagcttgcatattcacggtggcacaggacgggaccgcagatttccaaacggtgcaggaggctatcgacgccgtgccgctgggcaacattcgccggacggtgattcgggtct

SEQ ID NO: 67467 - DNA, 226 bp, Glycine max
  Clone ID: 700843320H1
gttgaacaaaactcattttccaactacatttcttccaccaactcataaaatactcatatctgttcccaaaagcttgtttgtgagaatggcttcgggtgaaaagaaattcccacctcaacaacaacaaacacagcctgggaaggagcatgctatgaatccagtaccccaattcactagccctgactacaagccttcaaataaacttcaaggaaagatagcattagtg

SEQ ID NO: 67468 - DNA, 228 bp, Glycine max
  Clone ID: 700843321H1
gagaagaagaaaagaagaacaaagatgcaatcctcaaaggagaagatgaaaaacatggcaagtagctgccaaggaacaagtcgacatctataaagccaaaatagacgagaaggcagagaaagcaacggcaagaacagaagaggagagggtgatagcccatgagcacgcaaaggcaaaggaagctggagcaaagatggagctgcatgaagctaaagcaaggcatgcagc

SEQ ID NO: 67469 - DNA, 223 bp, Glycine max
  Clone ID: 700843322H1
gtttgcggcaggagaagagacatggaagattccgtctcggtgcggccttgcttcacccaaggcttccactacttcggcgtcttcgacggtcacggttgctctcatgttgcgactatgtgtaaggagcggctacacgagatcgtgaatgaagaaattgaaagcgcgcgcgagaatttggagtggaaactgacgatggagaacggattcgctcgcatggacgacg

SEQ ID NO: 67470 - DNA, 222 bp, Glycine max
  Clone ID: 700843323H1
ttaggcggtgggaaaagattgcacatctttattcaataaataccatgcttgggttaatgctgaattcttattggaaaaatgctttgtgggtaccttagatgaaggtcagtgaagatttcattctaataatgcataaacacatgaagatggcttggctccaatccgttatacctcttcatgggccctctctatttactgaccaggggccatcaagcaaggagg

SEQ ID NO: 67471 - DNA, 225 bp, Glycine max
  Clone ID: 700843324H1
gctcctggctggttactgtaggaagccactgaactgggtaaaaaaacaagagaactaaaaaaagcagctgaggcactacatcaggaagaaagaagtggttcaaagggtagaaagtttcgtaaaaatgtgaaggaagttgagaaggagttgtttcaattagaagaagatgtaaagcttcttgaagagatgtatccacaaggggaaaaggctgagacaacatgggct

SEQ ID NO: 67472 - DNA, 223 bp, Glycine max
  Clone ID: 700843326H1
ctaaaacagtaaagctaacttcaacacctttaattttctaaaagtaattcagcggctgaataccaagcggagaagatgagtcaggagcagccacggcgtcccaaaggccaaaaccccatcaaatacggcgacgtttttgtcgtctccggcgaccttgcacagaagcccgtcgcaccggaagatgctgccatgatgcaaagcgcggaaactcgagtgctcggac

SEQ ID NO: 67473 - DNA, 222 bp, Glycine max
  Clone ID: 700843327H1
tctacaagtacttccttacaatcaaaaccaacaacaactatggcaagttatcaaaagcactacgatgatcagggtcgcaaggttgacgagtatggcaacgttgagaagcaaaccgacgaatacggcaaccctgttcatgctgctagtgtcacctatgtagccaccagaactgctgctggtggttacagtgatgacattaataagcaacatgataccaccaat

SEQ ID NO: 67474 - DNA, 225 bp, Glycine max
  Clone ID: 700843328H1
atcagcagcaaggttatagctcagctgctagctatggtagcaacccagccccagagggccacactgccaattacggatcccaaggggattcaacccaagctccacctgcccagcctccaagtcaaggttatgggactggccaacaacctagcccaaatgctgccaactatgcaccacaagctcaaccaggttatggggtgcccccaacctcccagccggctactt

SEQ ID NO: 67475 - DNA, 223 bp, Glycine max
  Clone ID: 700843329H1
ttagaagataacaaaaagtggaaaaagcatgtaaatgcttataagaaaattaacagactgctggatactggaaggtatcgcaacattatggatatgaatgctggattgggtagttttgctgctgctattcaatcatccaagttatgggtcatgaatgttgtgcctactatagctgagaaaagtacattgggtgtcatatatgagagaggacttattggcatct

SEQ ID NO: 67476 - DNA, 225 bp, Glycine max
  Clone ID: 700843330H1
tacacaactactacaagtacttccttacaatcaaaaccaacaacaactatggcaagttatcaaaagcactacgatgatcagggtcgcaaggttgacgagtatggcaacgttgagaagcaaaccgacgaatacggcaaccctgttcatgctgctagtgtcacctatgtagccaccagaactgctgctggtggttacagtgatgacattaataagcaacatgatacc

SEQ ID NO: 67477 - DNA, 230 bp, Glycine max
  Clone ID: 700843332H1
gtgagcggttcgctgcccgcgacgttgtgagaagtccactgaaccttatcatttagagaaggagaaggagaatgagaagataccagaacctgtaaaaaagaacgcctcaggtggatcccttgatagagacattgctcttgcagaaatagagaaagagaaacgattgtctaatgtgaaggcttgggaagaaagtgaaaaatccaaagcagagaataaagcccaaaagcagc

SEQ ID NO: 67478 - DNA, 230 bp, Glycine max
  Clone ID: 700843333H1
gcttagaattagaaacaaagaaaagaagaaaggaaagaattgatcgttgaaaatgcagggaggaaagaaagcgggagagtccattaaggaaacagctacaaacattggtgcttctgccaaggctggcatggagaagaccaaggccactgtccaagagaaggcagaaagaatgacagcacgtgatccggtgcaaaaggagttggcaacccaaaagaaagaggcaaagatga

SEQ ID NO: 67479 - DNA, 226 bp, Glycine max
  Clone ID: 700843334H1
ggagctgtctgtgcaaatttgcgttgttcttcgcggcacacctcactcactgaacggtaagtaaggcggacaaggctgttacaatccgaacccgaaagttcatgaccaacaggcttctttccaggaagcagtttgtcgttgatgtccttcatccagggagggcaaatgtttccaaggctgaacttaaggagaagctggctaggatgtatgaagtgatagaccctaa

SEQ ID NO: 67480 - DNA, 226 bp, Glycine max
  Clone ID: 700843335H1
gtgttgtgtatgttgtgcaagacctggaacttcacctttctacgtacgtgtgctgttaggatgcagtgtgctttgatgatgctttgatgaatatgcagtgtgcttttttaagtctattattttcttttattctcttttcataaggactttagttcttccaaaaaaaaaaaaaaaaaaaaaaaaaaaaaaaaaaaagggggggccccccacttagggccctcccccc

SEQ ID NO: 67481 - DNA, 224 bp, Glycine max
  Clone ID: 700843338H1
ggcaggtacatcagtaatttctacaggataaagacgaaattcttgagagtgaattctttgacactaggcaggcatttctgagtctctgccagggaaatcattatcagtatgatactctaaggcgggccaagcattcctctatgatgattttgtatcatcttcataatccaactgcccctgcatttgttacaacatgtaatatttgtcgtcttgacatagaaaca

SEQ ID NO: 67482 - DNA, 223 bp, Glycine max
  Clone ID: 700843340H1
gtaagaagaggaaaagaaagtggtggtggtggtggtgttcagcatgagaggaagtttgaaacgaaagttgaagagaagaagggttttggggaaaaggctgaactcgagggaataacaagagtggtggtgggaagagagtgcagcaaagaggagaaacaaggaagaacaagagagaaagtagaggcagagaaagcaagatcaatggagaaaactagagatgaag

SEQ ID NO: 67483 - DNA, 225 bp, Glycine max
  Clone ID: 700843341H1
agatctcgtctttgaagtttctaagatgacttctccctacattaaatgtacagtctctttcttcatagcatttggaaatttggctgatgacaccatcaattttgaggcttttccccacaagctggtgcagtttggagagattcaggaaaaagttgtattgaaattttcacaagaggaatttcttacagcttggtcaactcaggtgcgtcctgcaacaactctgtt

SEQ ID NO: 67484 - DNA, 221 bp, Glycine max
  Clone ID: 700843342H1
caaaatggaaagaagctaccagatggcttgtgggaggaggtacttgaaggcttgcaatttgtagagaatgaaatgggagccattcttgggaatcctttaaaacatcttctcctctctgtgcgctctggtgctgcgatttccatgcctgggatgatggacacagttctcaacttaggattgaaagatgaagtggttgctgggttggcagcaaaaagtggaga

SEQ ID NO: 67485 - DNA, 222 bp, Glycine max
  Clone ID: 700843343H1
gatgctttgtataaaattcagactgattgattatgatgtcttttcacttgatacagaactggaggaagcgaaaatttcttccattgctacaagtgtggttgttgctactcaactcttctgaaaaacagtcacccttgtgtagaaggagcaatgcatcatgattgcccggtttgttttgagtatttgtttgaatcaagaaatgatgtcactgttatgccttgt

SEQ ID NO: 67486 - DNA, 223 bp, Glycine max
  Clone ID: 700843344H1
gggactgcggaggcggccaagaacaaggccgcagaggtaaaggacagagctgcagaaaccgcggaggcggccaagaacaagactgccgagactgctgaggcagcgaagcagaaaaccgcacaggcaaaggacaacgccaaggaaaatgtgagtggtgcagatgaaggagcaaggaggaaaatggaggacctaaggcttcgaggtaaagggtatggaagtcatg

SEQ ID NO: 67487 - DNA, 219 bp, Glycine max
  Clone ID: 700843345H1
gtgaagcgcaaacaattccagacggtggaggtgaaagtgaagatggactgcgaagggtgtgagagaaaggtgaagaaatcggtggagggaatgaaaggggtgacagaggtggaggtggatagaaaggccagcaaggtaactgtttccggctatgtggaaccctcaaaggtggtttctcgcatcgctcaccggactggtaagagagcggactatggccat

SEQ ID NO: 67488 - DNA, 221 bp, Glycine max
  Clone ID: 700843347H1
ggagaatcttacgatcatttcgacttggtaattataaggatttcttctgtactgcagcagctcaggcatcatatctgcagttctgcattatgatgccttatatcaatgaagttcgtgtgctggctttatcttgcataaattttggtggatacaagcttcatccatatcctctgttggatctttcaaaactcctgttcataaaggaatcagatttagaatcc

SEQ ID NO: 67489 - DNA, 226 bp, Glycine max
  Clone ID: 700843350H1
gttgcagaccgagctagctagctagcaagcaagcacagagatggaggcaaagcgaggccatgccctcatgtgcttggcacgtgtttcactcttcctctgcgctctaaccctatccgctgctcacggaagcaccacggttcaagacatcgcgagaaagttgaaactcggggacaacgagcttctgcgcacggagaagaagttcaaggttttcatggagaattacggg

SEQ ID NO: 67490 - DNA, 221 bp, Glycine max
  Clone ID: 700843351H1
cttcaccagccaattcccagtcccactcgaggttcttcgtctcgcattgatgccgatggttcaaactctaataggggtggtgctgctcgttctattggtactccatcaaggtcaccaggtttggcgtcgttgtatctttcaccgggtgtggtttctccacctaggagtttggctggcgtggattcggtggtttcgagtccttggtctaacaggcgagtctc

SEQ ID NO: 67491 - DNA, 223 bp, Glycine max
  Clone ID: 700843352H1
ataatggtgttctcacagttaccgttcccaaagaagaggttaagaagcctgatgttaaggccattgaaatctctggttaaacttgttgttgcttaaaatcgtgagctttgctttgtgtaataactaataagtattctctgtcatgtgttcctgtggtgaattttgagaattgaaagattttacattgtgaaatgtaactgcttaagtggtaattgtgtgcttg

SEQ ID NO: 67492 - DNA, 222 bp, Glycine max
  Clone ID: 700843353H1
ggcaaccctgttcatgctgctagtgtcacctatgtagccaccagaactgctgctggtggttacagtgatgacattaataagcaacatgataccaccaatgcctacggcgtagacactggtagacagcattctagtggtggctacgatgttgacactaataaacatcatggaactactggtggctataatgatgacaccaatagacatcatggaactaccggt

SEQ ID NO: 67493 - DNA, 223 bp, Glycine max
  Clone ID: 700843354H1
caaaaccaaaacagtaaagctaacttcaacacctttaattttctaaaagtaattcagcggctgaataccaagcggagaagatgagtcaggagcagccacggcgtcccaaaggccaaaaccccatcaaatacggcgacgtttttgtcgtctccggcgaccttgcacagaagcccgtcgcaccggaagatgctgccatgatgcaaagcgcggaaactcgagtgct

SEQ ID NO: 67494 - DNA, 222 bp, Glycine max
  Clone ID: 700843355H1
tctcgagcgaatcggctcgaggagaaaacaagaagtagtgaaatgaagggagagaatgtgtggaaaaggcaaaagctgtgcagaagaagataggtatgaccgagacttggttgaagaagcaccgtcttctttacaatggagccactagacaccctcttattattagcattcgcgatggcaccatcaacactgcttccttcaaaacatggctcgcacaggatt

SEQ ID NO: 67495 - DNA, 221 bp, Glycine max
  Clone ID: 700843357H1
gcatgcgactaaaggagaagaaggtgaaggatttgatggttgacaagaagaggctagtggaggtgccgtacatggcgtccctggcccacacaatgactacactggtggcgaacaaggttgtggcggtgccggtggctgcgccgccggggcaatggatcggagccggagggtccatgatcgttgagtctgataagcaaaccggaaccgtacggaagcactac

SEQ ID NO: 67496 - DNA, 218 bp, Glycine max
  Clone ID: 700843358H1
ggtttttgcttccctatccgctctctcttcttcacttcagtatggcggtggtaccttacaccaccggttctgcacctcttctttctcctccttctacttctagtgttgccacaaagctctactccggattgaaacttcaagctgcgagtcctttcggagctgcaaaacctaacgtaaccgctgagttttatggaaaagttcacaacactcttcactgt

SEQ ID NO: 67497 - DNA, 221 bp, Glycine max
  Clone ID: 700843359H1
tctttttttttaagttattagtttaacttccttttcatatttactacaattttgggtagccatgtcaagattcaacaaaaatgtttgcaatttaactgtgactacaattctttcatacttgttatgcaggcacaggattacttgttcgttcgggcgtttgtcccatttgtggctagtgtgctgataaaagcgtggaaggaatcagattgcagtggtgacat

SEQ ID NO: 67498 - DNA, 220 bp, Glycine max
  Clone ID: 700843360H1
gggagtttatttctggacaaattgctaccagtatcggttttttgcattccaagaagtgcttgattggcgagttttcatccttggagattttcttcgggtttcctttgttaattgcacttagggttcttatccgctttaatgatcagcacagggtacgtgatgctacattcttctgatacaggtgctgcatcttaagtgcacttgtacaatgcattgctga

SEQ ID NO: 67499 - DNA, 223 bp, Glycine max
  Clone ID: 700843361H1
gttacacgtacacgtcatgggcatcctgcttttctatgttatatagatttgtatgttactattgaaagtggtgatattatacataatgtgactattccaccaaaaagttttctattagttcaaaacaatcaatatgtaaaatcagaacaagtaattgccgagattcgcgcaggaacatacacttttaatttaaaagaaaaagttcgaaaacatgtctattctg

SEQ ID NO: 67500 - DNA, 222 bp, Glycine max
  Clone ID: 700843362H1
tctgaagatatttgcagctgaaggtgttgaattccttttatcttgtgaaggaaaggtacccgtatcagaatgcaatgggaaaattatatgcctatttttcactgcaaactggtgtagaccttgcagagctttcattccccgtcttgttgaactttatgaaacactgagaaagaggggaataaatctagagatcatcttcatctcctttgaccgtgatgagga

SEQ ID NO: 67501 - DNA, 225 bp, Glycine max
  Clone ID: 700843363H1
ttggaacaaggacaaagcatttaggaatgattatgaaaaaagaattttggcctcattggatatgcgacagttgagtcgggacggacggatgaggaacccggatgaaaagccaattctggaagaaccaaaacctgctgaagctgaagcattaccaaaaatggctgcaaaacagccaaaggaggaacctaagccttctccacaagaaactttgcctgctcagaaaga

SEQ ID NO: 67502 - DNA, 227 bp, Glycine max
  Clone ID: 700843364H1
gtaaatttgaagagtttgtttattgtgaaaaaaagaaaaatgcaggcagcaaagaaagccatagagacctttaaggaaaccgcagccaacattggcgcctctgccaagtctggcttggagaaaaccaaggccactatccaagagaagaatgagaagatgaatgcagaagatcaaactcaaatggatatggctaccaagaggaaagaagagaagatcaaccaggctga

SEQ ID NO: 67503 - DNA, 227 bp, Glycine max
  Clone ID: 700843365H1
ataaaattcttccaccaagttatgggtttccttgtgttgcttcttttctccctcttaggtctctcttctagttccagcatatcaactcatcgttccatattggaccttgacctaaccaagtttaccacacagaaacaggtgtcttcactgttccaactatggaagagtgagcatggacgtgtctaccataaccacgaagaagaggcaaagagacttgagattttcaa

SEQ ID NO: 67504 - DNA, 226 bp, Glycine max
  Clone ID: 700843366H1
tactcactcactcactcactcactcactcgcaagcaaaaagaaagaatcccaggcgaggagaaagatggaggggaaggagcaggatgtgtcgttgggagcgaacaagttccccgagagacagccgattgggacggcggcgcagagccaagacgacggcaaggactaccaggagccggcgccggcgccgctggttgacccgacggagtttacgtcatggtcgtttta

SEQ ID NO: 67505 - DNA, 224 bp, Glycine max
  unsure (1)..(224): unsure at all n locations
  Clone ID: 700843367H1
ggaaagaaagcgggagagtccattaaggaaacagctacaaacattggtgcttctgccaaggctggcatggagaagaccaaggccactgtccaagagaagaaagaatgacagcacgtgatccggtgcaaaaggagttggcaacccaaaagaaagaggcaaagatgaaccaggcggagctggacaagcaggcggcgcgtcagcantaacacggcggccaaacagtc

SEQ ID NO: 67506 - DNA, 220 bp, Glycine max
  Clone ID: 700843368H1
atcgaatcaaacccctctttctctccgaagctgcttttaatatcgtactggccttcgattgttctcctctttaatacatactgttctctcttcgatttgagggaacagtacaagagtctgagcatcggttaacccaactgcacaggtagtctccaaataatggagcctcatgatgagactggatgccaggctcctgaacgctccattctttgcattaata

SEQ ID NO: 67507 - DNA, 93 bp, Glycine max
  Clone ID: 700843369H1
gtggtaatttacaatgatttgtagttgtagttttctccatgaggtttctttcatttcatcaatgctttttgcaaattttagttatttcaatta

SEQ ID NO: 67508 - DNA, 222 bp, Glycine max
  Clone ID: 700843371H1
ggcggtgaactcttcgccaaagtcaacaaaggaaaactcaccgaagatctcgccagaaagtacttccaacaactcatcagcgccgtcgacttctgtcacagccgcggcgtcacccaccgcgacctcaagccggagaatctcctcttagaccaaaacgaagacctcaaagtctccgacttcggactctccacgctgccggagcagcgccgcgccgacggcatg

SEQ ID NO: 67509 - DNA, 221 bp, Glycine max
  Clone ID: 700843372H1
gtagcccctaggtgctctgaaataccagaacttgtggcacttaagaatatctttgacaagaaatatgggaaagattttgtatctgcagctgttgatctcagacctagctgcggtgtaaatcgccagttgattgaaaagctctcagtacgaacaccaccgggtgaagtaaaattgaaagtgttgaaggaaatagctaaggaacatcaaattgattgggatac

SEQ ID NO: 67510 - DNA, 219 bp, Glycine max
  Clone ID: 700843374H1
gtaattcaaccaagcgcgggtaaacggcgggagtaactatgactctcttaaggtagccaaatgcctcgtcatctaattagtgacgcgcatgaatggattaacgagattcccactgtccctgtctactatccagcgaaaccacagccaagggaacgggcttggcggaatcagcggggaaagaagaccctgttgagcttgactctagtccgactttgtgaa

SEQ ID NO: 67511 - DNA, 216 bp, Glycine max
  Clone ID: 700843375H1
tagacatcatggaactaccggtgtctatggtatagacaccgataggcaacaacatgggactactggtggctatgccggtgacactggtaggcaacatgggaacatcggtggcccattactatggaaccaacaccgcagacaccggtactggtcccagaagtggaaccacgggcggcaccggttatggaggcactggtggcactgattatggaacaa

SEQ ID NO: 67512 - DNA, 218 bp, Glycine max
  Clone ID: 700843376H1
taaactcgttccttggggcaatgccaaactccgtgccaacgccacctttgactgccagcatgggccatatgagtgcttgctgaacacagttgaagcctgtgcaattcacatctggcctcaactcagcaaacattttcctttcatctactgtgttgaggatctggtgtttcagagtaagcgtgaggaatgggaatcttgttttgagaaactggatcttg

SEQ ID NO: 67513 - DNA, 219 bp, Glycine max
  Clone ID: 700843377H1
ggttattgtcacacgggttgttccgtgagttcaacagtctctacatgtgaagaagttgagttcttggccacatgcaaacaatgtcatcatgccaaattacttactcaaaaagagtcctgtaatgaatctccaactagtcccttactcttacaaggacaagaacgtagcactttggcagttctgaaggggccaaggcctaaatgtgatggtcaaggattg

SEQ ID NO: 67514 - DNA, 221 bp, Glycine max
  Clone ID: 700843379H1
ttcatgtgtggaataaacactatggtttctgctgcaatggtgcctcaaccacaaacaacacctacaaagaattatgcttcttattagctatgcacttaaggaaatctaaataaatatttttcattctaggtgatgtatcatgtatgtaccaaaatattttggtacgtaagtcttttaaaaagtttgcatctcctctttggttttccttagttctgaaagtt

SEQ ID NO: 67515 - DNA, 223 bp, Glycine max
  Clone ID: 700843381H1
gtatatgtatggcatgcactagctggttattggggtggagtgaagccagcagcaaccggcatggaacattatgacactgccttggcatatccagtgcagtcaccaggcgtgctaggaaaccaaccagacattgtcatggacagcttggctgtacatggccttggcctagtgcacccaaagaaggttttcaatttctacaacgagctccatgcttacttagctt

SEQ ID NO: 67516 - DNA, 222 bp, Glycine max
  Clone ID: 700843383H1
atgaaaacagttgattcagtcaatttccgtcctgtgaccagccagaacggtagcttgaaggctgtgggcaaaacacatgggaaagtcaagacgagaagctctttaggtgggaaatttcttggggtgcactctcagactcgatcacatatgttggcttctgcaaattccagaagcaacttgaaggagccaagagtgagcagtgacatgtggttgcatgcagca

SEQ ID NO: 67517 - DNA, 221 bp, Glycine max
  Clone ID: 700843384H1
ttgcgtttcaatatggaaatccagataaagtatgcaagcctcttgttgaagcaaagaaggctggagaggacttggtggatgcttatgccaaatatgtcaaagagtactacattggaacttttggtactgatgtgcagacatatgatcagaagtacttgaaaagaactgctatgaacgaggacaattctgctcgattatggtggtttcaagtttgcactgaa

SEQ ID NO: 67518 - DNA, 221 bp, Glycine max
  Clone ID: 700843385H1
gtcttcaagaccgatttgaggttccagagtcacgctgttcttgcgcttcaggaagctgcggaggcttacttggtgggtttgtttgaggacaccaacttgtgtgcgattcacgccaagagggtgaccatcatgccaaaggacattcaactcgcacgccgcatccgtggagaacgtgcttaggctaataataagagtaataacgtagttgctgctgctttttt

SEQ ID NO: 67519 - DNA, 220 bp, Glycine max
  Clone ID: 700843386H1
taacaactctgttggctgatgggtgtccatatttgtatgctatggtcatgatagttcagtgtctacaataccaggtgattttgtcattggtgttaagttgacaaccataaacaatatgtgtgcatatgggcttaatcctggtatttcaggttctcgtcttttgggcaccattcctcagtccatttcacagcaaactgtttggaatcaaatggcaacagtg

SEQ ID NO: 67520 - DNA, 217 bp, Glycine max
  Clone ID: 700843388H1
cggcttatctgtcagtcgcgtcgggtctgccgctcagttgaaagctatgaaacaagtctgcggtagtttaaaacttgaattggcacaatatcgcgaagtcgccgcctttgctcaatttggctcagaccttgatgctgcgactcaggcattactcaatagaggtgcaaggcttacagaagtactgaaacaacctcaatatgcaccacttccaattgaa

SEQ ID NO: 67521 - DNA, 220 bp, Glycine max
  Clone ID: 700843389H1
agttcacctcaccttttcttttccctattagctccgaacccgaacctgtaaaatggatctactcgacccgaaccgtttccgcaaccgcaagcaacccaccctctcctcgcgggaacgcttcctcggcgtcccatcccacgcgccgcgactcgaaaacccttcctccgacgacgtcgttttctccaacaacgacgacctaatcgaagacgacgtcgttttc

SEQ ID NO: 67522 - DNA, 220 bp, Glycine max
  Clone ID: 700843390H1
gagcctcccataaacctaaaaccctaaatcacactaccatgagctggagaaccctagcttccacttcaagacacactatcaagagactcaatgcaatcctacgatccccttccaccaccatcccttcttcacgcgcctcctcctcactcttcctccacgtgccgttctccaccaccaccctacattccctgccacaacccaccaacgccctcatcgaccc

SEQ ID NO: 67523 - DNA, 218 bp, Glycine max
  Clone ID: 700843391H1
aaacagtaaagctaacttcaacacctttaattttctaaaagtaattcagcggctgaataccaagcggagaagatgagtcaggagcagccacggcgtcccaaaggccaaaaccccatcaaatacggcgacgtttttgtcgtctccggcgaccttgcacagaagcccgtcgcaccggaagatgctgccatgatgcaaagcgcggaaactcgagtgctcgg

SEQ ID NO: 67524 - DNA, 220 bp, Glycine max
  Clone ID: 700843393H1
tgaaaattcctcaatttctccgccaatcccaatctggttcctctcgcgctagggttttagtcttagctcactctcatcacaaccctaacaacacaaatttcccactttctagggtttcgtttcatccaccatggccgagtggcagtccctcctccaatcgattttcgtcggcctcattttctcctaccttctcgccaagctcatttccatcgtcgtttcc

SEQ ID NO: 67525 - DNA, 219 bp, Glycine max
  Clone ID: 700843394H1
tacacacaactacaagaaagaacttccttataaccaaaaccaacaacaactatggcaagttatcagaagcactacgatgatcagggtcgcaaggtcgacgagtatggcaatgttgagaggcaaactgacgaatatggcaacccggttcatgccactagtgtcacttatgtagccaccaaaagtgttggtggctacaatgatgacgctaataagcaacat

SEQ ID NO: 67526 - DNA, 224 bp, Glycine max
  Clone ID: 700843395H1
gtgaaaactagagatgaagctaaaggaagagaacaagctgaaaccaaaggtcaaaccaagaagggtggtggtgaggaacagggaagaagaagagaagaaataggagaagaaaataaacaatccagcctcgaagagatttctaaatgcagagctgaagctgaagagaaagttaaggagagaaaggagagatcaaaacaagcagcaagtaatgaagctgccaaaga

SEQ ID NO: 67527 - DNA, 226 bp, Glycine max
  Clone ID: 700843396H1
ggaaaagaaaataggacagaacatattgtataataataataataaaaaacaacagacaagtttgttgttcctgttctaatctctggaccatgtcatacaactgaatctaattgcaattcctgtgagccgtggcaaagcttttgaatttagtgcctctcctctctgtttacccatccagatattgcagatacagcaagatcatgagtgggacttcggaaaagaaact

SEQ ID NO: 67528 - DNA, 104 bp, Glycine max
  Clone ID: 700843402H1
ggagtccataagctcataacttatatttcgcaaaatagacacgctataaaatcttatataattcagccgcaatatgatcttgagaatgtcgttcgtctggagag

SEQ ID NO: 67529 - DNA, 243 bp, Glycine max
  Clone ID: 700843403H1
gataacttaattagtgttcatgaatatgtcaagccttactttagtggttctacattgaaaagctttctagctggtcataatatcaccattactgatggtattgacaaaactagtgcaactttgcaatttagacagttagcagattgtgattttctcaagagaaactttcagcagctgtctaatgttttgtgggtggctcctgaggacaaggcgagtttatggtcacaacttcactatgtttcg

SEQ ID NO: 67530 - DNA, 240 bp, Glycine max
  Clone ID: 700843404H1
ttcaaaagaaattacagaacaatgagcagatgtcaggtctgaagcatctagtacatggagcaaagcagcatcacaatgtgaaaaatgtatatgtatggcatgcactagctggttattggggtggagtgaagccagcagcaaccggcatggaacattatgacactgccttggcatatccagtgcagtcaccaagcgtgctaggaaaccaaccagacattgtcatggacagcttggctgtac

SEQ ID NO: 67531 - DNA, 249 bp, Glycine max
  Clone ID: 700843405H1
gttaagttcaagattggttgaaggatatttgatactcttctatcacggagttttgggacaccaatgatggaggctgaaatttccttgagaaagcaaatcgttttcgtggacatttgtgtggttttcttatatttttcgccgccttgatattctctcttgtcatgatatttgaactaggattatttttagggggactgatagatagcttcatagatgatttaatacgtataggtcgcactagtttatttc

SEQ ID NO: 67532 - DNA, 253 bp, Glycine max
  Clone ID: 700843406H1
gtataatcatattaaatattaaatagaaaaaatggcccgatcatttatcaaaggccaatcttcggtagaagagaaggttcctttggaacacttatttctatttcagtataccgggtctctttctttcatttcaaaaaatttatagaatttcgattttgaaatgaaagaaaagtgtggggataaatataaatgacaaaaagatattggaacataatcttggaagagatgatggaagcaggagttcattttggcc

SEQ ID NO: 67533 - DNA, 252 bp, Glycine max
  Clone ID: 700843407H1
gcctaaccaaacgggtttaaatgggtgctactttattccacaattctaaagcacggttccaacctcatgtgattagtttatccttgcagaccaatgataccacaagctactctgccaccagcatttccagtagttttgctaagctcatgaccaccttttccaaggtcatcagaatcagcatggacaacaacagcccttcctatgatggagtttggtccagtgagaggaatctgactgtcggtaatactgaag

SEQ ID NO: 67534 - DNA, 198 bp, Glycine max
  Clone ID: 700843408H1
cttaaagtgtcagataagaagatatttgatcctcaagacaagtttctgctcttatggaacaaactttttgttatctcatgcattttggccgtgtctatagatccactatttttttatctaccagtcattaatgattcatttcattgtcttggcatagaccgaaagttggcaacaatagttacaaccttaaggacaatg

SEQ ID NO: 67535 - DNA, 249 bp, Glycine max
  Clone ID: 700843409H1
tgtcaatctcgtaaatgtgttacgagaattgtatttgcacagtccagaggaagctcgccaattgagaaggaaagctctctctcgtattgagtggctgcaaaaagctgatgtgcctaccatagcacagattgaagagtttcattcgatgcagaggatgatgaatgctcctgattcaaatgataatattgatctactgttgagcattgatttgttgggtttacaaggagcaggtaaagcttttccaaacaa

SEQ ID NO: 67536 - DNA, 251 bp, Glycine max
  Clone ID: 700843410H1
cacaaaacttccacttgagagaaaagtagtgtattaagactacaaattttcaatttttcaatggcgtcgaggcaacaaaaagaggatcgagctgaggcagctgcgaaagttgctgcgaaagaactcgaacaactcaaccgagaaaaagaccgtgatttcagtgttggtgttgcagaccaacaccaacaagaagaacatcagttagatcaacaaaagcgtggtgtaatcggatccatgttcaaggcggtgca

SEQ ID NO: 67537 - DNA, 250 bp, Glycine max
  Clone ID: 700843411H1
tattgaattttgattctagcaagcagagcttttgtcaattttctattgaccttctcggtggaggaattttagtggacaaaactggagattggatcacacttatacaaaattctccaattagtaacttgttgagagttgctgcttggaagaaaggctgtttaatggttaagattgtgatgtctgggaatgcagcagtcaaaaggagtgattgggcctcattggtacaagtgtttttaacaaacagcaacag

SEQ ID NO: 67538 - DNA, 251 bp, Glycine max
  Clone ID: 700843412H1
gtttgatgctaaaataaaattccgattccgccgctaacaaaccctaataaagcttaattagcttggactgttaacttgactcagcgcaccacaaccccagtgtggttcccggaaccggaaggtactggcttggctaggttagttgcagcagcaacaccacacaacagccaaggtagggccagtttgaatatttgctcaacacaagcgtttactagggtttttttccgctgaaaagtacgtgtcccattctt

SEQ ID NO: 67539 - DNA, 249 bp, Glycine max
  Clone ID: 700843413H1
ttaacccatcagagcatgaggagagagaaacttccctgcccttccatttccctctcgattccttcgcctttgctttcgatcctttgctagaagagaaccttattcctctctgtctctcccccttcaaattcccttccttttcttccatattcactctctcttcctaaccgcccgatgcactttggttttgcaaactaattcgttggctaaattactccgattgtgaactggttctgttggaatatccaa

SEQ ID NO: 67540 - DNA, 254 bp, Glycine max
  Clone ID: 700843414H1
gtacccagagggtgctttcccatgcccatgccatgtgttatttcgtctgcatgcgcctaacttcactcttctttctcacccagccccatttcatttcttcgtaagagaaaaaaaaaaaaagaaaggagcatggaaggcatcaccgccagcgtgtgcaggggcgtaaaggcatattggaggaggaaggggtacaacaggctaaccgggtagggccggaggagaaggaaccgggtggaccttgggaccccccgaac

SEQ ID NO: 67541 - DNA, 258 bp, Glycine max
  Clone ID: 700843415H1
cattgattccgaagccccacataccatttgttattcatataaaaactcgttttccttctccatttctcgtcgcaccttttcctcttctctctctttctctctttctagttcgtgttcttcgtcgcaaatccgaagtaggatctctcttgttttttctctaggtttttcgcgatggcgtcgaagcgaattttgaaggagcttaaggatttgcagaaggatcctccaacatcttgcagtgccggtcctgttcatgaagat

SEQ ID NO: 67542 - DNA, 212 bp, Glycine max
  Clone ID: 700843417H1
gtcactacgagtgcctttcatgccaatcacttcacatatttgaatgccacaatatctaagtttggtcccagtgctgtttggcctggatgtcatcctgtagagtggcctcttccaggatgtattgttgaaccgatccctgatcccatttcagagtcacaagctctgtgtcatggtttggaaagtccaagttcggcttcagatcatcctgagga

SEQ ID NO: 67543 - DNA, 224 bp, Glycine max
  Clone ID: 700843418H1
gtgataagtgataactgcaaacttattgaatccttaaacaatatgaactctagaaataagagttagttgtttagttgcacattttctgacatggtgtttcaattggaccctttgtggcttattacagaagatacttagtgtccagtactcggtccccgattatgtacgagtttccatggaatgtagacatcttctatcacaaatatttgtggcaagtcctgaaa

SEQ ID NO: 67544 - DNA, 248 bp, Glycine max
  Clone ID: 700843419H1
gctgtgcattcctacactggcttaaattggtgggcagccatagttctaacaaccctgttgattcgaaccgctacagttccactcttaataaatcaacttaaggccacttctaaacttacgttaatgaggcctcatttggaagagataaagcaacaaatggagggactgactatggatcccgtagctgttgctaaaggtcagcagcagatgaagaaactatttaaggaatatggtgtgagtcttttacg

SEQ ID NO: 67545 - DNA, 224 bp, Glycine max
  unsure (1)..(224): unsure at all n locations
  Clone ID: 700843420H1
gtagaccaatggaagatacaaaactggaagctaaaggaagagaaaaagctgaaaccaaagagggtggtggtgaggaaaaaggaatgagaagagaagaaataggagaagaaaataaacaatccagcctggaagagatttttaagtacagagctgaagctcaacagacagttaaggagagaaacgagagagcaaaacaagcagcagaagctgccanagagagaaac

SEQ ID NO: 67546 - DNA, 250 bp, Glycine max
  Clone ID: 700843421H1
gttatggaggagccatcttctcttagctcggtggagaggaacgtccacatagcctctgttgtggaagccatggcggtggacactattctcgctgctgccaaatctctcatttgcttcttcattctgactggatctctgctgactgacgtcaatcattcagtgtccccaaaattgaccccaatggatggaagatttccttttgatgatctctgcaagggaaaacatacttaccttttaaacaaagatgcta

SEQ ID NO: 67547 - DNA, 249 bp, Glycine max
  Clone ID: 700843422H1
gtaagatggagaagcaacaacaacaagcaccatctaaggaaacaaaggcacagagtgatgaatcagttaaagaaagcagcactgaagggcttccaatggaggatagtccctatgtgaaatacaaggatttggaggattataagcgtcagggttatggtacacaaggtcatcaagaaccaaagacaggtcgtggagctggagccactgaagcacccactctctctggtgctgcagtttcatctgatgcac

SEQ ID NO: 67548 - DNA, 243 bp, Glycine max
  Clone ID: 700843423H1
tatccgcttttgtggaggagtattcatgtggatcagcctttgaacgagaggattactgatgatgttcttttgcaattgaccaacagggctcaaggtcatctccagtgcttgagcctggtcgagtgtaccaggataacagatgatggtttgaagcggattcttgaaggcaatcccaagttaaccaagttgagtgttccaggatgtacaagactcagtattgagggtattgtgactattttaaaa

SEQ ID NO: 67549 - DNA, 248 bp, Glycine max
  Clone ID: 700843424H1
cgacgaactcgctttcaaacccatcgcgccaagagacgcagctctcatgcaagccacggagaaccaagcattgggccaaactcaaaaaggaggtcccgcctcggtgatgcaatccgccgcaaccgaaaacctccgcgccggcgtcgtgggccgccaagacatctccgacgtggcgaggaacgaaggcgtgagcgtgaccgaaaccaaagtgggctgccaccgcgtcatcacggagttcgtgggaagac

SEQ ID NO: 67550 - DNA, 248 bp, Glycine max
  Clone ID: 700843425H1
ttagttttcgcagcagcaaactaacaaattactcatatcatataataagatggcccgttctctctcgcaagccaaacgtattggtgtccttgttgctcaatctatctccctaattcccgttcatcggcgaggttacgcagtggcatccgatgtatcggtaagagttggattgggtaatattgggcgaaggaatggaatcgtgggaggtgtagaagagaagcctgatacaagagatggttcaaaagcct

SEQ ID NO: 67551 - DNA, 249 bp, Glycine max
  Clone ID: 700843426H1
ttcctcttcagtgatctttgattagtactaagctaaaccatttcttattccctcaaaatcaaaacctttttctttctagctatttcccttttcaaatcatgccacctaacatcaccaccgttgttgccaatgtcaccaccgagcaattacccaaggctcgtggaggaagtgggcgtgccttcgtgacctttcttgctgggaacggtgattacgtaaagggtgtcgtgggtttggccaaaggactgagaa

SEQ ID NO: 67552 - DNA, 247 bp, Glycine max
  Clone ID: 700843427H1
cgaatatggcaacccggttcatgccactagtgtcacttatgttgccaccaaaagtgttggtggctacaatgatgacgctaataagcaacatgatattactggtgtctatcccgagaaagacaccggtagacatcattttggtcgtggttacgacggtgagtctaacaagcaacatgatgctactggtgtttatcccggaatagacattggtagagatcatgggactaccggtgtttatggcctaaac

SEQ ID NO: 67553 - DNA, 251 bp, Glycine max
  Clone ID: 700843428H1
atttgtacataaaggggcgtaaacccctttgaacctgttaaccacgcaaagtccaaaatctgcacaagaactcgccggagaaaaaaaaaagaatgatcgacagagggaaaacgtcggtcgccgtcgtgtactccgacggaaaccgcgagatcaatgtcggcacggtcgtggtggaccccacgctcaactttaagagcctcgtcacgctcctcagccagcagatcgggatctcgccgcaccagttatccgtc

SEQ ID NO: 67554 - DNA, 251 bp, Glycine max
  Clone ID: 700843429H1
gttgctagcaattttactgataacggatgcattgcgtgtatgtgtcacaacactgatggactttatagtgctaagcagactgctattgtgagagcttctgatgatttttaccctcgtgatcctgcttcccataccatccatatttcttctgttgcatacaactcactattccttggagaattcatgcaacctgactgggacatgtttcatagtttacacccagcagcagattatcatgctgcagctcgtgc

SEQ ID NO: 67555 - DNA, 257 bp, Glycine max
  Clone ID: 700843431H1
ggataaggcaaagttggctgaagacacgattccaggcttaactgacatagttggagatgaagataaagcaaaggagattgtggaagctgccaaagcctccatgggacaggatttgtccccagtggacttaatcaatgtccatcaatttgcacagagggtaatggacctatctgagtacagaaagaacttatatgattacctggttgctaaaatgaatgatattgcaccaaatttggccactttaattggtgaagttg

SEQ ID NO: 67556 - DNA, 259 bp, Glycine max
  Clone ID: 700843432H1
taatgctttcaccaatggataactctactccatctccatgcatcaccatgcatttcacatttgctgtgtcaatcaaccctaagggtttatcatcagattatatttcttaagaactcagtgtaggtaaattgattatcttgctctttttactagcatatgagaatcaccatgcaattttcctttcagtttgaacaattaattaatcggtgctttgaagtcaaaagggaatttctcagacggcaaggttccaaccttcatg

SEQ ID NO: 67557 - DNA, 250 bp, Glycine max
  Clone ID: 700843433H1
tctgtgctgggtctggtctcattctccttattaatttgtgttaagtagcaaaccaaaaccaaaccaattttgtggttgtgtgtgagtgagaaactgagaataattatcaattatgggcctctcaaatttcccaattagtgcatctgaaggggtgctacctgtgcttgtgataaacacggttttctcagtggctttgttgaagagcatgtttagatccatgctccaagtagtgtttggtggcagtgctgct

SEQ ID NO: 67558 - DNA, 252 bp, Glycine max
  Clone ID: 700843434H1
ctaagcgaggccatgccctcatgtgcttggcacgtgtttcactcttcctctgcgctctaaccctatccgctgctcacggaagcaccacggttcaagacatcgcgagaaagttgaaactcggggacaacgagcttctgcgcacggagaagaagttcaaggttttcatggagaattacgggaggagctactccacagaggaggagtatttgcgccgtttggggattttcgcccagaacatggtcagagcggcgg

SEQ ID NO: 67559 - DNA, 249 bp, Glycine max
  Clone ID: 700843435H1
tttttcacttcactttcccccaattttctttctcaacaatggacgcagcaacacaactccacttaccccctggattccgattccaccccaccgatgaagaactcgtcgttcactatctctgccgcaaatgcgcttcgcaagaaatcgcagttccaataatcgccgaaatcgatctctacaagtacgacccatgggaccttccaggaatggctttgtacggagcagaagagtggtattttttcacgccga

SEQ ID NO: 67560 - DNA, 246 bp, Glycine max
  Clone ID: 700843436H1
cttcgttcactcttcttctcttgcggctagggttttagcgcagttcttctagatttaaggaagatgggtaaggtaaaggttcacatcagtattgtggttattggccatgttgactctgggaagtccactaccactggccacctgatctacaagcttggaggcattgacaagcgtgttattgagagatttgagaaggaagctgctgagatgaacaagaggtctttcaagtatgcctgggtgcttgat

SEQ ID NO: 67561 - DNA, 221 bp, Glycine max
  Clone ID: 700843437H1
ataggcagattgggatatgcttcattgataccatatgttgagccagttgtgcaagctcacagtgctgaagtttactttgacttcttccctgtggaggttgatagtcaagagggagttgctcacattggtgaattgaaatctggtgtctatgttccactgcctacaaaaagcaatttggtggaaactcccaaggactggcaactggatctaccttgtgacaa

SEQ ID NO: 67562 - DNA, 250 bp, Glycine max
  Clone ID: 700843438H1
ggttgagactgttcttcagactcaggaaccagtgataaaaccaatttggaatacatttgctagcagtctcagtggaatttggaaaggtgtaggtgctgtgttttctcccatcacagctgaaatggaaccaatggaaataggtagcaagaatgaacacctatatgactgctatactctttctcgcatagaggcagtaccatcagtttcaggtgagcgtacatctcaaatccagagaaaggttaactgggtg

SEQ ID NO: 67563 - DNA, 250 bp, Glycine max
  Clone ID: 700843439H1
ttaactacaagaaagaacttccttataaccaaaaccaacaacaactatggcaagttatcagaagcactacgatgatcagggtcgcaaggtcgacgagtatggcaatgttgagaggcaaactgacgaatatggcaacccggttcatgccactagtgtcacttatgtagccaccaaaagtgttggtggctacaatgatgacgctaataagcaacatgatattactggtgtctatcccgagaaagacaccggt

SEQ ID NO: 67564 - DNA, 112 bp, Glycine max
  Clone ID: 700843440H1
gtaaaattatgggccactggtatggctacgttactcctaacgctgtttctgatttgttggacccacatcttgcaaagggagaggtcaccaaacgacttttcaggggccaaat

SEQ ID NO: 67565 - DNA, 249 bp, Glycine max
  Clone ID: 700843441H1
gtataatagagacaacctttttgccctcaaagtattctgtggagatgtcttcggcggtttataagaattgggttttcactgatcaagcactacctgcagatcttatcaagagaggagtggcaattaaggatccatcaaccccacatggagttcgtcttctgatagaggactatccttatgccgctgatggactggagatatgggctgcaattaagacatgggttcaagaatatgtgcccttgtactatg

SEQ ID NO: 67566 - DNA, 247 bp, Glycine max
  Clone ID: 700843442H1
ctctaatctatctccgctattcctcattctccttcttaaaattcatcttcaattcaattctctctctctgtctctgtcaccgttcctcattcgcatggtgaacgacaccgccgccgccgctaacaataacaccaccgccaccgccgccgcgaaagcaggttccggaggagtgaaatcgaacaaccataacctagaagaggagcattccaatttgaatggcgaggagcagatggctgaacaagtggag

SEQ ID NO: 67567 - DNA, 248 bp, Glycine max
  Clone ID: 700843443H1
gagattcttgagaaacaatgcctcaagcagaagcagaggaaggtcaagaaccaccaccgccatgtttctgagaaagaagaacaccaacaatattgaaacacaagaaccctcttcccccaaagtcacttgcatggggcaagtccgcgttaaacgctccgcctccaaaagggtgccctccgccggcgccggaactccgaccaagtttcggtgctgctcatgggtcccacatgctctgttttttcaccgtt

SEQ ID NO: 67568 - DNA, 247 bp, Glycine max
  Clone ID: 700843444H1
gtgaagggaatggtgccttgggaattagaatggctctccttggatcaaacataacaagcgaggttggactccgtttgctcctttgtcctcttggttccaacgttgtaattagaacagcatgctgtactgtgggagttgctttgcctgtgtactctacgttcaaggcaatagaaagtaaagatcaagatgctcagcataagtgtcttctctactgggcagcctatggttcattcagtctcgctgaagt

SEQ ID NO: 67569 - DNA, 232 bp, Glycine max
  Clone ID: 700842829H1
tgagcacacagcagaaaagaacaaacgcaggttcccaattgaaacggttctgaagaagtgaagaacaatctaggttttcctttctccgattcactcccagagcgaagaagccgccatgggaggcgaggagaagcggcaccagatgatgcagaacctcttcggagaccaatccgaggaggaggaagagctcgacgttgattctgagcacgaatcaaacccgcaactcaattac

SEQ ID NO: 67570 - DNA, 246 bp, Glycine max
  Clone ID: 700842832H1
cttgctctatactacacagtacacacactagaagaataatggcttccatcctccactactttttagccctctctctttcttgctcttttcttttcttcttatccgactcagtcacccctacaaaaccaataaaccttgttgttctacccgttcaaaatgatggttccacagggctccattggcccaacctccaaaaaagaacccctctaatgcaagtaccagtcctggtggacctcaatggaaatc

SEQ ID NO: 67571 - DNA, 243 bp, Glycine max
  Clone ID: 700842833H1
ctggaaaattcaacatcccaaagcattttctgtattttgttcaagattcggccctttcttcaaagatcacggttcatccagatggtcaaatgacatttatggggtgaatatcaatgaattagagagaagtcattcctccacattgaagaatcaatccaccttaactgctcctttaaagagtcctgagaaagtcaaactgaagccatcaccaaaaaagaccaagaaagtaggcagggagaggga

SEQ ID NO: 67572 - DNA, 122 bp, Glycine max
  Clone ID: 700842836H1
cagaggagatgtacagatggagaaggttgtcaacccggtctctgagtcatagttgaagtcggtttcagcgccacctaccacacacttcagtggtctctgggaggagtaaactccaaatctgc

SEQ ID NO: 67573 - DNA, 241 bp, Glycine max
  Clone ID: 700842837H1
cttcttcctccaagagaagtaaacaaccctcacattcaccacagcagcacacacagacaaagacaaccttgtttgtctccaatcaaaacctttcaagctggcgttcgaaaaccaagacaaccctgtccgagaaatcaagcccaagaataggagaatcatgggtgctggaggccctgatgatgaggacaacaacaggtggccaccgtggctgaagcctctgctaaaagaaagtttctttgtt

SEQ ID NO: 67574 - DNA, 240 bp, Glycine max
  Clone ID: 700842839H1
accatataagcaattgcatgggagtctggcgacaagcattaatcaagaagctcacgataactcaaaccaatcccagaacaagaaagagcttaatatggttagccaacctgtgttgaggaccagctccacctcttatgagaatgctcccaaatttacaactagagtctcttatcttgatcaaggcaacataataaggaatttgaatgaagaacctcgtcacactggaaacacaacaccacc

SEQ ID NO: 67575 - DNA, 238 bp, Glycine max
  Clone ID: 700842840H1
ccgaagtgctaccctgagatgccggctcggagcgagagggaagggtttgcggaggcggagctggggatgaagatagcgtgtggattggagatgatgtatcagcagcggaagcgagacggggaggaagggaaagggagctcttgggaggcgtttaggaagagtttggagaacagtgggtacttccaaggacagcttccgggttcctctgagtaccagagattgatgcagagtgctcagg

SEQ ID NO: 67576 - DNA, 237 bp, Glycine max
  Clone ID: 700842841H1
cttccttcaacacaaggttccaaggctcagccataagacgccacacctatgatagctcagtggccatggttcccttcggaccttactggaagttcgtgaggcagctcatcatgaacgaccttctcaacgccaccactgtaaacaagttgaggcctttgaggacccaacagatccgcaagttccttagggttatggcccaaggcgcagaggcacagaagccccttgacttgaccgagg

SEQ ID NO: 67577 - DNA, 122 bp, Glycine max
  Clone ID: 700842842H1
ggttttggttatagcgatgatgttgtttgccatgaactgtaactgcactagtgttggccacatgccttcaaccaaagaggaaggtcacgattttcaggcgtctaaagccaagaccacacaaa

SEQ ID NO: 67578 - DNA, 236 bp, Glycine max
  Clone ID: 700842846H1
cctagctagggtttctgagtttatgtggttgcgcctctgcctgtaagagtgaaaaaaccttctcttttccttctctcaagtctcaagagatttcatcatggctccaaagaaggacaaggctccaccaccttcctccaagcccgccaaatctggcggtggcaagcagaagaagaagaagtggagcaagggaaagcaaaaggagaaggtgaataacatggtgctgtttgatcagggca

SEQ ID NO: 67579 - DNA, 241 bp, Glycine max
  Clone ID: 700842847H1
gctgttgtcgctgctcatcctccataacctccgagctctacaccgaagaacgaagccatggggaagacacatggaatgggagctgctcgcaagctcaagtctcaccgcaggaggcaaaggtgggctgataagtcatacaagaaatcccatcttgggaatgaatggcagaaaccttttgccggttcatcccatgccaagggaattgtccttgaaaagataggtattgaagctaagcagccca

SEQ ID NO: 67580 - DNA, 245 bp, Glycine max
  Clone ID: 700842848H1
ggagattctttgtttgctaccttctctcggaaaaatggttacgttcaggtttcaccagtaccaggtggttgggagggctcgtcccacggaagcagatcagcaccccaagatctaccgaatgaagctctgggccaccaacgaggttcgcgccaagtccaagttctggtattttctgaggaaactgaaaaaggtgaagaagagcaatggccaagtgcttgccatcaacgagatttttgagaagaacc

SEQ ID NO: 67581 - DNA, 242 bp, Glycine max
  Clone ID: 700842849H1
ggaattttgggctagatgggctcatagggctctctggcatgcttcgctgtggcacatgcatgagtcccaccatcgaccaagagaaggacccttcgagcttaacgatgtatttgcaataatcaacgctgtccctgccatcgctctcctttcctatggtttctttaacaagggactggtccctggcctttgctttggtgcgggtcttggaattacggtctttgggatggcctacatgtttgtac

SEQ ID NO: 67582 - DNA, 157 bp, Glycine max
  Clone ID: 700842851H1
cgtgatccgatgcaaaaggagttggcaacccagaagaaagaggcaaagatgagccaggcagagctggacaagcaggcggcgcgtcagcataacacggcggcgaacaggctgccacggcagggcacatgggacaacccatggggaaccatcagacgtc

SEQ ID NO: 67583 - DNA, 239 bp, Glycine max
  Clone ID: 700842852H1
gtttcttatggttttaggtactattggggcagttggggaaggcttggccacccctctagtgttgtatatcagtagccgcatgatgaataacattggaatttcctctaacatggatggaaacactttcatccataacatcaataagaatgcagtggcttggttatatttggctggtgcctcttttggggtttgcttcctcgagggttattgttggacaagaacaagcgaaagacaagcgg

SEQ ID NO: 67584 - DNA, 237 bp, Glycine max
  Clone ID: 700842855H1
gacaccatcaattttgaggcttttccccacaagctggtgcagtttggagagattcaggaaaaagttgtattgaaattttcacaagaggaatttcttacagcttggtcaactcaggtgcgtcctgcaacaactctgttggctgatgggtgtccatatttgtatgctatggtgcatgatagttcagtgtctacaataccaggtgattttgtcattggtgttaagttgacaaccataaac

SEQ ID NO: 67585 - DNA, 233 bp, Glycine max
  Clone ID: 700842856H1
tcgcgatttcggaagggtcgtgtttccctgcttcagtttcagcttcggcttcgagaagcgtcgattgggtccttaagctgttccttctctgtttctgatgacaagcgcttggacaaatatgagctttgcaatcaaacatagggatatagagagggaatgggagaatcggggtggagttatggttatttttttaaaattattggagattcttgctcactctcagaagatgtatg

SEQ ID NO: 67586 - DNA, 231 bp, Glycine max
  Clone ID: 700842857H1
ggaattttgggctagatgggctcatagggctctctggcatgcttcgctgtggcacatgcatgagtcccaccatcgaccaagagaaggacccttcgagcttaacgatgtatttgcaataatcaacgctgtccctgccatcgctctcctttcctatggtttctttaacaagggactggtccctggcctttgctttggtgcgggtcttggaattacggtctttgggatggccta

SEQ ID NO: 67587 - DNA, 234 bp, Glycine max
  Clone ID: 700842859H1
cgtgatccgatgcaaaaggagttggcaacccagaagaaagaggcaaagatgagccaggcagagctggacaagcaggcggcgcgtcagcataacacggcggcgaacagagctgccacggcagggcacatgggacaacccatggggacccatcagacgtcagctatgcccggtcatggaaccggacagcccacgggccatgtcaccgagggagtggtgggctcacaccctattgga

SEQ ID NO: 67588 - DNA, 233 bp, Glycine max
  Clone ID: 700842860H1
gtttcttatggttttaggtactattggggcagttggggaaggcttggccacccctctagtgttgtatatcagtagccgcatgatgaataacattggaatttcctctaacatggatggaaacactttcatccataacatcaataagaatgcagtggcttggttatatttggctggtgcctcttttggggtttgcttcctcgagggttattgttggacaagaacaagcgacagac

SEQ ID NO: 67589 - DNA, 241 bp, Glycine max
  Clone ID: 700842863H1
gacaccatcaattttgaggcttttccccacaagctggtgcagtttggagagattcaggaaaaagttgtattgaaattttcacaagaggaatttcttacagcttggtcaactcaggtgcgtcctgcaacaactctgttggctgatgggtgtccatatttgtatgctatggtgcatgatagttcagtgtctacaataccaggtgattttgtcattggtgttaagttgacaaccataaacaata

SEQ ID NO: 67590 - DNA, 244 bp, Glycine max
  Clone ID: 700842864H1
tcgcgatttcggaagggtcgtgtttccctgcttcagtttcagcttcggcttcgagaagcgtcgattgggtccttaagctgttccttctctgtttctgatgacaagcgcttggacaaatatgagctttgcaatcaaacatagggatatagagagggaatgggagaatcggggtggagttatggttatttttttaaaattattggagattcttgctcactctcagaagatgtatgcctgctaatat

SEQ ID NO: 67591 - DNA, 242 bp, Glycine max
  Clone ID: 700842865H1
gcggtttcctttgttggtgttgctgggaactgttttcctggcatcagtttgtgtctcattaaaggtgagagaggatgagaataaccctttctacttgagaagctctaacagcttccaaactctctttgagaaccaaaacggtcgcattcgtctcctccagagattcaacaaaggctccccacaacttgagaagcttcgagactaccggattgtccagtttcagtcaaaacccaacacaatct

SEQ ID NO: 67592 - DNA, 106 bp, Glycine max
  Clone ID: 700842866H1
gtctgaaccttgtcagccgatcatttgaatttcaggctgatggctttgctaagaagcttggatatgcatctggactacgcggtggtcttgtgaaactacaggagga

SEQ ID NO: 67593 - DNA, 240 bp, Glycine max
  Clone ID: 700842867H1
gtgagaaacaaagaaaggaaataattgatctttgaaaatgcagggaggaaagaaagctggagagtccatcaaggaaacagctgcaaacattggtgcttctgccaaggctggcatggagaaaaccaaggccactgtccaggagaaggcagaaagaatgacggcacgtgatccgatgcaaaaggagttggcaacccagaagacagaggcaaagatgagccaggcagagctggacaagcaggc

SEQ ID NO: 67594 - DNA, 237 bp, Glycine max
  Clone ID: 700842868H1
aagagttgaaggaaatggctgaagcacaactacgagaccagcatggcaaccctgtcccactcaccgatcaatacggtaatccggttatcttaactgacgagcgcggtaatcccgtccaactcactggtgtcgctaccaccgctaccggcacagcaggttctgggtttgggtcctatggtaccggtgcttacggtggtggtgcaagtgcaaacccgttgcagatcttttggcaaccca

SEQ ID NO: 67595 - DNA, 237 bp, Glycine max
  Clone ID: 700842869H1
ggggatgcaaggcatagggatagggtgctgctcaaacgacgtcgtagggcagctggagctaagtcccactatgagcaactcctcttcctcgctatcgatggagctggacgagtcccccgagagccgaatccaacggctgatatcggagcaccccgtcatcatcttcacccgatcctcctgctgcatgtgccacgtcatgaagaagctcctcgccaccatcggcgtccaccccaccgt

SEQ ID NO: 67596 - DNA, 236 bp, Glycine max
  Clone ID: 700842870H1
caagaatcaaagaaaggggtggtggctgcttcgaaagcttaataatttgtttatttccagaacatcatagttttcgcagcagcaaactaacaaattactcatatcatataataagatggcccgttctctctcgcaagccaaacgtattggtgtccttgttgctcaatctatctccctaattcccgttcatcggcgaggttacgcagtggcatccgatgtatcggtaagagttggat

SEQ ID NO: 67597 - DNA, 236 bp, Glycine max
  Clone ID: 700842871H1
atttggttcttctcttctctctatcgtcttcttcctctgttccattagggtttccttttctccctcggagcttccaattgaaatccaattcctcaatacctccacactttctcgttcggatagctcgcgaattcgaaagacatcgacggctccacgtgatacgttttcttcctctctggttatcaatgttggctactagtgcagttgcatctttgcccgtattaccaccagtgaga

SEQ ID NO: 67598 - DNA, 234 bp, Glycine max
  Clone ID: 700842872H1
tgattattgtcttattattgatcttattattcttttattccactatttttgattttattggttacattgttgctattagggagattggaatggagctggagctcactcaaactacagcaccaagtccatgagagatgagggtggttatgaggtgattaagaaggccattgaaaagcttggattgaggcacaaggagcacattgcagcatatggagaaggcaacgagagacgtct

SEQ ID NO: 67599 - DNA, 232 bp, Glycine max
  Clone ID: 700842873H1
gatcttgtcaaacgaactggatctattgtggatgttcctgcgggaaaggctatgctagggcgtgtggtcgacgcgttgggagtacctattgatggaagaggggctctaagcgatcacgagcgaagacgtgtcgaagtgaaagcccctgggattattgaacgtaaatctgtgcacgagcctatgcaaacagggttaaaagcagtagatagcctggttcctataggccgtggtc

SEQ ID NO: 67600 - DNA, 227 bp, Glycine max
  Clone ID: 700842875H1
atttcattgtgatatcatttgtgtcactggatggactgccaccccaatgcaggatgttcaggttacaattgattggtttatttcctctcaggaatgtgttcccagaacctattgtgttttaaatccacaaaatccttttgtgttgaataggtggatggggaaactgactttcccccagggcacttcccgaagtgttaaaagaatgcctctttctatagggggaggag

SEQ ID NO: 67601 - DNA, 233 bp, Glycine max
  Clone ID: 700842876H1
cacaaacccgtccctcacactctccaaaccctagcggcactacacactagttctatcgctatctccccaagatgtcgagcgccgctcccgagcacagagaagaggaggaggcacccgccgttggcgacgacgaggacaccggagctcacgtcgctccaatcgtcaagctcgaggaggttgctgtcaccaccggcgaggaggacgaagatgcaatcctggatctcaaatcgaag

SEQ ID NO: 67602 - DNA, 232 bp, Glycine max
  Clone ID: 700842877H1
gtcatagggtactgttgtggttagggattcgaattttgattatcgaatcgcaaaattctgaatcaatcaatcagtaattagagccattaacgactgcaatggtctgcgagaagtgtgagaagaaattatcgcaggtgatagtaccagacaaatggaaagaaggggccagcaatactaccgagggtggtggccgcaagatcaacgagaacaagcttctctccaagaaaaacag

SEQ ID NO: 67603 - DNA, 236 bp, Glycine max
  Clone ID: 700842879H1
atcttcatatttcaaaacttttgcgaaatttctctcttcttcatcttgctcttacattctgcatggcagcctgggatttgtgtgaaaaatatatctcagttacacaggcttcaatcaaaaccatgtgttttaccaaatagttttggtccttgcttacaaagcttaagagcaacacaatcggttagctcaaaatgttggcccagtttacaatctcggaaacctcttcatatttgctt

SEQ ID NO: 67604 - DNA, 243 bp, Glycine max
  Clone ID: 700842880H1
ccatcacacctctcctcgttcacgctacccctttctgctcttcttctacctttcaagttttaaaagtataaagatggcagagacattcctatttacctcagagtcggtgaacgagggacaccctgacaagctctgcgaccaaatctccgatgctgtcctcgacgcttgcctcgagcaggacccagacagcaaaggtgcctgcgaaacatgcaccaaaaccaacttggtcatggtcttcggaga

SEQ ID NO: 67605 - DNA, 135 bp, Glycine max
  Clone ID: 700842884H1
tagcgatactgataagagagataccaacaagaaaagaaaaaaagaagagttgagattccctttgaagaaaagatggcatcccataggcaaagctatgaagctggtcaaactaagggccgaactgaggcaaagacg

SEQ ID NO: 67606 - DNA, 235 bp, Glycine max
  Clone ID: 700842885H1
cttcttctctggttgattcggatctagagtcttcagtttctccacgttgttcttcgctttcctgttttcaatttcgattctttcgttaatttaataagatgtttgggagggcaccgaagaagagcgataatacgaggtactacgaaatcctcggcgtctccaagaacgcttcgcaggatgatctgaagaaggcttacaagaaagccgccattaagaatcaccccgacaagggcgg

SEQ ID NO: 67607 - DNA, 234 bp, Glycine max
  Clone ID: 700842886H1
aagaggaaggtggaaaagccctagtgtgtgttctgctgagagtccgatacacatctaggaaacgctatctatggctttttacggaggcgcgaaacgcgtttgtgtatccataaggcactattgttcgaattcagcgtcagagaaggtgaatctgataaagcagctgagagagagaacaagcgcagctatgaaggacgtgaaagcggctctggtggattcgaattgggacataga

SEQ ID NO: 67608 - DNA, 232 bp, Glycine max
  Clone ID: 700842887H1
gcgaaaccaagacaaaagtggcatccttgttgttcgcttcaaattcaatgttctacagaggtaaatttgccgatggtggtgatgggcgtgaaatggctgcaaaacgccagcgcactgttgatccaggatcttcattctatggtgcttccacgggttccaattttatgtacaatccatctccttacggatatgtcagccaacctcctcctcctccaccttttcctgttgttcg

SEQ ID NO: 67609 - DNA, 233 bp, Glycine max
  Clone ID: 700842888H1
ctaggcagctgtcatatcatgaatttggcagaagggaaaagggtagatgttttcagtgtggccaactatttggtcttcatgcctaggtgcctcaaagaaagtatgataatcgtgattttgacgtgaaaaggggagattgttatttgttaaaaatggtaatcctaggaggaaggacagtgggaaggatatggctactatcagatcttggttccccaatttcaccattgtggaca

SEQ ID NO: 67610 - DNA, 228 bp, Glycine max
  Clone ID: 700842889H1
ggaattttgggctagatgggctcatagggctctctggcatgcttcgctgtggcacatgcatgagtcccaccatcgaccaagagaaggacccttcgagcttaacgatgtatttgcaataatcaacgctgtccctgccatcgctctcctttcctatggtttctttaacaagggactggtccctggcctttgctttggtgcgggtcttggaattacggtctttgggatggc

SEQ ID NO: 67611 - DNA, 229 bp, Glycine max
  Clone ID: 700842890H1
gttcgcgaactcctcaagtccgagaccggcgccgacctccgccgcgagtacgtgcgcggctcgccgaagtgctcggagcttctcgaggcgtggcagcttcgcgagggaaagcaaggcatgaactacgtgttcgacctaatctccgccattctcagccaaagtaaaggtaagtacaaccctagcgacatcgaaagcgtgaatattactaaggatttggataaattcgcgc

SEQ ID NO: 67612 - DNA, 231 bp, Glycine max
  Clone ID: 700842894H1
caagtccaacctacccctttttcttctcccaccaacttcaccgtcgtcttcctcgatcatgtctcacttcaagggcaagtaccatgatgagcttattgccaatgctgcttacattggcactcctggaaagggtattcttgctgctgatgagtcaacagggacaattggcaagcgtttggccagcatcagtgtagagaatgttgaatccaacaggcgtgctcttagggagct

SEQ ID NO: 67613 - DNA, 259 bp, Glycine max
  Clone ID: 700842901H1
cttttggccattgccagatattaaatcacctggggaccctacgtttatggaagcatttggtatgttttctcccacctatcattagctgaaatagctatgcattgtcccttttatgcaaaatgcaaatgttaagttaaagctatgccaaatatctttgtttttatgtagaattgagtccagaggaatctgaggatgttcttttcaaggaggcttggctgacatatttttggagaagagccaaagctcatggtatagagga

SEQ ID NO: 67614 - DNA, 254 bp, Glycine max
  Clone ID: 700842902H1
ctccaactcaactaagttcaactatattcatagagcatccactgaaggagttcctaatgagttggttgaagactcaaaatttgttcctttgaatgaggaggatcctatatatggtccacctgtaagtcatggccttattgttgttgggctttgaagcagatgaagctttgaagattcgacagcttttgaaagagttggatggtgaattcctaaaggtcatctattgtactgaagacatgattatgcgttcgctt

SEQ ID NO: 67615 - DNA, 161 bp, Glycine max
  Clone ID: 700842903H1
tccaaggactatgccggtgacactgctcagaaaaccaaggactatgccggtgacactgcacagacatcaaaggactatgccggtgatgctgctcagaaatcaaagggctatgtcggtgatgctgcacaaaagaccaaagaatatgttggtgatgctgctca

SEQ ID NO: 67616 - DNA, 249 bp, Glycine max
  Clone ID: 700842904H1
gaagacgttcttgcaatccacgccacacaagggtcgacccaacaacttggcccattggtcacagtcccacaattcctcttttcttgtgcaccttccttccttgttcaaaagggtcttcctagaaacactcaaggtgtggctgggttaggccatgcaccaatttctcttccaaaccaactcgcttcccactttggcctacaacgccaattcaccacttgcctttctcgctaccctacttcaaagggtgct

SEQ ID NO: 67617 - DNA, 247 bp, Glycine max
  Clone ID: 700842905H1
caagtacttccttacaatcaaaaccaacaacaactatggcaagttatcaaaagcactacgatgatcagggtcgcaaggttgacgagtatggcaacgttgagaagcaaaccgacgaatacggcaaccctgttcatgctgctagtgtcacctatgtagccaccagaactgctgctggtggttacagtgatgacattaataagcaacatgataccaccaatgcctacggcgtagacactggtagacagca

SEQ ID NO: 67618 - DNA, 246 bp, Glycine max
  Clone ID: 700842907H1
gcaacatgtcccccttttgttaggattaaggaagatgataaattgattcaagcagaaggtgtggattctctttcagaagatgaacttcgggaagattgtagagagcgaggcatgcttgggttgctttctgttgaagaaatgcgccaacagcttcgagattggctggacttatctctgaatcactctgttccatcatctcttttgatactttcaaggtcatttactgtgtctgggagattgaaacca

SEQ ID NO: 67619 - DNA, 246 bp, Glycine max
  Clone ID: 700842908H1
cttgtaacaacaactatggctagcgatggcagcgaagagttcaggctagtgtcaccggcgttcaaaaacggggggaagttaccgaggcactacaccgacgatggtcagggtacgaagaagaacatatcccctccattggagtggtataacctcccggaggggacgaagactcttgccctcgtggtggaggatattgatgcgaccgattctggtgggcccatggtgccatggactcactgggtcgtc

SEQ ID NO: 67620 - DNA, 242 bp, Glycine max
  Clone ID: 700842912H1
aaagaacttccttataaccaaaaccaacaacaactatggcaagttatcagaagcactacgatgatcagggtcgcaaggtcgacgagtatggcaatgttgagaggcaaactgacgaatatggcaacccggttcatgccactagtgtcacttatgtagccaccaaaagtgttggtggctacaatgatgacgctaataagcaacatgatattactggtgtctatcccgagaaagacaccggtaga

SEQ ID NO: 67621 - DNA, 245 bp, Glycine max
  Clone ID: 700842913H1
caaaatgttcttccattattgcaatctgcttttgatttaaatttcacaccccgtgagatatatagacttgatgaagttcatggactctattcaggcggaattaagctgccaacagatataatcagcaagattagtccactacccgtgcttaacgaaatcttccgaactgatggtgaacaggcccttaagtttcctcctcctaaagtaattcaagtgagtaagtctgcatggatgactgatgaaga

SEQ ID NO: 67622 - DNA, 244 bp, Glycine max
  Clone ID: 700842914H1
caaatatattctagcagtttgaaagttcatttttatggtagagttatctaggttaagatggtacttttgattaaatatgataattaatacttgcttttaaaaacagtaaataaataaaactatacgagtaaatggaaattaaagatattttgtttttttcaacatgacattgacagttatggttgatttgaatttgaagggattgaatttatttgcctttttttcaaatagatgaatgattggt

SEQ ID NO: 67623 - DNA, 249 bp, Glycine max
  Clone ID: 700842916H1
ttagcaactaactccaaaaaacctcactgtatggccatcaatctcagcaccactgcttctcttcactccaagccttcttttctgacccataaacacaacaacctcatcaaaatctaccatccttcttcctctttactcacaacatgtgctcaaacacaagggactgacactggagttacacaggaagatgcttctgctggtaatggtatatatgctaacaattcctacccactctttattattattatt

SEQ ID NO: 67624 - DNA, 253 bp, Glycine max
  Clone ID: 700842917H1
cctaagtgagatacaaagaaaggaaataattgatctttgaaaatgcagggaggaaagaaagctggagagtccatcaaggaaacagctgcaaacattggtgcttctgccaaggctggcatggagaaaaccaaggccactgtccaggagaaggcagaaagaatgacggcacgtgatccgatgcaaaaggagttggcaacccagaagaaagaggcaaagatgagccaggcagagctggacaagcaggcggcgcgtc

SEQ ID NO: 67625 - DNA, 252 bp, Glycine max
  Clone ID: 700842918H1
tgagtctctgtccgaagccacttgagagaaaatggcggtgcctctgctctcagatgtgatcgtgaagaagagggtaaagaagttcaagaggcctcagagtgacaggaaaatttccgtcaagggttttcctttcttttttgttttgaatttgaatatgggatatgatgacaaccttttgacacccagtcttacttgctccattggggtactatgactaactggcgcagaccaaagggtatcgattctcgtgtt

SEQ ID NO: 67626 - DNA, 248 bp, Glycine max
  Clone ID: 700842919H1
tatgggccagttgaagttgcattcactgtttatgaggattttgctcactacaaatcaggagtttacaaacacatcacaggttatgaactaggtggtcatgcagtaaagctaattggatggggaacaactgaagatggggaggattattggcttcttgcaaatcagtggaacagagaatggggagatgatggttacttcaagatccgaagcgggacaaacgaatgtgggattgaagaggatgtaactgc

SEQ ID NO: 67627 - DNA, 246 bp, Glycine max
  Clone ID: 700842920H1
tgggtttggacagggtatgggtgctactccaccactgttgcatcctcagtccatgatgaatcagggttttgatcctgcatttggccccatgggtagaatgggtagttacggaggctttcccggtgctccgacaccatcattctctgggattttgccttcattccctggtgttggaggtgttggtttgcctggagtggcacctcatgttaatccagccttttttggaagagggatgcctgttaatgg

SEQ ID NO: 67628 - DNA, 247 bp, Glycine max
  Clone ID: 700842921H1
aaacaaaacagtgtctttgattacgagagagagagaacaaaacaatcaacacaatggcttctgtgcaaatgcctcgcagagagaacaacagcaatagggtgatagagagagaggttcacgttgagacacacagaaaagagtccctccctgataagggaagggttgtgatagagagtgagaagaaggagaaagagagagagttggcttctgatagagccaggtctggaaatatagttaaggaggacaa

SEQ ID NO: 67629 - DNA, 242 bp, Glycine max
  Clone ID: 700842923H1
ctacgccaccgctccaccctcgccacgtaaggacattcccgtctggaagcttatgtgaagtgaccagatggaagaatgaaaatgaggagtacgatggtgtggggttttgtgctgtctattggtgcaggaatcgtggttaactgagttttattaagctactgaagtgaactatgtgcatatggcttctatgtgcatcagaaatagccaagtaaaattctgaagaactacttactaccttggta

SEQ ID NO: 67630 - DNA, 246 bp, Glycine max
  Clone ID: 700842924H1
aaattttctttgggaaatatttctatgaataataataatatgtctaatgagatggtcccaaaattagagcaagagatgaaggagttaaaggagaggcatgaggaagaaatgaaccaaatgaaagagttgaatcaaaagcaagttgcagaattgaccatcatgagacaaaatcaagaaaaaatgatgttagaattatctttcatgagggaagttatgtgtagatttatgcatacggagttaccaacg

SEQ ID NO: 67631 - DNA, 243 bp, Glycine max
  Clone ID: 700842925H1
gacattgccttggcaattggagaaaactttgagaaatacctgttatatgcaatgcctatgcttcagagtgccgcagagctctctgctcatacatctggtgctgatgacgatatgacagaatacactaattctttgagaaatggaattctagaggcatactcagggatcttccaagggtttaaaggttccccaaagacccagcttctgatgccatatgctcctcatgtgctgcaattcttggat

SEQ ID NO: 67632 - DNA, 242 bp, Glycine max
  Clone ID: 700842926H1
ctcgaatttcctcgaatcgcttaatttgtatttgattagttaaaccgcaacgcgcaatctcttttctcgaactggctaactctcaggcaagtggttcggacgctgattccagcaacaagcggctggtgctcgcactgtatgacgccctaaactccggcgactccgacgccgtcgtcaagatcgtcgccgccgacctcgagtggtggttccatggtccgccctcacaccagtttttgatgcgc

SEQ ID NO: 67633 - DNA, 154 bp, Glycine max
  unsure (1)..(154): unsure at all n locations
  Clone ID: 700842928H1
caagtttcatgctgcctgtgcggattcgtggcttacttcatggagaaccttttgtccagattgcaagcgtgatgctagaaccggcttaactgatccaccaccttcagagtccatcccctagctgaaacaaaacccagnatgtatggcatcctct

SEQ ID NO: 67634 - DNA, 242 bp, Glycine max
  Clone ID: 700842929H1
agatcatacatagtagtgttggtgggttgcaaagatgcttgggggtcttctccataggggtcataagataaaagggacagtggtgttgatgcgcaagaatgtgttggacgtgaatagcgtaaccagcgttgggggaattattggtcaaggtctcgacttagttggctcaacactcgatactcttactgccttcttgggccgatccgtgtctctccagcttattagtgctaccaaagctgatg

SEQ ID NO: 67635 - DNA, 242 bp, Glycine max
  Clone ID: 700842930H1
tagaagggaactaaaaaccaaaccagtgtctcactctcaccccagaaactcattgttgtgtggcacaacaaacttcaccaatgatgaatgccctcacaagctcttgttctaaggccatggtcgagaccctaggtcccttctctcccagagttcccctttgtgtttctgatagacccgaattctgcttcacccttcgttccaaaaatgagaaaaagggatggaatttattgctcctgaaactg

SEQ ID NO: 67636 - DNA, 244 bp, Glycine max
  Clone ID: 700842931H1
gataatttgaggggtgtgtctgaattttcactgaatttcttgaatgatagagtcaaggttcgagcatcttgtaatggcttgctgtgctgctctagtattcctgataagggtgtcttctatgtctgcaatccggttactcgcgagtacaggttgcttcccaagagtagggaaaggcatgtgactcgattttacccggatggcgaggctaccttggttggtttggcctgtgattcagcatatcgga

SEQ ID NO: 67637 - DNA, 247 bp, Glycine max
  Clone ID: 700842932H1
gctgaagaaaacctaagcttagaattagaaacaaagaaaagaagaaaggaaagaattgatcgttgaaaatgcagggaggaaagaaagcgggagagtccattaaggaaacagctacaaacattggtgcttctgccaaggctggcatggagaagaccaaggccactgtccaagagaaggcagaaagaatgacagcacgtgatccggtgcaaaaggagttggcaacccaaaagaaagaggcaaagatgaa

SEQ ID NO: 67638 - DNA, 255 bp, Glycine max
  Clone ID: 700842933H1
ggcttgactcctctcatcagaagaaagcgaaaaaagcaaaaatgcaatctatgtccctgacgctgagcaagaggctctccaattcaaagcctctcttcagaatctcttccagcctcgtcgctcacgcatcctccgccacaacctctccgccgccaccttcgccgccagtcccctctccctccgccctcaacagcctcctcaccgctccgtggtccgccactcagtcacgcggaatcacgctttccggatctgata

SEQ ID NO: 67639 - DNA, 250 bp, Glycine max
  Clone ID: 700842934H1
taatcggcccagtcagggaaggacaacacccaagggttcctgcagcagacaggggagaaggtgaagggcgcagccaaggtgctacagaggctgtgaagcaaacccttggcttgggcgagcatgatcaagacaaccgcagaaattactaatactataatttgaagtgctttcttgtagtagtggtttacgcagcatggctttttaaataagctgctattccctacactcctacctaaggagtgtactatta

SEQ ID NO: 67640 - DNA, 247 bp, Glycine max
  Clone ID: 700842936H1
ctagctagcaagcaagcacagagatggaggcaaagcgaggccatgccctcatgtgcttggcacgtgtttcactcttcctctgcgctctaaccctatccgctgctcacggaagcaccacggttcaagacatcgcgagatagttgaaactcggggacaacgagcttctgcgcacggagaagaagttcaaggttttcatggagaattacgggaggagctactccacagaggaggagtatttgcgccgttt

SEQ ID NO: 67641 - DNA, 245 bp, Glycine max
  Clone ID: 700842937H1
agataacctaagcttagaattagaaacaaagaaaagaagaaaggaaagaattgatcgttgaaaatgcagggaggaaagaaagcgggagagtccattaaggaaacagctacaaacattggtgcttctgccaaggctggcatggagaagaccaaggccactgtccaagagaaggcagaaagaatgacagcacgtgatccggtgcaaaaggagttggcaacccaaaagaaagaggcaaagatgaacca

SEQ ID NO: 67642 - DNA, 243 bp, Glycine max
  Clone ID: 700842938H1
ggcagtgttcttcatagttcagtgtgtcgtttaaaaatgtcgcagttgctggataaagccaagaacttcgtgtcggagaaggtaaatgatatggccaagccggaggcgagtgtcactgacgtggacttcaagcgcgtgagcaaagataatgtcgagtacttggccaaggtctctgttcgtaacccttattcaacttccatacccatttgtgagatcaactactctttcaaaagcgcatccagg

SEQ ID NO: 67643 - DNA, 241 bp, Glycine max
  Clone ID: 700842939H1
tggaggagctagtgtggcttagtcgctaaatttgttacgataaagaaattaattcagcaacaaatacaatgggttctcttatggcaggatgggactctctgatcttggatcctgaatcagctacaatagagaggaatcgatcactcaccaaagaagaaattaatgcttactggagagtaaagaaggagacagagttagaacacctcagagctatgtccaaactatctgagactattcaggc

SEQ ID NO: 67644 - DNA, 243 bp, Glycine max
  Clone ID: 700842940H1
cgaacaactcaaccgagaaaaagaccgtgatttcagttttggtgttgcagaccaacaccaacaagaagaacatcagttagatcaacaaaagcgtggtgtaatcggatccatgttcaaggcggtgcaagacacctacgagaacgccaaggaagctgtcgttggcaagaaagaaccttcgacgacgactaactcgtacagtaccagagaggttattcacgacgttgacattcaacccgatgacgc

SEQ ID NO: 67645 - DNA, 244 bp, Glycine max
  Clone ID: 700842941H1
gaagaagaaccgcaaaacgccgaaagcgaacaagaggtagaggaagaggaagaggaagaagatgaacaacaagaggagcaggaaccagaaactcgagaagggcaaccgggaccagaaaccctagaagctgcaaaccaagccgaagcgaacggtagcaatgaaggaaacaacgaagaagaggaagaggaggatctcacactagaagaagagcccgtggagaagcttctggaaccgttcacgaagg

SEQ ID NO: 67646 - DNA, 156 bp, Glycine max
  Clone ID: 700842943H1
ttaaaacgcactgaggcatacatactggtccagcttatatgcaccattcgcacagtatagtgatgtgcggttctaatgtaattttgtttttggttgttaaaaagcaaaaaaaaaaaaaaaagaaaaagaaaaaaaggagaaaaaaaaaaaagggta

SEQ ID NO: 67647 - DNA, 239 bp, Glycine max
  Clone ID: 700842945H1
gtttggaaggatgaatgaggctagccacccagactccatcagagctgccttggctgaattcctctccacttgcatctttgtctttgctggagaaggctctgcccttgctttgcgacaaatttacaaggaaccagggtcatcagcgggtgagctagtggtaattgcactagctcatgcatttgctctatttgctgctatttctgctagcatgcatgtgtctggtggacacgtcaaccctg

SEQ ID NO: 67648 - DNA, 239 bp, Glycine max
  Clone ID: 700842946H1
ctcgagccgggaatataagaactaagatggattggatcggagcgtaccgcggaggccagagaagcagggactggtgcgacccttcatcaccattcactgatttgtgggaccctacgtcgtgtcggtgacgctgatgatatcacctcctctctcgcccatgctcacgttgactggcgtgagactgataaagctcatatcttccgtgctgatcttccaggggtgaagaaagaggatctgaa

SEQ ID NO: 67649 - DNA, 243 bp, Glycine max
  Clone ID: 700842952H1
ggcctatgaccttttcacctcagaagggtaccccacagtgacacagccacctgctccttggaacaaccctagaggccaattcagtgcagaacaaggggtcacggaatggaacaaaactttaggggtgcccttaaacaaactgaatctgggtttgcccttttatggttacaagtggagtttgtcagattctaataaaaatggactctttgcaccggccaagcagggacttggggcagtgaagta

SEQ ID NO: 67650 - DNA, 244 bp, Glycine max
  Clone ID: 700842953H1
accacgtgggtcccacaccgatggaagctcagaagaaaacccaaacccaaaccaaactcacccgaacccaatcctctctgcttcggtgttcctctcccaccaccaccacgcgttcttccgttcatagcctctcttcggtcaacgaagacttttttccagaagaagaaaagtcctcctccgatacgagcagcaagagaaagaagaagaataataaaccaattagacttagacccggttcgatccg

SEQ ID NO: 67651 - DNA, 242 bp, Glycine max
  Clone ID: 700842954H1
acaaaaatggtgctaacttcaatttcaatagtctcttcttcatcttcattcctctcagattctccttccacttcttcccctaccgccagaatcagaccattcttcttccattccacaaaacgtaccacaccctttgtgttccccagagcacaccttcccagtgctaccctcagagcctcttcttcttccgtttccacgccgcatgaaaatgggtcgccggaacagttcttgaagagcaattc

SEQ ID NO: 67652 - DNA, 241 bp, Glycine max
  Clone ID: 700842955H1
tattcgttcttcttctttcaccaacaacaaagaaaacagagaaactttcatttcatatattttcatcatcgcagcaaaggaatcaatcaatcaaaccatggcaggcttcagtggcgacgaaaccgctcctttcttcggcttcctcggtgccgctgcggccctcgtcttctcctgtatgggagcggcgtacggaacggcaaagagtggggtgggggtggcgtcgatgggcgtgatgaggccg

SEQ ID NO: 67653 - DNA, 241 bp, Glycine max
  Clone ID: 700842956H1
gtttttctctgttcatgcaagggctgccacagaaaaaaccatttatgattttactgtcaaggatattgacagaaaggatgtttctcttagcaagtttaaggggaaggttctattgattgtcaatgttgcttcacgatgtggtttgacatcatcaaattactcggagctgtcacgcttgtatgaaaaatataagaatcaaggtttggagattttagctttcccctgcaatcaatttggtatg

SEQ ID NO: 67654 - DNA, 240 bp, Glycine max
  Clone ID: 700842957H1
gctctgcctggtgccaatgttgccactggacctgcacttcctcaacaccttgctgtgcatccctattcacagcctactcttcctctgggacattttgctaatatgattggctatcaattcttgcctcagagctatacctacatgccatcagcatttcagcaggcttttcctggaaatagcacataccaccaatctctggcagccatgcttccacaatataaaaatagcatttctgtcagt

SEQ ID NO: 67655 - DNA, 240 bp, Glycine max
  Clone ID: 700842958H1
ggcggagatagaaaaagagagaggtagagaaaagcgaagagtctctctcttcctatctctctctttcaatgtcagggcacaaatcttccacctctactactaaataatcttccttctaacctatatcacaaggaaacgcgaaaaaagaaattaacaaaagaggtaaagggttctagaagccgccaatttttatttgctttaaatttgtctgagtcagagacgttcgagattgtaaccatg

SEQ ID NO: 67656 - DNA, 236 bp, Glycine max
  Clone ID: 700842960H1
ctgtgtttgtgagtgggttgatatctgacaaaaaaatgggcggaggaggagcaatgaggtcggcggcggcgaagatcgccggcatcggcatttccaaggcggcgctccgtccttcggcgctcccgacggagcaggcggtccacaacgcgtcgagaccgacatcggttgtcggagtgaagggggcgaaatccactgaggttgcgtcgcttcacgcggcagcccgtgggacgactggg

SEQ ID NO: 67657 - DNA, 238 bp, Glycine max
  Clone ID: 700842961H1
caaagaatcaaagaaaggggtggtggctgcttcgaaagcttaataatttgtttatttccagaacatcatagttttcgcagcagcaaactaacaaattactcatatcatataataagatggcccgttctctctcgcaagccaaacgtattggtgtccttgttgctcaatctatctccctaattcccgttcatcggcgaggttacgcagtggcatccgatgtatcggtaagagttggatt

SEQ ID NO: 67658 - DNA, 240 bp, Glycine max
  Clone ID: 700842962H1
ctcctaacaatgctttcaccaatggtaaactctactccatctccatgcatcaccatgaatttcacatttgctgtgtcaatcagacctaatgctttatcatcagatagtatttcttcagaattcagtgtaggattcatctctatagatgcatgcacaactccacgataaatcgtcgaattagacaacattcaacgacaactctgattgaggccttgttcgtggagactattcagatggtga

SEQ ID NO: 67659 - DNA, 243 bp, Glycine max
  Clone ID: 700842963H1
gcacccaccattactcagcactgccattcttcaatcacactaatggctgtcaccttctcagatcttcacaccgaagagggcatcaaatccctcgatcaattcctttctgggaaaacctatatctctggggatcaattgacaaaggatgatatcaaagtgtatgcagctgttgtggaaaagccaggagactcttttcctaatgctgctaagtggtacgatgccgtctcttctcaacttgctcca

SEQ ID NO: 67660 - DNA, 247 bp, Glycine max
  Clone ID: 700842965H1
ctgagtaccccccacttggtcgctttgctgtcagggatatgcgtcaaactgttgctgtgggagtcatcaagaacgtggagaagaaggatcctactggagccaaggtcaccaaggctgcccagaagaagaagtgaatcgtgcggtttggttcatcaggggatgtcgtttcttatggttacaataaatgttggtttcttgcccttgtgtcttcgtttctaggtagcttgtttttcggacatagtttgaa

SEQ ID NO: 67661 - DNA, 246 bp, Glycine max
  Clone ID: 700842966H1
attacaatctccccagtttctaatctcagctaagaaaaaccaaaagatgtctctgattccaggtttcttcggtgcccgaaggagcaacgtcttcgatccattctcactcgacatttgggatcccttcaaggattttcatgttcccacttcttctgtttctgctgaaaattctgcattcgtgagcactcgtgtggattggtaggaaaccccagaggcacacgtgttcaaggctgatattccagggct

SEQ ID NO: 67662 - DNA, 241 bp, Glycine max
  Clone ID: 700842969H1
gcaccaccaggagtggagcctgcggcttaatttgactcaacacggggaaacttaccaggtccagacatagtaaggattgacagactgagagctctttcttgattctatgggtggtggtgcatggccgttcttagttggtggagcgatttgtctggttaattccgttaacgatcgagacctcagcctgctaaatagctatgtggaggtaaccctccacggccagcttcttagagggactatg

SEQ ID NO: 67663 - DNA, 240 bp, Glycine max
  Clone ID: 700842970H1
gcaccaccaggagtggtgcctgcggcttaatttgactcaacacggggaaacttaccaggtccagacatagtaaggattgacagactgagagctctttcttgattctatgggtggtggtgcatggccgttcttagttggtggagcgatttgtctggttaattccgttaacgatcgagacctcagcctgctaaatagctatgtggaggtaaccctaccacggccagcttcttagagggacta

SEQ ID NO: 67664 - DNA, 239 bp, Glycine max
  Clone ID: 700842972H1
actactacaagtacttccttacaatcaaaaccaacaacaactatggcaagttatcaaaagcactacgatgatcagggtcgcaaggttgacgagtatggcaacgttgagaagcaaaccgacgaatacggcaaccctgttcatgctgctagtgtcacctatgtagccaccagaactgctgctggtggttacagtgatgacattaataagcaacatgataccaccaatgcctacggcgtaga

SEQ ID NO: 67665 - DNA, 239 bp, Glycine max
  Clone ID: 700842973H1
atcacacacaactactacaagtacttccttacaatcaaaaccaacaacaactatggcaagttatcaaaagcactacgatgatcagggtcgcaaggttgacgagtatggcaacgttgagaagcaaaccgacgaatacggcaaccctgttcatgctgctagtgtcacctatgtagccaccagaactgctgctggtggttacagtgatgacattaataagcaacatgataccaccaatgcct

SEQ ID NO: 67666 - DNA, 238 bp, Glycine max
  Clone ID: 700842976H1
gtcgccctaagtcatggcaggacttgcacccgagggatcacagtttgatgctcgtcaatatgataccaagatgaatgagttgcttacatctgatggacaggattttttcacatcttatgatgcggtttatgacagttttgatgctatgggcttgcaggagaatctcctgagaggcatttatgcatatggttttgagaagccatcagctattcagcagagaggaatagttcctttctgc

SEQ ID NO: 67667 - DNA, 237 bp, Glycine max
  Clone ID: 700842977H1
tttgaatttttaaatagttttttatttaattaaaaagtagtatatatttattattatttacatttacaactcacataaaaatatattatattctgaaaaatataaaatggacttaaatattaccatcataaattttgaatgtatcaaatttagcatcgtttgttgtaatactcaggttgcaaatttttacatttacattaagaagtctttacattttagcatattactttgaaactg

SEQ ID NO: 67668 - DNA, 238 bp, Glycine max
  Clone ID: 700842978H1
cgcagtcgcagtgagtgaaaaggaaaaccctaattgcggtattctcagtgccttcgagagaaagaaaaaatggcagataatcttgttctccgtggcaccatgcgcgcccacaccgacgttgtgacggcgattgccactcccatcgacaactccgacatgatcgtcaccgcctcacgcgacaagtccatcatcctctggcatcttaccaaggaggacaagacttacggtgtcccccgcc

SEQ ID NO: 67669 - DNA, 244 bp, Glycine max
  Clone ID: 700842980H1
acaggttagagctatgactgaaatgcaaggggttctttgttcaacaaggcccatgcgaattggaccagcctctaataaaaaccctagcactcagtctcagccaaaagcatcatatcagaatcctcaaggggcacagaacgagcatgatccaaataatacaactatttttgtcggcaatttggatcctaacgtcacggatgaccatttgagacaagtttttgggcattatggagagttagttcat

SEQ ID NO: 67670 - DNA, 233 bp, Glycine max
  Clone ID: 700842982H1
ttaaaatgatccatgtcaagatggcaagggcatcattagggaaaacatttattgtttgctgggagatccactattagctccagtgtgtttgtgctggtttgatgaacactttggctcattttgtaatttgattgcctgcttggtctgcattttttttccaaaaaaaaaaaaaaaaaaaaaaaaaaaaaataaaaaaaaaaaaaataaaaaaaaaaaaaaaaacaagtaaagaa

SEQ ID NO: 67671 - DNA, 240 bp, Glycine max
  Clone ID: 700842984H1
cacccaacggacgaggaactgattgtgtattacctttgtaaccaagccacctcaaagccatgccctgcatctatcatcccagaagtggatctctataagtttgatccttgggaattgccagataaaacagaatttggagaaaatgaatggtatttctttagtccaagagacaggaagtacccaaatggggtgaggcctaaccgagcaactgtgtctgggtattggaaggctactggcaca

SEQ ID NO: 67672 - DNA, 237 bp, Glycine max
  Clone ID: 700842986H1
gatttctccgatcaaagttcctcactttctctcccttgatcgacacccaccacgcgttagagagagataaaaaaaccccgagagatcggaaagatgggtacgcttcagtcttggagaagagcctacggtgccatcaaggataccaccaaagtgggtcttgcccatgtcaatagcgattacgcggatttggacgttgccatagtcaaagctacgatccacgtcgagtgtccccccaaa

SEQ ID NO: 67673 - DNA, 235 bp, Glycine max
  Clone ID: 700842987H1
gagaaacaaagaaaggaaataattgatctttgaaaatgcagggaggaaagaaagctggagagtccatcaaggaaacagctgcaaacattggtgcttctgccaaggctggcatggagaaaaccaaggccactgtccaggagaaggcagaaagaatgacggcacgtgatccgatgcaaaaggagttggcaacccagaagaaagaggcaaagatgagccaggcagagctggacaagca

SEQ ID NO: 67674 - DNA, 238 bp, Glycine max
  Clone ID: 700842988H1
aaaagtttccttgacaatctaattctgcaaaaatggcaagcaataaggagtctaagttcccagcacagagccagaaaactcagccaggaaaagaacatgtaatgaatccactcccacaagccacaaatcctgatcacaaggccgccaataaactccagggaaaggtggcgttggtgacaggaggtgactcaggaattggcagagcggtttgcctgtgtttcgcaaaagagggtgcaac

SEQ ID NO: 67675 - DNA, 234 bp, Glycine max
  Clone ID: 700842989H1
ctcgagccgcaaaaagtttacgttacaaatcgcataataaccgtcctaagtttattgagagaattttgcaagtgtgagaaacatggcatctcgtcaaaacaacaagcaagagcttgatgaaagagcaaggcaaggagagactgttgtcccgggtggaactggtggcaagagcctggaggctcagcaacaccttgctgaaggaaggagcaagggagggcaaacaaggaaggaaca

SEQ ID NO: 67676 - DNA, 232 bp, Glycine max
  Clone ID: 700842990H1
gtgattgttgtgactcgttcttcttcgtcgttatcttcttctgttgatgtttgtgtgaatgtctcttctctcagctgacaatgtcttgctgcggtggtaactgttgttgcggtagcgcctgcacgtgctgcaacggctgcggaggcttccatatgtactcagacttgagctataccgtgtcaaccaccaccgagtacttggtcatgggagtggcaccagttaaggctcaatt

SEQ ID NO: 67677 - DNA, 170 bp, Glycine max
  Clone ID: 700842991H1
ctgtgttttgctgtagtacgtctacttcttgtgttattactcctaggagtttctctttgcagacatgaaataagaagggtttcaatttagtctgaatccttccatgtatatttgagagtggctttgatttcagtgaatgtttccccttttgtattaattcaacaatcttt

SEQ ID NO: 67678 - DNA, 239 bp, Glycine max
  Clone ID: 700842995H1
cgacacatcaagcaaccaacacaaactgatttctcatttcgtagcatcaaccgctaactatccagatactaattttcgctttggtttggttcaattctgtccgcagacatggttttcaggccaatgagtggtaattggttagcactgttaagaaacagttatggaggtaaagccgcgtacgcaacctcaacagcaccaaagatgaaagcgtatgcagctgcggctgattacggacacaa

SEQ ID NO: 67679 - DNA, 245 bp, Glycine max
  Clone ID: 700842996H1
tctcgagcgaatcggctcgaggaagaagaagaatccaaaagcaatcccatctgtgtgttagcacatcggaagggagggcacatcaaactctaaggattgctctgaatcggtttcgtcttcttcgtttttcttcaaaatcctcgtgacagatctaatctaatcagccttttgggggtgtttcagacattgcatgcatatgggtggttgtgttggatgctataaaaggccttcactgagtcccacag

SEQ ID NO: 67680 - DNA, 100 bp, Glycine max
  Clone ID: 700843001H1
gggatccgtctggaggagtctctggcatctgactagcgaggcatctgtcagagaatggactcatggatcagggattgaaggggagtggtgccacgatgct

SEQ ID NO: 67681 - DNA, 165 bp, Glycine max
  Clone ID: 700843002H1
ggcaaaatggagtccttgacattccaagcacacggaacaccacttctccagtttctcctgttggtgtctattattccaaagtactcaatgcagtgcaggaagcaagacgagctgccgagaagcctatgatatggctaaggtagatgaaggggtgaacagagctgt

SEQ ID NO: 67682 - DNA, 247 bp, Glycine max
  Clone ID: 700843003H1
tcttcctcggtttctgattctgcactctgaagccaatcaatgaaaggttgaggaagaataatttttcctacattctccgttacttatgtttacttgattgtgtcatgttctttatttccataaaggttattgtaggccccatgtgttgttgaactactatactgtgcgaatggtgcatgcttgctggaccagtatgtatgcctcagtgcgttttgtgatgtgcggttctaatgtaattttgtttttg

SEQ ID NO: 67683 - DNA, 117 bp, Glycine max
  Clone ID: 700843005H1
ggagaaaatcacgagaattgagaaccggagcagaaaaccgatccgattcactaaaccttaattttctactttcctttcgcaacttaccctcttgtctataaacctgaatccctgctt

SEQ ID NO: 67684 - DNA, 243 bp, Glycine max
  Clone ID: 700843006H1
gctgaaaccaaaggtcaaaccaagaagggtggtggtgaggaacagggaagaagaagagaagaaataggagaagaaaataaacaatccagcctcgaagagatttctaaatgcagagctaagctgaagagaaagttaaggagagaaaggagagatcaaaacaagcagcaagtaatgaagctgccaaagagagaaacaagcaggcaaataaggaggcaacaaaggcaaaagatgtcacaagagaga

SEQ ID NO: 67685 - DNA, 243 bp, Glycine max
  Clone ID: 700843007H1
gtgcagaagagcgtcgcagttgtaaccctaatcagaagaagcgcacttcaagcgagtgacagccaccagccatgggtcgtatgcacagccgcggtaagggtatatcctcttctgcttgccctacaaaaggacacctcctagctggctcaagatctcttcgcaagatgtcgaagaaaatatctgcaagtttgcgaagaaaggtttgaccccgtctcagattggtgtcattctcagagattctca

SEQ ID NO: 67686 - DNA, 241 bp, Glycine max
  Clone ID: 700843008H1
tctcgagccgaatcggctcgaggaagctgtccataaatcaactagttcagaaaggatgaggacccttaggtctacaagttataccagaaaggtcaacactgccagccttcaggaacacttacctgtgctgtatccagaagttgttctatctgtagaggtttaccataatgttcgaaagggtaccaagatccaagagttgttagttcttggaggtcagaccttaactgctctgagggacaaa

SEQ ID NO: 67687 - DNA, 241 bp, Glycine max
  Clone ID: 700843009H1
gtgaaggtgctgaatcgaatcgaatctccgaagatggccgcgagcgatcgtacagtgttgcaattctcttcatcatcttcttcttcgcagagcttgtccgcgaaggtccaccctctggtcatcttcaacatctgcgattgctacgttcgacgccctgaccaagccgatcgcgtcatcggaaccctactcggctccgtccttcccgatggaaccgtcgatatccgcaattcctatgctgttc

SEQ ID NO: 67688 - DNA, 238 bp, Glycine max
  Clone ID: 700843010H1
cacaaaattgaactgtaattgtagtagtagacagtagcaccatgagccaggaccagctcaagaaacctcaaggggagcaggaccccatcaaatacggcgacgttttcaaagtctcgacgaactcgctttcaaacccatcgcgccaagagacgcagctctcatgcaagccacggagaaccaagcattgggccaaactcaaaaaggaggtcccgcctcggtgatgcaatccgccgcaacc

SEQ ID NO: 67689 - DNA, 236 bp, Glycine max
  Clone ID: 700843012H1
tttttctctctgttgcttcacaataccaacaacaccacctggttccgggtcacactacttgcccaggatcaggacccttctcatgcaacaaccgattcaagtgtttttcgcctttccaaacaacaactatagggaactaaaatcgaccctttggctagataatcacaccaacatcaaaaaaatcgttttttgctttgtgggtattgtttttttttttttgagttgggacaaaagaa

SEQ ID NO: 67690 - DNA, 225 bp, Glycine max
  Clone ID: 700843014H1
tggatccctacaagcaccggccatccagcgccttcaattctcccttctggactacaaattctggtgctcctatttggaacaacaactcctctttaaccgttgggctagaggtccaattctgctggaggattatcatcttgtggagaagcttgcaaattttgatagggaacgtatcccagaacgtgttgtccatgccaggggcgctagtgcaaagggtttctttga

SEQ ID NO: 67691 - DNA, 225 bp, Glycine max
  Clone ID: 700843015H1
gtcattgataactgaagctcctaatgcaccagttactgcacagagaagggtcagaaatgacttagaaaattctctaccaaaaccatacttgccaagagcattgaagctcctgatacgggtcacccaaatggaacagcaggccacaggcaccacaacttatctgttcttcagcagcattgtgctttttttgatcaagatgacaatggaatcatttacccttgggaa

SEQ ID NO: 67692 - DNA, 128 bp, Glycine max
  Clone ID: 700843016H1
caaaaaaaactgaattgtgtgaatcgaaaactaaacattgctattgtaaaagttgcaaatgcttataaacaccctaatattattgcagaatttatagctggacattaaagaatagagtttcgtttcgt

SEQ ID NO: 67693 - DNA, 250 bp, Glycine max
  Clone ID: 700843017H1
tgaaaagttagagagacctcaagcggagaaagaccccatcaaatacggcgacgagagaagatgcagaaggagtgattggagctgagcttaggaacaacttggacatgagaacaacccctggtggggtcgctgcatccatcaaacagctatgtttcttaatatattaaataatactacctcttatttttattgctatcttataatataatcaagttttcgttatcttcctttgatctcttttgcttatttc

SEQ ID NO: 67694 - DNA, 244 bp, Glycine max
  Clone ID: 700843019H1
tgccctctgccgtgggaggagtttgtaacatggctgctctaccaacggcggagcttagtgacgcaaatgcaacacatgtagcaagttgtgatgtgagggtgttgcatccagtgttcaggtttacggtggggccactgcgttctccggccccgttgtcaccgtgaaggtgtttgaagacaacgtgttggtgagggagcttcttgagacgaaaggcgaaggaagagtattggttgttgatggagga

SEQ ID NO: 67695 - DNA, 243 bp, Glycine max
  Clone ID: 700843020H1
acgacaaccaagtacagagaagtaaagagagttttgctttttgaaatggcagcgtcgtcgtcgtcgtcggagaagcaagtggtgctgataggcatagacgacagcgagcagagcactacgcgctgaattgggctttggatcacttcttcccgagcccaatcttcaagctcgttctcatccactcaaggcccaccgccacctccgccgtgggcttcgccggccctgtgtatgcaggagccgctg

SEQ ID NO: 67696 - DNA, 236 bp, Glycine max
  Clone ID: 700843022H1
ggagttgttaccatcagatgttttggacatagcttttcacagtagtaggaatgataagaaagttactcgacatggtgcggcaggcacggcatcagctaatgcagatatacaggatgtggactacactgaaggacgatcctccaaaggaggtggaaagaagaaagggaaaaaggggaaaaaggtcagcccttcagttttgggatttaacgttgtgagtaaccggatcatgatgggtg

SEQ ID NO: 67697 - DNA, 239 bp, Glycine max
  Clone ID: 700843023H1
gagaattttgcaagtgtgagaaacatggcatctcgtcaaaacaacaagcaagagcttgatgaaagagcaaggcaaggagagactgttgtcccgggtggaactggtggcaagagctggaggctcagcaacaccttgctgaaggaaggagcaagggagggcaaacaaggaaggaacagctgggtacagaagggtaccaggaaatgggacgcaaaggagggttgagcactgtggacaaatca

SEQ ID NO: 67698 - DNA, 240 bp, Glycine max
  Clone ID: 700843024H1
cggattctccctgccactacaaattcccaacttcgcaaaccctaggcagcagcagcagcagcaacaacaacagcaacgaagaattcgaagagaaatcaaatcgaatctcatttgactgtgtgtggttgcggcggcggcaatggcggagcacttggcatcgatattcgggacggagaaggacagggtgaactgcccgttctacttcaagatcggcgcgtgcaggcacggcgaccggtgctc

SEQ ID NO: 67699 - DNA, 236 bp, Glycine max
  Clone ID: 700843025H1
ggaagaggtggaggaggcaggaatggtaggttctccaatggtggtgggcgtggcggcaactggggtggaaagagatggtgaagctgagaagggactttgggagttgagtgtttcactctgctcggtgtgggatcataactgcgtgacgaccacgtggggatgaatacttcagtcgtgaatgaagaaacagttgatgttggttaaggcccacggaggattcgagttcaagatggatt

SEQ ID NO: 67700 - DNA, 238 bp, Glycine max
  Clone ID: 700843026H1
cacacaactactacaagtacttccttacaatcaaaaccaacaacaactatggcaagttatcaaaagcactacgatgatcagggtcgcaaggttgacgagtatggcaacgttgagaagcaaaccgacgaatacggcaaccctgttcatgctgctagtgtcacctatgtagccaccagaactgctgctggtggttacagtgatgacattaataagcaacatgataccaccaatgcctacg

SEQ ID NO: 67701 - DNA, 236 bp, Glycine max
  Clone ID: 700843028H1
tcttcttttcctcggctctggttcggtaaggcgtagggggttgttattattcttcataatggttgcaacagctgctacggcgtcgtttctccctgtgccttcgccggacgctgaaaagggaaacccaagggtggtggtggcggcggcgtttctgtgaacctcggaggactcaaagagaagcaaggtttgtgcggttgcttgcaggtcaaggcaaacgcacaagcccctccgaagac

SEQ ID NO: 67702 - DNA, 228 bp, Glycine max
  Clone ID: 700843029H1
ctgaaaccctacgtttccgagaaacctcgcgcgcgcgtggtggcgctggccgtgaagagcctcggcgacacggacgcggtggcggtgtcgccggaagatggccaaccgccggagaactgccgtcgggatccggcgtctacgacgtgtacgacacgaacggcgacgttcagttcatcggtgtgtcgcggaacattgccgcgagcgttgccgcgcactggaaatcggtgc

SEQ ID NO: 67703 - DNA, 228 bp, Glycine max
  Clone ID: 700843030H1
ctagcgatactgataagagagataccaacaagaaaagaaaaaaagaagagttgagattccctttgaagaaaagatggcatcccataggcaaagctatgaagctggcaaactaagggccgaactgaggaaaagacgaaccagacgatgggcaatattggagagaaggctcaagctgcaaaggagaagacccaggaaatggcccaagctgcaaaggagaagacccaacaa

SEQ ID NO: 67704 - DNA, 230 bp, Glycine max
  Clone ID: 700843031H1
ggtgattgttgttcggtggtttgcaaggatggggaacacgttctgcttcttctgtggttgcgttgctcaatccagcgtcggcgtggtcgagcagtggggtcgcttccaccgcctcgcccaaccgggcttccactttttcaaccctctcgccggcgaatgcctctccggtatcctctccaccaggatctcctccctcgacgtccgcatcgaaaccaaaaccaaggacaatg

SEQ ID NO: 67705 - DNA, 226 bp, Glycine max
  Clone ID: 700843032H1
agctattatactctctagagtaattgcggaatctgctagaattttctaataatggcgaaagacgttgagcaggtcacagagcaaggtgaatactccgcgaaggacaccatgaccctcctccggcaccgttgatcgacccagatgagctcacaaagtggtccttgtacagagccgccatagctgagttcatagcaacactcctttttctttacatcaccgtgttgac

SEQ ID NO: 67706 - DNA, 249 bp, Glycine max
  Clone ID: 700843033H1
atcagcacaagccaaagatgctacggtaggatcaatggagaaaactacaaaggatgctaaaggaagagaaaaagcaggaaccaaaggtcaaacaaagaagggtggtggtgaggaacaggaaaaagaagagaagaaacaggagaagaataacaatccagcctggaggagatttctaagcacagagctgaagctcaacaaaaagcaatgagttcaattgaaggtgctaaggagagatacgagagagcaaaa

SEQ ID NO: 67707 - DNA, 243 bp, Glycine max
  Clone ID: 700843034H1
gtgatgtgatgtgatgtgatggagtctacaaaggaacaatctggaatgctgcacaagatcctacctccacgtctagaagatgccggcctcgaagatcctgcccttccacccgattcatccacgaagcttttctgaaggccgccgccgccgtcaaatcacgcgccgcctccattttctcctccaccgacgacgacaacgacggaggttgcgtcacgacccgtggcccagcgccaaggacgctcc

SEQ ID NO: 67708 - DNA, 239 bp, Glycine max
  Clone ID: 700843035H1
atataaacctgctagaagatttctctgctatccatggcaaacaaagttaagcttgcaactcctgttcttggtatgggctgcagtgatggcaggccacaaagctactattggggaggaggttgggaaaatttctccatttgcccttgtttatgttagaggactaaggattgaaagagggaatagaataataggaaggggtagggggagaatgattcagaaaatgaagtcctgcagaaatc

SEQ ID NO: 67709 - DNA, 238 bp, Glycine max
  Clone ID: 700843037H1
gagagaataaggtgaggtccggtggggtgggtgaaaccgcacaagaagcagctactttcaacagtcacgtcatgcgagtccaagacatgacgaaactttccgatatcttaacggatgcggcggagaagctccccgtggacaaggcggtgacaaaagaagatgctgaggctgtgtatactgcagaggtgcagtttccatggcagagagatgcggcggaagtggttgctgaacctggcgg

SEQ ID NO: 67710 - DNA, 236 bp, Glycine max
  Clone ID: 700843039H1
ccagaaggtatcattaaacacattctgggaaaacttgagtgtcgttgtaaatgcactggacaatgttaatgcaagactatatgttgatcagagatgcttgtatttccaaaagctcttcttgagtctggaactctgggagccaaatgcaatacgcagatggtaattccccacctgacagaaaactatggtgcatcaagagatccacctgagaagcaggcaccaatgtgtactgtaca

SEQ ID NO: 67711 - DNA, 236 bp, Glycine max
  Clone ID: 700843041H1
aacaaactgaaaccaaaggccaaatcatgaagggtggtggtgaggaacaaggaagaagaagagaagaaaataaacaatccaacctagaagagatctctaagtacagtgaagtcaacagaaaacaatgaaagcaattgaaggtgctaaggagagatacgagagagcacaacaagaagcaagtgaagcatccaaagagagaaatggtcaggcaaatgagggggctgaagaaggcagaa

SEQ ID NO: 67712 - DNA, 231 bp, Glycine max
  Clone ID: 700843042H1
ctgtgaataagatgggagagtataaagattatacggcggagaaggctaaagaggggaaagatacgacgttggggaagcttggggagctgaaggactctgcggctgatgcgcgaagagggcagtgggttacttgagcggcaagacagaggaaaccaaagagaaagtctcggagacggcagaggcgacggctaataaggcggcggagatgaaggaggccaccagggagaaggc

SEQ ID NO: 67713 - DNA, 234 bp, Glycine max
  Clone ID: 700843043H1
gtcctattgtgactgaagctgacatacagcatattgtctcatcctggactggtattcctgttgagaaagtctcaacagatgaatctgatcgcctcctgaagatggaagagctttacataagcgagtgattggtcaggatgaagcagttaaagccattagtcgggctatccgtcgagctcgggttggacgaaaaaatcctaatcgtcccattgccagcttcatcttttctggtcc

SEQ ID NO: 67714 - DNA, 234 bp, Glycine max
  Clone ID: 700843044H1
gtgagaaacaaagaaaggaaataattgatctttgaaaatgcagggaggaaagaaagctggagagtccatcaaggaaacagctgcaaacattggtgcttctgccaaggctggatggagaaaaccaaggccactgtccaggagaaggcagaaagaatgacggcacgtgatccgatgcaaaaggagttggcaacccagaagaaagaggcaaagatgagccaggcagagctggacaag

SEQ ID NO: 67715 - DNA, 239 bp, Glycine max
  Clone ID: 700843045H1
cttttgttcccgattttctcaaattgctttcggttttcgttctgattctgcaaaatcatggagatggagcgcatcgttgaattccctcacacctacatggatcgacccccaagaaagagagcgcgtttgggctgggacatcgctgaggcccccaaggctcaggtaggattgttttgtggacaagaggttgagaatatttcaagctatgctccttcagaacatccccctagttctctgtt

SEQ ID NO: 67716 - DNA, 239 bp, Glycine max
  Clone ID: 700843047H1
ctcgcgttttccaattccccccaaatctcacgcttagggtttctatcgcaaaccctccctacctccaaccaggtcgcgtgcaaagggatttcgaagcttcggaagaaaaaaatgaacctgttttctgtggaaacctggatttcgacgcgcgtcaatctgacgtggagaggctcttcagaagatacggcaaagttgatagagttgacatgaaatccgggtttgcttttgtctacatggaa

SEQ ID NO: 67717 - DNA, 238 bp, Glycine max
  Clone ID: 700843048H1
taaagattgaaatttggatcggagagagagagagagatggcgttgaatcctcaattgtttcctaatggaatgcccgttcctttcgtgaacgagatgtttgtgttggccagagacgcgtcgaattcgaggtcgataagattcctgcctctggaaatcatgggggtcatctcaaaacaaagggaatcgtgtatttgtcaaatattcggatggtcttcgttgctaaaagttcagttggaca

SEQ ID NO: 67718 - DNA, 241 bp, Glycine max
  Clone ID: 700843049H1
gcaaaggattctacccgccgctcgatgggaattgcgcttcaaggcgtctcgtagggctaatccgcctcacgagggtcaccaacggcacgtgcctttggggggccgaggccccctctgctggtcggcaaacggacggcgggcgcacgcgtcgcttctagcccggattctgacttagaggcgttcagtcataatccaacgcacggtagcttcgcgccactggcttttcaacacagcgcgatga

SEQ ID NO: 67719 - DNA, 233 bp, Glycine max
  Clone ID: 700843051H1
tcttcttcttccctcttccctttcacaatctaaccagttttgtgacgctggaacttcatctaagctgttgatcaagggcggcaccgttgcgtctgttcgccaccatcaggtcgacatgtctatgtcgacgatggtatcattgttgccatcagtcctactattacggttggagatgacgtgacggtcatagatgccactggcaagtttgtcatgccagggggcattgaccctca

SEQ ID NO: 67720 - DNA, 235 bp, Glycine max
  Clone ID: 700843053H1
cgctccgtgaggaggttcacgaaccagagagagagaagagagaactgttacagaattttcaaatttactcccttaaagatagaatttgaaattctattctttcaactaactaaatttcttttaaaattctaaaattttgaattccttttactaaaatatccaaacagttacttttaataaaaaagaatttaattctttataaaaaatatattatctagctaaattaccttatcca

SEQ ID NO: 67721 - DNA, 235 bp, Glycine max
  Clone ID: 700843056H1
ctcctctctccgcatcgctgcgttttccgaatcgaaaggtacgtaagtaacaatggtggaggccaagggtaggaaagaggaggtcgtcactcgagagttcaccatcaaccccacaaacgcttgcatggctgcacattcaagaagaaggctcctaaagcaattaaggagataaggaagtttgctcagaaagcgatggggacgaatgatgtgagagtggatgtgaagctgaacaagg

SEQ ID NO: 67722 - DNA, 234 bp, Glycine max
  Clone ID: 700843057H1
ggagaaaactacaaaggatgctaaaggaagagaaaaagcaggaaccaaaggtcaaacaaagaagggtggtggtgaggaacaaggaaaaagaagagaagaaacaggagaaaaaaacaatccagcctggaggagatttctaagcacagagctgaagctcaacaaaaagcaatgagttcaattgaaggtgctaaggagagatacgagagagcaaaacaagaagcaagtaaagcttcc

SEQ ID NO: 67723 - DNA, 135 bp, Glycine max
  Clone ID: 700843061H1
tgcaattcactctgtacaattcttcgttcgttctctgcagttatatcctttttgagcttcaatggcggacgctgaaaccttcgctttccaggctgagatcaaccagcttctaatctcatcatcaacacattccac

SEQ ID NO: 67724 - DNA, 231 bp, Glycine max
  Clone ID: 700843062H1
gtgcgaggctagaagcaacagcaaagaaatttcaagtgacatatagctaacaagctgcaatgaaccaccacgactggtgaacttagcaatagagttgaccacagcgaaccagctggcctgttctcggagatgtcagcggttctattgggcctgggcttcaacgtcacctccgccacggcctggacccacaacgacagggtggcctgcataatccacctggaggacgcaaag

SEQ ID NO: 67725 - DNA, 234 bp, Glycine max
  Clone ID: 700843063H1
tgcagaccgagctagctagctagcaagcaagcacagagatggaggcaaagcgaggccatgccctcatgtgcttggcacgtgtttcactcttcctctgcgctctaaccctatccgtgctcacggaagcaccacggttcaagacatcgcgagaaagttgaaactcggggacaacgagcttctgcgcacggagaagaagttcaaggttttcatggagaattacgggaggagctactc

SEQ ID NO: 67726 - DNA, 188 bp, Glycine max
  Clone ID: 700843064H1
caagtattgatggtgaagggaacaagtgtcggaacaccgtgcagatgcctttcactgctaatgaagcttaaaatactactaggttttaatttttgaagggagttgcttaattggatacacttacgattactttgttctttatagtcagaagcaagattacattttaaggaaaaaattccaaaaaggtc

SEQ ID NO: 67727 - DNA, 235 bp, Glycine max
  Clone ID: 700843065H1
actcgagccgaatcggctcgagcaaatggggagcaggagggacgaggtgcccgccataaacattaccaacgtcttcgcggcgctcggcagcttgaagaagaagaagaagcccagaaggaccaggaccagggcccgtccaagtccaaggcccaggacaacaagaaggacgtcttttgggcccccgcgcctctcacctccaagtcatgggccgatgtcgacgacgaagatgacgacg

SEQ ID NO: 67728 - DNA, 234 bp, Glycine max
  Clone ID: 700843068H1
gtcgctccgcaccagtttcaccgcacgaatatcttgttgtttggagcgatccgagaaaaactctgtaaacatgttggtttaccaggacctccttacaggtgatgagctctctctgactccttccgttacaaggaaattgagaatggaatgctgtgggaagttgaggggaagtgggttgttaaaggagcagttgatgtagacattggtgcaaacccttctgctgagggtggagga

SEQ ID NO: 67729 - DNA, 234 bp, Glycine max
  Clone ID: 700843069H1
gtgaatcgtactgattaccagctcattgatattgctgaggatggatttttgagtctgcttactgaaaatggtaacactaaggatgacctcaagcttcccactgatgagagtctgctcactcagataaaggatggatttgctgagggcaaggatcttgttgtgtctgtcatgtctgctatgggtgaggaacagatttgtgccctcaaggatattgggccaaagaactagcttttg

SEQ ID NO: 67730 - DNA, 232 bp, Glycine max
  Clone ID: 700843070H1
gtgaatcgtactgattaccagctcattgatattgctgaggatggatttttgagtctgcttactgaaaatggtaacactaaggatgacctcaagcttcccactgatgaagtctgctcactcagataaaggatggatttgctgagggcaaggatcttgttgtgtctgtcatgtctgctatgggtgaggaacagatttgtgccctcaaggatattgggccaaagaactagctttt

SEQ ID NO: 67731 - DNA, 232 bp, Glycine max
  Clone ID: 700843071H1
cagtagtcatatgcttgtctcaaagattaagccatgcatgtgtaagtatgaactaattcagactgtgaaactgcgaatggctcattaaatcagttatagtttgtttgatggtatctactactcggataaccgtagtaattctagagctaatacgtgcaacaaaccccgacttctggaagggatgcatttattagataaaaggtcaacacaggctctgcctgttgctttgatg

SEQ ID NO: 67732 - DNA, 226 bp, Glycine max
  Clone ID: 700843074H1
tgcagaatgcatatggctaattcctgagatggtaacagttgattttcgtttaattggggcttgtgtatattttgcactgttctgaacatgaaggaaaagaagaatctgcctctactctaaagcgcattttagtgaattgttcatctcaggcaaaagcatacgggagctgtgttgcagcgaaggttccagacattgagcgaaatatatgtgtgaaggaatttgcggc

SEQ ID NO: 67733 - DNA, 224 bp, Glycine max
  unsure (1)..(224): unsure at all n locations
  Clone ID: 700843075H1
tacaattccttcacttgcagcactgttgcatcatcatcttcattgcaaaaccctaaacttcaccttcaaccatgaccacacaagtaccaccacacagtgtccaagtcacacaacataagacacatatnaagctggcgttgttcccccctgagcccgtttcgatccgccgcgttatgatgctggcgtcaaagcgccctccatttaccattccgagagaggtccaa

SEQ ID NO: 67734 - DNA, 224 bp, Glycine max
  Clone ID: 700843076H1
cacaaactcaggcctcacttggctatatacctccttcaaccccgataatgggtccttttggcaccacaggattaaatcagacatctagtgagggtgtttacctacatggcctagtgctgcaatgatgtatgcacattcatacgaccaatttagacatgctgttttccaggctccatttggtcaacagccgttgagctttgactattcacagaactattagatga

SEQ ID NO: 67735 - DNA, 234 bp, Glycine max
  Clone ID: 700843077H1
ggaagaccggccagccgcgtggtttcggcttcataacttacgctgatccctccgtggttgatacagtgattgaggacactcacattatcaatggcaagcaggtggagattagcggacgataccgaggggggctgctggctcgaactcaaaggacttccgaacgaagaagatttttgtgggtggaattccttcgactgttactgaagatgaatttagggacttctttacacgcta

SEQ ID NO: 67736 - DNA, 230 bp, Glycine max
  Clone ID: 700843078H1
gtccagtgagtgttagcggttctggttctggaaattgatcgagtcgaaaagaaccctaacaataacatggattctcaggttgccgtagctcttgctctttcacttgttggggtgtcagcacttctatcggtgcactttttgtaattgttaataaagctcccagtttgaagatgcttgggctattacagggttttgctgctggtttgatgcttagcatatcgttctttgat

SEQ ID NO: 67737 - DNA, 234 bp, Glycine max
  Clone ID: 700843079H1
cagatagtgaaatcctaagattgtttagttggaagatggaggcagtggaatcaatagcggttccggaaccggacgaagacgatccttcatcgacgcttctggatctctcgagttaccagctccacgaccttgactcggtcgagttgccacccagcctcaccgagttggacctcaccgcgaatcgcttgtccacgctggacccgcgcatagggaacctctcccatctcaagaact

SEQ ID NO: 67738 - DNA, 232 bp, Glycine max
  Clone ID: 700843080H1
gggcttcttgggcgttgtaattttaaagctgatatgcttgaccgaaaagtttcactattgagtggtggtgagaaggcacggctggccttttgcaaattcatggtaaagcatcaactatgcttgtgttggatgaaccaaccaatcacttggatataccttctaaagaaatgctcgaggaagcaataaatgaataccagggcactgttatcacagtatctcatgaccgatactt

SEQ ID NO: 67739 - DNA, 237 bp, Glycine max
  Clone ID: 700843081H1
gaaaaaaagaaaaatgcaggcagcaaagaaagccatagagacctttaaggaaaccgcagccaacattggcgcctctgccaagtctggcttggagaaaaccaaggccactatccaagagaagaatgagaagatgaatgcagaagatcaaactcaaatggatatggctaccaagaggaaagaagagaagatcaaccaggctgagatggagaagcagcaggcccgtaagtactacgccgc

SEQ ID NO: 67740 - DNA, 152 bp, Glycine max
  Clone ID: 700843082H1
gccatccagcgccttcaattctcccttctggactacaaattctggtgctcctatttggaacaacaactcctctttaaccgttggagctagaggtccaattctgctggaggattatcatcttgtggagaagcttgcaaattttgatagggaac

SEQ ID NO: 67741 - DNA, 150 bp, Glycine max
  Clone ID: 700843083H1
cttcttgggttgtaattgctctcttattggtttcagccattctaattattcgaaatctgcaaaccattcccgctttcggtcagaatttctttgaatatgttcttgattcattcgagacgtgagcaaaactcaaattggagaagaatatgg

SEQ ID NO: 67742 - DNA, 230 bp, Glycine max
  Clone ID: 700843084H1
acgtgacgttcattctgtctgttggaactgttggccttttagggttagggtttcggtttgtggatctattgttgcctctgcgatggatcgcaagaggggaaggctgaagctgccttcaatttcaatggcggcgccaagaaatcgaggcctgcacctccggctgtccatttggtgaaggatgccacttcctgcattatgttcctggtggctttaaagctgtctctcaactg

SEQ ID NO: 67743 - DNA, 229 bp, Glycine max
  Clone ID: 700843085H1
gaacagtgctaaattggtaggagtggtttgagctaattgatgttctatggataggccatgacttcagtgatgcagatgtgttctaatgtcacattttttatccaatggttgtttagttgccagtatattcttagctgcatgttggtataaactttctctttactgactggcaactttatgcccatatatgtatgttgtcacctaagcaggttttctggttgcgtgggtg

SEQ ID NO: 67744 - DNA, 229 bp, Glycine max
  Clone ID: 700843086H1
gttcagccgcacgacctcctcccaagtcccaaccctccctctccctcacgccttgctctctcagccaccgggaggtcagccgtcaaggaagaaagccatcgcgagacatccagcagacgaccacgaagccactgcagtcagtcacttggtcgggacgctaccgcttgtcacccatttacgagctcacaccgtcgcgattccaccgccgacagccactgtgaccgtccct

SEQ ID NO: 67745 - DNA, 226 bp, Glycine max
  Clone ID: 700843087H1
atttgaggtccaaaaatgttggtgtagtattaatgtcgtgatagtttgatgatacaagatggaagttcagtaatagcaggaggaaccgttgctcatataggtgtagtgaggcttatttaggtcgtgttatagatgccctggctaaaccacttgatggtcgaggagttatttcagattcggaatctcgattaatcggatctcctgctcccggtattatttcgagacg

SEQ ID NO: 67746 - DNA, 147 bp, Glycine max
  Clone ID: 700843088H1
ccacattcctctccatgtccggagagccaccacggccgttggagatccacctgagggtcaactccaagagaggcggcaccaccatggtgcaccccgtggccacggggttccggttcagtaccccagagaggaggagggagtgaagca

SEQ ID NO: 67747 - DNA, 145 bp, Glycine max
  Clone ID: 700843089H1
tgaatttacgattgcttttctttcttcataacttgcttttactcgctttattattgaatctggagtaaatggctttcttgatattgacatgagatgagaggattaatgatagaagcttctccatttgttaatgtcccgtgtcatc

SEQ ID NO: 67748 - DNA, 146 bp, Glycine max
  Clone ID: 700843090H1
gtgctttctaatcttgtaattttctgcgttgcttcgtggttaattcttcgtgttcttgtgatctttctgttggagtatttacaacactcctttgtaagtttaatatagaggctaattaattttcaattggaccacagcagatggct

SEQ ID NO: 67749 - DNA, 146 bp, Glycine max
  Clone ID: 700843091H1
gttttgtcgtttgcttctttctttgattaatgatgactagctttaaggttgcatgtgtggttgcgatgatgtgcatggttgttgccatgagtgttacacccatgcacaggccgcaatcacgtgcgggcaggtcgccggcgacgtgt

SEQ ID NO: 67750 - DNA, 146 bp, Glycine max
  Clone ID: 700843092H1
gaagaattagaattgaaattgttattctaaaacttaaactacaattcttatatccagagtctagtatttgaccgagatgaaatttggcatgtgcattatgtttcaacagtgggctgagtcctttcaagctctctggaaaactaatt

SEQ ID NO: 67751 - DNA, 231 bp, Glycine max
  Clone ID: 700843093H1
tggatttgtcatggattgatggctttgactttattgacgattacttgaagagcttttccgcggatgagttatttcaggtggatgaacttttggggcttatagataatacccaattgataactctgtgttgatgcaaggtttgtattttggacaaatgggttttcctggagatggtaatcctcaggttgacgatactccttcaagctttatttatcagttgcaaaatccaga

SEQ ID NO: 67752 - DNA, 230 bp, Glycine max
  Clone ID: 700843094H1
taaaattcttccaccaagttatgggtagacttgtgttgcttcttttctccctcttaggtctctcttctagtttcagcatatcaactcatcgttccatattggaccttgacctaaccaagtttaccacacagaaacaggtctcttcactgttccaactatggaagagtgagcatggacgtgtctaccataaccacgaagaagaggcaaagagacttgagattttcaagaat

SEQ ID NO: 67753 - DNA, 232 bp, Glycine max
  Clone ID: 700843095H1
gtacttccttacaatcaaaaccaacaacaactatggcaagttatcaaaagcactacgatgatcagggtcgcaaggttgacgagtatggcaacgttgagaagcaaaccgacgaatacggcaaccctgttcatgctgctagtgtcacctatgtagccaccagaactgctgctggtggttacagtgatgacattaataagcaacatgataccaccaatgcctacggcgtagacac

SEQ ID NO: 67754 - DNA, 152 bp, Glycine max
  Clone ID: 700843096H1
ttagaataactatattattatctctgattgtaatctgatcttttcattatacattataattataattattgttgttattattccttaaatatggattcgccgtgtctctccacgattcggattctggattcaaacctcttcagatcccttca

SEQ ID NO: 67755 - DNA, 249 bp, Glycine max
  Clone ID: 700843102H1
cacaactactacaagtacttccttacaatcaaaaccaacaacaactatggcaagttatcaaaagcactacgatgatcagggtcgcaaggttgacgagtatggcaacgttgagaagcaaaccgacgaatacggcaaccctgttcatgctgctagtgtcacctatgtagccaccagaactgctgctggtggttacagtgatgacattaataagcaacatgataccaccaatgcctacggcgtagacactgg

SEQ ID NO: 67756 - DNA, 254 bp, Glycine max
  Clone ID: 700843103H1
gagatcgaaagctgtgatatagtatagaaagagacagagagagagagacagacaagaagaacaaagatgcaatcttcaaaggagaagctggaaaacatgaccagtgctgccaaggagcaagtcgacatctataaagcaaaaatagacgagaagacagagaaagcaacggcaagaacagaagaggagatggtgattacccatgaacgtgcggaggcagatgaagctgaagcgacgatggcgctgcatgaagcaaa

SEQ ID NO: 67757 - DNA, 249 bp, Glycine max
  Clone ID: 700843104H1
acgggactttttttttctttttccagagggatttttagtgcaagtgtgatgtctgtcttcccttgaaaaattgtcttgtgtggaaacaaacttcggaaagagaaagaaagaaagaaagaaagccactttttattcttattttttctctctctctcactaatatatctgattttctctctcacttcttctgttctatgtaatgggtgttagatgtgcttagtttcagagtgtgcaacacaacaccagcaa

SEQ ID NO: 67758 - DNA, 247 bp, Glycine max
  Clone ID: 700843105H1
caattttgtaactttcaagactcagctaataaacatcaaaagatgtctctgattccaagtatttttggtggccgaagagcaacgtgttcgatcctttctcccttgacgtgtgggaccctttcaaggattttcattttcccacttctctttctgctgaaaattctgcatctgtgaacactcgtgtggattggaaagaaaccccagaagcacacgtgttcaaggctgatattccagggctgaagaagga

SEQ ID NO: 67759 - DNA, 246 bp, Glycine max
  Clone ID: 700843106H1
tttttcttgctcaatacccatcgaatgcaaagacaaagagactctcttttttaattattatttcctgttcctttcttccttcttctgaccaaccagtaggactccttcaaagggattttgagcgttgtttgaattgctggaggcctgagagttctaactaactccacaatccatggataaagatgcaagggtggaagagactgttgatttgcgaaccaatgtggagttggttagatcagtctctga

SEQ ID NO: 67760 - DNA, 201 bp, Glycine max
  Clone ID: 700843107H1
gcttaagagctagtccttgatttataacagatagtttataaggggagttattcggggtgatgcaatgatacccataaaccgagtcagcatccttgccttgggttacgatggtgacttatggaatatatttgatgggagtcctgtgggaaaggaaatccttaatttattgacaatatattaattatacgcgatgtttgtgtc

SEQ ID NO: 67761 - DNA, 239 bp, Glycine max
  Clone ID: 700843110H1
cacaactacaagaaagaacttccttataaccaaaaccaacaacaactatggcaagttatcagaagcactacgatgatcagggtcgcaaggtcgacgagtatggcaatgttgagaggcaaactgacgaatatggcaacccggttcatgccactagtgtcacttatgtagccaccaaaagtgttggtggctacaatgatgacgctaataagcaacatgatattactggtgtctatcccgag

SEQ ID NO: 67762 - DNA, 237 bp, Glycine max
  Clone ID: 700843111H1
gtgattgtgtgcttctttggaacccctccatcagggtctccaaaaaatcaccacctttggggaataattggaggccagggtgtttcactgcctttggccttggctatgatcatgttaatgaggattacaaggtggtggctgtgttttgtgaccctagtgagtattttattgagtgtaaagtgaaggtgtatagcatggccaccaattcatggaggaagattcaggatttccctcatg

SEQ ID NO: 67763 - DNA, 261 bp, Glycine max
  Clone ID: 700843114H1
aagctcgccaattccactcgaggttttgagggagacaacatgattgagaggtccacaaaccttgactggtacaagggtccaactctgcttgatgcacttgaccagattagtgagcccaagaggccctctgacaagcccctcaggcttccccttcaggatgtgtacaagattggaggtattggaactgtgccagtgggacgtgttgagaccggtgtcttgaagcctggaatggtggtgacttttgcaccaactggactgaca

SEQ ID NO: 67764 - DNA, 238 bp, Glycine max
  Clone ID: 700843115H1
ctggaggatcgtggcggcgtggaaaacctgaagacacctgacgtccacactttcttgcagcacgttgttaccttcgggattgtcaagaacgatgactccgatttgtaccggaagcttgttattgcttccgcttggaggaaacagatgccgaagctcgcgctttcgcttggtctcgctcagcaaatgcctgatatgattgaagagttgatcagcaaagggcagcagcttgatgcggttc

SEQ ID NO: 67765 - DNA, 252 bp, Glycine max
  Clone ID: 700843116H1
attcggctcgaggtggagaacaaactgctgaaacacctaccattgatgtgagctcaaaagaattttatggtgagggatatgatgacagtgacaagagaatccctgacatgaccataataaacaagcagcttggatggaatcctaagacttcactttgggacctgcttgaatccactctgacatatcagcacaggacatatgctgaagccgttaagaaagtcattgcaaaacccctcgcaagttaagctttta

SEQ ID NO: 67766 - DNA, 253 bp, Glycine max
  Clone ID: 700843117H1
tcggctcgaggtgatgcagcacagaagacaaaggattatgccactgacgcagcacagaagaccaaagattatgctactcagaagaccaaggactatgcaagtgatgcaactgatgctgcaaagaagactaaagattatgctgctcagaagactaaggagtatgcaagtgaagctagtgatgttgcacagaacacaaaagattatgctgctcagaagaccaaggactatgccagcggtggtgcgcagaagacca

SEQ ID NO: 67767 - DNA, 247 bp, Glycine max
  Clone ID: 700843118H1
attgcaaaaccctaaacttcaccttcaaccatgaccacacaagtaccaccacacagtgtccaagtccacacaacaacacacctctacgaagctggcgtcgtcccccccggagcccgtttcgaaccgccgcgttatgaagccggcgtcaaagcgccctccatttaccattccgagagaggtccaacgacttcccaggtcctcgccgtcctcgccggcctcccggtcggtggcatcctgctcctcctgg

SEQ ID NO: 67768 - DNA, 239 bp, Glycine max
  Clone ID: 700843120H1
ctctctctgggtcgtgttgtggttaactgtgttgattgatttggtttctgggggaccagtttggtttttggttttggtaagcttttatatatatatatacatccaatccatgatgagcctttggtgatctaaagaagcaaatctgaatagagaggagagagcagagacagctaaaatgcaaggaggaatgagatcatttttgtcacatgggaatgtcattagaaatgctgttctacaac

SEQ ID NO: 67769 - DNA, 238 bp, Glycine max
  Clone ID: 700843121H1
gcgtctttcattttcacactcaaccctttcttcatccttttatctcgtctctgccaaaacgatgccgttgctctggagaataacggaggagttacgatcggacggtcctccttcgcttactgcgtcgcgatctgcgatcgtgattttccggaggatgattccgactccagctccgactcctccatcggaaggaacagcatctcgtcggaagattcctccgaccgggaagacgccgtcg

SEQ ID NO: 67770 - DNA, 239 bp, Glycine max
  Clone ID: 700843123H1
gctgaagaaaacctaagcttagaattagaaacaaagaaaagaagaaaggaaagaattgatcgttgaaaatgcagggaggaaagaaagcgggagagtccattaaggaaacagctacaaacattggtgcttctgccaaggctggcatggagaagaccaaggccactgtccaagagaaggcagaaagaatgacagcacgtgatccggtgcaaaaggagttggcaacccaaaagaaagaggca

SEQ ID NO: 67771 - DNA, 233 bp, Glycine max
  Clone ID: 700843124H1
aaattttgtttctttgtgtgtgtatggtgatgataacttaattagtgttcatgaatatgtcaagcctactttagtggttctaaattgaaaagctttctagctggtcataatatcaccattactgatggtattgacaaaactagtgcaactttgcaatttagaaagttagcagattgtgattttctcaagagaaactttaagcagatgtctaatgttttgtgggtggctcctga

SEQ ID NO: 67772 - DNA, 234 bp, Glycine max
  Clone ID: 700843125H1
tctcgcttcgcttcgccaaagctaatgctccttcttcttcacatgtcattttcaattttgcacgtgtggacagatattggttttctactcaacccgccctagagcttcccgcgagcaagatcgtggacgtgccgttggcacaaactggtgaaggcatcgcagaatgtgagcttctcaaatggtatgtacaagagggggattatgttgaagactttcaaccactttgcgaagtcc

SEQ ID NO: 67773 - DNA, 228 bp, Glycine max
  Clone ID: 700843126H1
gctttcagcgtattggcttggtttcaagtcacctgaacagctttcacgtatccgaaacactggtgtgaaaccagagatcttgaaaaatgttggaaaagcaatcacaaccatccctgaaaatttcacacctcatagagcagtgaagaggatatatgaacaacgggcccaaatgattgaaactggggaagatattgactggggatttgcagaggcgcttgcttatgctac

SEQ ID NO: 67774 - DNA, 232 bp, Glycine max
  Clone ID: 700843128H1
ggacacacctgctgttggcttgttgttcaaggatggcaatttgtaagaaagatgtttggagattgaatgtggaatcccttctggatttccgctcacagttatttgtaatagcatttttaatgagatgctcattagatatagctatgaaaaattactgcgccaggctaaagctccaagtatgtttttacaatccttcaaaaattttgtttctttgtgtgtgtatggtgatgat

SEQ ID NO: 67775 - DNA, 236 bp, Glycine max
  Clone ID: 700843130H1
ctcactcactctgcactcaccactgccacacttcaatcgcactaatggctgtcaccttctcagatctacacaccgaagagggcatcaaatccctcgatcaattcctttttgggaaaacctatatttctggggatcagttgacaaaggatgatattaaagtgtatgcagctgttgttgaaaagccaggggacacttttcctaatgctgccaagtggtacgatgctgtctcttctcaa

SEQ ID NO: 67776 - DNA, 237 bp, Glycine max
  Clone ID: 700843132H1
aaatccgtcaacacgatccgcttcctcgccatcgacgccgtagagaaggcgaattcgggtcacccgggctccccatgggatgtgctccgatgggtcacgtgctatatgatgaaaccatgaagtataaccctaagaaccctttctggttcaaccgcgatcgcttcgttctctctgctgggcacgggtgcatgcttcagtacgcgcttctgcacctcgctgggttcgatagcgtcaagg

SEQ ID NO: 67777 - DNA, 239 bp, Glycine max
  Clone ID: 700843134H1
tacccacattagaaccacctcgtaagttgaattttgtcattgacatccctccagttggtgatgagaaaaatgcaaagatggatgacgaggttgatagcctaaaacagatttcaagtgctggacatattgttagtagttctgagatcaccagcactacatctgtggatgaaaaggctgagaaaggttcagttgataaagaagatattgcttctgtccttaagattggttcagttactatt

SEQ ID NO: 67778 - DNA, 235 bp, Glycine max
  Clone ID: 700843135H1
ctcgagccgctcgagccgattcggctcagctttccaatacaataatcactaactgaattttcgataggagatgtctgccgccgccgaagaagctaacgctcccgccgtcgaaaagccggttgaggaggtgaaggcgccgaaccccgcgaaggagaagaaacctaaggctccgaaggaaaagaagccaaaacaggccaaaacagcttcacatcctccatattttcagatgattaag

SEQ ID NO: 67779 - DNA, 234 bp, Glycine max
  Clone ID: 700843138H1
gtaactaccaggggtaggaggagggaataataataaggagcatgcacacacaacaactgctccaaccaccgccactaaccaccctgctgatcagcatgagaagaagggcataatggagaggatcaaagaaaaattgcctggccaccacacccactgaaaacctgcgttacattaccatatgtttgcgcctgtctgtcttatatatgtaacataaagtactatatatgtcatggg

SEQ ID NO: 67780 - DNA, 232 bp, Glycine max
  Clone ID: 700843139H1
ggcgagggcgacaagcggtggatcgtggaggaccgccccgacggcaccaacgtccacaactggcactggtccgagaccaactgcctcgactggtccaaaaccttcttcagcaacctcctctccaacctccctatcctccacggcgaggctaacctcttcctcaaaacgacgtcgctccgctccctcgacggcgaggcctacgtcaacgtccgcaaggggaaaatcatccccg

SEQ ID NO: 67781 - DNA, 230 bp, Glycine max
  Clone ID: 700843140H1
gaaaaggtttacaccagaggaagatgagaaaattaagttggctgtttttgattatatagagtctcatggtttgggagatgaaggtctagatatggttctccattgcaaatctcatcctgaaattagagattgttggaaggaaattggagcagccttacctcagaggccttatgttagtgtgtatactcgtgctcatattttgtttgaaaggggtgaggatcgtaagtgga

SEQ ID NO: 67782 - DNA, 228 bp, Glycine max
  Clone ID: 700843141H1
cttcacttgcagaacttagttctctgttgcatcatcatcatcttcattagtgttagccctaaacttcaccttcaaccatgaccacagtgccaccacacagtgtccaagtgcacacaacaacacaccgctacgaagccggcgtcgtcccgccggctcgttttgaggcgccgcgttacgaagccggcatcaaggcgccctcttccatttaccattccgagagaggtccga

SEQ ID NO: 67783 - DNA, 227 bp, Glycine max
  Clone ID: 700843144H1
cgcaacgttcagaaaccaaatcggtttgagtcctcattacccgcctctctctggaaaccagcaaaaccacctttctctactatctatcggttccttttgtactctgagtgggtagaagacatggtgaggctcactgctgacttgatctggaaaagccctcatttcttcaacgcgattaaagagcgtgagttagatcttcgaggcaacaagatagctgtaattgagaa

SEQ ID NO: 67784 - DNA, 227 bp, Glycine max
  Clone ID: 700843147H1
accattccctgaaccaccgacggagcgagaaaaactaaccgagacagaaagtgatcgcaatgttgcgacacttgggcgttcacgcgccgcgtttggccttcaacttcaagtcgagtttaattcacggtggcagaggcaaaacattaaccacacgcgcattctcgtcctccgccgccgtatcgccgccgtcgaaggcgatcgtgtacgaggcgcacggggaaccggac

SEQ ID NO: 67785 - DNA, 219 bp, Glycine max
  Clone ID: 700843149H1
gaaagaataacattattgcaatgactagcctagaggtaattgaggaatgcaatgcattctacatagcaggacaagaaaccacatcggttttactagtttggacaatggtgttattgagtagatatcctcattggcaagaacgtgcaagggaggaagtattgcatgtttttggtaaccaaaagccagactataatgggctaagtcaccttaaaattgtga

SEQ ID NO: 67786 - DNA, 230 bp, Glycine max
  Clone ID: 700843151H1
tgtaaatccaaacttgattcgttgtcttaaggatttccctccacgaagcaagccagatagccaagtctatggtgatcatactagtcaaataaccaaagaacacctagagcccaacttagaagggctcactgtagatgaggcaattcaaaacaagagattgttcctactagatcatcatgacccaatcatgccatatttgaggcgaataaatgcaacctccacaaaggctt

SEQ ID NO: 67787 - DNA, 227 bp, Glycine max
  Clone ID: 700843152H1
ctttcctggtagaggccttactgctactgttaacagcattgagtcaggaactggaggtgctaaactattgaaagcatcacttggatctatagatttcatcacctctttttgtcaatctgaagtcgagtcagaaaagatcaaggaagctgttaatacatcttcttatggaagtgaatatgttcatgctgccctttcagttaatcagaaggtaacattgattcatctag

SEQ ID NO: 67788 - DNA, 225 bp, Glycine max
  Clone ID: 700843153H1
cctttggcagtgatagtggtcctaactctgcccgattgcttctttttggcacataattacttaatactctataggaatatcttggcatcaagttattcagctttgttaaggaatattctctaacatctgctaatcgtctgagaagataataccccaatcaatttgttctcggtatggtttagcaattggtgcaacagtggctccagttgtccgtgttctggtatg

SEQ ID NO: 67789 - DNA, 227 bp, Glycine max
  Clone ID: 700843154H1
gaagtaatgcctaaacctaatgattcaaagaaaagctaaaagatcatggaacaagtaaataccattttcaaattgtctcatcaattctattatcaaaaattataaaaaataaattataaagaaacgaaacacgggcaagaaaggggagtagagaccactcaataaatgaaatagctactaaaggctttgttctctttttagttatttgataattatccaatttgagt

SEQ ID NO: 67790 - DNA, 241 bp, Glycine max
  Clone ID: 700842521H1
aaattctctcaccaaatcctcacttatccaaattcgatactccaatccccacccaaattccccgcatcgactcccctccccaaaattcccccatcgccggcgtctcccgcggccgaacgcatcacatcgccgattcggctacggcgctaacagtggctatcgtatgggtaagattctccaagaaaccgcgaaccgtcggcgaattccacatcggcgtacccctctgcggcgcccggcacca

SEQ ID NO: 67791 - DNA, 239 bp, Glycine max
  Clone ID: 700842523H1
cttcttgtggagtagatggagtgaaggttgatgtgcagaacattattgagacccttggtgcgggacatggtggccgagtgtcacttactcgcagctatcatcacgcgcttgaggcttccattgctagcaattttactgataacggatgcattgcgtgtatgtgtcacaacactgatggactttatagtgctaagcagactgctattgtgagagcttctgatgatttttaccctcgtgat

SEQ ID NO: 67792 - DNA, 243 bp, Glycine max
  Clone ID: 700842524H1
attaggattaggattagggctaccaataccaataccaataccaattctattctatggcttgctcaagcgcccaaatacacggtctcggaaccccttcctcccgaaccctatttttaggtcagaggctaaataccaaggccgcctttatcaagctcaagtccacacctagaagactccgccctctcagagtggttaatgagaaagtcgtcggtatcgatttgggaaccaccaactccgccgtgg

SEQ ID NO: 67793 - DNA, 245 bp, Glycine max
  Clone ID: 700842525H1
tggaaacatcccagtttccattaagaaattcttctgatgtacctagccattcactggatattcaaatagagccagatgcaaacaccactaaccagttaaacccaggaagggatcatgctatcggcatcctgtctacaagagattctgcccatgcgtcttctattattgcagtgaatacggtttatcaaggttcagatgatgaatcaatggaaagtgttgaaaattttcctgttgatgttaataat

SEQ ID NO: 67794 - DNA, 242 bp, Glycine max
  Clone ID: 700842526H1
ctctctagagcgtcgtcgtttagttagggcagaaaaccccttttcggatcggtggagcgaacctcgccggcgagacccccgaggctgttcaatcggcgatcgagcaacggcgaaaagcgacgaagatgaaggttttcgtgaagactctcaagggcacgcacttcgaaattgaagtgaacccttcggacacgctttctgaagtgaagaaaaatatagaaactgttcagggtgcagatgtctat

SEQ ID NO: 67795 - DNA, 244 bp, Glycine max
  Clone ID: 700842527H1
ataaaaaatggctgatacaggtggaggagatgcagtgagaccagtggtaatatgtgataacaagtgtggctgcacacttccatgcactggtggttccacttgcaggtctcttaagttcatgatttcaacaaagtgcacaagtgctggcactgccacaggagggggtgatcacgtgacatgctcgtgcggagagcactgtggttgcaatccatgctcatgtcccaagattgcggctgctggaagt

SEQ ID NO: 67796 - DNA, 244 bp, Glycine max
  Clone ID: 700842529H1
tgaacctattcagccagagcctgagcttgaggtgccaaaagagctaatacaatcaacaaagctagaagagttgaaaaagctgcgcaagtcggcctttattcctgtaaatcctgaaacagatgctacaaagcttcatgatgaggaaactgggatcacccggcgccgtctcgctaatggaattcctgttaattataagatatcaaaaactgaaacacaaagcggtgtgatgcggctgattgttggt

SEQ ID NO: 67797 - DNA, 236 bp, Glycine max
  Clone ID: 700842530H1
atgaagcatcatgtgtatgcttagttgtcatactgatacttgctctaacattggcatggagggtgctgaactgagttatggctaaggccaaagaggttagagaggctcctaagagagcaaggccttcaaggaaatccctacaggcttttggttggggatttaaaggagattatgaatatgcaaaaggaagtcacatccaaacccatgaatctctcccatgatatagtgcctcgtgt

SEQ ID NO: 67798 - DNA, 247 bp, Glycine max
  Clone ID: 700842531H1
ctactacaagtacttccttacaatcaaaaccaacaacaactatggcaagttatcaaaagcactacgatgatcagggtcgcaaggttgacgagtatggcaacgttgagaagcaaaccgacgaatacggcaaccctgttcatgctgctagtgtcacctatgtagccaccagaactgctgctggtggttacagtgatgacattaataagcaacatgataccaccaatgcctacggcgtagacactggtag

SEQ ID NO: 67799 - DNA, 236 bp, Glycine max
  Clone ID: 700842533H1
gccatgggagatattggtggacgtgggaaagccagagagactcacgagctgggtgcacactttgaatccctggctgacaaagtaactgaccatgcagcagccaatgtagttggaaacaaagagagtcaaagagaagctcgtggtggtgttcgtgatgttgggaagttcgaaatgagaactgaagggggagaaaaaggaaacaaggatagaccagaactgaaaacacgaaccagaga

SEQ ID NO: 67800 - DNA, 243 bp, Glycine max
  Clone ID: 700842534H1
ctatcccattctccttctatctcaccaaaacgtcaccgttttacatttctgttctcactcgccaacgccgcttcctttccgtttcttctttaaccgctgaccaccacaacctctctgatttcggagatggtgacagcgttgcaatttcaaacgaaggtttgaagatgcttctcaaagggatgacttatccagaacttgaaaaatgggttcaatcacatggatacaggcctgggcaggctatga

SEQ ID NO: 67801 - DNA, 241 bp, Glycine max
  Clone ID: 700842535H1
cttcaacaccaacaaagtctacatccaaagagaaaactgaaaaagtcactaaaggaaaaggcaagaagaaagagaagtcaagccctagtgataatcagttacgtgatgcgatatgtaaaattcttaaagaagttgacttcaatacggcaacatttactgacattctgaagcaacttgctaagcaatttgatatggatctcactcctaaaaaggcatctataaagctgatgattcaggaaga

SEQ ID NO: 67802 - DNA, 241 bp, Glycine max
  Clone ID: 700842537H1
cttgcagaggcattaactggttatacagtgcacctcactaccatagatggtagaaacttaaccataccaatcaacaatgttattcatcccacttatgaagaggttgtcccaagagaaggaatgccacttccaaaagatccatcaaagaaggggaatttgaggataaagtttaacatcaagttcccaactaggctcactgaagagcaaaaagcaggaatcagaaaactcttaaatgcctaag

SEQ ID NO: 67803 - DNA, 240 bp, Glycine max
  Clone ID: 700842538H1
ctcgtgagtcgcagaaccctcccatggccgccgtggcccctccgcggcgcaagcctcgatcatacgccaaggcctccgtagttctctccgttcttctcgttgtctccgtcatcgctctcttggtcctttcgtcgaacaagttgcgtgcgttccaacgcggggtttcctatgagacgatcactgtcgtcaacgttttccctcacgaccctcaagccttcacccagggccttgtttatgata

SEQ ID NO: 67804 - DNA, 240 bp, Glycine max
  Clone ID: 700842539H1
taaatttgttatggctcgtgcatagcatatgaagattgagaagatgttttatctggcaatgctttttctgtgtgtgtaaaccttgacctggttactagagcaacaaggacattgttgcacaaataatatctgctagcattgccggcgatttagttcttgctacagcatattcacatgagctgccacgatatggtcttgaagtaggacttacaaattatgcagcaggtgctgtgttcatga

SEQ ID NO: 67805 - DNA, 241 bp, Glycine max
  Clone ID: 700842540H1
gcctttcggtgacccagagatcaagaacctcgttagacactacaacgtgcaaggaattccttggttggtgattataggtcctgatggtaaaacaataaccgtacacgggaggagtttgataaacttgtaccaagagaatgcgtaccctttcaccaaggccaaagtggaggagctggagaaacagctggaggaagaggccaagggtcttccagcattggtgtatcaccaagggcatcgacat

SEQ ID NO: 67806 - DNA, 242 bp, Glycine max
  Clone ID: 700842541H1
gtttaaaaatgtcgcagttgctggataaagccaagaacttcgtgtcggagaaggtaaatgatatggccaagccggaggcgagtgtcactgacgtggacttcaagcgcgtgagcaaagataatgtcgagtacttggccaagggagatagcatcagggaaaattccagacccaggatcgttgaaggcaaaggacacaacaatggtggatgtgccagttaaggttccatacagcatattgatgag

SEQ ID NO: 67807 - DNA, 243 bp, Glycine max
  Clone ID: 700842542H1
cgtgtgcaaagtcgcatccgtttgtggcttctcccggatcggcctcgtcgccggtggagtctccgccgatgtcgccgatgactgtgagtgttaatgagatggtggcttcgctaaggaacttgcaactggggaaggtgaagtccttgccttcttcgtggaatgttatggggtcttccgggttcgggtctcctagaggacccatgatccgacccggatttttcagccttccgacaacgccgaccc

SEQ ID NO: 67808 - DNA, 242 bp, Glycine max
  Clone ID: 700842543H1
tctgacttttggcggtgtgggagtcacgagagcagcaaggggaagtcacaagagtcacaagaatggagagaggttcgggcaagctgagcaggaagaaaagtggtggtggaaacggacaggttctagacggttctaatattatggagttggttggaaaccagcaagttttcaccaccttcgtggaccataagtttcacgagttagacacagacaaagatggcaaactctctgtcaaagagctc

SEQ ID NO: 67809 - DNA, 238 bp, Glycine max
  Clone ID: 700842544H1
cacgctcttctctctagagctgctgcgttgctaaaacgcaccggtttgttcctgttctcgttcaaaagaaaactgacacaagtgaggcttggtgcataaacagcaatggcagaaaaaccccaaccggttcgggttctctactgcggcgtgtgcagtttgccccccgaatactgcgaattcggatccgatttcgagaaatgcaaaccctggttgatccaaaacgtccctgacctatacc

SEQ ID NO: 67810 - DNA, 238 bp, Glycine max
  Clone ID: 700842545H1
gtctcaaacccaaagaacacggagttggcggcgaccctttctctctctgatttcgatcatggcagctgttgctccttcttctgacaaaactgcagatttattgcagaatttgactctggactctgagtccaaagccattggagttgctgagcctgcgaagaagaatggacctgctttttccaatggggcagctaaagggagggccaagccattcaatccaaattcatgctttgttcca

SEQ ID NO: 67811 - DNA, 238 bp, Glycine max
  Clone ID: 700842547H1
gttgcattatcacaaacacctcgtccctcacaatgcagctagcaatggcggccaacgctgtcgtttcaccgtcgccgttccgacctcagccctttctccggtcatccttctccggcgtctccgtcaagctcactccccaatccataacgctttcacgctccaagcccctcaccgtcttcgccgccaccaagaaggccgtcgccgtcctcaaggggacctccgccgtcgaaggcgtcgc

SEQ ID NO: 67812 - DNA, 241 bp, Glycine max
  Clone ID: 700842549H1
ttgagagtggggataagtgggatgagattgaagctgggttgcctcagtgagaaagagtgtggtctcctttgtattgtacaattctttgatcaattggaggggagcactgaaaattgaattaactatggaatatcagctttggaatagctttattttgttttgccatttcttctagccattggcctttttgcttgctcgaatgaattcatcggtgactggtaattttgccaagttagtttaa

SEQ ID NO: 67813 - DNA, 238 bp, Glycine max
  Clone ID: 700842550H1
gtttgttgatatatataaccctgagagacacagctggtgtgagattaagaatgctatgggtgttgtgtgtaaaggatggaggtcgtttattcaaagcaaagaattcactactgtgcgaaaattggctgggatgctagaggaatggctctatttcttaacaacagactgtgaaggaaaggaaagtcattgggaggttatggattgtctcggtcataaatgcggatctcttccaccaatg

SEQ ID NO: 67814 - DNA, 240 bp, Glycine max
  Clone ID: 700842552H1
tcaaaaccaacaacaactatggcaagttatcaaaagcactacgatgatcagggtcgcaaggttgacgagtatggcaacgttgagaagcaaaccgacgaatacggcaaccctgttcatgctgctagtgtcacctatgtagccaccagaactgctgctggtggttacagtgatgacattaataagcaacatgataccaccaatgcctacggcgtagacactggtagacagcattctagtggt

SEQ ID NO: 67815 - DNA, 239 bp, Glycine max
  Clone ID: 700842553H1
ccaaaacagtaaagctaacttcaacacctttaattttctaaaagtaattcagcggctgaataccaagcggagaagatgagtcaggagcagccacggcgtcccaaaggccaaaaccccatcaaatacggcgacgtttttgtcgtctccggcgaccttgcacagaagcccgtcgcaccggaagatgctgccatgatgcaaagcgcggaaactcgagtgctcggacaaacccaacccggcgg

SEQ ID NO: 67816 - DNA, 236 bp, Glycine max
  Clone ID: 700842554H1
aacaaaactacccttttgcttttgctctttgttctttgccatggagtggccacaacaacaatggccttccatgatgatgagggtggtgataaaaagtcaccaaaaagtttgtttttgatgagcaactccacgagggttttcaagactgatgcaggggaaatgcgtgtgctgaaaagcaaaggtggtaggatattttataggcacatgcacattggcttcatctctatggaaccaaa

SEQ ID NO: 67817 - DNA, 239 bp, Glycine max
  Clone ID: 700842555H1
ctcgagccgcgcccaagaaaacctaggcctcagattcctggacctcctacttcaaaaggagaaactatagagaacaacaagaaaattggtctttgggcagtgaagttaccttcagcagattcaattgtagttcgacgaacgctagggattctaacagaaaacctccatggtctccctgggctgaacgagagtgctgagacagttgagaaaagggaagccttctggtcatctgtgaagcc

SEQ ID NO: 67818 - DNA, 243 bp, Glycine max
  Clone ID: 700842556H1
ttataatagaacgcggaagaagaagaagaagtaaccgacgcttgaataaaccgaaccgttcttcgattcgggttcaagttcgaagaagaaaagcgatgagttcgggtagtagcagcagccacagcagtgagaaggagaaggagaagcagagagtgagtcgcacgtcgctgatactctggcacgcgcaccaaaacgacgccgcagctgtgcggaagctcctccaggaggatccctcgctcgtca

SEQ ID NO: 67819 - DNA, 242 bp, Glycine max
  Clone ID: 700842557H1
gtatacattagcatgggataacaccacaggattctgatcctattgtgttggccttcgggatcggagtaatgattaacagggacagtcgggggcattcgtatttcatagtcagaggtgaaattcttggatttatgaaagacgaacaactgcgaaagcatttgccaaggatgttttcattaatcaagaacgaaagttgggggctcgaagacgatcagataccgtcctagtctcaaccataaacg

SEQ ID NO: 67820 - DNA, 239 bp, Glycine max
  Clone ID: 700842558H1
gtacagagcattttgatgcatgtaagtggacaaaatcagaaccacattcctgggaattgatcttcccaatagaggtatgtggtagtaataatggttttgaaatgtggagttctgagtgggcaaatcaaacttcatggcatttgagtttccttattgacaatcccaaacagtctacagtttttgatattctcttgggaatctctcaagattttgaaattgctggtaatactcttatgcca

SEQ ID NO: 67821 - DNA, 239 bp, Glycine max
  Clone ID: 700842559H1
ctactacaagtacttccttacaatcaaaaccaacaacaactatggcaagttatcaaaagcactacgatgatcagggtcgcaaggttgacgagtatggcaacgttgagaagcaaaccgacgaatacggcaaccctgttcatgctgctagtgtcacctatgtagccaccagaactgctgctggtggttacagtgatgacattaataagcaacatgataccaccaatgcctacggcgtagac

SEQ ID NO: 67822 - DNA, 235 bp, Glycine max
  Clone ID: 700842560H1
atcaaaattaaaacgaattcgaatgagtacctgcagcctggcccaagggagaatctcctacgatgctttataaagcgcaaccgttccagccaaacatactatttgtatctcagtttaaccaatacactagctgaagatgggaagttccttcttgctgcacgcaaatgcagacgtccaacctgcacagattatatcatctctcttgatgcagatgatatgtcaaagggaagcaact

SEQ ID NO: 67823 - DNA, 241 bp, Glycine max
  Clone ID: 700842561H1
gaaaacctaagcttagaattagaaacaaagaaaagaagaaaggaaagaattgatcgttgaaaatgcagggaggaaagaaagcgggagagtccattaaggaaacagctacaaacattggtgcttctgccaaggctggcatggagaagaccaaggccactgtccaagagaaggcagaaagaatgacagcacgtgatccggtgcaaaaggagttggcaacccaaaagaaagaggcaaagatgaa

SEQ ID NO: 67824 - DNA, 241 bp, Glycine max
  Clone ID: 700842562H1
ttagcatccctccagtttttcacgccctctctactgtttttgcctcttccgtcaccgtgcaagcatgctccccagttgtaccatttaccgttgtagatatgtcttgggtcccctattttgtttctctctctacctcttctgtttctctctctatctctccattctctccctctcattctctctaattaagaataagcatggaagtggcaattgtctaacttgaccccttggttgaaggggc

SEQ ID NO: 67825 - DNA, 244 bp, Glycine max
  Clone ID: 700842563H1
gccgtttgtgttgttttcgggacgaagaagaagatggtgtcaggttctggaatctgcgcaaagcgggtggtggtggacgcgcgccaccacatgctgggtcgtctagcctccatcgtggcgaaggagcttctgaacggccagaaagtggtggtcgttcgctgtgaagagatttgcatctcgggcgggcttatgaggcagaagatgaaatacttgaggttccttcgcaaacgcatgaacaccaaac

SEQ ID NO: 67826 - DNA, 243 bp, Glycine max
  Clone ID: 700842564H1
gtttgattaccaagcaagttatgagcaagatggcagaaatgataaacagtctttgtggtggtgatgaaaaattgatgcgtgaaaggacacatttgctgttggcttgttgttcaaggatggcaatttgtaagaaagatgtttggagagttgaatgtggaatcccttctggatttccgctcacagttatttgcaatagcatttttaatgagatgctcattagatatagctatgaaaaatactgcg

SEQ ID NO: 67827 - DNA, 241 bp, Glycine max
  Clone ID: 700842565H1
aattaattcagcaacaaatacaatgggttctcttatggcaggatgggactctctgatcttggatcctgaatcagctacaatagagaggaatcgatcactcaccaaagaagaaattaatgcttactggagagtaaagaaggagacagagttagaacacctcagagctatgtccaaactatctgagactattcaggcccgaaaatttgaggattcagagaattctcataagtcaagtaccgtg

SEQ ID NO: 67828 - DNA, 234 bp, Glycine max
  Clone ID: 700842566H1
gatcatgatgacttccctcctgctctttatgagttgtttccttcagggcttgggagtgcactgatgcaggcaagtaataacatcaacaggctgtttgagaacatgaatctgacaccttggtctctgactagtgggcgtgtgaaagagaaggatgaccattacaaactacggtacgagatgccggggatcgccaaagaggacgtgaagatcaccattgatgatgatggggtattg

SEQ ID NO: 67829 - DNA, 237 bp, Glycine max
  Clone ID: 700842567H1
agctattgaacttatctctcttctcacttctgttgttataagtaacttccctcatcattacaaaacaatcctccacaggtttcaaaatgctgaaatcgggcatgggaattgaggagagaaagcaagtgaagaagccagcacaagccagctcgagaaaagggtgtatgagagggaaaggaggtcccgagaatgctagttgcacctacaaaggtgtgaggcagagaaatggggaaatgg

SEQ ID NO: 67830 - DNA, 237 bp, Glycine max
  Clone ID: 700842568H1
gcatatgcttttcttggaatgaagaatctactttgaaaatgtccatgtttctgaaattgaacatctagcccctttgatacctctataactaggcttcttattcttctatttacttggtaagccagctaattccagaatagtaagtatgtcctcaatgttcgaattaaatatgatgctgatcttcataatattcctgttgcaaagtatacaaaggtcacatcatcttaaagcatacac

SEQ ID NO: 67831 - DNA, 238 bp, Glycine max
  Clone ID: 700842569H1
tgagaagaccggaacttctcacgtcaatggagcacatgatactactaagcttgctggccttcttgagaacttcattaagacatatgtccagtgttatggttgtggaaatcctgaaactgagatcataatcactaagaaccaaatgatccagctgaaatgcgctgcttgtggttttgtgtctgatgttgatatgagagacaagctgactaccttcatcattaagaaccctccagaagtt

SEQ ID NO: 67832 - DNA, 239 bp, Glycine max
  Clone ID: 700842570H1
caagtgttagggaggacaaataccgcccctttatgcgcgaagacagtgagaagaacatcaaatggagatatggtgctcctccaaattatgacgttgtcaacaaattatttgatgaaggcagaaccaaggtatggcctccgggttcacttgaagaaaaggtgcagactttagtgaagatatgggagatggaaatgttccacaaggaggatttcaaggataacagatcagtggacccagag

SEQ ID NO: 67833 - DNA, 240 bp, Glycine max
  Clone ID: 700842571H1
caagtacttccttacaatcaaaaccaacaacaactatggcaagttatcaaaagcactacgatgatcagggtcgcaaggttgacgagtatggcaacgttgagaagcaaaccgacgaatacggtaaccctgttcatgctgctagtgtcacctatgtagccaccagaactgctgctggtggttacagtgatgacattaataagcaacatgataccaccaatgcctacggcgtagacactggta

SEQ ID NO: 67834 - DNA, 240 bp, Glycine max
  unsure (1)..(240): unsure at all n locations
  Clone ID: 700842572H1
gtggctcttctaagaggaaacttgatcgattcctaatacacttccagaggtatattttaagcaaagggacactgcctctggacattgaatttgacttacaggatctgtttgtggacttgcgtcccaatatggttcgttacacttctatcgaggaagtgaatgcagctctagtagaactcgaggaacatgatcggattgtttctgctgataaggtcagcagtganaaacattctggcactg

SEQ ID NO: 67835 - DNA, 241 bp, Glycine max
  Clone ID: 700842573H1
attaaattctacattaaaggtctgaaagcttctgagatgttcttaaggaatgttagatatggaattatggatatagtgacaggggctgttcaatataccctgataggattggcatttaactcaagccttattattattacttgttttgcatttcttcaattgctttctcttggtccataacattgtagtattttacaatacgtgattagatgttgaaacgcaatgcaggtctcttttagtg

SEQ ID NO: 67836 - DNA, 240 bp, Glycine max
  Clone ID: 700842574H1
tgaacactcatcaccatggccaagcttgttctttccctttgtttccttcttttcagtggctgcttcgctctgagagagcaggcacagcaaaatgagtgccagatccaaaagctgaatgccctcaaaccggataaccgtatagagtcggaaggtgggttcattgagacctggaaccctaacaacaagccattccagtgtgccggtgttgccctctctcgctgcacccttaaccgcaatgcc

SEQ ID NO: 67837 - DNA, 241 bp, Glycine max
  Clone ID: 700842575H1
atagaatcaaagaaaggggtggtggctgcttcgaaagcttaataatttgtttatttccagaacatcatagttttcgcagcagcaaactaacaaattactcatatcatataataagatggcccgttctctctcgcaagccaaacgtattggtgtccttgttgctcaatctatctccctaattcccgttcatcggcgaggttacgcagtggcatccgatgtatcggtaagagttggattgggt

SEQ ID NO: 67838 - DNA, 236 bp, Glycine max
  Clone ID: 700842576H1
agagaacataaacaagaacaagagaatatatgaacaaatagaaagccttgctaagaaataccagagcactcctccccaattggcattagcttgggtacttcaccaaggcaacgatgttgttcctattcctggaacaactaagattaagaacctggatcaaaacatcggtgcattatcactgaaatttacagaaagtgacttgagagaaatttccgaggcagttcccatacatgatg

SEQ ID NO: 67839 - DNA, 239 bp, Glycine max
  Clone ID: 700842577H1
atcacccaagtaaagtaccaagggggctgtggaagcgttgggcgttttctgccacgggagccatagaagcagcacatgcaatagcaacaggagaccttgttagcctttctgaacaagaactcgtagactgtgtggaagaaagcgaaggttgttacaatggatggcactatcaatcgttcgaatgggttttagaacatggtgggattgccactgatgatgattatccttacagagctaaa

SEQ ID NO: 67840 - DNA, 243 bp, Glycine max
  Clone ID: 700842579H1
cacaaaacaaaaagtttacgttacaaatcgcataataaccgtcctaagtttattgagagaattttgcaagtgtgagaaacatggcatctcgtcaaaacaacaagcaagagcttgatgaaagagcaaggcaaggagagactgttgtcccgggtggaactggtggcaagagcctggaggctcagcaacaccttgctgaaggaaggagcaagggagggcaaacaaggaaggaacagctgggtacag

SEQ ID NO: 67841 - DNA, 241 bp, Glycine max
  Clone ID: 700842580H1
tgattaatgacactgtttttgcttttgttatttcataaagcgtgctatcatagtaattcaatttagctaacatgttgagtgtaatttcaggtctgagcaatctggttggtagaacctttggtcttagagagtcaagttttatgtctggattagacgatcaaattcctactgccttcgatccttttgctgatgcaatgctgatgactcgggtgctgggtcaaggagtagtgcatattcgcgt

SEQ ID NO: 67842 - DNA, 238 bp, Glycine max
  Clone ID: 700842582H1
cgagagagtccagtgagtgttagcggttctggttctggaaattgatcgagtcgaaaagaaccctaacaataacatggattctcaggttgccgtagctcttgctctttcacttgttggtggtgtcagcacttctatcggtgcactttttgtacttgttaataaagctcccagtttgaagatgcttgggctattacagggttttgctgctggtttgatgcttagcatatcgttctttgat

SEQ ID NO: 67843 - DNA, 234 bp, Glycine max
  Clone ID: 700842584H1
aatttgtttttgcttggcgtatgtttatgatgagtgaaaaatcatagttactggttactacccggctttgtgttgtatgaatccattgttgtgcagatattctggtgaattaatattctcaattagggtaagtagatgctttaggttaactattgttttggatgtaatattagtatgtttaaaactgtggttgcaagtttgttttcaaatgtggctgcaattgagatagtggag

SEQ ID NO: 67844 - DNA, 111 bp, Glycine max
  Clone ID: 700842585H1
gtggaagcacacaaagagcaccacgttacatatagtaactatggcgagagtgggtacaatgaaacttggttcagaagggtttgaagtgtctatgcagggacttgggtgcat

SEQ ID NO: 67845 - DNA, 153 bp, Glycine max
  Clone ID: 700842586H1
atttggagatgaatcgccaaatcatactcactcgtccgcccgatattaacctgcccctctccgccgagcgcagccgccgccacagccgtggaattctgagccctgtgatattctggatgttggtcttggtactcaaggctacgagactgagag

SEQ ID NO: 67846 - DNA, 91 bp, Glycine max
  Clone ID: 700842587H1
tgcatttcgttactttcatttgttgtgcaatcttacaagttccaaacttctctattttgttattatttgttctcacttctcacacatacag

SEQ ID NO: 67847 - DNA, 236 bp, Glycine max
  Clone ID: 700842589H1
gtccctgcggatgttgacgcaatgtgatttctgcccagtgctctgaatgtcaaagtgaagaaattcaaccaagcgcgggtaaacggcgggagtaactatgactctcttaaggtagccaaatgcctcgtcatctaattagtgacgcgcatgaatggattaacgagattcccactgtccctgtctactatccagcgaaaccacagccaagggaacgggcttggcggaatcagcgggga

SEQ ID NO: 67848 - DNA, 238 bp, Glycine max
  Clone ID: 700842591H1
caacataacaatgtcgttgattccaagtttcttcggcaccgggcgaagaaccaacgtcttcgaccccttctccctcgacgtgtgggacccattccatggcttccccggcaccaccgccctctccgctccgcgctccgagacggcggccttcgccaacacgcgcatcgactggaaggagacggcggaggcgcacgtgttcaaggcagacctgccggggctgaagaaggaagaggtgaag

SEQ ID NO: 67849 - DNA, 233 bp, Glycine max
  Clone ID: 700842592H1
ggacagttgattctggctgctgctggagtggttaaaggccgcacgtgcacggcttttcctcctgttaaacccgtgctagttgctgctggtgctcattgggttgaacctgacactgaggcagcaacagtggtagatggtgatctcattactgcagctacttatgaggggcacccggagctcattcgccatttcgtgaaggcattaggaggaaaaataagtggttttgataagaa

SEQ ID NO: 67850 - DNA, 238 bp, Glycine max
  Clone ID: 700842593H1
ctttcgtttttctccctctcaggacatcctgtattaacagtgaaaagtgcatctgaagagacagaatgcaaggacccgggggtggcatggatcgtttctttgattttggcgatccttttggtggttttggaggctttggttcctttggacctcccaggagtttaatctcaagcttttttgggggtagggacccatttaatgatcctttcttcgcccgaccttttggagggatgtttga

SEQ ID NO: 67851 - DNA, 229 bp, Glycine max
  Clone ID: 700842594H1
ttgagacgtgctggaggggcacagggtggtgttcgacgagcgagacgtgtcgctgcacggggagtttctgagggaggtgaaggagctggtggacggggaaggggtggcgctgccgagggtgttcgtgaaggggaggtacgtgggtgggttggaggagttggtggagctgaacgagacgggtcgactcgggaggatattgaatgcgacgcgtgtggagagggggattggg

SEQ ID NO: 67852 - DNA, 116 bp, Glycine max
  Clone ID: 700842596H1
gaaagaacttccttataaccaaaaccaacaacaactatggcaagttatcagaagcactacgatgatcagggtcgcaaggtcgacgagtatggcaatgttgagaggcaaactgacga

SEQ ID NO: 67853 - DNA, 243 bp, Glycine max
  Clone ID: 700842601H1
gcgtctctctctcacctcaacaaactcctctgcatgccgccgctcaactcttcaccctctacttcgccaccgcgcagcagcgtcggagtttcgaccaaatctgtcggaaggccgaggatggtcgccgatttcgcgaggccggtggggcgtgtccgagcggtgacgagcgacgacgagtggggcccggagaaggaggaggaggcatacggcggaggagtggcggtggaggagaaaccgacggag

SEQ ID NO: 67854 - DNA, 245 bp, Glycine max
  Clone ID: 700842603H1
tcggctcgagggaaaatatctgcaccttgaagcttcacgagaacattgctcgcccttcacgcgctgacttctacaaccctaaagctggtcgcattagtaccctcaacagcctcaccctcccagccctccgccaattccaactcagtgcccaatatgttgtcctctacaagaatggaatttactctccacattggaatctgaatgcaaacagtgtgatctatgtgactcgaggacaaggaaaggtt

SEQ ID NO: 67855 - DNA, 235 bp, Glycine max
  Clone ID: 700842604H1
tattaccaagcaagttatgagcaagatggcagaaatgataaacagtctttagtggtggtgatgaaaaattgatgcgtgaaaggacacacctgctgttggcttgttgttcaaggatggcaatttgtaagaaagatatttggagagttgaatgtggaatcccgtctggatttccgctcacagttatttgcaatagcatttttaatgagatgctcattagatatagctatgaaaaatt

SEQ ID NO: 67856 - DNA, 234 bp, Glycine max
  Clone ID: 700842605H1
ccctttgaaccctaatctccacccaaacccattttcccgggaaattgccttggaaaagaaagagcgatgaggaaaatgcagaatcacaggctgaagcagcagcagcagcagcaacaacaagctcttatgcagcaagctcttctccaacaacagtctctctaccaccctggcctccttgctcctcctcagattgaaccatatccaagtacttgccgcagtgtcttctttatcttt

SEQ ID NO: 67857 - DNA, 234 bp, Glycine max
  Clone ID: 700842606H1
ttcgcatgcaacaaaagattgataagtactggaaagattgcagtttggttttggctattgcagtcgttatggatcctcgtttcaagatgaagcttgttgagtgtagtttcactaaaatctatggcgaggatgcccatgaatatgttcagattgttgatgatggaattcatgagactgtttcacgagtatgtagcccttcccctacgactaaccccggcttatgcagaagaagga

SEQ ID NO: 67858 - DNA, 230 bp, Glycine max
  Clone ID: 700842607H1
cgcaggtggcgctgccaaacgcagaacctccggcagaaattgccaccgcaaacacgtggaagacgggtagtagtactccatctcgcattctctcatattccctttactaattaaagatcatgaacagcgagagacagtcgacgacgacgacgttgctgcacggcaagtacgagctaggtcgtgtgctggggcacagaagcttcgccaaggtctaccacgcgcggaacctg

SEQ ID NO: 67859 - DNA, 228 bp, Glycine max
  Clone ID: 700842608H1
ctgcagaagagcgtcgcagttgtaaccctaatcagaagaagcgcagcttcaagcgagtgacagccaccagccatgggtcgtatgcacagccgcggtaagggtatatcctcttctgctttgccctacaatcggacacctcctagctggctcaagatctcttcgcaagatgtcgaagaaactatctgcaaatttgcgaagaaaggtttaaccccgtctcagattggtgtc

SEQ ID NO: 67860 - DNA, 233 bp, Glycine max
  Clone ID: 700842610H1
tgcagaccgagctagctagctagcaagcaagcacagagatggaggcaaagcgaagccatgccctacatgtgcttggcacgtgtttcactcttcctctgcgctctaaccctatccgctgctcacggaagcaccacggttcaagacatcgcgagaaagttgaaactcggggacaacgagcttctgcgcacggagaagaagttcaaggttttcatggagaattacgggaggagcta

SEQ ID NO: 67861 - DNA, 229 bp, Glycine max
  Clone ID: 700842611H1
gattcatgataactcgtcggatcgcacggcctttgtgccggcgacgcatcattcaaatttctgccctatcaactttcgatggtaggatagtggcctaccatggtggtgacgggtgacggagaattagggttcgattccggagagggagcctgagaaacggctaccacatccaaggaaggcagcaggcgcgcaaattacccaatcctgacacggggaggtagtgacaata

SEQ ID NO: 67862 - DNA, 232 bp, Glycine max
  Clone ID: 700842613H1
ctccaaagtcccagcacacccatttccgttctttgtccttgatgggtttagtctttggaaaaataaccgttgagacagcaaaatatgaagtgatcaaatccacaagtgagtacgaaatccgtaagtatgcaccatcagtagtggctgaagtcacatatgacccttcacagttcaagggaaacaaagatggtggctttatgattttggccaattacattggcgctgtggggaa

SEQ ID NO: 67863 - DNA, 173 bp, Glycine max
  Clone ID: 700842614H1
ataacattgcaacgcattccttatattttctatgatcagaatgtcataccactaccagtattagttttattgttgtagctactgtagttaaattctttcatttgttcccctgtttggcatcactatgtaaacaaatatggccatttttataataaaataaattcttttgctat

SEQ ID NO: 67864 - DNA, 112 bp, Glycine max
  Clone ID: 700842616H1
cgtctcgacgaattctgctcgacggctcgagcttgggaacttaccgttgctactggacactacttcgccgcggagcgtgactctggagacgaaagcgcgtcccgccggatcc

SEQ ID NO: 67865 - DNA, 237 bp, Glycine max
  Clone ID: 700842618H1
ttaaatttcgataagaaaagttcccaacttcagctaagagaaaatgtctctgattccaaactttttcggtggccgtaggagcaatgtgtttgatcctttctcccttgaagtgtgggatcccttcaaggattttcattttccctcttctgtttctgctgaaaatttagcatttgtaagcactcgtgtggattggaaggagactccagaagcgcacgtgttgaaggcagatattccagg

SEQ ID NO: 67866 - DNA, 235 bp, Glycine max
  Clone ID: 700842619H1
ctctctctctctctcgaacatatgacagcgatgagtgttgaacggccaagatggtaaacgaagacgagtctgtgcgcgcggcgatggcggccgacaccgtcgtggtgggagcttctgctacgcctcaagcaaggtaccgtttcacacaaatctcaccagcagcttatacctttctcctggggtgtcaaacagccgcgctcaagatcaaggcttagcgccgccgtctctcgctgcg

SEQ ID NO: 67867 - DNA, 229 bp, Glycine max
  Clone ID: 700842620H1
gaaggattccaagaaaaagaagaagatcaaggaggtgtctcatgagtggcaactcatcaacaagcagaaaccaatttggctgcgaaagccagaagagatcaccaaggatgaatacgcttctttctacaagagcctcaccaatgactgggaagaacacttggctgtgaaacatttctctgttgagggccagcttgagttcaaggccattctctttgtgccaaagagggca

SEQ ID NO: 67868 - DNA, 232 bp, Glycine max
  Clone ID: 700842621H1
gcggcttcaaccttgtagttattctctttcttcttttttagctatccctctcttgaaaaatctagatctcgttcttccttgatctacgttacgcttttagtgaccggatctgtatggatctgaaccagatctacacgcagttagtggttttggcctggtctttcatagatctgatgcatggaggctcagatctactgtacagaggtgtgcgattcatatactgtagataatc

SEQ ID NO: 67869 - DNA, 231 bp, Glycine max
  Clone ID: 700842622H1
agctacataaggccacattttgttcgctggtcaaaagtcagaactacatatgatgatgatgacaatgacgaactcagtgatagtggcagtgaagtatcagatgatgattttatcgacaggaacacaaaggatatgattgatgatgatatgatggtgagcgttgaaggttttgattttaaccttgacttgaacaaaatgtctataacccccagaaaatcttttaaacatggg

SEQ ID NO: 67870 - DNA, 231 bp, Glycine max
  Clone ID: 700842623H1
ctcgagccgttttgatccaaagttggctgatgatgagagagaaaaaggaaatgaattcatcaagcagcagaagtatcctgatgctgtgaagcattacacagagtctatacgaagaaatccaaaagatcctagggcttatagtaacagagcagcatgctacactaaattgggggcaatgcctgaagggttaaaggatgcagagaagtgcattgaacttgatccaacctttgt

SEQ ID NO: 67871 - DNA, 230 bp, Glycine max
  Clone ID: 700842624H1
gttcgattctgcgtactttgggaggaacagacacacatgaaggattcgaattcggatctgtttgacccggtcatggcgatggagtccgagtggtctcgcggcggcaccacctccgatgccgatttcgccttcgccttcaacgacagcaacttctccgacagggttctccggatcgagatcatgcacgaccccgtcgacgcccgccctgattccgacgcctgcgccaccat

SEQ ID NO: 67872 - DNA, 229 bp, Glycine max
  Clone ID: 700842626H1
tgtaactgcactagtgttggccacatgccttcaaccaaagaggaaggtcacgattttcaggaggctaaagccaagacaacacaaactgcgaacaaggccatggaaactggtaaagatgggaaagaagccgcagagtcatggacagaatgggctaaagagaaactcactgaaggtcttggcttcaaacatgatcaagaatccaccactaagaaagtctctgactatgccg

SEQ ID NO: 67873 - DNA, 228 bp, Glycine max
  Clone ID: 700842627H1
aagaatcaaagaaaggggtggtggctgcttcgaaagcttaataatttgtttatttccagaacatcatagttttcgcagcagcaaactaacaaattactcatatcatataataagatggcccgttctctctcgcaagccaaacgtattggtgtccttgttgctcaatctatctccctaattcccgttcatcggcgaggttacgcagtggcatccgatgtatcggtaaga

SEQ ID NO: 67874 - DNA, 231 bp, Glycine max
  Clone ID: 700842628H1
cagaaatcaaagggctatgttggtgatgctgcacaaaagaccaaagaatatgttggtgatgcagcacagaagacaaaggattatgccactgacgcagcacagaagaccaaagattatgctactcagaagaccaaggactatgcaagtgatgcaactgatgctgcaaagaagactaaagattatgctgctcagaagactaaggactatgcaagtgaagctagtgatgttgca

SEQ ID NO: 67875 - DNA, 232 bp, Glycine max
  Clone ID: 700842630H1
tttatttctcacataactcctcttttcctcacctcaatctcactttttgttgttgtggttttctcttttgggtcttcagcttttcaagcgaagtctcaaagctaaaaaatttcaggtataacgtctctcaagttttatctggaagctaattagttattattggcaatgagcaatctcaagctaggtgtggacgttgtgggtgctcatgaccttatgcccaaagatggacagg

SEQ ID NO: 67876 - DNA, 232 bp, Glycine max
  Clone ID: 700842631H1
aacagcaacaacatatgagtcagtagaaggaggagagaaccgaacaaggactgacttgctttcaagggaggatcaaggctgcattcaagtggaaaaacttcaggagaaggtccatgatcctgctggcaaaggtggtcctgtctttggtgctggcaaagatgaagacaaacaagaccttggagttactggcacaggctaattaacctactatatatattactactatatacta

SEQ ID NO: 67877 - DNA, 86 bp, Glycine max
  Clone ID: 700842632H1
gtctctctctctccaccattgccatggatccttacaagctccggccatacagcgcctacagttctcacttctgaactacagattct

SEQ ID NO: 67878 - DNA, 239 bp, Glycine max
  Clone ID: 700842633H1
agaagaacgaagaagccacttttttggaggacttgaaggatcacattgacgagtttattaatgcttctatggatgaacataagacttgcttcaagaaaacagttcagaagatgttcggaatgtccaaggctgttgcagagagggacaccaatgctgccaaagaagttgagagttctctgcctcttcagacaactttgcaagactagtatcatgcttgctctcaagaaaaataatgtttg

SEQ ID NO: 67879 - DNA, 234 bp, Glycine max
  Clone ID: 700842634H1
caaaacagtaaagctaacttcaacacctttaattttctaaaagtaattcagcggctgaataccaagcggagaagatgagtcaggagcagccacggcgtcccaaaggccaaaaccccatcaaatacggcgacgtttttgtcgtctccggcgaccttgcacagaagcccgtcgcaccggaagatgctgccatgatgcaaagcgcggaaactcgagtgctcggacaaacccaacccg

SEQ ID NO: 67880 - DNA, 232 bp, Glycine max
  Clone ID: 700842635H1
gttctcacttctcacacatacagattttagccttttatattatcatggcttctaaggtggtttcggttttggttatagcgatgatgttgtttgccatgaactgttactgcactagtgttggccacatgccttcaaccaaagaggaaggtcacgattttcaggagtctaaagccaagaccacacaaactgcgaacaaggccatggaaactggtaaagagggacaagaagccgc

SEQ ID NO: 67881 - DNA, 229 bp, Glycine max
  Clone ID: 700842636H1
gggatatggtgcaaaaggcttctcaattcttaggcttggcaacaaaccatactggatcatcaagaattcgtggggggagaaatggggagaagatggctattacaagctctgcagagggcatggcatgtgtggaataaacactatggtttctgctgcaatggtgcctcaaccacaaacaacacctacaaagaattatgcttcttattagctatgcacttaaggaaatcta

SEQ ID NO: 67882 - DNA, 232 bp, Glycine max
  Clone ID: 700842637H1
cgagataacaagaagtagtgagaagaagggagagaatggaggacaaggcaaaagctgagcagaagaagataggtatgaccgagacttggttgaagaagcaccgtcttctttacaatggagccactagacaccctcttattattagcattcgcgatggcaccatcaacactgcttccttcaaaacatggctcgcacaggattacttgttcgttcgggcgtttgtcccatttgt

SEQ ID NO: 67883 - DNA, 228 bp, Glycine max
  Clone ID: 700842638H1
tgggtggtgaactatctccggcagatgccacgggggacgacgatgatgacggtgctgccggagcaagcgaacggcacgtggcggacatggcggagtacgtggggcagaagacgaaggaggttgggcaagacattcagacaagggcacatcatgcccagggaacaacaaggatgacagtgcattgagttatcatgagacaagaaaatggtttcaatttatatcgcttat

SEQ ID NO: 67884 - DNA, 229 bp, Glycine max
  Clone ID: 700842640H1
caaaactacccttttgcttttgctctttgttctttgccatggagtggccacaacaacaatggccttccatgatgatgagggtggtgataaaaagtcaccaaaaagtttgtttttgatgagcaactccacgagggttttcaagactgatgcaggggaaatgcgtgtgctgaaaagccatggtggtaggatattttataggcacatgcacattggcttcatctctatggaa

SEQ ID NO: 67885 - DNA, 228 bp, Glycine max
  Clone ID: 700842641H1
ctcgcttgtgctgccttcgtttgcgtttttatcacagaggaattaacatatatatagcaagcatggcagtcacactctacgaccttagctcttcctctgggttgaagaaacttgatgagtaccttctcccacgcagttacatcaccgggtaccaagctacaaaggatgatcttactgtttatgcagctttgccaactgctccatcagatgaatatggaaatgtttcca

SEQ ID NO: 67886 - DNA, 228 bp, Glycine max
  Clone ID: 700842643H1
agaacctaagtgagaaacaaagaaaggaaataattgatctttgaaaatgcagggaggaaagaaagctggagagtccatcaaggaaacagctgcaaacattggtgcttctgccaaggctggcatggagaaaaccaaggccactgtccaggagaaggcagaaagaatgacggcacgtgatccgatgcaaaaggagttggcaacccagaagaaagaggcaaagatgagcca

SEQ ID NO: 67887 - DNA, 229 bp, Glycine max
  Clone ID: 700842645H1
ctcactctctcactctatcgttcgtcgctattgaaattcgaaactcttctgcgcgttcttcctccttttatactattctgtttcaaacggtttaaacccttcgcggggtttttctttttctcgccataaaaaaataaaaagtgttcaacaaaaaaaatgtggtaaaaaacttgaatgcacgtgatgtaattgtaacagttcaagttttgaaagatgcatcattccttgc

SEQ ID NO: 67888 - DNA, 228 bp, Glycine max
  Clone ID: 700842646H1
gagcgagcgaaagtagaatctgaaaaacaatggcggcgaactagacacccacgccgtggcttccgatctgatcgacttcctcaacgcttctccaacggctttccacgccgtcgacgaggcaaagaggcgtttgcgtacgcggggtaccaccaactctctgagagggaagtgtgggaactgcaagcgggcaacaagtacttcttcaccagaaatcactccaccatcgtc

SEQ ID NO: 67889 - DNA, 230 bp, Glycine max
  Clone ID: 700842647H1
ggaacatcggtggcccttactatggaaccaacaccgcagacaccggtactggtcccagaagtggaaccacgggcggcaccggttatggaggcactggtggcactgattatggaacaactggtggcactggttatggaagtggaactgggtatggagtcaacactgggggtgcgcacactgaagcaggatataggaaggaacatcgtcagcatgaccaatctcatggtgat

SEQ ID NO: 67890 - DNA, 236 bp, Glycine max
  Clone ID: 700842648H1
cggaaggaggtttgcgcgtcggagtcggcggttgatggaagccgcgacgtttggagttcggagccctcgctcgcttcctccgcggatcacctcgttgtaatggtgaacggaattctcggacgtgagacggattggaaatatgctgcggagaaatttgtcaaggagttgccagataaagtgtttgttcactgtagcgaacgaaatgtgtctatgcatacactagatggtgtggatgt

SEQ ID NO: 67891 - DNA, 225 bp, Glycine max
  Clone ID: 700842657H1
cgatcccgtcgtagcagaaaaacttgtcaccatggtttcttccgacaaggatccacgagaggatatccttcaagcctggtacatggatgatagtgatgaagatcaaagattcccccaccacaaagaacccaaggagtttgtctcgttggaccaacttgctgaacttggagtccttagctggaaactagatgctgataaccatgaaaatgatccagagctgaagaa

SEQ ID NO: 67892 - DNA, 231 bp, Glycine max
  Clone ID: 700842658H1
gagcgctgctacaagagagagagagagagagagagagagagagagagagatgcatcgacaccaaaatcgcgtctctcgttcattgttgtgcttccgtttcgcgttggtgatcctcctctcgctgctctctccaccatcacacagtgtgactcactcaccatatagctatggctgctcagaagcgttccttccctgatgctcctaacgataacaagcgccacgccatacatc

SEQ ID NO: 67893 - DNA, 228 bp, Glycine max
  Clone ID: 700842660H1
cacacattctcattctcatggatgaccttcccactcccaaacaccgcctcctaactctcctcaactccctcaaagaagcttccaaagtccttcacaccaccaccaaccccttctccttccactccagaaccgattcacgcgccgccatcgacactctcctcgacctcgaagcaaaagcccacgccaccctctcctccgtcgacccaaccctccgcaacctctcccgca

SEQ ID NO: 67894 - DNA, 97 bp, Glycine max
  Clone ID: 700842661H1
ctctgtaattgtcatgtccacgttacggtcttgattggctaactgggtttggagtagaatctctgcttcactcacttcactgctgtaggaggtaact

SEQ ID NO: 67895 - DNA, 230 bp, Glycine max
  Clone ID: 700842662H1
gaaacaaagaaaggaaataattgatctttgaaaatgcagggaggaaagaaagctggagagtccatcaaggaaacagctgcaaacattggtgcttctgccaaggctggcatggagaaaaccaaggccactgtccaggagaaggcagaaagaatgacggcacgtgatccgatgcaaaaggagttggcaacccagaagaaagaggcaaagatgagccaggcagagctggacaa

SEQ ID NO: 67896 - DNA, 230 bp, Glycine max
  Clone ID: 700842663H1
gtttctgttcagaggtaaaaagaaagaaaacatagcgttgttgtgttgagttgaaaccgattcagctcaagactcaggtcaatccaaatacacatttagaagtttcaattcaatttttcaactcaatgatggtccaagagcgttcacgtcccaaatcagtgaacccgaagccccacacgcgaacggcggcactggcctccacgaagagcctcgatttctccgcatgggtc

SEQ ID NO: 67897 - DNA, 231 bp, Glycine max
  Clone ID: 700842666H1
cagatcaacagctgactggtaggttgtcaactgctgctaccccaaacacctaccatgcaggagggaaccctttcggatgacctaaagtttttgtctgcttggactctttttaagtcatgcatcgatttgttgcaccctgtacaaacatggttgaactttctggcgtttttcagtcaaaacgaaacactcatcaagcatattgagagatttatgttcagttaccacacgcct

SEQ ID NO: 67898 - DNA, 229 bp, Glycine max
  Clone ID: 700842669H1
gtgcacagcttgaacacaccgcgtttcggagagagacgtcgcaatggggaggaggcctgcaaggtgttatcggcagataaaaaacaagccataccccaaatcacgcttttgccgtggtgttcctgatcctaagatcagaatttatgatgttggtatgaagaagaaaggtgttgatgagtttcccttctgtgttcatctggttagctgggaaaaagaaaatgtttcaagt

SEQ ID NO: 67899 - DNA, 225 bp, Glycine max
  Clone ID: 700842670H1
ctgaagcagaagctgagtttgagaggcttcttggtgtatcagaagcaaaatttgcaatgtcagagttatccaaggcagatagaggagacgatagtgatagtgtgaagctgtcggaattgcttcatggtcgtcattctaaagttgtttttattggatcaaccctatttgctttacaacagctatctggtataaatgctgtgttttatttctcttcaactgttttta

SEQ ID NO: 67900 - DNA, 225 bp, Glycine max
  Clone ID: 700842671H1
caaaacaaaaacaaaacaaaacagtgtctttgattacgagagagagagaacaaaacaatcaacacaatggcttctgagcaaatgcctcgcagagagaacaacagcaatagggtgatagagatagaggttcacgttgagacacacagaaaagagtccctccctgataagggaagggttgtgatagagagtgagaagaaggagaaagagagagagttggcttctgat

SEQ ID NO: 67901 - DNA, 226 bp, Glycine max
  Clone ID: 700842672H1
gtgaaaacaatgggcggtggtgagtgcttctgcttcatcatcatcatagaatggcggctactgtgtcttctgcttggtcaaagcccggcgcgtaggccctagattccgaggtacacgaagccgagctccttcaacagaacaacaacaaggccaacgacaagccactcgccgacttcacctcccttgctgccgccgccgccatcaagcccaagacgaagaaggccca

SEQ ID NO: 67902 - DNA, 222 bp, Glycine max
  Clone ID: 700842673H1
ggcatctcgtcaaaacaacaagcaagagcttgatgaaagagcaaggcaaggagagactgttgtcccgggtggaactggtggcaagagcctggaggctcagcaacacctgctgaaggaaggagcaagggagggcaaacaaggaaggaacagctgggtacagaagggtaccaggaaatgggacgcaaaggagggttgagcactgtggacaaatcaggagaagaa

SEQ ID NO: 67903 - DNA, 123 bp, Glycine max
  Clone ID: 700842674H1
ctttgttggcggcaaggcaaatctgcattgcgatggcgcctccgaagctcttcgtctttgcgctttctgtaaccctaattttcgccatcgttggggccgaagccgatatttccatcgaaggaa

SEQ ID NO: 67904 - DNA, 101 bp, Glycine max
  Clone ID: 700842675H1
ctcatgctgatttgccaccgttgaagagcttcgtgtctgcgaggaggttgcttttgaagatgcagaagcgtgcaaagcttgaagctctcagccctcggaga

SEQ ID NO: 67905 - DNA, 226 bp, Glycine max
  Clone ID: 700842677H1
tgaacacaatggagagaagggttggctatgaggtgctggtggctttggtgacccttttggttttctcatttgcttgtgccactgcttcatcatcaggaccaacaaaactccaccaccgtgtggagcaattcaggaggaatctgcttgctaatggccttggtagaactcctccaatggggtggaacagttggaatcatttcagctgtcaaattaacgaaaaaatgat

SEQ ID NO: 67906 - DNA, 227 bp, Glycine max
  Clone ID: 700842678H1
ttcttctctggttgattcggatctagagtcttcagtttctcctcgttgttcttcgctttcctgttttcaatttcgattctttcgttaatttaataagatgtttggtggggcaccgaagaagagcgataatacgaggtactacgaaatcctcggcgtctccaagaacgcttcgcaggatgatgtgaagaaggcttacaagaaagccgccattaagaatcaccccgaca

SEQ ID NO: 67907 - DNA, 228 bp, Glycine max
  Clone ID: 700842679H1
tcacacacaactactacaagtacttccttacaatcaaaaccaacaacaactatggcaagttatcaaaagcactacgatgatcagggtcgcaaggttgacgagtatggcaacgttgagaagcaaaccgacgaatacggcaaccctgttcatgctgctagtgtcacctatgtagccaccagaactgctgctggtggttacagtgatgacattaataagcaacatgatacc

SEQ ID NO: 67908 - DNA, 104 bp, Glycine max
  Clone ID: 700842680H1
gatgtctgggaatgcagcagtcaccaggcgtgattgggcctcattggtacaagtgtttctaacaaacagcaacagtacagagcattttgatgcatgtaagtgga

SEQ ID NO: 67909 - DNA, 227 bp, Glycine max
  Clone ID: 700842684H1
caaaacagtaaagctaacttcaacacctttaattttctaaaagtaattcagcggctgaataccaagcggagaagatgagtcaggagcagccacggcgtcccaaaggccaaaaccccatcaaatacggcgacgtttttgtcgtctccggcgaccttgcacagaagcccgtcgcaccggtagatgctgccatgatgcagagcgcggaaactcgagtgctcggacaaacc

SEQ ID NO: 67910 - DNA, 227 bp, Glycine max
  Clone ID: 700842689H1
tctcgagccgaatcggctcgaggtcagatttaaacaagcttaaacactatatgaagaaaaccatgttgaaagatcaaaaacacggaacagtagaaaagcttgaagacgtagaagttcaacagcaacagccacaacaacaaatcatcatccaaaatgagcagcaacaagcaccaaaatcccgagatcttcttcagccagagtcagagtcacatccacatgcacaacca

SEQ ID NO: 67911 - DNA, 222 bp, Glycine max
  Clone ID: 700842690H1
attctctttcactttctgccaacccttggagtcaacatgactatcctcattgagcaatctgatcactttggggctgaagtagaggcaaagactgaaccaataaatgagagagaactggtgttggatggtggatttctgataacacagaccaactcatttgggcacatgtttagggcttataatgatgctgaaagtgagaggcatgaaggagtggagaacttc

SEQ ID NO: 67912 - DNA, 98 bp, Glycine max
  Clone ID: 700842691H1
acttagccgacgctgtcgtcttcaccgtataagaactatcgcctggttctgaacagtgtgtgattcggattccgacgaggatgtcgtcgttgggttcc

SEQ ID NO: 67913 - DNA, 101 bp, Glycine max
  Clone ID: 700842692H1
aattaatggcacaaaattccttgctacaaaaaatgtcggtaattgttttccacctccaactttagtgcatgattagaattccgttaaagcttgtccgcgag

SEQ ID NO: 67914 - DNA, 225 bp, Glycine max
  Clone ID: 700842693H1
ctcaattccgcgctttaacaacagaaagaaatccacacatttccctttcaatggcacgaaccaagcaaacagcgcgcaagtccaccggcggcaaggctcctcggaagcagctcgccacaaaagccgctagaaagtccgctccggcaaccggcggagtaaaaaagccgcaccgttttaggcccggcacggtggcgctgagggagatccgaaagtaccagaagagca

SEQ ID NO: 67915 - DNA, 224 bp, Glycine max
  Clone ID: 700842694H1
gacgatagtcctcattggaggctgctatcaaacaatctagggaggaagaaaaggaaattctcattgctaaagctaccactgatgaattaaaggaggaaggagtcactgacagtgttttggttataacggaactactgaagccacttaaaaatgcagtcccttggtttcaagaaatcttcacatgggaaaggccaataattactcttgctgttcttgctgcatcc

SEQ ID NO: 67916 - DNA, 103 bp, Glycine max
  Clone ID: 700842695H1
aacaaccccaacgacaagccactcgccgacttccactcccttgccgccgccgccgccaccaagcccaagaagaagaaggcccagacctactccctcgccgaat

SEQ ID NO: 67917 - DNA, 107 bp, Glycine max
  Clone ID: 700842696H1
gcgtgagatagtatagtatttgtcagattcctgctttttgctcttcagtgagcctagttgggaacttgatgttaaactttatcctcaaattccccttctttgatgga

SEQ ID NO: 67918 - DNA, 265 bp, Glycine max
  Clone ID: 700842702H1
cttcttctctggttgattcggatctagagtcttcagtttctcctcgttgttcttcgctttcctgttttcaatttcgattctttcgttaatttaataagatgtttgggagggcaccgaagaagagcgataatacgaggtactacgaaatcctcggcgtctccaagaacgcttcgcaggatgatctgaagaaggcttacaagaaagccgccattaagaatcaccccgacaagggcggtgatcccgagaagtttaaagagctggcgca

SEQ ID NO: 67919 - DNA, 263 bp, Glycine max
  Clone ID: 700842704H1
attcagactctggaagcttcctttggccggagaagaagacggtgtcgtttgagacttgggggagaggagaatgacagagttgagcagcagagaggtggaatacataaggagacaccacagcaaggcagcagaggacaatcagtgtgcctctgctctcgttaagcacataagggccccacttcctctcgtaattccctttgcatcattaagtaattaagtaattattatattattaattactttatgatttgtaggggtggtcg

SEQ ID NO: 67920 - DNA, 130 bp, Glycine max
  Clone ID: 700842705H1
gagaactttcccatctgcagatccagcttggttctatcttcatgttggttgccaggtatctgcttacgacattggggttgcttgctggggaactggcatgaaacttggaagcgaatcagtggggattcaa

SEQ ID NO: 67921 - DNA, 257 bp, Glycine max
  Clone ID: 700842706H1
acaatcttttggagactccatactgccagttttatgtctacatgaaggcattgaatttagctgttaatgggaaagtcacagaatacattataccttcattcaaaaagatagatagcttcttgaaagagtggaaaattgggatacctgaacagagagagctctttctcactatctctaatattttgaaggaaaataaaagcatgtcaaaggatgcttttaagttcctgagcaattatctgtcgaccttttcgggagaa

SEQ ID NO: 67922 - DNA, 256 bp, Glycine max
  Clone ID: 700842707H1
cacacaactactacaagtacttccttacaatcaaaaccaacaacaactatggcaagttatcaaaagcactacgatgatcagggtcgcaaggttgacgagtatggcaacgttgagaagcaaaccgacgaatacggcaaccctgttcatgctgctagtgtcacctatgtagccaccagaactgctgctggtggttacagtgatgacattaataagcaacatgataccaccaatgcctacggcgtagacactggtagac

SEQ ID NO: 67923 - DNA, 256 bp, Glycine max
  Clone ID: 700842708H1
gggacattcaggaaccacagctaagtcctgatgagaagttcaatgcttgctttgaaagcatacctgtctctgccttccctccacctccttcaaatcaagtctgaacccacatctccaaggagtccatccggtggagctgctaatacggctgcagtgaatggaataacttctgaagcattcggccttgaatctgcttcgacaacttcaggcaatttctttgaggatctgacttcttctcaactatataagaacacca

SEQ ID NO: 67924 - DNA, 253 bp, Glycine max
  Clone ID: 700842709H1
agcactttcaccttccttctctttctctgtgatttgctctccgctcttctccaacttccttcactgtcaaactcgtttttgtgttgttgttgttttccgaagagagaaaaaaccatgtggtacttgtgcgttttcttccacaggttattggatttcagaaaacccgaagtggaatctctggcacaactcttcggagcaaccgaggacccccaaaacggcgacgtttcctcgcaattgcaatggaaactccctc

SEQ ID NO: 67925 - DNA, 250 bp, Glycine max
  Clone ID: 700842710H1
cacaagcagtgggaggaggctcgggactctgaccgcgtgcctgttgaagaatgagccggcgactcataggcagtggcttggttaagggaaaccaccggagccgtagcgaaagcgagtcttcacagggcaattgtcactgcttatggacccgaacctgggtgatctatccatgaccaggatgaagcttgggtgaaactaagtggaggtccgaaccgactgatgttgaagaatcagcggatgagttgtggtt

SEQ ID NO: 67926 - DNA, 250 bp, Glycine max
  Clone ID: 700842711H1
atttgcacgtctttttcttctttcatttgtcaatatgaatataaactacaaaacaacccattcttaccctaaaaatgttcaattatcaatgcttcaattgattgcttattttaaatattcattcttagaatccattttttttataaaaattagtcacgtttttgagtagaaattagttccaatgtattaatactttttaataattgacaaaattataagtcaaggcccttctgtacatttctgggtctaa

SEQ ID NO: 67927 - DNA, 254 bp, Glycine max
  Clone ID: 700842714H1
attagaaacaaagaaaagaagaaaggaaagaattgatcgttgaaaatgcagggaggaaagaaagcgggagagtccattaaggaaacagctacaaacattggtgcttctgccaaggctggcatggagaagaccaaggccactgtccaagagaaggcagaaagaatgacagcacgtgatccggtgcaaaaggagttggcaacccaaaagaaagaggcaaagatgaaccaggcggactggacaagcaggcggcgcgt

SEQ ID NO: 67928 - DNA, 255 bp, Glycine max
  Clone ID: 700842715H1
caacaccttgctgaaggaaggagcaagggagggcaaacaaggaaggaacagctgggtacagaagggtaccaggaaatgggacgcaaaggagggttgagcactgtggacaaatcaggagaagaacgtgctcaagaggaaggcattggcatcgatgagtccaagttcaggactggtaataacaagaaccagaatcagaacgaagaccaggataagtgataatgtaacacccttcactagcatgtgtagtgtgttctt

SEQ ID NO: 67929 - DNA, 259 bp, Glycine max
  Clone ID: 700842716H1
ctaaagactaagcatgctactcccaagtatggtcttatataccatgcttccttgattggtcaggcagctccaaagttcaaggggaaaatttcccggtcacttgcagcaaagacggcattggctattaggtgtgatgctcttggagatagccaagataacaccatgggattggagaacagagccaagcttgaagcacgattgaggaaccttgaaggcaaagagttaggtcgttttgctggttctgccaagggaaagccca

SEQ ID NO: 67930 - DNA, 269 bp, Glycine max
  Clone ID: 700842717H1
gatttttggaagagacaaataattattgccagtatgcataagcgacctgccagttttgggatttatgtgcctgcaaaggatgaagctgtcattgaaggtggcaatatcagaaggagaaaggtctctcgtcttgtcagtataaaaaatgaagagaccactagcatatgttctgacgaggactttgtctcttgtgcaaatgatattcaaaatagagaggatcctgatttatctgacaatgaagctgaaatggtagatttgataaatagagt

SEQ ID NO: 67931 - DNA, 264 bp, Glycine max
  Clone ID: 700842718H1
gatcctgctttggagagacgattccagccagttaaagtgccagagccaactgtagatgaaaccatacaaatactgaaaggacttagagagcggtatgaaattcaccacaagctccgctatactgatgaggctcttgtagctgctgcacagctgtcctaccagtatatcagtgatcgatatttgccagacaaagctatcgatttgattgatgaagctggttcacgagtccggcttcaacatgcacagttacctgaagaagcaaga

SEQ ID NO: 67932 - DNA, 261 bp, Glycine max
  Clone ID: 700842719H1
ctactctttcaaaagcgcatccagggagatagcatcagggaaaattccagacccaggatcgttgaaggcaaaggacacaacaatggtggatgtgccagttaaggttccatacagcatattgatgagcttggcaaaggacattggtgctgactgggacatagactatcaattggatcttggtctggttattgatgttcctgtcattggcatcttcaccattcctctctctcagaaaggagagatcaagctaccaaccctctc

SEQ ID NO: 67933 - DNA, 258 bp, Glycine max
  Clone ID: 700842720H1
cactactgctccagactccactagaacttcatacaatgtgctgtctatgattccgatgaatccaaagctcgtctcctcggggtggagtacatcgttcctgctgatgtctttgaagcctttcctccggaggagcagaaactttggcattctcatgcttatgagattaaatcaggcctgttggtgaatcctagagttcctgaggttgttgccatgccagagctcgaaaaccttgcccaaacttacggcaaattctggtgt

SEQ ID NO: 67934 - DNA, 255 bp, Glycine max
  Clone ID: 700842721H1
agaagaactactttgctgctgctgttgctgaggagggatcccagctgttattgcttcatgctattgaagaattttcttgcaagtctacttccaatgctttaaaggaggttgccctggttctaaagacattctacgatgctgatgtgttggaggaagagcacatagtgcagtggtatcaaaagggactgaagggcaataacaagaactctaagatttggaagaatgctcaacctttcattgattggcttcagagtg

SEQ ID NO: 67935 - DNA, 255 bp, Glycine max
  Clone ID: 700842722H1
ctgcaggtctagagcttgatgatattgatctttttgaaataactgaggcatttgcctcccagttcgtgtattgccgtaacaagctagggcttgatccagaaaagatcaatgttaatggaggtgcaatggcaattgggcatcctctgggttcaacaggtgctcgatgtgttgcaactctgttgcatgaaatgaagaaacgtggcagggactgtcgatttggagttatatctatgtgcataggtactggaatggggg

SEQ ID NO: 67936 - DNA, 253 bp, Glycine max
  Clone ID: 700842723H1
accaagcaaaaatggtacatccaggaaatatgtatttccaccaaatcttgagggtcctggtggtattacacccttgcacttggcggcatgcacatctggttctgagagtgtagttgactctttaacaagtgacccacaggagattggtttgaagtgctgggaatcccttgtggatgcaaacggacaaagtccacatgcctatgccatgatgaggaataatgactcttataatgcgctggtcgcccgtaaactt

SEQ ID NO: 67937 - DNA, 247 bp, Glycine max
  Clone ID: 700842726H1
gcacgacgtgagatatattgtgaagtagaaatcggtgcaagaaattctccactttatctaaaaaaattcggtgagtttgtgaagacatcaaatcactagctactcaaaaatggccacagtaggaaggaacgttgcagctcctttgctgtttcttaacttgatcatgtcattttattgttcttggctttgctagttagtgcctcaacaggttcatcaatggccaaacttaccaccctagttctcgtgg

SEQ ID NO: 67938 - DNA, 249 bp, Glycine max
  Clone ID: 700842728H1
aaccgtttaacggtagcagttgtgtgtgttaattataactactgtcccacttcctgctctgcatggggagaagttgtatttctaatgtagatcccatagtactaggtgattgtggaaagtaactaggacggccaagaaacatcagaaactcaactaccactgttcggtttagttgtagaaagacttaccgtgtttacattatatgcttatcttgggatcgaactgaaggaaaacaaaacaagaaagagg

SEQ ID NO: 67939 - DNA, 254 bp, Glycine max
  Clone ID: 700842730H1
ctcttctcggggacccagtagtcgccgtcgcagcctccgttggccgtcagaatagaaagcctcactcgcaccacagtttctctctcaaacgaaaagggatttaggtcagggttcctttcctttcttctcgcgccgtaccgctcccccagtggacgccgtcgcagccttcaccgttgatatagtagctctctaacgctgtcgtcgcagattctagtggttctacttctctatcgccgttgcagaatggaaagcag

SEQ ID NO: 67940 - DNA, 251 bp, Glycine max
  Clone ID: 700842731H1
gtcctaatgaacataacgaggctggggttgatgctaaccctcacaactaagaaggcaactttctaaagcttatatatgggtttaagttatcgcaataaataaaacttcatgagaaggttagttgtaatagaagtggaaaactttgtaaaggaataatacctttcatgaatttccttatctttgtgttgtctctggttctgttttgctaaactcaaataaataaaattgtataatattgtctaatttgtttc

SEQ ID NO: 67941 - DNA, 259 bp, Glycine max
  Clone ID: 700842732H1
gtctgaaccttgtcagccgatcatttgaatttcaggctgatggctttgctaagaagcttggatatgcatctggactacgcggtggtcttgtgaaactacaggaggagaatctttcagctatgaatacagatccttggtactctgcttatcactattctcatcctccccttgttgaaagattggccgcgctggacgaagcggataagaaagaagactaagcaagcaacttaaagatgaagagcagctaaaattggttgta

SEQ ID NO: 67942 - DNA, 268 bp, Glycine max
  Clone ID: 700842733H1
ctttctgaaggaagtgaagtaaagactaaagagagttgtggtgtaggtggtggttgtcgtttttgaaatggcagcgtcgtcgtcagagaagcaagtggtggtgataggcatagacgacagcgagcagagcacgtacgcgttgaattgggctctggataactttttcccgagcccaattttcaagctcgttctcatccactccaggcccaccgccacctccgctgtgggcttcgccggccctgtgtttgcaggagccgctgaggtcttg

SEQ ID NO: 67943 - DNA, 262 bp, Glycine max
  Clone ID: 700842734H1
aaaggaatcaaagttgattctgggcaatcaaaatttttcagggtttcgggaagagaagggaatttgattaagcttggaaaagttaagccagacatttctgaattcaacctgacctctggtagaggcaatatgtctgatgggcggataaaacatagtattgatggaatgattaatcaggttggaataaaagctacatcaagaggtgaaaggacatatttggggaggcagtcagaaggcagctctgatgcatatgagacagatg

SEQ ID NO: 67944 - DNA, 259 bp, Glycine max
  Clone ID: 700842735H1
tttgaggccttgccgagtgtggaaattggagaaggtaacgaagattcggagtgtgtggtttgtttggaggagtttggggttggtggggtggcaaaggagatgccatgtaagcataggtttcatggtaattgtattgagaagtggttggggatgcatgggtcttgccctgtgtgtaggtatgagatgcctgtggaggagattgattgggggaagaagagggaggaggaaggtggtgagaggagaaggagtgatggtggtg

SEQ ID NO: 67945 - DNA, 253 bp, Glycine max
  Clone ID: 700842736H1
caattggttcagaagataactttaagggagttatagaccttgttaggaataaggctatagtttggtctggagaagagctgggtgccaagtttgatattgtagatattccagaagatcttcaagagcaggctcaggattaccgtgcccagatgatagaaaacatagttgagtttgatgaccaggctatggagaactacctggaaggaattgaaccggatgaggaaactataaaaaaattaattaggaagggaac

SEQ ID NO: 67946 - DNA, 254 bp, Glycine max
  Clone ID: 700842738H1
gaccgagctagctagctagcaagcaagcacagagatggagtcaaagcgagatcctgccctcatgtgcttggcacgtgtttcactcttcctctgcgctctaaccctatccgctgctcacggaagcaccacggttcaagacatcgcgagaaagttgaaactcggggacaacgagcttctgcgcacggagaagaagttcaaggttttcatggagaattacgggaggagctactccacagaggaggagtatttgcgcc

SEQ ID NO: 67947 - DNA, 252 bp, Glycine max
  Clone ID: 700842739H1
atttcaggttctcgtcttttgggcaccattcctcagtctatttcacagcaaactgtttggaatcaaatggcaacagtgagaacaccattgaattttgattctagcaagcagagcttttgtcaattttctattgaccttctcggtggaggaattttagtggacaaaactggagattggatcacacttatacaaaattctccaattagtaacttgttgagagttgctgcttggaagaaaggctgtttaatggtt

SEQ ID NO: 67948 - DNA, 248 bp, Glycine max
  Clone ID: 700842740H1
gttctgttgcaatggaacagttgttcaggacccagaactaggacaggttattcaacttcaaggtgatcagaggaagaatgtttctaccttcctagtccaggctggtatcgtgaagaaggatcatatcaagattcatggtttctgagcggttggagtcttaagtgtcaaattttacctgcctgactatgtgttaggcataatatataatctgagtcgtgtggatgtgattgtggtatttctaatgtgtt

SEQ ID NO: 67949 - DNA, 249 bp, Glycine max
  Clone ID: 700842741H1
gttaagattgtgatgtctgggaatgcagcagtcaaaaggagtgattgggcctcattggtacaagtgtttttaacaaacagcaacagtacagagcattttgatgcatgtaagtggacaaaatcagaaccacattcctgggaattgatcttgccaatagaggtatgtggtcctaataatggttttgaaatgtggagttctgagtgggcaaatcaaacttcatggcatttgagtttcctaattgacaatccc

SEQ ID NO: 67950 - DNA, 85 bp, Glycine max
  Clone ID: 700842743H1
tttcgttactttcatttgttgtgcaatcttacaagttccaaacttctctatgttgttattatttgttctcacttccacacaacat

SEQ ID NO: 67951 - DNA, 250 bp, Glycine max
  Clone ID: 700842744H1
tctcgagccgaatcggctcgagcacttctacctctaatctaggaattggaaaaagatgggcaccactagtgcgagtgccctcaggctatcgtcgatggtcagcgtgtccccgaattgcaattgctcatcgatgacgcttatgaagaagacggcgatggcgatggcgatggctcctttttcacttgcaatgaaaatcaaaagcaaaaggggtggtattaggtgcgaggtggctattaatgcggtggatgag

SEQ ID NO: 67952 - DNA, 250 bp, Glycine max
  Clone ID: 700842747H1
acatagtgcagtggtatcaaaagggactgaagggtgataacaagaactctaggatttggaagaatgctcaacctttcattgattggcttcagaatgcagaatcagaaaccgaggaagaataatttgtcctacattctccgttacttatgtttgcttgcttgtgttatgtcctttatttccaattaagggtcttgttggccccatgtgttgttcaactactatacttgctaaaaactggtgtgaggggtgc

SEQ ID NO: 67953 - DNA, 260 bp, Glycine max
  Clone ID: 700842748H1
aataaatagataaaggagcatgttgattatatagaaagtaaagggcaacaatcatttttgtttaccatgggtaaggacaccatcgctgacataataacctatataagaaatgctgacatgaataaaaaaggaatggttcaaataccatttactaacataacagaaaacattgtaaaaatacttttacgcgagggttttgttgaaaacgtcagaaaacatagagaaaacgacaaatattttttagttttaactctacggta

SEQ ID NO: 67954 - DNA, 264 bp, Glycine max
  Clone ID: 700842749H1
aaaaaacattgcccttgttctttcaaagttaccaaacacaagtacacaacacaacagcaacatatggcgtctgaacaattggctcgcagagagggtcaaagatcatgcaggaaaagccatgggagatattggtggacgtgggaaagccagagagactcacgagctgggtgcacactttgaatccctggctgacaaagtaactgaccatgcagcagccaatgtagttggaaacaaagagagtcaaagagaagctcgtggtggtgt

SEQ ID NO: 67955 - DNA, 258 bp, Glycine max
  Clone ID: 700842750H1
aaaaaaaaaacgtgattcgctcttctcttcgaataaaccacaaaaccaacaaacgagaagaggagtgagagaagatggggttgtcgttcacgaagctgttcagcaggttgtttgcgaagaaggaaatgaggattctgatggtaggtctcgatgctgctggtaagacaaccatcttgtacaagctcaagcttggagaaatcgtcaccaccatccccaccatcggatttaatgttgagactgtggagtacaagaacatca

SEQ ID NO: 67956 - DNA, 254 bp, Glycine max
  Clone ID: 700842751H1
cggctcgaggattgctattggagtatagaggatcagaatgcaatttctattcttttgaccaagcatgatcaaatggaatggtggaaatgtctagtgaaaggtgatcctgagattgatacccaaaaggttgaacctgaaaacagcaaacttggtgacctggatcctgagactcgacagactgttgaaaaaatgatgtttgaccagaggcagaagtctatgggcctccctaccagtgaagagctccagaagcagga

SEQ ID NO: 67957 - DNA, 251 bp, Glycine max
  Clone ID: 700842754H1
gatttgttgggtttacaaggagcaggtaaagcttttccaaacaagattgtttttgatgataagcttgtgttggctaacacacaagaattctttgatggaaattttccagtggattcttggttaccaatttttgtgaattgtctttatcctgtaagtcaattacctccagaagctgtcgttgtaaatgttacatgtggtagtggacgtggtggtttacccaccactgcttggattagttctgcagttaacaa

SEQ ID NO: 67958 - DNA, 251 bp, Glycine max
  Clone ID: 700842755H1
ttcaaataccttcttcaattaagatttgaaccaataaatgagttcaagctgcggaagaacccatggattcaatttggacttggccaaatcctcatccacctcaaccctaacttcacccacctcctctccttcttcaacaacaacctcggaaaccaccaactccccccaatcaataatcttcacgaaaaaacctcgtaccctccgaaagcgaccgaaccaaaccttcaatgaagccgccacactcctctcca

SEQ ID NO: 67959 - DNA, 248 bp, Glycine max
  Clone ID: 700842756H1
acagaaaagaaaaaggaaaccctagctggataggtcaaacatcatcatgtcggacgaagagcaccatttcgagtccaaggcagacgccggtgcctccaaaacctaccctcagcaagccggtaccattcgcaagaacggctacatcgtcatcaaaggacgcccctgcaaggttgtggaagtttcgacttccaaaactggaaagcacggtcacgccaagtgccactttgttggaattgatattttcactg

SEQ ID NO: 67960 - DNA, 248 bp, Glycine max
  Clone ID: 700842757H1
cacatatgacccttcacagttcaagggaaacaaagatggtggctttatgatttttgccaattacattggcgctgtggggaagccccagatcaccaagcctgataagattgccatgactgcaccggtcataacaaaggacagtgttggtggtggtggcagtgatggtgagaagattgctatgtccgctccagttgtgacgaaggagggtggcggtgaaggtgaagaagggaagaggaacaagatggtga

SEQ ID NO: 67961 - DNA, 247 bp, Glycine max
  Clone ID: 700842758H1
gggaaacaaaactacccttttgcttttgctctttgttctttgccatggagtggccacaacaacaatggccttccatgatgatgagggtggtgataaaaagtcaccaaaaagtttgtttttgatgagcaactccacgagggttttcaagactgatgcaggggaaatgcgtgtgctgaaaagccatggtggtaggatattttataggcacatgcacattggcttcatctctatggaaccaaagtccttg

SEQ ID NO: 67962 - DNA, 240 bp, Glycine max
  Clone ID: 700842761H1
attgaagccaaacatggtcacccccggatccaattctgctaaggtttcccctcaggtggttgcggacacactgttagagcccttcagagaaccgtgcctgctgcagttcctgctatcgttttcttgtctggtgggcagagtgaggaggaggcatccgttaacctcaatgccattaaccaggtcaatggaaagaagccatggtcactctctttctcctttggaagggcattcaacagagca

SEQ ID NO: 67963 - DNA, 252 bp, Glycine max
  Clone ID: 700842762H1
aaaactcttgaagtggctgaaatctacaagccaagtgtacatgtcaattccatattttcacctgtaggagctgacacggggaaactttttagtgcttctgaagctactgatattgtcttcaaatatgttgaaaaagaaaatcttgtgaaaccaacaaataaatccgttgtggttcttgatgtaatattatgtgatgcactgttcaagggggctattaaaaaaggaacaacatatcctacagaaattcacaag

SEQ ID NO: 67964 - DNA, 244 bp, Glycine max
  Clone ID: 700842763H1
ctctctccgccgatccgtccgccatgagttccggcgagctcctccacatacaaccccaggggctgcagtttccctttgaattgaggaagcagatctcatgctccttgcagttgtctaacaagactgacaactatgtggctttcaaggttaagacaacaaatcctaagaaatattgtgttagacctaacactggagttgtgatgcctaggtctacttgtgatgtcatagtaacaatgcaagccca

SEQ ID NO: 67965 - DNA, 160 bp, Glycine max
  Clone ID: 700842764H1
ggcttcttcgtcttcagaatcggcggtgtcggagcgaagaggaataccaaggggtcagttcgtagaggatgtccaaacttaacttcactcaatcgggtctcgatgttggttcagccctggcttttctccaagagagacttcaagaatacaaggtagtaga

SEQ ID NO: 67966 - DNA, 260 bp, Glycine max
  Clone ID: 700842765H1
cacacaactacaagaaagaacttccttataaccaaaaccaacaacaactatggcaagttatcagaagcactacgatgatcagggtcgcaaggtcgacgagtatggcaatgttgagaggcaaactgacgaatatggcaacccggttcatgccactagtgtcacttatgtagccaccaaaagtgttggtggctacaatgatgacgctaataagcaacatgatattactggtgtctatcccgagaaagacaccggtagacatc

SEQ ID NO: 67967 - DNA, 258 bp, Glycine max
  Clone ID: 700842766H1
ggagctgtcagttctagtaacttagttgcctctaccagaaacagcgtgccttctgtgacgggccagaccactcatcaactacctagaggtaatgtggtgcctgttctgccccaacctaataattttacaaatggggtgccagtttctaatcaaccatcacaagccaagacccaagtttctctagggagtggagtggttgctgctaaagaaattcctgtagatggaaaccatgcacttgtctctcacactcaaactagc

SEQ ID NO: 67968 - DNA, 255 bp, Glycine max
  Clone ID: 700842767H1
gccaagtcgtaaaagggtttcaagggatggaaaacatgcagagcttctggcaattgggtgatgaactccgtgggcactcaaaagcatcggaggatcacaagtggttaatggttgcctcgaaactggccgaacagacaagattgaagggggagcgtgtgaacaaccttgatctttcaaagggacccattgaaacaaggtcaagggataaatttgggttccaggaagagaacaaatttgattctcttaacttgagca

SEQ ID NO: 67969 - DNA, 255 bp, Glycine max
  Clone ID: 700842768H1
atcaaaagcactacgatgatcagggtcgcaaggttgacgagtatggcaacgttgagaagcaaaccgacgaatacggcaaccctgttcatgctgctagtgtcacctatgtagccaccagaactgctgctggtggttacagtgatgacattaataagcaacatgataccaccaatgcctacggcgtagacactggtagacagcattctagtggtggctacgatggtgacactaataaacatcatggaactactggtg

SEQ ID NO: 67970 - DNA, 252 bp, Glycine max
  Clone ID: 700842771H1
gaggaagagttacagaatttcctgtttacgatcttattgcaattttgcaactttcaaagcttattagctaaagtaacatcaaaagatgtcattgattccaagtattttcggtggcccaaggagctacgtgttcgatccattctcactcgatatgtgggatcccttcaaggattttcatgttcccacttcttctgtttctgctgaaaattctgcatttgtgaacacacgtgtggattggaaggagacccaaga

SEQ ID NO: 67971 - DNA, 242 bp, Glycine max
  Clone ID: 700842773H1
cttaagttatagttttattgtgtgctgtgtaagaagaagtttaagcgtgagaagcagtggaagaaccatgagcagtccaagaagcataaggagagggttgccgagttcagggattcgattggtgatgaggaggatttggaagaagaagaagaagaagaaggaaaggagggtttggaaagtgaggaggatcaggttggggtgaatgatgagattgataatgggattggtgatttggaggcaag

SEQ ID NO: 67972 - DNA, 242 bp, Glycine max
  Clone ID: 700842775H1
caaaattgaactgtaattgtagtagtagacagtagcaccatgagccaggaacagctcaagaaacctcaaggggagcaggaccccatcgcatacggcgacgttttcaaagtctccgacgaactcgctttcaaacccatcgcgccaagagacgcagctctcatgcaagccacggagaaccaagcattgggccaaactcaaaaaggaggtcccgcctcggtgatgcaatccgccgcaaccgaaaa

SEQ ID NO: 67973 - DNA, 78 bp, Glycine max
  Clone ID: 700842776H1
ctttcatttgttgtgcaatcttacaagttccaaacttctctattatgttattatttgttctcacttccacacaacata

SEQ ID NO: 67974 - DNA, 249 bp, Glycine max
  Clone ID: 700842778H1
ctgttccaaaacatttgagagaggcagaagaagaagaagaaaagatggtgggaccagtgagacctcagtttgtgctctttggttcttccattgttcagctcagttactctctccaaggttggggcgctattcttgctcatttgtatgctcgcaaggcggatataattctgcgaggatactctggttggaattcaaggcgtgctgtgcaagttctggatgaaattttccctaagaacgccactgagcaac

SEQ ID NO: 67975 - DNA, 251 bp, Glycine max
  Clone ID: 700842779H1
agataacttgacaaataaaatcaccatgtctatcatcccaaacttgttcggtggtagacgaagcaacgtcttcgacccattctctctggacgtatgggaccctttcgaggggtttcctttttccacaggtcacgtgccttcctctggtggggaaagcagtgccatagccaacactcgcgtggactggaaggagactccggcggctcacgtgttcaacgttgatcttcccgggttgaagaaggaggaagtga

SEQ ID NO: 67976 - DNA, 257 bp, Glycine max
  Clone ID: 700842780H1
atggcagccatgttcttaaccagaagcgcgctttttcgcttttcaaagtctctcccttatgccccttcactctcccttaaaccctccatggtcaccttctcctctactcccaattcaggctggagaaatgcagcagaaggaggaagaagagacggaagaaccaattggacgtatgattctgccgaggcaagacgcgaggcagatgaaatgtctgagagtgccaaagaaacgatgaatgaaggctatgacagggccaa

SEQ ID NO: 67977 - DNA, 257 bp, Glycine max
  Clone ID: 700842782H1
tgcacaaaagaccaaagaatatgttggtgatgctgctcagaagaccatggattatgccactgatgcagcacagaagaccaaagattatgctactcagaagactaaggactatgcaagtgatgcaactgatgctgcaaaaaagactaaagattatgctgctcagaagaccaaggattatgcaagtgatgcaactgatgctgcaaaaaagactaaggattatgctgcgcagaagaccaaggactatgccagtggtggtg

SEQ ID NO: 67978 - DNA, 248 bp, Glycine max
  Clone ID: 700842784H1
atccaagaaatagctccaagtatatcatttgcagcaatagggctactggatatgttcaacgatggaggagcagtggagcaggttgagattcataaccgagcagcaacgaaaacaatagctcttagtgtaaggggaagaggcagatttggagtttactcctcccagagaccactgaagtgtgtggtaggtggcgctgaaaccgacttcaactatgactcagagaccgggttgacaaccttctccattcc

SEQ ID NO: 67979 - DNA, 248 bp, Glycine max
  Clone ID: 700842785H1
tgatggttgaatgtggtggaaatagtgggaaaggagtgaacattaaagctggtgtgatcacggagtggaaggatattccagttgagcttttgatgcaaattttgtcacttgtggatgatcaaacggttatcatagcttctgaagtgtgtcgtgggtggagagaggcaatttgctttggccttactcggttatcactctcatggtgtagcaagaacatgaataacttggtcctatccctttctcctaaa

SEQ ID NO: 67980 - DNA, 244 bp, Glycine max
  Clone ID: 700842786H1
ccaaactctaagcaattattgtatacattctcttctctctcccttttctcatcacacactaacttgctttcgaggttttcttcttctttctcgaattttcacataccgaacttctcgtctttcacatctccaggtttgaaatgaatcctgagaagtttactcacaagactaatgaagctcttgcgtcggcccacgagctcgcgatgagttcaggccacgcgcaattgactcccatccacttggc

SEQ ID NO: 67981 - DNA, 246 bp, Glycine max
  Clone ID: 700842787H1
cctcactcgcgatctacgcgcgtgacccgtacactctccgcctcctcctcctctccgcctggccggagctctccgccgtcaagctcgtaccggtggcaccagcgcccgccgacctccgctaacgaagccgacttcgccgagctcttcacgaagtgccgatcgctcgcctcgctcgaactctcctccttctaccactggacggaggacatcccgaaagtgctcgcggcgaatcctatctccgccgcc

SEQ ID NO: 67982 - DNA, 245 bp, Glycine max
  unsure (1)..(245): unsure at all n locations
  Clone ID: 700842788H1
gttcagtgtgtcgtttaaaaatgtcgcagttgctggataaagccaagaacttcgtgtcggagaaggtaaatgatatggccaagccggagggangtgtcactgacgtggacttcaagcgcgtgagctaagataatgtcgagtacttggccaaggtctctgttcgtaacccttattcaacttccatacccatttgtgagatcaactactctttcaaaagcgcatccagggagatagcatcagggaaa

SEQ ID NO: 67983 - DNA, 246 bp, Glycine max
  Clone ID: 700842789H1
gttcttcttccccataccaccactactgacactaccaccactgctctcgaacaaagtcatcgtcgcgtttggctcgaaaaaccgataacggaacggtggagccaattcaaatttccctcgacacgcttccggcgacggcgcagccttcgtcgccgtctctcctccgatctccgacgagctcccttccgatcaaggagcttcatgcttctatcgccttcctcggcgcggacgtcaagtgcgcttcga

SEQ ID NO: 67984 - DNA, 219 bp, Glycine max
  Clone ID: 700842790H1
gcggaacaacgagtttcgaaatcccgtggagaacgtaacattctttggtttctggatttgaagatgaaggccacaaaggaattgagccagcatgtggaggaaaatgaggtcacggtcttggttgatgaggaggaggacgaagaatacgagtccgaggatgaagtagtagacgacggagaggacgatgaagacgacgacgacgacgatgacgatgacgac

SEQ ID NO: 67985 - DNA, 243 bp, Glycine max
  Clone ID: 700842791H1
agaacccttgctgattacaatattcagaaggagtctaccttacacttggttcttcgtttaagaggtggcatgcagattttcgtcaagactttgacgggaaagaccatcaccttggaggtggagagttcagataccatagacaatgtgaaagccaagattcaagataaggagggtatccccccagaccagcagaggcttatctttgctggtaaacagcttgaagatggacgaacccttgcagat

SEQ ID NO: 67986 - DNA, 243 bp, Glycine max
  Clone ID: 700842792H1
gtggaatggattccccacaatgtgaaatccacagtctgtgacattcccccaaccggcttgaagatggcttcaacattcattggcaactctacctccattcaggagatgttccgtagagtgagtgagcaattcactgctatgttcaggaggaaggccttcttgcattggtataccggggaaggcatggacgagatggagttcactgaggctgagagcaacatgaacgatcttgtgtcagagtat

SEQ ID NO: 67987 - DNA, 246 bp, Glycine max
  Clone ID: 700842793H1
cacacaactacaagaaagaacttccttataaccaaaaccaacaacaactatggcaagttatcagaagcactacgatgatcagggtcgcaaggtcgacgagtatggcaatgttgagaggcaaactgacgaatatggcaacccggttcatgccactagtgtcacttatgtagccaccaaaagtgttggtggctacaatgatgacgctaataagcaacatgatattactggtgtctatcccgagaaaga

SEQ ID NO: 67988 - DNA, 246 bp, Glycine max
  Clone ID: 700842794H1
taaccttgctctatactacacagtacacacactagaagaataatggcttccatcctccactactttttagccctctctctttcttgctcttttcttttcttcttatccgactcagtcacccctacaaaaccaataaaccttgttgttctacccgttcaaaatgatggttccacagggctccattgggccaacctccaaaaaagaacccctctaatgcaagtaccagtcctggtggacctcaatgga

SEQ ID NO: 67989 - DNA, 205 bp, Glycine max
  Clone ID: 700842795H1
tgaaccataaccatgtcagacgaggagcaccacttcgagtcaaaggctgatgctgtgagcatcaaagacatttccccagcaagctggaaccatccgcaaaaacggttacattgtcatcaagaacaggccatgcaaggttgtggaggtttcaacttccaaaactggcaagcatggacacgcaaagtgtcactttgttgcaattgac

SEQ ID NO: 67990 - DNA, 248 bp, Glycine max
  Clone ID: 700842796H1
ctagaaagaggaaaagtaggagcagaggggatgggtccaaatctgtggctgagactattgcaaagtggaaggaatacaatgagcatctttattctggcaaagatgatagtagaacaactcgtaaggcgccggctaaaggttcgaagaaagggtgcatgaaagggaagggaggacctcaaaattctcagtgtaactacagaggagttaggcagaagacatgggggatatgggttggtgagattaggaac

SEQ ID NO: 67991 - DNA, 245 bp, Glycine max
  Clone ID: 700842802H1
ccccggatcgccgccttccgccgccttccacggcggaggagatgaactcgacctgaaacaactagaacggttgctagggttggacaacatgggtgctgagtgggactacatggatgacctgtggatgctggacgacgtcgttgtgcccaaccgtcacgtaatttactagaagggagataatgaattaatgaataaatggcgttttcttaagttatagttttataaaactatgttggtgtatgtgt

SEQ ID NO: 67992 - DNA, 133 bp, Glycine max
  Clone ID: 700842803H1
ggaagacagcgaaggttgttacaatggatggcactatcaatcgttcgaatgggttttagaacatggtgggattgccactgatgatgattatccttacagagctaaagagggtagatgccaagccaataagata

SEQ ID NO: 67993 - DNA, 247 bp, Glycine max
  Clone ID: 700842804H1
ccgagctagctagctagcaagcaagcacagagatggaggcaaagcgaggccatgccctcatgtgcttggcacgtgtttcactcttcctctgcgctctaaccctatccgctgctcacggaagcaccacggttcaagacatcgcgagacagttgaaactcggggacaacgagcttctgcgcacggagaagaagttcaaggttttcatggagaattacgggaggagctaactccacagaggaggagtatt

SEQ ID NO: 67994 - DNA, 243 bp, Glycine max
  Clone ID: 700842807H1
ggaagagcacatagtgcagtggtatcaaaagggactgaagggcaataacaagaactctaagatttggaagaatgctcaacctttcattgattggcttcagagtgcagaatcagaaaccgaggaagaataattttcccacattctccgtttcttatgtttgcttgcttttgtcatgtcctttatgtccaataaaagggtcttgttggccccatgcgttgtggaactactatacttgtctgaagg

SEQ ID NO: 67995 - DNA, 241 bp, Glycine max
  Clone ID: 700842808H1
tttcctctgtttttttcttcaaatccattgtttcgtggaaatcccgaaatttaaccatgcttctccgaaccgccgcctccgccgcttctgcttcgtccctctccctcttcagccctacctccgaacctctccgttcggttcccgctcgtggattggtggttcgcgccgcgaaaggatccacgaaccaccgcgccctaaccggcgtgatctttgaaccgttcgaagaggtgaagaaggagct

SEQ ID NO: 67996 - DNA, 239 bp, Glycine max
  Clone ID: 700842809H1
ccgggaggcgctactccacagaggaggagtatttgcgccgtttggggattttcgcccagaacatggtcagagcggcggagcatcaggcgctggaccccaccgccgtccacggcgtcacgcagttctccgatcgcaccgaggacgagtttgagacgctctacactggcgtcaatggcggcttcccgtcatcgaataatgccgccggcggtattgcgccgccgttagacgtggacgggctg

SEQ ID NO: 67997 - DNA, 239 bp, Glycine max
  Clone ID: 700842810H1
tgcagaccgagctagctagctagcaagcaagcacagagatggaggcaaagcgaggccatgccctcatgtgcttggcacgtgtttcactcttcctctgcgctctaaccctatccgctgctcacggaagcaccacggctcaagacatcgcgagacagttgaaactcggggacaacgagcttctgcgcacggagaagaagttcaaggttttcatggagaattacgggaggagctactccaca

SEQ ID NO: 67998 - DNA, 239 bp, Glycine max
  Clone ID: 700842811H1
gcagaccgagctagctagctagcaagcaagcacagagatggaggcaaagcgacgccatgccctcatgtgcttggcacgtgtttcactcttcctctgcgctctaaccctatccgctgctcacggaagcaccacggttcaagacatcgcgagacagttgaaactcggggacaacgagcttctgcgcacggagaagaagttcaaggttttcatggagaattacgggaggagctactccacag

SEQ ID NO: 67999 - DNA, 235 bp, Glycine max
  Clone ID: 700842812H1
catttggtcccgaatcgcacctcaccacaacctctctttctcgtctccgtccgtgcaacctgggaagcaatggcatggagaggaaatcttttgaacaacataaaagaacttcggtttttgatgtgccagtcatcacctgcaagctcacccacaagggcttttgtggaaaggacttataaggaactaaagacattgaacccaaaattgtccatattaatccgtgagtgcagtggag

SEQ ID NO: 68000 - DNA, 236 bp, Glycine max
  Clone ID: 700842813H1
cggctggatactatagttacaagtgggctgaggtgctgtctgctgatgctttctctgcatttgaggatgctggattggataatgacaaggctgttaaagaaacggggcgcaagttccgggagaccattcttgctcttggaggtggcaagccaccactagatgtttttgtgcaattccgtgggagagaaccaacaccagatgcattgcttaggcacaatggcctatgtacagttgca

SEQ ID NO: 68001 - DNA, 241 bp, Glycine max
  Clone ID: 700842814H1
ctcgaccgattcggctcgaggtgggagatgggtctcccaaccgccaacgatctcaagcctctctcccagccgctgctcccgccggagctcgcttcggccttcagcatctcgccggagccccaccgcaccctcctcgaggtcaaccgcgcctcgcgcaacacgctctccacaatccgcggcggcggtagcgtgcaccaggccttctcatccaacaacaacaacaaccaccactacgacggcg

SEQ ID NO: 68002 - DNA, 243 bp, Glycine max
  Clone ID: 700842815H1
caaagttacctgtttgcgatctcattacaatctccccagtttctaatctcagctaagaaaaaccaaaagatgtctctgattccaggtttcttcggtgcccgaaggagcaacgtcttcgatccattctcactcgacatttgggatcccttcaaggattttcatgttcccacttcttctgtttctgctgaaaattctgcattcgtgagcactcgtgtggattggaaggaaaccccagaggcacac

SEQ ID NO: 68003 - DNA, 250 bp, Glycine max
  Clone ID: 700842816H1
tggcatggtaggagtaaacataacagaagaaagcatgtttattcatctgaagattctgacagtcagagggatgatcaaagtagaaagaatatacaaaagcataagagcaaagatagcaaaaaaagacattcatattcatatgagaattctggtcctgcccgtgatcatgctgataacaagagcagggatgcactttcttattcatctgatgattctaatcatcaaagacaacccaaggttaagaggagca

SEQ ID NO: 68004 - DNA, 247 bp, Glycine max
  Clone ID: 700842817H1
gacggagtcgttttgggtcatgaggaacgatttaagaagagagaggaaattgcccggatttttcgataaggaggtatatgatattcttgattcaccagcggccttggctctcgctctttcatcctcatctcctcctcctccaaccacaaccagaacaataacactccctgctgaggagcctctgcctcacctctatgatagtaatcggagcgcgcccggtgacggtgaggatggcttgttctcagat

SEQ ID NO: 68005 - DNA, 246 bp, Glycine max
  Clone ID: 700842818H1
aaaaaaaccctagtaatgccgccgatggggaggaagcgaaaggtagcacccaaatcttctctatccaccgagccacctcccaagcagcaacaaccaaaacccgaaaatccccctcaagaatacgaagaagtcgaagaggaagttgaggaagaagaggtagaggcacaggtcgaagaggacgaagaagaagacgaggaggacgaggcagaagaggaagaggaagaagcagacgacgaagaaaacgac

SEQ ID NO: 68006 - DNA, 239 bp, Glycine max
  Clone ID: 700842821H1
aatggggctaaggagccttcaaatattgagttttatgagtatgtagaagctttgaagctaactggggatccttatgtaccagctggccaggtggcatttcgtgcaaaaattggaaagaggtatcaattgcctcataaagggataatacctgaagagtttggcgtgattgctcgctataaaggtgaagggaggctggctgagccagggtttcagaatgcccgatgggttgatggtgagct

SEQ ID NO: 68007 - DNA, 240 bp, Glycine max
  Clone ID: 700842822H1
gttagtgacaagccaggcaatcacaattttgatcttcttaagaagctggttctcccggatggttcggttctccgtgctcagttacctggcaggccaactcgtgattctctatttgtggatccagccagagataggactagcttgctcaaaatatggaacctgaacaaatgctctggagttgttggtgtatttaactgccaaggtgctggatggtgcaagatagagaagaaaacccgcatc

SEQ ID NO: 68008 - DNA, 237 bp, Glycine max
  Clone ID: 700842823H1
agagagaggagctgttagacaacgtcactggcaacatcaccgagggaggaggcgaggtgttgggagcagtaggtgaaaccgttgctgagattggacagaacatgatgaagccagcggagatagttcaggaacgcgctcacgttcgacaagcgggtggggtcttggatgccattggtgaaacattgctgagattgctgaaacgactcgagtcatggtttctggagaggacgagagagt

SEQ ID NO: 68009 - DNA, 128 bp, Glycine max
  Clone ID: 700842824H1
ggactttacatattaacgagcgggaatcgtcgaggtatttattcaaataggtataatccacggaattgcggaaattttagaaatcttaaaaatgaaagaattcgagataataactataagtatacgag

SEQ ID NO: 68010 - DNA, 237 bp, Glycine max
  Clone ID: 700842827H1
gggtattattttttcatgcagaaacgagggatcatctaattaaaccagctttcatcagggtgtgggtgatttattgtaagctttttcttattatcttcgattgtgtttacacgtgtgtgttaaaggtggcgaatcctaaagagaagggaaatgaggttgatgacaataaggaattgatattattccatgaagggataatgaacaaccctacattgtcaaggctatttccgggtttga

SEQ ID NO: 68011 - DNA, 253 bp, Glycine max
  Clone ID: 700842243H1
cattgcaggtcattgccttggatataaatttaccagttaagcaagcattccatgttctttacgagcaggggatatctatggctcctcgatgggatttgtgcaggaggcagttcgttggagttctgagtgcaatggacttcattctgaatattgaaagagctcggggaagcatagttcaaatttgactcaggaacaactcgagactcatactatagctgcctggctagaaggataatttcaactcttcagaaca

SEQ ID NO: 68012 - DNA, 253 bp, Glycine max
  Clone ID: 700842244H1
cgaaagggaaaatgggtaaggatctgagcgaggaacaagtgtcttccatgaaggaagccttctctctattcgacactgacggagacggtcggatcgctccgtcggagctggggatcctgatgaggtctctgggaggtaacccgacgcaggcccaactcaaagccatcgtggctgaagagaacctcacggcccccttcgacttcccccgattcctcgatctaatggccaaacacattaaacccgaacccttcga

SEQ ID NO: 68013 - DNA, 177 bp, Glycine max
  Clone ID: 700842245H1
atgttgaagttgatccaaaatactgctgcattaagctctgtagcaacaaatgatgaagatgagggccccccagacctttcttctaaagatattggaatcatgaagaggcgcattgcaaatgttcttgaacctggggaaacggtcttgcaagccttaagaaggttaaaaggtaacagt

SEQ ID NO: 68014 - DNA, 255 bp, Glycine max
  Clone ID: 700842246H1
cttgttatctaacttttaacgcaatgcacttctgatatatgtgtggaggttcacatgttttgggatttgtgtgattacaggtgcataatgttagatgtagagactatactagtcctaatgaatcagcacctggagtgaatgctcagccctcaatgtgagggcaacatcgagttcccatgacgggtcctccacctcaacagtagaatggagctgaatacgcatcagttactgagcagactctgatgccgcaatctc

SEQ ID NO: 68015 - DNA, 251 bp, Glycine max
  Clone ID: 700842249H1
ggaataatagagaaaattaaggagaagcttcctgggacacatcaccacaacaacaaatagactcatgcttttactctcatctcatctcatcatcgtactgtaatatatgcgtagtagcatttattacagtacgatgatgagatgagatgagagtaaaagctactacgcatatatgttgctactaattactatatgtatcgttgagtcagctactgaattatatatgctccgcttagttaatctttattaaa

SEQ ID NO: 68016 - DNA, 250 bp, Glycine max
  Clone ID: 700842251H1
agctattatactctctagagtaattgcggaatctgctagaattttctaataatggcgaaagacgttgagcaggtcacagagcaaggtgaatactccgcgaaggactaccatgaccctcctccggcaccgttgatcgacccagatgagctcacaaagtggtccttgtacagagccgccatagctgagttcatagcaacactcctttttctttacatcaccgtgttgaccattattggctacaagagacaga

SEQ ID NO: 68017 - DNA, 249 bp, Glycine max
  Clone ID: 700842252H1
caggaaaaagttgtattgaaattttcacaagaggaatttcttacagcttggtcaactcaggtgcgtcctgcaacaactctgttggctgatgggtgtccatatttgtatgctatggtgcatgatagttcagtgtctacaataccaggtgattttgtcattggtgttaagttgacaaccataaacaatatgtgtgcatatgggctcaatcctggtatttcaggttctcgtcttttgggcaccattcctcag

SEQ ID NO: 68018 - DNA, 249 bp, Glycine max
  Clone ID: 700842253H1
cctcgagccgattcggctcgaggtgcgagtcaacgggcgagtaaacccgtaaggcgcaagaccgctgattggtgggatccacctgtgggttgcaccgccgaccgaccctgatcttctgtgaagggttcgagtgagagcatacctgtcgggacccgaaagatggtgaactatgcctgagcggggcgaaccagaggaaactctggtggaggcccgcagcgatactgacgtgcaaatcgttcgtctgacttg

SEQ ID NO: 68019 - DNA, 249 bp, Glycine max
  Clone ID: 700842254H1
ggcatctggttttgaggaatctatgaagtataagacgctcaccaatgctcagaggtctggtctaaaccagatacccaaccgaagatttacactatggtggtcgccaaccattaaccgagccaatgtttatgtgggtttccaagtgcagctagatctgactggtattttcatgcatggaaaaataccaactttgaagatatcccttattcagatattcagagctcacttgtggcagaagatccacgagag

SEQ ID NO: 68020 - DNA, 249 bp, Glycine max
  Clone ID: 700842256H1
cgtgattatgggtgtgagaaatatgcttgctgctaaagatgtcaaagaaacattacttaaggagattccctccgctaaagttgatgccatggagttagatctcagttcattggagtctgtcaagaaatttgcatcagagtttaagtcctctggtcttccattgaatatgttgataaacaatgcaggaattatggcatgtcctttcaagctctctaaagacaaaattgaactacagtttgccacaaatca

SEQ ID NO: 68021 - DNA, 248 bp, Glycine max
  Clone ID: 700842257H1
ctttatgatttcaatttcatggtggaattattattgctttctacgtgacgttgaatttgtactgtatgtgttgatcttttgttcttaatttgggtcgcatagtgtttgtggcttgtttggtgaagtaacgtagacccgagtgttctaacaaatgatatgttggattctttcattagcatgctttttggaatttttgacctttggaagtcgtatactgttcagcatcactaaatttagtcctccctcaa

SEQ ID NO: 68022 - DNA, 250 bp, Glycine max
  Clone ID: 700842258H1
cttgcttttgttgcacaattgtttcatcataggagtggtctatctacagacactaaaaagatgtcctatgctgagatgatgactgatgatgtgcaaacatctagagaagagagatgcttccgactgtggatcaatagtcttggaatttctacacatgtaaataatctgtttgaggatgtcagaaatggatggatacttttagaagtgttagacaagatatttccaagatcagttaactggaaacatgcaa

SEQ ID NO: 68023 - DNA, 252 bp, Glycine max
  Clone ID: 700842260H1
cagaattggaggtgctcagttcactctaaatggaatccattacaaattagttgctaatgaaggaaacaacacacttcatttgacaaggtacataaaagatgatgacaaacccagaatcaccttcagttatcacagttatgatggtgaaggaggatttcctggggacctcctagtaactgtgagctacattcttgggaaaaactcattaagcataatcatgaaagcaaaagctctgaacaagcctaccccagt

SEQ ID NO: 68024 - DNA, 251 bp, Glycine max
  Clone ID: 700842261H1
cgcagtggcaaatctggcttattctccatcaatctgtttgggttcttgatacccaggttccttccaagagcttttgagaggtatttccaagacaagggagagatctatgctaagtctgcagaggataaaagacctgtggttgtcaacaaaactcaattatcagaaaagaaagattaattacagagctataaccaatgtgacttcacttacaatttgaaacactttcagcattctttttttcttttcttaga

SEQ ID NO: 68025 - DNA, 276 bp, Glycine max
  Clone ID: 700842262H1
atgtaagcgcttaattcggttctagagtgtgtgtgggagagatggctatggcttcttggaagaatctggttctgttgttgtttatctttctcggcacttttaatgcagatgatgaacagagctctaccccgttgtatctggagcagaactgttccggcggcaatagcatcgtcaatagtgcctaccaactcaaccttattaccctcctcacttccctgtcttccaactgcttgaggaccttattctcgaacaacaggtggggattgggatgatccg

SEQ ID NO: 68026 - DNA, 257 bp, Glycine max
  Clone ID: 700842263H1
caggagcacaaccaaaggagtcaaaaacagcaacaacatatgagtcagtagaaggaggagagaaccgaacaaggactgacttgctttcaagggaggatcaaggctgcattcaagtggaaaaacttcaggagaaggtccatgatcctgctggcaaaggtggtcctgtctttggtgctggcaaagatgaagacaaacaagaccttggagttactggcacaggctaattaacctactatatatattactactatatacta

SEQ ID NO: 68027 - DNA, 255 bp, Glycine max
  Clone ID: 700842264H1
cactgatcgggggcgttcgtagtgactgagggggtcaaagaccaagaagtgagttatttatcagccaagcattctattcttcttatggctagatccaatctcctggtccctgtggaaaggaaaaagaatttttcacgttcttcctttcgggaaggaaggattagtaaaatcctattgattgcaattttctccagacccccgggaaaagcatgaaaaaaaggctcgaatggtacgatcccaccgtcaccccagaat

SEQ ID NO: 68028 - DNA, 251 bp, Glycine max
  Clone ID: 700842265H1
cagaaagagagagaagaagaaaagaagaacaaagatgcaatcctcaaaggagaagatgaaaaacatggcaagtgctgccaaggaacaagtcgacatctataaagccaaaatagacgagaaggcagagaaagcaacggcaagaacagaagaggagagggtgatagcccatgagcacgcaaaggcaaaggaagctggagcaaagatggagctgcatgaagctaaagcaaggcatgcagcagagaagctaagcg

SEQ ID NO: 68029 - DNA, 248 bp, Glycine max
  Clone ID: 700842266H1
gaaagaaagaccatcaaagtttcacttcagccttatccggtttagggtttcggtttttgacccaacctttgacgtatcgaaaccttaagtttcggatcaggtctgagcaatctggttggtagaactttggtcttagagagtcaagttttatgtctgaattagacgatcaaattcctactgccttcgatccttttgctgatgcaaatgctgatgactcgggtgctgggtcaaaggagtatgtgcatatt

SEQ ID NO: 68030 - DNA, 248 bp, Glycine max
  Clone ID: 700842267H1
cgaattctttgatggaaattttccagtggattcttggttaccaatttttgtgaattgtctttatcctgtaagtcaattaccttcagaagctgtcgttgtaaatgtcacatgtggtagtggacgtggtggtttacccaccactgcttggattagttctgcagttaacaatcgctcctcagagatcaacaaaaggattcgcacagcacttgggaaaggtaagacaattgtttttcttactagagttgatc

SEQ ID NO: 68031 - DNA, 248 bp, Glycine max
  Clone ID: 700842268H1
ctcgttgattccaagtttcttcggcaccgggcgaagaaccaacgtcttcgaccccttctccctcgacgtgtgggacccattccatggcttccccggcaccaccgccctctccactccgcgctccgagacggcggccttacgccaacacgcgcatcgactggaaggagacggcggaggcgcacgtgttcaaggcagacctgccggggctgaagaaggaagaggtgaaggtggagatcgaggaggaggga

SEQ ID NO: 68032 - DNA, 247 bp, Glycine max
  Clone ID: 700842269H1
cttcgccgtgtctctccaacgattcggtttctggattcaaagacaaggagtcaatggttgacccctttttggtcgaggctctccagaaccctcgtcaccgcctcaccattttgaggatggagctggagatccagaagtttttgaataatgctgatcagctgcattttgagtttcatcatttcccttcttcctatctccgactggctgcacaccgtgttgctcaacactacaacatgcaaacaatggt

SEQ ID NO: 68033 - DNA, 247 bp, Glycine max
  Clone ID: 700842270H1
ctcaaatcagaaggagctgcaactgccaagaaggtccatgaggtcacaagacatgttacaaatccaccttcacaaagcacagaacgaagacagcatcaccatggagataattcaagtgatgattctggtgctgaagaagaagatattattgtgaggattgactcaccaagcacgctatcttttcgctagtcttcagggtgaagaatcttttgtgattatttgtttgttgtgcaataaatggtgcctc

SEQ ID NO: 68034 - DNA, 248 bp, Glycine max
  Clone ID: 700842271H1
ctacaacgtgagagtcaactcaataagaatcaaccagcacagtgtgttcccactgaacaagatatcatccaccatcgtagggtcgacctctggaggaaccatgattagcacctcaactcctcacatggttctccagcaatccgtgtaccaggctttcactcaggtgtttgctcagcagctaccaaagcaagcacaggtgaaatctgtggcaccatttgggttatgcttcaactccaacaagatcaatg

SEQ ID NO: 68035 - DNA, 248 bp, Glycine max
  Clone ID: 700842272H1
caactacaagaaagaacttccttataaccaaaaccaacaacaactatggcaagttatcagaagcactacgatgatcagggtcgcaaggtcgacgagtatggcaatgttgagaggcaaactgacgaatatggcaacccggttcatgccactagtgtcacttatgtagccaccaaaagtgttggtggctacaatgatgacgctaataagcaacatgatattactggtgtctatcccgagaaagacaccgg

SEQ ID NO: 68036 - DNA, 247 bp, Glycine max
  Clone ID: 700842274H1
ctagtacttcatcatcttccacaaaattatcctcacatcactcccaagttcacaacactaggtctaaatttgattgaagatggttggaattggggttccaatatgcgtgcaatgtggcaacaccagcaacccttgccggtgcaaggtggtggggccaacgctcgggttcctggcgtttgcggcggcagcggtggttgagtggccggtgggggctctcgtgtattgctttcgccacacaaagggtcgc

SEQ ID NO: 68037 - DNA, 249 bp, Glycine max
  Clone ID: 700842275H1
ctttttatcagtaaaaaaaaaatacaggggaaggatggaccttggcccagttcatggagcgaaaacaaagaaattgtggcccgcccaggtttccatgatcattgttttcttttcttatgtcctattggtttgaacaacacacccattcgttgaactgatgatgtcgttgtcatcttcttaggaactccgaacaacgcagcgacacgacacgccgaatgggtggccacggtgaagttacaatcttcgccg

SEQ ID NO: 68038 - DNA, 250 bp, Glycine max
  Clone ID: 700842276H1
cgcaacaacagccttgtccacgaccagtgtgctttgcaggaggaaacctcagcacatgcatattatcctaccctcttcacagacactccaaaatggaactctaagaactgatgtaactgcttcagcctcaaaagataatatcagcatagaaagtgagaagtgttgttcctctttgttggtgaacagaagaacagttttggcttctggggtttccttgttgggtttcccgggtgagagtttggctgtggtg

SEQ ID NO: 68039 - DNA, 250 bp, Glycine max
  Clone ID: 700842277H1
caagaagtagtgagaagaagggagagaatggaggaaaaggcaaaagctgagcagaagaagataggtatgaccgagacttggttgaagaagcaccgtcttctttacaatggagccactagacaccctcttattattagcattcgcgatggcaccatcaacactgcttccttcaaaacatggctcgcacaggattacttgttcgttcgggcgtttgtcccatttgtggctagtgtgctgataaaagcgtgga

SEQ ID NO: 68040 - DNA, 253 bp, Glycine max
  Clone ID: 700842278H1
ctaaaacgtccacacattctccgtcgccacaacaacaatggctccgaagaaaggtgtgaaaggttccgttgtagcagcgaagaagaaggttcaggagaaggtgacgaatcctttgttcgagaagcgtccgaagcagttcgggatcggaggcgcgctgccgccgaagcgggacctgacgcggttcgtgaagtggccgaagaacgtccaaatccaacgcaagaagcgcatcctcaagcagaggctcaaggtccct

SEQ ID NO: 68041 - DNA, 252 bp, Glycine max
  Clone ID: 700842279H1
gggaggaaagatagctggagagtccatctaggaaacagctgcaaacattggtgcttctgccaaggctggcatggagaaaaccaaggccactgtccaggagaaggcagaaagaatgacggcacgtgatacgatgcaaaaggagttggcaacccagaagatagaggcaaagatgagccaggcagagctggacaagcaggcggcgcgtcagcataacacggcggcgaacaggctgccacggcagggcacattgga

SEQ ID NO: 68042 - DNA, 255 bp, Glycine max
  Clone ID: 700842280H1
cggctcgagcggctcgagattagcgttgccattctcatcctcctctgtctctctctctccaccattgccatacatccttacaagctccggccatccagcgccttcaattctcccttctggactacaaattctggtgctcctgtttggaacaacaactcctctttaaccgttggagctagaggtccaattctgcttgaggattatcatcttgtggagcagcttgcaaactttgacagggaacgtatcccagaacgt

SEQ ID NO: 68043 - DNA, 251 bp, Glycine max
  Clone ID: 700842281H1
cgctcagccatgaacatggtgaagcacccaaacatcgtgcagcttcacgaggtcatggcgagctcgtccaagatctacatcgccacggagctcgtccgcggcggcgagctcttcaactaagatcgccagacgctgtctccgggcggagatggccagactttacttccaacaactcatctctgctgtggacttctgccacagccgcggcgtctaccatcgtgaccttaagccagagaatcttctcctcgacg

SEQ ID NO: 68044 - DNA, 246 bp, Glycine max
  Clone ID: 700842282H1
gaccgagctagctagctagcaagcaagcacagagatggaggcaaagcgaggccatgccctcatgtgcttggcacgtgtttcactcttcctctgcgctctaaccctatccgctgctcacggaagcaccacggttcaagacatcgcgagacagttgaacctcggggacaacgagcttctgcgcacggagaagaagttcacggttttcatggagaattacgggaggagctactccacagaggaggagta

SEQ ID NO: 68045 - DNA, 242 bp, Glycine max
  Clone ID: 700842283H1
ctttgaagatggcacaagttgaacttcgtgacgagcatgggaacccagttgaactaacagatgcatatgggaatccggtttggttaacggccgagaaaggcaacccggtgcacctcacggctgtggcaaccaatgcacacaaatctatgcttcagaatgacaccccacaagagcttcctcactccaagagttcaagctcgtctgaggatgaagggcatggagagaggatcaggtagggactg

SEQ ID NO: 68046 - DNA, 243 bp, Glycine max
  Clone ID: 700842284H1
ctgccggttcttcaatcttctagagagagagagagagagagagagagagatggcgttgaatcctcaactgtttccatatggaatgcccgttcctctcgtgaacgagatgtttgtgttggactgagacggtgtcgaattcgctgtctataagattcctgcctctggcactcatgggggtaatctcaaaacaaagggcatcgtgtatgtgtcgtatattcggctggtcttcgttgcgaaaagtcc

SEQ ID NO: 68047 - DNA, 244 bp, Glycine max
  Clone ID: 700842285H1
ctcaaaacaacaagcaagagcttgatgaaagagcaaggcaaggcgagactgttgtcccgggtggaactggtggcaagagcctggaggctcagcaacaccttgctgaagagaagaagggttttggggaaaaggctgaactcgagggaataacaagagtggtggtgggaagagagtgcagcaaagaggagaaacaaggaagaacaagagagaaagtagaggcagagaaagcaagatcaatggagaa

SEQ ID NO: 68048 - DNA, 246 bp, Glycine max
  Clone ID: 700842287H1
ctggcaacaaaccatactggatcatcaagaattcgtggggggagacatggggagaagatggctattacaagctctgcagagggcatggcatgtgtggaataaacactatggtttctgctgcaatggtgcctcaaccacaaacaacacgtggaaagaattatgcttcttattagctatgcacttaaggcaatctaaataaatattgttcattctaggtgctgtatcatgtatgtaccagaatatttt

SEQ ID NO: 68049 - DNA, 246 bp, Glycine max
  Clone ID: 700842288H1
ccaggattctacccgccgctcgatgggaattgcgcttcaaggcgtctcgtagggctaatccgcctcacgagggtcaccaacggcacgtgcctttggggggccgaggccccctactgctggtcggcaaacggacggcgggcgcacgcgtcgcttctagcccggattctgacttagaggcgttcagtcataatccaacgcacggtagcttcgcgccactggcttttgcaccaagcgcgatgaccaatt

SEQ ID NO: 68050 - DNA, 273 bp, Glycine max
  Clone ID: 700842289H1
gtacgtcagctcgaacttcagctctaacgagagagatgagaacaagaggagaagaaaagcagtgttgctattcccttatgtcgaaaagatggcatcccattcgccaagctatgatgctggccattctaagggctgaactgaggtacaagcgaaccagacgatgggcaatattgcttccaaagctcaagctgttcaggcgaatacccaggctatggcccaagctgcaaaggcgaagactcaatcaaacagccccagctgcctaggtctagactt

SEQ ID NO: 68051 - DNA, 249 bp, Glycine max
  Clone ID: 700842290H1
ctcgagacgatcaactttcgatggtcagatagtagccgacgagagtggtgacgggtgacggcggattagggctcgattccggagagggaggctgagatacggcgaccacatccacggaaggcagcaggcgcgcaaagtaggcaatcctaacacggggaggtagtgcacaataaataacactagcgggctcattactgtctggtcattaggatgactactatctgaatggcatatcgtcgctacattgga

SEQ ID NO: 68052 - DNA, 257 bp, Glycine max
  Clone ID: 700842291H1
ggcacggcaagttccgtgccacgttgattaacgtggcaggtgtagcagtagcaaaaagaccagcgcatgcacatataacccaatgatatagtagtatatttctatgccatatcctttgtgttcaatttcaacaacgctcatcacataacaattgcagtgatggggtaccactatgactactacggaacctacctttactttcatcatacacagtcgaagcctgataaatgtcttgcccatcagccctggctctagat

SEQ ID NO: 68053 - DNA, 241 bp, Glycine max
  Clone ID: 700842292H1
ccgagcgaaaccccaaataccaatccaatcctctcccaactcacaaagccatgtctccaagtcccgttatcgacgcttcccctgaggttgatgcagcgcaacaacttccctccgtcgatgacgccactcagaagaagataccccaaccacaggaggacgatgctccccttgtcgaggacttgaaggctgatgacaaagacgacgacgatgaagacgacgacgacgacgacgaagatgacaa

SEQ ID NO: 68054 - DNA, 72 bp, Glycine max
  Clone ID: 700842293H1
cctaggacataattgatcgttgaaaatgcacggaggtaagtcagctggtgagtccatctgggaaactgctgc

SEQ ID NO: 68055 - DNA, 251 bp, Glycine max
  Clone ID: 700842294H1
cacagacatccacagcaatacgctgacccaggaacccaggttccaccagtatacccacggtgcgaagcacaccgacgaatgacccgaccctgttcatgctgctagtgtcacctatgtagccaccagaactgctgctggtggttacagtgctgacattaatccgcaccatgataccaccaatgcctacggcgcagacactggtagaccgcattctagtggtggctacgatggtgacactaataaacatcatg

SEQ ID NO: 68056 - DNA, 262 bp, Glycine max
  Clone ID: 700842295H1
tgatctatctacattcaatggtggtaccaactttgttactccttgttagaccaagggtgcaaagtcttagtgcttctattattgctcatatcgtccttatttacaccattgtctccgcgaccgatgccagactgaacgccagtgattcgctcgtccccattttggcacctcttgcctattgagttcgcgatgttcttggttcacttggcaacgatcgctatcagtgacactggtatcaaggctgctcgtattcttagtgctg

SEQ ID NO: 68057 - DNA, 253 bp, Glycine max
  Clone ID: 700842296H1
gccactgccgctcagctaggaaatcatgggttggttgtgatcccctttttgagtgcatttgtgagtttaaaagtgctcaacttggctggaaatgctattgtgaggataactgctggtgctcttcctcgtggacttcatgccttgaatttgtctagaaacaagatctccactatagaaggattacgtgaacttactcggcttcgtgtcctagacctcagttacaaccgtatattaagaattggacatggccttg

SEQ ID NO: 68058 - DNA, 251 bp, Glycine max
  Clone ID: 700842301H1
gtcttccttccctttcttctccggaaccacccatatgaattcataacccgatgcttccatcccgcatgcaatctcgtaaagctgtttatccggaaaatagcagagggtcccaaaacttatgtacaccaccgagttgtctcgcttggagtcgagccaactcaggcactcgttcgcactcaccacgctcttctggcccctctctgctttctccagagcggttctgcgaacgagggacgctgggccaaggtgcc

SEQ ID NO: 68059 - DNA, 255 bp, Glycine max
  Clone ID: 700842302H1
gtagctttagctgcaccaatgccacgatcaagaagttcaaagatgcattagccaaacacaccccagacagatgcagcttaggcccaaccaaagggttagaggagaaagaactcgaagctcttgctgccaacaaagatctttccttcacctactcaccaaaaccattacaaccttcacatgaaaacgaagagttggcaaccgaaactgcttctgctcctgctcttggttcaggatctcttccttcaccttcaatga

SEQ ID NO: 68060 - DNA, 82 bp, Glycine max
  Clone ID: 700842304H1
tgtccttatgtggttatgaatgtgcttcttttaggacaagcaacagggacggattgggctcctcttggactgtgtttggtat

SEQ ID NO: 68061 - DNA, 218 bp, Glycine max
  Clone ID: 700842305H1
gcaaatatttttttgccgaggtgggctaatgttttcctagccgaataaatcggaacatgacagtttcggcagaaacaaaacgtcggttgagcttgcacaaaaaaacctagccgacctacattgtacatattttatgcaacaccaaaacaagaaaacttcctctgccgtaaaaaaaaaattgtcggcctgcaagcgtttttaacaaaaaattgcgcaat

SEQ ID NO: 68062 - DNA, 251 bp, Glycine max
  Clone ID: 700842306H1
caaaacaaaaacaaaacaaaacagtgtctttgattacgagagagagagaacaaaacaatcaacacaatggcttctgagcaaatgcctcgcagagagaacaacagcaatagggtgatagagagagaggttcacgttgagacacacagaaaagagtccctccctgataagggaagggttgtgatagagagtgagaagaaggagaaagagagagagttggcttctgatagagccaggtctggaaatatagttaa

SEQ ID NO: 68063 - DNA, 220 bp, Glycine max
  Clone ID: 700842308H1
tgacaccaccgaaaaaactcaaacaaatcataaagaagagaacacaagcaatgaaaaaccgtcaacaatcacatcagcaacctcagccaaaaacactgtctcttcggatcaccaagagaacacaggcagtgcaaagccatcaacaatctcttcagcaacctctgcaatagctgataaagccatatcagccaaaaacacagtctcttccaagctcggatac

SEQ ID NO: 68064 - DNA, 248 bp, Glycine max
  Clone ID: 700842309H1
gcagaacctaaccctcacgaaagcccttttcgattccgataactctcgttgttccgaaaccctaaccctaaccgggttttttcgtttgtttggattgaattggcatcggagggaggcgatcgattggaaattggtagtagtagtttagcgttgaagaacgatgtctgctgctgtgtgcggaagcaagagatctttcttcgaagagcttcctccttctccgccactctccaagaggctccgttgttcct

SEQ ID NO: 68065 - DNA, 243 bp, Glycine max
  Clone ID: 700842311H1
gtggttacagtgatgacattaataagcaacatgataccaccaatgcctacggcgtagacactggtagacagcattctagtggtggctacgatggtgacactaataaacatcatggaactactggtggctataatgatgacaccaatagacatcatggaactaccggtgtctatggtatagacaccgataggcaacaacatgggactactggtggctatgccggtgacactggtaggcaacatg

SEQ ID NO: 68066 - DNA, 243 bp, Glycine max
  Clone ID: 700842314H1
aatcaaacaaagtttcggttattggtgttcatttttcttcctccatctttctctaaaacattaattgaactctccattccttaaattttaccaacgagctagttccgacacagacaaagcaatggcaaagactgaggttggctggcataattatatttttggcttttcttaaaattccttctttgattgatgtttttttctcttcccatggaggtggagattgtaatttattgaactaaagta

SEQ ID NO: 68067 - DNA, 246 bp, Glycine max
  Clone ID: 700842315H1
gaaaacagcatcgaacccgtcgtagcagaaaaacttgtcaccatggtttcttccgacaaggatccacgagaggatgtccttcaagcctggtacatggatgatagtgatgaagatcaaagactcccccaccacaaagaacccaaggagtttgtctcgttggaccaacttgctgaacttggagtccttagctggaaactagatgctgataaccatgaaaatgatccagagctgaagaagattcgtgaa

SEQ ID NO: 68068 - DNA, 79 bp, Glycine max
  Clone ID: 700842316H1
ttcttcctggatctcatcatctgcctgcgctccagccccaaaagatccgtggtcgtcctcccaagcccaagctccaccc

SEQ ID NO: 68069 - DNA, 151 bp, Glycine max
  Clone ID: 700842317H1
tgcagaccgagctagctagctagcaagcaagcacagagatggaggcaaagcgaggccatgccctcatgtgcttggcacgtgtttcactcttcctctgcgctctaaccctatccgctgctcacggaagcaccacggttcaagacatcgcgag

SEQ ID NO: 68070 - DNA, 149 bp, Glycine max
  Clone ID: 700842319H1
gcagaccgagctagctagctagcaagcaagcacagagatggaggcaaagcgaggccatgccctcatgtgcttggcacgtgtttcactcttcctctgcgctctaaccctatccgctgctcacggaagcaccacggttcaagacatcgcga

SEQ ID NO: 68071 - DNA, 220 bp, Glycine max
  Clone ID: 700842320H1
ctatgaatcgcgttgcattgcccaaatccattgcccagcgtttcagaggcatccaccacagcccgtgtaagcagttgtgtaataacaaccgttgcgaaggccaggtccaaagtgctgggcccgtggggtctctcctcaagtcccgttcggttattcggttccgcgggcctgacacactcaaattccttcagggcttgttgaccaacgatgtacgcaattt

SEQ ID NO: 68072 - DNA, 250 bp, Glycine max
  Clone ID: 700842321H1
gaattacagagcattttccaacacgattacacgaccgaatcaaaccctctctttctctccgaagctgcgtttaatatcttactcgccttagattgttcttctctttcattatactgttctcttttcgatttgagggaacagtacaagagtgtgaggatcggttaacccaactgcacagatcttttccgagggactgaggtgcctttcttgcaggtagtcactaaaataatggagtctcacgatgagactg

SEQ ID NO: 68073 - DNA, 219 bp, Glycine max
  Clone ID: 700842323H1
gcttcgacttcttcgaccagcctctctccgtcacctcctccgccttcgcccaccgcttcgtctcatgcaccaaatgctcctccctcactcacctctcctgcctcccttcgcctcctccttcccccttcctctgtcccccttgctcccaacaaaccttctccttcttcccagattctaccgctccattagataaacgccgcgccatcatcctcctctgcg

SEQ ID NO: 68074 - DNA, 246 bp, Glycine max
  Clone ID: 700842325H1
tcctctaaactcatctccagacacattttctcacaactatcacgccccaccaccaccatgtccataaatctacgcacccacgccttcgcgggtaacccgctccgatcccccaaccgggtcgacccgttttcgcccgcctccgcgctcgagaccctcacgacccgaatcctcgacgccgcgcacgtgtcctcaccgtccgtggattttaaggtcttgccttttagaaatgggagggtgctggcttct

SEQ ID NO: 68075 - DNA, 246 bp, Glycine max
  Clone ID: 700842326H1
ggggaataagccaattgtttattcatcaaaagatggccatgctagcttccctcatcccgggacgtaccttcagggatcatccaaactaggaattggagtacgcaatgatgcagctcaaagcaaatttattgtggattcgagtgtcaaatatcagattgttgcggccgagtatcttggtgaaggagtcattacagaaccatgttggttgcagtatatgagagagtggggtcctaccgttgtatatga

SEQ ID NO: 68076 - DNA, 244 bp, Glycine max
  Clone ID: 700842327H1
gattgtctttgtatcacgaaaactatacgattcgattccttgttttcaatggacaccttcttcaattctcaatcttcttcttcttcgagaagccgctggagttacgatactctcaagaatttccgtgagatctctccgctggttcagaatcacatcaaacgggtttattttacgttatgttgcgctgtggtggctgctgctgttggagcttttcttcatgttctgtggaacattgggggttttc

SEQ ID NO: 68077 - DNA, 243 bp, Glycine max
  Clone ID: 700842328H1
cactgtccctgtctactatccagcgaaaccacagccaagggaacgggcttggcggaatcagcggggaaagaagaccctgttgagcttgactctagtccgactttgtgaaatgacttgagaggtgtaggataagtgggagctggaaacagcgaaagtgaaataccactacttttaacgttattttacttattccgtgaatcggaagcggggcactgcccctctttttggacccaaggtcggctt

SEQ ID NO: 68078 - DNA, 241 bp, Glycine max
  Clone ID: 700842329H1
agaaaaatggctgatacaagtggaggagatgcagtgagaccggtggtaatatgtgataacaagtgtggctgcacagttccatgcactggtggttccacttgcaggtgcacaagtgtcggcatgacaactggaggcggtgatcacgtgacatgctcgtgcggagagtactgtgggtgcaatccatgctcatgtcccaagactgcggcttctggaactggttgcagatgtggcacagattgct

SEQ ID NO: 68079 - DNA, 247 bp, Glycine max
  Clone ID: 700842330H1
cttccttataaccaaaaccaacaacaactatggcaagttatcaacagcactacgatgatcagggtcgcaaggtcgacgagtatggcaatgttgagaggcaaactgacgaatatggcaacccggttcatgccactagtgtcacttatgtagccaccaaaagtgttggtggctacaatgatgacgctaataagcaacatgatattactggtgtctatcccgagaaagacaccggtagacatcattttgg

SEQ ID NO: 68080 - DNA, 245 bp, Glycine max
  Clone ID: 700842331H1
tcttgagttgcttattgggcttcttggctcatctagctctaagcagcaacttgatggtgctgtggctttatgcaagttggcggataaagcctcgaccttgtctcctgtggatgctgctcctccttctccaacaccacaggtctatttaggagagcagtacgtaaacaatgctacgttgtctgacgttacatttttggttgaaggcaaacgattttatgctcatagaatttgtcttcttgcatcat

SEQ ID NO: 68081 - DNA, 215 bp, Glycine max
  Clone ID: 700842332H1
gggaaagaggctgtgagcctaatgtttatacttataccgtgttgattgattacttgtgtaaggagggtaggatggacgaggcgttgaagatgttgaatgagatggtggagaaaggcgtggctcctagtgttgtcccgttcaatgccttgattgatagttattgcaaacgggggatgatggaggatgccgtgggggttttgggtttgatggagtcg

SEQ ID NO: 68082 - DNA, 246 bp, Glycine max
  Clone ID: 700842333H1
gcccgcgataatttactcttttattagcaataaaaatatacagataaatgaagaggtgaaagaaagagagaaaaaaaatcaatgatatagaattctaatatgtaaaggtctatgggttatctcataaaaggtagtgtaataaagcatcaatctaaatcaattcatatctatttatatatgaattaatttataacgtaaacaaattaagagctctgaatcaataaaaactgagaatattgattcacg

SEQ ID NO: 68083 - DNA, 85 bp, Glycine max
  Clone ID: 700842334H1
cggctcgagcggctcgagcttctaaaccctatggccgacgaagccaaagccaaaggcaacgcagccttctcctccggggactatc

SEQ ID NO: 68084 - DNA, 244 bp, Glycine max
  Clone ID: 700842335H1
aactcaggtgcgtcctgcaacaactctgttggctgatgggtgtccatatttgtatgctatggtgcatgatagttcagtgtctacaataccaggtgattttgtcattggtgttaagttgacaaccataaacaatatgtgtgcatatgggctcaatcctggtatttcaggttctcgtcttttgggcaccattcctcagtctatttcacagcaaactgtttggactcaaatggcaacagtgagaaca

SEQ ID NO: 68085 - DNA, 149 bp, Glycine max
  Clone ID: 700842336H1
caaatccaatcaacaattacagcatcaattgaactctgattacatgtacaacactacccagatggattcttcttcagctttgcctctaccagcagcaacaatgcctgaatcactcttgtccttctatcaatccaacttttgtgatccaa

SEQ ID NO: 68086 - DNA, 251 bp, Glycine max
  Clone ID: 700842337H1
ctacacagtacacacactagaagaataatggcttccatcctccactactttttagccctctctctttcttgctcttttcttttcttcttatccgactcagtcacccctacaaaaccaataaaccttgttgttctacccgttcaaaatgatggttccacagggctccattgggccaacctccaaaaaagaacccctctaatgcaagtaccagtcctggtggacctcaatggaaatcacttgtgggttaactg

SEQ ID NO: 68087 - DNA, 250 bp, Glycine max
  Clone ID: 700842338H1
aagatcttccttacaaaagtttgttttcaaagtgtgttttgtttcccaaatcctactcttgtgaccacaacccttcctcctctttcttttgaaacctctttttttctattccccaaccaaacaagcaaacgctactcactcatcatcactgagatcatggctcctaatatcaccactgtcaaaaccaccatcaccgacgctcaagccaaggtcgccaccgatcatggtcgtgcctacgtcaccttcctcg

SEQ ID NO: 68088 - DNA, 216 bp, Glycine max
  Clone ID: 700842339H1
agaggaagggggtgagattgttttcggtggtgttgatcctgctcactataagggaaagcacacttatgtgcctgtgaccagaaaaggatattggcagtttgatatgggagatgtacttattggcggtaaacccactggatattgtgctaatggctgttcagccattgcagactcagggacttctttgttggcaggtccaacgactgtcataactat

SEQ ID NO: 68089 - DNA, 246 bp, Glycine max
  Clone ID: 700842341H1
gcagaacctaaccctcacgaaagcccttttcgattccgataactctcgttgttccgaaaccctaaccctaaccgggttttttcgtttgtttggattgaattggcatcggagggaggcgatcgattggaaattggtagtagtagtttagcgttgaagaacgatgtctgctgctgtgtgcggaagcaagagatctttcttcgaagagcttcctccttctccgccactctccaagaggctccgttgttc

SEQ ID NO: 68090 - DNA, 110 bp, Glycine max
  Clone ID: 700842342H1
gaaaatttgaagagtttgtttattgtgaagaaaagaaaaatgcaggcagcaaagaaagccatagagacctttaaggaaaccgcagccaacattggcgcctctgacaagtc

SEQ ID NO: 68091 - DNA, 245 bp, Glycine max
  Clone ID: 700842343H1
gaagaaaagaagaacaaagatgcaatcctcaaaggagaagatgaaaaacatggcaagtgctgccaaggaacaagtcgacatctataaagccaaaatagacgagaaggcagagaaagcaacggcaagaacagaagaggagagggtgatagcccatgagcacgcaaaggcaaaggaagctggagcaaagatggagctgcatgaagctaaagcaaggcatgcagcagagaagctaagcgccaaccaat

SEQ ID NO: 68092 - DNA, 243 bp, Glycine max
  Clone ID: 700842345H1
gcaaaagctgagcagaagaagataggtatgaccgagacttggttgaagaagcaccgtcttctttacaatggagccactagacaccctcttattattagcattcgcgatggcaccatcaacactgcttccttcaaaacatggctcgcacaggattacttgttcgttcgggcgtttgtcccatttgtggctagtgtgctgataaaagcgtggaaggaatcagattgcagtggtgacatggaagtc

SEQ ID NO: 68093 - DNA, 214 bp, Glycine max
  Clone ID: 700842346H1
aagaacctaagtgagaaacaaagaaaggaaataattgatctttgaaaatgcagggaggaaagaaagctggagagtccatcaaggaaacagctgcaaacattggtgcttctgccaaggctggcatggagaaaaccaaggccactgtccaggagaaggcagaaagaatgacggcacgtgatccgatgcaaaaggagttggcaacccagaagaaaga

SEQ ID NO: 68094 - DNA, 251 bp, Glycine max
  Clone ID: 700842348H1
gttttgtgagatagcacatagcatagcaaggaaggagtattacaaccgaaaccctgaagaaaaaaagagtagaggaagaaaaaacacctgcaccaccaacgatgggtgtggattactacaagatcttgcaggttgataggagcgccaaagacgacgacttgaagaaggcttataggaaacttgctatgaaatggcaccctgataagaaccccaacaacaagaaagaagctgaagctaagtttaagcagatt

SEQ ID NO: 68095 - DNA, 172 bp, Glycine max
  Clone ID: 700842349H1
tattttctcaagagaaactttaagcagatgtctaatgttttgtgggtggctcctgaggacaaggcgagtttatggtcacaacttcattatgtttcgtgtaataatctggaaatgcaagaagcttatcttgtcaatctcgtaaatgtgttacgagaattgtatttgcacagtc

SEQ ID NO: 68096 - DNA, 221 bp, Glycine max
  Clone ID: 700842350H1
tttcccatccccttactcctccaaactttcccggttccatttcgccggaataatcgttccttctcatgcttccgaaatcagttccctcagcggtaccccaacccaaaacacttgcttccaaaatcaccctaacttcttccctcacctccctcctccaaccccaaaaccctcgcacatggatcctcttcaccgtcctcttcatccagatcctcctcctctgc

SEQ ID NO: 68097 - DNA, 247 bp, Glycine max
  Clone ID: 700842354H1
gtgcggtttcctttgttggtgttgctgggaactgttttcctggcatcagtttgtgtctcattaaaggtgagagaggatgagaataaccctttctacttgagaagctctaacagcttccaaactctctttgagaaccaaaacggtcgcattcgtctcctccagagattcaacaaacgctccccacaacttgagaaccttcgagactaccggattgtccagtttcagtcaaaacccaacacaatccttc

SEQ ID NO: 68098 - DNA, 249 bp, Glycine max
  Clone ID: 700842355H1
gcagagaatgctgcaccctagatggcgagagtccagtagccgaaagcatcactagcttacgctctgacccgagtagcatggggcacgtggaatcccgtgtgaatcagcaaggaccaccttgcaaggctaaatactcctgggtgaccgatagtgaagtagtaccgtgagggaagggtgaaaagaacctaagtgagaaacaaagaaaggaaataattgatctttgaaaatgcagggaggaaagaaagctgg

SEQ ID NO: 68099 - DNA, 248 bp, Glycine max
  Clone ID: 700842356H1
agcatgggaacccagttgaactaacagatgcatatgggaatccggtttggttaacggacgagaaaggcaacccggtgcacctcacggctgtggcaaccaatgcacacaaatctatgcttcagactgacaccccacaagagcttcctcactccaagagttcaagctcgtctgaggatgaagggcatggagagaggatcaggaagggactgaaggataacatagaagaaaagttaccagctggagaagga

SEQ ID NO: 68100 - DNA, 246 bp, Glycine max
  Clone ID: 700842357H1
tgggaatggtggtggtagtgccaggtgtctgtctgaggagaaaatagaataaaaagctatgaaattttggcacaaggtctgattgtagaattgaagaagatgactggggggggtatcactatgcaatcgacgccgggaagctcaggatacttggatttgtatccagagcggaagatgtcctttttcaaaaatccttacattctcggactggctgctgtcgccggcatcggtggtctcctcttcggc

SEQ ID NO: 68101 - DNA, 240 bp, Glycine max
  Clone ID: 700842359H1
aaaaaaggaatggttcttccttttgagccacattctatcacctttgatgaagtcatatactctgttgacatgccacaggaaatgaaggaacagggtgtacaagaggacagattggtgcttttgaagggtgttagtggtgcattcaggcctggtgttctcacagctttgatgggtgtaagtggagctggtaagactactttgatggatgttctggctggtaggaaaaccggaggatatatt

SEQ ID NO: 68102 - DNA, 213 bp, Glycine max
  Clone ID: 700842361H1
agaagaccaaggactatgcaagtgatgctgcgcagaagaccaaggactatgcaagtgatggtgctcaaaagagcaaagaatatgcgggtgatgtagcactgaatgccaaagattatgctcaaaaaagcaaagattacgcaggtgatgctgcacagaatgtcaagattatgcaagtgatgcagtgcagaagagaaaagagtattctggtgatgc

SEQ ID NO: 68103 - DNA, 245 bp, Glycine max
  Clone ID: 700842362H1
atatactgtgtccgctgtttagtgaacgttgatattcctctcaatcaaggctgtttggctccagtgaagattcttattccagaaggctcatttctctctccaagtgatactgctgctgtagtaggaggtaatgtccttacatctcagaggataactgatgttatattcactgcatttcaggcctgtgcttgttcccagggatgtatgaataattttacatttggggatgatacttttggttatta

SEQ ID NO: 68104 - DNA, 251 bp, Glycine max
  Clone ID: 700842367H1
gtgatagaagctcctatgagaaggggaaggcaggctacgaccactgccgttagtttccaactcaatgtgaaaccaataacaaaagctgttacagtgagagctacattttgaacaatggttgagagtctgtcagctagagcacttcttactaatgttgcatccgcagctagcatggccgttagtgagccagtgttgttctcatccttatcaaaccatgcaacttcattgttgagaatagctgacagttaaat

SEQ ID NO: 68105 - DNA, 250 bp, Glycine max
  Clone ID: 700842369H1
cgtggccgcaacctcgccgcgcaggaactgtggtccgagcttgaccctttctctgacctccttggcttcgataccaccaccaccaccaccaaccaaccaccccttccagacaaaaaagtggtgtcatcatgtgagaagaagaagaagaaaagtgtgagtgcagaaaagaagagtggtgggcgagctcggaagaacgtgtacagaggaatcaggcaaaggccgtggggcaagtgggccgcggaaataaggg

SEQ ID NO: 68106 - DNA, 249 bp, Glycine max
  Clone ID: 700842370H1
caggaagggactgaaggataacatagaagaaaagttaccagctggagaaggagtagtgaaggagaataaacacaccacaattgctgcttctacttctacaacagatactagtgatgctaatcaccacccaaccactgagcatgagaagaagagtatcatagacaagattaaagaaaaattccaataaatcagcagtgaatattaatatatattcacgaattgaagctttgtttatttgttatgtttttt

SEQ ID NO: 68107 - DNA, 63 bp, Glycine max
  Clone ID: 700842371H1
ttttaagattaagagagagagacaacatgttgcggcaccacttacagttatgcaacacatata

SEQ ID NO: 68108 - DNA, 249 bp, Glycine max
  Clone ID: 700842372H1
gtgttctttctgattctccttgatcttctttttctcttcgttattgttcccaacacattccaaaccctaaatttattgcctggctcttccatccccaatatccgaactcaaacgcggagtggacgcagagaacaaaaacatgtcatcttggctgagatctgcggtcaacaaagccgtcgaggtcggcaacaaaaacaacctcactcgcaccgtcaagaactacgccgacaccgtcgttcaacacgccgg

SEQ ID NO: 68109 - DNA, 243 bp, Glycine max
  Clone ID: 700842375H1
ctgcgctgcttcgcggcgttgtcaacttcccttcacccaaccaccttccatctccaaacaaacatgggtcggaaacacgacgccgttttggccagcgaacctgtcgccgaagaagccccctgcagccctgagctcgattccgagaagaagaagaagaagaaaaagaagaacaaaaacaaagacaagcaccaaaccgaaagcagccccaaacgaaagctcgacgaacacgacccccaaaacggc

SEQ ID NO: 68110 - DNA, 239 bp, Glycine max
  Clone ID: 700842376H1
gaaacaaagaagttgtccaagagggaaagtagaggcagagaaagcaagaccaatggaagaaacaaaactggaagctaaaggaagagaaaaagctgaaaccaaagagggtggtggtgaggaacaaggaatgagaagagaagaaataggagaagacaataaacaatccagcctggaagagatttttaagtacagagctgaagctcaacagaaagttaaggagagaaacgagagagcagaac

SEQ ID NO: 68111 - DNA, 238 bp, Glycine max
  Clone ID: 700842377H1
ggtaggcatagatgttgcaacatgtttgcaagacgcattggcacggatatgcctagatgtgcgggtagctgcattggttaatgacactgttggaccattagcagttggacattatcatgatccagatactgttgcagcaattataattggtactggtacaaatgcctgctatttggaacgagttgctgctattatcatgtgtcaaggccttcttataacatccggtcgaatggttgtc

SEQ ID NO: 68112 - DNA, 213 bp, Glycine max
  Clone ID: 700842378H1
gttccctacctctcctttcaagatgcagatcttcgtcaagaccctcaccggaaagaccatcacccttgaggtggaaagctctgacaccatcgacaacgtcaaggccaagatccaggacaaggaaggaattcccccggatcagcaacgtctcatcttcgccggaaagcagctcgaggacggccgtaccctcgccgactacaacatccagaagga

SEQ ID NO: 68113 - DNA, 244 bp, Glycine max
  Clone ID: 700842379H1
tcaattcaaacaataggagaagaagggactagcggcgaactcaaacggcgtcgtatcgactcgttgttcatccatttgagaggcatctggtagcggaagatggataagggtaagatccaagaggtgatcgagaaccaagtcctgacggtggcgcaagctgtcgaggacaagatcgacgatgagatcgccgccctggaacgcctcgatgccgacgacatcgaagccctccgcgagcgccgcctcc

SEQ ID NO: 68114 - DNA, 168 bp, Glycine max
  Clone ID: 700842381H1
gttaccaacaacactcaaatggaaaacctgcagcagattcaaaacaattacatagacatggctacgtgttctaatttcaacaacatcaataatccagaagtttccatggcctctcagcaggttggagttggaccaatttacaccagtgactccatcgtgtctcttccc

SEQ ID NO: 68115 - DNA, 220 bp, Glycine max
  Clone ID: 700842382H1
gttttgtcatggtcaaagggcatctctaaggacacacgcaggggtggggctacagaaaaatccgatcagaatccaaatgctggtaaatttcctccattaaggagaagaaaacatctgtttgtcattgctgtggattgtgataccacttcaagccttcttgaaactattaaagccatctttgagtctgctggaaaggatagggcagagagcattgtaggtt

SEQ ID NO: 68116 - DNA, 148 bp, Glycine max
  Clone ID: 700842383H1
caggggttgccagagggtgcacttaggagagttattttaactgcatctggcggtgctttcagggattggccagttgataaactgaaagatgttaaagttgctgatgcattaaaacatcctaactggaatatggggaaaaagataactg

SEQ ID NO: 68117 - DNA, 250 bp, Glycine max
  Clone ID: 700842384H1
cggatctagagtcttcagtttctcctcgttgttcttcgctttcctgttttcaatttcgattctttcgttaatttaataagatgtttgggagggcaccgaagaagagcgataatacgaggtactacgaaatcctcggcgtctccaagaacgcttcgcaggatgatctgaagaaggcttacaagaaagccgccattaagaatcaccccgacaagggcggtgatcccgagaagtttaaagagctggcgcaact

SEQ ID NO: 68118 - DNA, 246 bp, Glycine max
  Clone ID: 700842385H1
ggacctcattccttctctgaattctccagctcttcatgcatcttttgacgctgagtttggctgcttcaaatcttcctggaaaaacttcactctcgccgagatccaagctgcaaccaatgactttagccatgaaaatttgattggggagggaggctatgctgaggtttacttgggcaaattggaggatggaaactttgttgccattacaaggttgacaagagggtgccaagaagaaatgactgcaga

SEQ ID NO: 68119 - DNA, 246 bp, Glycine max
  Clone ID: 700842386H1
cttgtgagtttgactcttgaagacattccaaaccatggaagcatcctatttgtttgcaattcgtggatttacaatgccaaactcttcaaaagtgaccgcattttctttgccaaccagacatatcttccaagtgagacaccagctccactagtcaaatatagagaagaagagttgcataatttaagaggagatggcactggagaacgcaaagagtgggaaaggatctatgattatgatgtctacaat

SEQ ID NO: 68120 - DNA, 249 bp, Glycine max
  Clone ID: 700842388H1
atttgcagcctgagtttttaagcttgcttgtgtgcaagcttatgtctagttcttatctcacacggcagcattcatggttgcatgatatcatagagctcatagcttcttacaaatgtaagtcatgctctagatgtacgcttctgaactttttggggaaactctaaaggtcaagttttatattaccaaagatatttttgcacatttgtttaagaaaatgtagtgatttttgagtctttgtttctctggttg

SEQ ID NO: 68121 - DNA, 246 bp, Glycine max
  Clone ID: 700842389H1
cctttttatctctatctttcttcacatcttaaccttgttcttaccagatggctgcctcagttaaactcttatttttgtcctttctctcgttgttcatctctttctccatagctcaaacctctttcagaccaaaggcacttgttcttcctgtaaccaaagatgtttctgcctcagttcctcagtatgtcacacaaatcaaacaaagaaccccacttgtggcagtgaaactaactgttgatcttggtg

SEQ ID NO: 68122 - DNA, 240 bp, Glycine max
  Clone ID: 700842391H1
gaaccacgacctcggttgttcttgctcagggtcttatagcggaaggtgtcaaggttgttgcagctggggccaaccctgtgctcatcacacgtggcattgagaagacagcgaaagctcttgtatctgagcttaaacagatgtcaaaagaggttgaagatagtgagttggcagatgtggcagcagtcagtgcagggaacaattatgaagtaggaaatatgattgctgaagcattgagcagag

SEQ ID NO: 68123 - DNA, 243 bp, Glycine max
  Clone ID: 700842392H1
cgttaacaccactgactcacttataaaaggcgctttaacaccaaacggagtctctctatcaaaaaaagctacctagagcttgcacctattggtatcttctacaatatcctaaagtgtttttcttcttcttcatcaccatgtctttactttcagacctcatcaacctcaatctctcagaatccacagaaaagatcattgctgagtacatatgggttggtggatctggtatggacctcagaagca

SEQ ID NO: 68124 - DNA, 241 bp, Glycine max
  Clone ID: 700842394H1
aactaattgtgcttatccttattgagagaaaaaatggccacatcaatcaaattctttgagttgaacacaggggccaagattccttctcttgggttagggacttggcaagctgaacctggtgttgtagctgaagctctcaccacagccattcaggtaagtaaaactcttgagcgttttctgcttgtaattgccatgtaaaaaatttcataggttagtcatggctttttgagtttcgattggt

SEQ ID NO: 68125 - DNA, 245 bp, Glycine max
  Clone ID: 700842395H1
gcttcctggatctcatcatctgcctgcgctccagccccaaaagacccgtggtcgtcctcccaagcccaagccccaccccgtctggcctgctgcagccctcaccgacagccctgctcttctatccgccaaaagaggccccggtcgtcctaaaaagattggtgtcagcccgccaggcccaaggggtcgtccacccgggactgggagatctaagctgcccaagaggcctggccgtccccccaagccca

SEQ ID NO: 68126 - DNA, 145 bp, Glycine max
  Clone ID: 700842396H1
cacaactactacaagtacttccttacaatcaaaaccaacaacaactatggcaagttatcaaaagcactacgatgatcagggtcgcaaggttgacgagtatggcaacgttgagaagcaaaccgacgaatacggcaaccctgttcat

SEQ ID NO: 68127 - DNA, 260 bp, Glycine max
  Clone ID: 700842402H1
gtaaatctcaaacgaagcccttttctctctctcttcaatttcacccttttagcatttgtacattcctttcccttccttgaatcgttcttaattgcgagaggggatatcggagaagttgattggcctcccattaattgcaggtctgaatgatctgatggagtctaaagttgggaagaagaagtcgtctagtagtaagtcccttttgtacgaagctcctctcgattacaccattgaagacgttcgaccacacggtggaatta

SEQ ID NO: 68128 - DNA, 57 bp, Glycine max
  Clone ID: 700842403H1
tacatcttttgaattcacacagaaacttacctcagtcgacttctcaggatcaagact

SEQ ID NO: 68129 - DNA, 255 bp, Glycine max
  Clone ID: 700842405H1
tgagtttgccacatcctcagggagatcaatctggtgcttttagtcaagtttttctgcctgcagatgaaggtgttgaaagttctatttggctgctagcaaaggcttatgtagttgtgaatgactcgtgctatcatcaacttgtcagccattggttaaacactcatgcagttgttgagccattcatcatagcaacaaacaggcatctcagtgttgttcaccctatttataaactccttcaccctcactatcgtgaca

SEQ ID NO: 68130 - DNA, 256 bp, Glycine max
  Clone ID: 700842406H1
atgaaaggaaataattgatctttgaaaatgcagggaggaaagaaagctggagagtccatcaaggaaacagctgcaaacattggtgcttctgccaaggctggcatggagaaaaccaaggccactgtccaggagaaggcagaaagaatgacggcacgtgatccgatgcaaaaggagttggcaacccagaagaaagaggcaaagatgagccaggcagagctggacaagcaggcggcgcgtcagcataacacggcggcga

SEQ ID NO: 68131 - DNA, 254 bp, Glycine max
  Clone ID: 700842407H1
gaggagttggtcaaactactctcccgcaaagacttacaactacaagatgacaagggatctgctttgctgcagctgttggaacgtgcacatggctgagatgatcagcagaaaaaaatgagtcgtggccaacgataaagggtggagaaggagtcactcctcttcgcttgggaggagtgagatggctcggtttgataaaactagagaaatactctactatgatgattggattacactaatccgttcggtatctgttt

SEQ ID NO: 68132 - DNA, 249 bp, Glycine max
  Clone ID: 700842408H1
attcttttacatatttttatgtttgagccagagcctatataaattaaaatttccttgttcacattgttaattaatgagggcgagccctggtgcagcggtaaagttgtgtcttggtgacttgttggtcatgggttcgaatccgaaaacaacgtcttatgcaagggtaaggctgcgtacaacatccctcccccataccttcgcatagcgaagagcctctgggcaatggggtacgaattttttttttttttt

SEQ ID NO: 68133 - DNA, 258 bp, Glycine max
  Clone ID: 700842409H1
gttcagttattaagctcttttggcatgcttcttgctggtcttagggtgaacttttgatgccataaaaaaccatcccatattagttctatttctctctctgcctctccctttgtttcaagttccctctgcttattctggaacgatgtctgagaaaaccacagctgagaaccttattgaaaaccttgtggacacatttgttgataagaaaaaatctgtatcattctttgaggatgataagtcagactcagtgagttctca

SEQ ID NO: 68134 - DNA, 260 bp, Glycine max
  Clone ID: 700842410H1
gtaacggtgattttttgtgagtgtggcatagatcattgaatcaatggccttcgccaccagcgccttggtttgttcaaacttgctcggaaggaaggttctagtcacaagcaaatcatccactccactaccatttcttttcaagagaagcatcttaaaagctcagaattcagagcaagtcaaatccgcatcttcacgggctactctagctgcacttatcgtctcctccgagagcctctctgccgaccccagaagccctagcc

SEQ ID NO: 68135 - DNA, 260 bp, Glycine max
  Clone ID: 700842411H1
tcaagtccaagaaccaacctaccttttgcaatctcaattcaatggcgtcctctctcattgcgaacgcttcctctcctcttctctcctctccaggtccctccttcgccccgccgcttccgcttcccaccgctctttcaacaccaacgccatgcgccagtatgacaaccgcgccgacgaccacagcaccgacatcgatcgtcactccgaacgctctttccctagcactgcgcgccgcgacgatatcttctcagatgtgttgg

SEQ ID NO: 68136 - DNA, 257 bp, Glycine max
  Clone ID: 700842412H1
taatcctctcctcttcctctctactaatttcagctatggccgacgaagctgtggttgttccagatcccacccagatcgatgtcaagctctttaaccgctggagcttcgacgatattgagattactgacatttctctggctgattatatcggagtggcgacatccaagcacgccacgtatgtgcctcacaccgccggcaggtactcggtgaagcggttcaggaaggcgcaatgccccattgttgagaggctgaccaac

SEQ ID NO: 68137 - DNA, 257 bp, Glycine max
  Clone ID: 700842413H1
tgttctagattgcgagctccccacagaagaagaaaagtctgtcgtggttgttaagaggctacatcaaaggcggccattttaacgaggcggcagagacgatcatgaaaatgcttgatttgggattctatccagagtacttggacagggcggctgtattacaaggtttgaggaaaagaatccagcaatatgggaatctagatacttatgtcaggctctgtaagtccctctctgatgcaaaccttatagacctgtcttgt

SEQ ID NO: 68138 - DNA, 258 bp, Glycine max
  Clone ID: 700842414H1
ctcgagcgaacagagttgacagagaaacatcactcacagcgaaaatggcaaagagaaagctgctgaagctaaagccaagtctccacgttcctcatacgtttcttccgcagctccactttggccctgacccgacccgttgccccgcttgcccgacccgaatccccctcgatatccctcttcaaaccctccaccgttcacttcccgggcatactcgcaaggcaaatggtcactgcgagatcgccacgtggtgcttcaaaa

SEQ ID NO: 68139 - DNA, 263 bp, Glycine max
  Clone ID: 700842415H1
tctcgagcgaatcggctcgaggttcagtgtgtcgtttaaaaatttcgcagttgctggagctagccaagaacttcgtgtcggagaaggtaaatgctatggccaagccggaggcgagtgtcactgacgtggacttcaagcgcgtgagcaaagataatgtcgagtacttggccaaggtctctgttcgtaacccttattcaacttccatacccatttgtgagatcaactactctttcaaaagcgcatccagggagatagcatcaggg

SEQ ID NO: 68140 - DNA, 266 bp, Glycine max
  Clone ID: 700842416H1
tggatggactgccaccccaatgcaggatgttcaggttacaattgattggtttatttcctctcaggaatgtgttcccagaacctattgtgttttaaatccacaaaatccttttgtgttgaataggtggatggggaaactgactttcccccagggcacttcccgaagtgttaaaagaatgcctctttctatagggggaggagctggtgcaaagaatgctattctcatgaatatgccaaatgctgttctttcaatgtggagatattttg

SEQ ID NO: 68141 - DNA, 236 bp, Glycine max
  Clone ID: 700842417H1
tttggacatcgagtgtacaaaaactatgatcccagggcaaaggtcttaagaaaactggcagaggaagtgttttccattgtgggcagggatcctcttattgaggtggcagttgccttggagaaggttgcactatctgatgaatatttcatcaagaggaagctatatccaaatgttgacttctactctggattaatttatagggccatgggatttccaccagagtatttcactgtttt

SEQ ID NO: 68142 - DNA, 256 bp, Glycine max
  Clone ID: 700842419H1
caggctactatccatttgggagcaactgagctgcttggagagtatttttcttcttctagaaaaaattacagaccctcatcccagagagttagctgtatgcattgcgagacatatcagaaattcattcagttttctggttgcggttggccaccttccattatacttgagggagattcttcaagggcacaagctaccttagaggctgaaattgcggctgcgtataatttgaattctggcatttgctgcatctgaatat

SEQ ID NO: 68143 - DNA, 257 bp, Glycine max
  Clone ID: 700842420H1
tgagaaaacaagaagtagtgagaagaagggagagaatggaggaaaaggcaaaagctgagcagaagaagataggtatgaccgagacttggttgaagaagcaccgtcttctttacaatggagccactagacaccctcttattattagcattcgcgatggcaccatcaacactgcttccttcaaaacatggctcgcacaggattacttgttcgttcgggcgtttgtcccatttgtggctagtgtgctgataaaagcgtgg

SEQ ID NO: 68144 - DNA, 257 bp, Glycine max
  Clone ID: 700842421H1
cacacaactactacaagtacttccttacaatcaaaaccaacaacaactatggcaagttatcaaaagcactacgatgatcagggtcgcaaggttgacgagtatggcaacgttgagaagcaaaccgacgaatacggcaaccctgttcatgctgctagtgtcacctatgtagccaccagaactgctgctggtggttacagtgatgacattaataagcaacatgataccaccaatgcctacggcgtagacactggtagaca

SEQ ID NO: 68145 - DNA, 255 bp, Glycine max
  Clone ID: 700842422H1
ggtccggtgtggcgaatgattactatttgagctcttccctctcacaaactcagaaaacaagtccaatgagcaatttccagagaatatcacacgaatcccaccctcccccagggtacggatctccttaccctccaccccaaccgggttacccatccgcaccgcctcatgaagggtaccctccgccgccgccgcctcacggatacggtgggtaccctccgccgcagccgccgcagcgtccgccgtacgactcctatc

SEQ ID NO: 68146 - DNA, 213 bp, Glycine max
  Clone ID: 700842423H1
ctgtaattgtagtagtagacagtagcaccatgagccaggagcagttcaagagacctcaaggggagcaggaccccatcaaatacggcgacgttttcaatgtctccgacgaactcgctttcaaacccatcgcgccatgagacgcagctctcatgcaagccacggagaaccaagcattgggccaaactcaataaggaggtcccgcctcggtgatgc

SEQ ID NO: 68147 - DNA, 258 bp, Glycine max
  Clone ID: 700842424H1
tgataacctaagcttagaattagaaacaaagataagaagaaaggaaagaattgatcgttgaaaatgcagggaggaaagaaagcgggagagtccattaaggaaacagctacaaacattggtgcttctgccaaggctggcatggagaagaccaaggccactgtccaagagaaggcagaaagaatgacagcacgtgatccggtgcaaaaggagttggcaacccaaaagatagaggcaaagatgaaccaggcggagctggac

SEQ ID NO: 68148 - DNA, 249 bp, Glycine max
  Clone ID: 700842425H1
tatgtttggctggttttgtgtggaccggtgctttgttggatcctcttgccaagttgggttctacagtgcaagaattcagtatacttccctaattcatggtattttgcaaaggagcttttcgcttagaaccagaactggagctctcactagtagcatagcactggtttatatgcagtgggttgaattcttactcccatttaccatgttacacctagaacgttgatgtttgagtacaattctcttttaaat

SEQ ID NO: 68149 - DNA, 259 bp, Glycine max
  Clone ID: 700842426H1
tttagctttctcttccttcataatttctcacctttcaaatctccattcagcttcattttctgcatagaaaaaacccttttctggagaaagaatatagtcttcagctggacaaggatcattcatcttgaaagaagagtttgtgtgtgacaatctttatagttctaaggagggtgcaagagagaactgaatttgctgtgatggcaactcgtagatatgcttttggaagagctgatgaggccactcatccagactccatgag

SEQ ID NO: 68150 - DNA, 257 bp, Glycine max
  Clone ID: 700842427H1
ttagaacctatttcaccaagtagtgctaatttcttcctttttagaatggctccagtggctacatttatgttaagtctggttgcttgggccgttgtaccttttgattatggtatggtattgtcagatttgaacatagggctactttatttgtttgccatatcttcgttaggtgtttatggaattattatagcaggttggtctagtaattagggggcggccgttcggtcgcctatgatactaggaccaataggtcaaaa

SEQ ID NO: 68151 - DNA, 257 bp, Glycine max
  Clone ID: 700842428H1
atctgagtcttgtgtttagcgtaggggattgaaaatgagtatgtacggtagggatccgtggggagggccgttggagatccacgccacagactccgccaccgacgacgagcgcaccggaatctccaggagctggaccgaggcgctttagacgagacacaacagagctggctcttgggcgccggagaacagaaaaagaagaagaaaaggtacgtagatcttggctgcatcatcgtcagccgcaagctcttcatctggac

SEQ ID NO: 68152 - DNA, 256 bp, Glycine max
  Clone ID: 700842429H1
gacactttctagttctaccatggcggtaggactctccgccgccataaccatgaagtccctcctccgtttccaccaacctcacctgagcctccccaaatcaagcccaacaacactccctttctcccccatgagaattttccaccacacagcatcaccaagaacccaaaaagtttcaactttcaccgtttgtgtcctcatgcaggacccaaaacaaggcacccacatggaaattgagccacaagaacaacctcctcct

SEQ ID NO: 68153 - DNA, 259 bp, Glycine max
  Clone ID: 700842430H1
cgaaacgacgccgttgctggcgagcttgacgcgggcgcaccacacgagcatgctgtggcacgtggagaggatggttaagtgggcggaggatctcacgacacgtggcggaaagaagatcgtcgatccttccgtggggactcccaggatggagattagaaaattcgccaagagctactctgagctgcttgagctcatgatggaacacgctcagatggaagaaaccatcctcttccctctttttcgataaggccgatcgagg

SEQ ID NO: 68154 - DNA, 242 bp, Glycine max
  Clone ID: 700842431H1
gaaaggaaataattgatcttagtaaatgcagggaggagtgaaagctggagagtccatcaaggaaacagctgcaaacattggtgcttctgccaaggctggcatggagaaaaccaaggccactgtccaggagaaggcagaaagaatgacggcacgtgatccgatgcaaaaggagttggcaacccagaagaaagaggcaaagatgagccaggcagagctggtacaagctaggcggcgcgtcacat

SEQ ID NO: 68155 - DNA, 216 bp, Glycine max
  Clone ID: 700842433H1
cgccaccgttgttgcccccaaatacaccgcgattaagcctctgggagacagagtgctgataaaagattaaggaagcagaggagaaaactgagggtgggattttgcttccatcaactgctcaaacgaagcctcaagggggtgaggtggttgctgttggagaaggaaagacaattgggaagaacaatgtagagattagtgtgaagactggtgcacaat

SEQ ID NO: 68156 - DNA, 258 bp, Glycine max
  Clone ID: 700842434H1
agcgatgcggatgaggcgccactcgatgtttccatttgcctgcatgcctttggtattgtggggtgtggttcgtttagtggtgtcaagtcttgcgaacgtgagggtgcatgagtggtaatcgggatgtttttgttgcacggctccatgcttgcgcatgcaacgtgtgacatgcatccttttcattgtacacttagccttcgtggcttaggtgctgacgattggttcctgtgttgcctacctaccaaacggtattcgtgt

SEQ ID NO: 68157 - DNA, 248 bp, Glycine max
  Clone ID: 700842435H1
ggtcagtgtaagattgacgctcagacgtgtgtttattgaaaccgactagtattcaaacacacatgatggagagcccaatgcttattgtgagctcaatgactggccgtgataaaaaatttcaaggttaaatgcatatttggggtatgtatccaacatctgaagtcatgatgggttcctttttttgtcttgtatttctcatcgaaacgcaaatccgctctcgctcgtcgctactaacggggtctgggttg

SEQ ID NO: 68158 - DNA, 253 bp, Glycine max
  Clone ID: 700842437H1
gtttcggcaaaggacatggatcggataaaagggccatggagtcctgaagaggacgaagcgttacggaggttggttcagacttacggccctaggaactggtccgttataagcaaatccattccgggtcggtctgggaaatcgtgccgcttgcggtggtgcaaccagctgtctccggaggtggagcgccggcctttcacggcggaggaagacgaggcgatcctgaaggctcacgccagttcgggaacaagtgggc

SEQ ID NO: 68159 - DNA, 210 bp, Glycine max
  Clone ID: 700842438H1
cagaacattggagaaaactacatccgattttcgcgaagaacgcaacgacggcgatgggagcgtccacttcggcggagccgagagtgtcggcggacagaaagaggcggaggccgtcacagcctccaccggagctctccccctgcttcagaaagccttctccaagctcgctaattccgagaccaacgccgttcccttagaaaatctccagca

SEQ ID NO: 68160 - DNA, 212 bp, Glycine max
  unsure (1)..(212): unsure at all n locations
  Clone ID: 700842439H1
ttaaatgtcgcagttgctggataaagccaagaacttcgtgtcggagaaggtaaatgatatggccaagccggagggangtgtcactgacgtggacttcaagcgcgtgagcaaagataatgtcgagtacttggccaaggtctctgttcgtaacccttattcaacttccatacccatttgtgagatcaactactctttcaaaagcgcatccaggg

SEQ ID NO: 68161 - DNA, 254 bp, Glycine max
  Clone ID: 700842440H1
ggttaattgtggagtattttggaaggatgtcttacgttgctcacaacgttaatcagccccaagagaaagatttgttggagggaaatttttcctttgatattaaatctcgctctagattggaaaaagtttcctctacaaaagcacaatttgttagtggaaaaaccttcaaatatgatataattggtgctggttcacattcttcagaagattttcctgaaaaggaagatcaagaaaaacccaaaaagattgatacc

SEQ ID NO: 68162 - DNA, 258 bp, Glycine max
  Clone ID: 700842441H1
cccaaagttccctcctttttcactccaaccaccccccacgaaacgaatccatgaggagttcggagtgacccacgtcaccagcttccgaatccaaccccattccgcaaaagggtactttactcaacgatggttgagaactcgacgctagggcgcttccaccaccaaaggctcgcccttcgctgctgggtccccgcgttcttcacctcgcacaagatcctcttgacctttctatggatcgccgccttcgcctccgttttt

SEQ ID NO: 68163 - DNA, 84 bp, Glycine max
  Clone ID: 700842442H1
atacaaatgccaacgacgtcttccagcgagtccagagaccggaacgccgatccgtcccggtcaccgctcatttcggcggcagag

SEQ ID NO: 68164 - DNA, 256 bp, Glycine max
  Clone ID: 700842443H1
gtaacctcgtgagtgagtttgttcggttatgctatggccacgaaggagtcatgttcatgagggaggcttttgcttaatgcactcccaaattgtttcctgcacttcctatttcattatgaaaagttcattctgaaatgcaactcctattttggaataagcttttcataatacaacaggaagtgcagggagtaacaataggagtgcggaaagttttaacccatgaaggaaaagagggtttccttagtgtaactattct

SEQ ID NO: 68165 - DNA, 254 bp, Glycine max
  Clone ID: 700842444H1
tttcaaaccttgctctatactacacagtacacacactagaagaataatggcttccatcctccactactttttagccctctctctttcttgctcttttcttttcttcttatccgactcagtcacccctacaaaaccaataaaccttgttgttctacccgttcaaaatgatggttccacagggctccattgggccaacctccaaaaaagaacccctctaatgcaagtaccagtcctggtggacctcaatggaaatc

SEQ ID NO: 68166 - DNA, 256 bp, Glycine max
  Clone ID: 700842445H1
gcgatgctcgcattttttgtttaggggttcgtattgttaaaaggcgcacatgcagcagatcctaaactcaatcccaaaggagtctgatggagagaaatttgaagaagctcttgcacgtgtctgccgttgtgttgggggaggaaatgcagctgatgatgctgatagtgacagtgatttggaagtggtttcagatactttcactatcaaccttcgatgtcctatgagtggttcaagaatgaagattgctggaagattt

SEQ ID NO: 68167 - DNA, 255 bp, Glycine max
  Clone ID: 700842446H1
tagcttttgagtctgagcgagaaaggaatgcagccatcatgcttgcaagaagatttgcatttgactgtaatattattcttgctggacctgatcacaaagctccattagaaacataatgggaccttggatattattttctcaactgtaattatttgagttttccttgtattataagtgtgtaacagtgaaatatgcctttggattgtgctaaggattcataccttgaggtctgaattcctttattccatttttttt

SEQ ID NO: 68168 - DNA, 259 bp, Glycine max
  Clone ID: 700842447H1
ggcggttgatcgctcccttacgaggtgctgtagcctcgtactgtggtcgtggatgttgctgaggatgatgatggcgcagggtgcagccgcgagggccaaccggaaggagtgggactcggtcataaagttaccggctgaaccggtcgatgctgactcggatcatgaagtgggaacacgatgggcggttcttgtggctggttcaaacggctatggaaactacaggcatcaagcagatgtgtgccatgcgtaccagttgctg

SEQ ID NO: 68169 - DNA, 87 bp, Glycine max
  Clone ID: 700842448H1
ggtcatacatagtagtgttggtgggttgcaaagatgcttgggcggtcttctccataggggtcatacgatacaagggacagtggtgtt

SEQ ID NO: 68170 - DNA, 256 bp, Glycine max
  Clone ID: 700842449H1
gtcagaaatgacttagaaaattctctaccaaaaccatacttgccaagagcattgaaagctcctgatacgggtcacccaaatggaacagcaggccacaggcaccacaacttatctgttcttcagcagcattgtgctttttttgatcaagatgacaatggaatcatttacccttgggaaacttacatggggctgcgttctattggatttaatgttgttgcatctgttattatggctattgttatcaatgttggattga

SEQ ID NO: 68171 - DNA, 256 bp, Glycine max
  Clone ID: 700842450H1
tctgaggctcccctcacctctctctccgaaatccccaaattgcctgtgaatgctagaaaccctaggcacgttcgatttgatgctctcccatttgcaatcaagggcgagcgcattcggttcttgcacgcaaggctggtactaccgctgcatcggcctcgatccctgaattcatcattctttctcgcaccatctttttctattccgattcgatttgctgttgttgttgttgttgttgcgttagtgtttccttccttga

SEQ ID NO: 68172 - DNA, 257 bp, Glycine max
  Clone ID: 700842451H1
ttccagaagagaaggctcaaccacaaagggatccaatttcatttttcatcttcctcttcttcactctcttttatggctccaagcaagctcaattcctcgggaaatactagtatgccatgttcacaggctgagaatggttttgtcaattccttttctctcttccccgagaaagtggtgcaagagcttcttcaatctccagtccaggggtcggatgaccatcttattgagttctctgaagctttaagaactgttgcgaa

SEQ ID NO: 68173 - DNA, 254 bp, Glycine max
  Clone ID: 700842452H1
gtcccttcgtcccctccaattggaatgtgattgtgacttcacatgctggtagctgacattttgaaattgtaactgtggtgggagcactattatatattttgcgacatcatggagatacagacttgtggcaggccgattgactccttgctagagaaagtgctttgtatgaatattctctcgtctgattacttcaaggagctctatcgattgacaacgtatcacgaagttattgatgagatctacaatcaagttga

SEQ ID NO: 68174 - DNA, 251 bp, Glycine max
  Clone ID: 700842453H1
gtcagaaatgacttagaaaattctctaccaaaaccatacttgccaagagcattgaaagctcctgatacgggtcacccaaatggaacagcaggccacaggcaccacaacttatctgttcttcagcagcattgtgctttttttgatcaagatgacaatggaatcatttacccttgggaaacttacatggggctgcgttctattggatttaatgttgttgcatctgttattatggctattgttatcaatgttgg

SEQ ID NO: 68175 - DNA, 252 bp, Glycine max
  Clone ID: 700842454H1
ctccatttccatttcctctctctcagtttccaagaatcttaagctatgggaaagtcttacccaaccgtgagcgctgattaccagaaggccgttgagaaggcgaagaagaagctcagaggcttcatcgctgagaagagatgcgctcctctaatgctccgtttggcatggcactctgctggaacttacgacgtgagctcgaagaccggtggtcccttcggaaccataaagcacccctccgaactcgctcacggc

SEQ ID NO: 68176 - DNA, 252 bp, Glycine max
  Clone ID: 700842455H1
cgctgatgacctcgctgtcatttctgagtccaaagaggtcgctaatgatttcatcactgatgccgtcattgatcaggtttttggtgagaaagcttttgagaaatttggaaaaggtttaatttcattacatttctccgaccagcaccctggtatacacaagaaggtattgttgttcaagtttgtgcttccagctgctaagaacatggctgatatgactcgactggtggctcttgttccgtattacattgactt

SEQ ID NO: 68177 - DNA, 254 bp, Glycine max
  Clone ID: 700842456H1
atactcatctcgaaaccctaagcactcgctcgggttcgtgtagtgccaaaccctagggctcattttccagatctattcagtttttctctcctctcttttccgatccaccgttggagatcgaagatggtgtccgacgccagcaagacgaaggccgcacagaagaaggccgccgccgccgacaagagaggtggtcaaagctgccgctgctgccgttatggccgtcacctcttccagagccgccgacaaggtcgcca

SEQ ID NO: 68178 - DNA, 251 bp, Glycine max
  Clone ID: 700842457H1
agggtcgcaaggttgacgagtatggcaacgttgagaagcaaaccgacgaatacggcaaccctgttcatgctgctagtgtcacctatgtagccaccagaactgctgctggtggttacagtgatgacattaataagcaacatgataccaccaatgcctacggcgtagacactggtagacagcattctagtggtggctacgatggtgacactaataaacatcatggaactactggtggctataatgatgacacc

SEQ ID NO: 68179 - DNA, 257 bp, Glycine max; identical to SEQ ID NO: 68144
  Clone ID: 700842459H1

SEQ ID NO: 68180 - DNA, 256 bp, Glycine max
  Clone ID: 700842460H1
ggattggctctgagggctgggcacgggggtcccagtcccgaacccgtcggctgtcggtggactgctcgagctgcttccgcggcgagagcgggtcgtcgcgtgccggtcgggggacggattgggaacgggcccttcggggcctcttccccgggcgtcgaacagtcaactcagaactggtacggacaaggggaatccgactgtttaattaaaacaaagctctgcgatggtccctgcggatgttgacgcaatgtgattt

SEQ ID NO: 68181 - DNA, 257 bp, Glycine max
  Clone ID: 700842461H1
ttttgatataatatagaaagagacagagagagagagacagacaagaagaacaaagatgcaatcttcaaaggagaagctgaaaaacatgacaagtgctgccaaggagcaagtcgacatctataaagcaaaaatagacgagaagacagagaaagcaacggcaagaacagaagaggagagggtgattacccatgaacgtgcaaaggcaaaggaagctgaagcaaagatggagctgcatgaagcaaaagccaggcatgcag

SEQ ID NO: 68182 - DNA, 260 bp, Glycine max
  Clone ID: 700842462H1
ttgctagtggcgagctgtgcttaaaatatatattttcatttggaggactcccgaggtcacctcttcttcacaggtttggtgatccatcctcctgctatattgattattgaattaacatttcatttctgcacttctacgtcaaaatacaatgtctttaacaggatggttgtaatttgtaaaacaatgttactcagacaacatttgtgggttgattcaatatggaactcctgtaaaaaattgtaaacgaggctatgaggttt

SEQ ID NO: 68183 - DNA, 259 bp, Glycine max
  Clone ID: 700842463H1
ttcctcttcagtgatctttgattagtactaagctaaaccatttcttattccctcaaaatcaaaacctttttctttctagctatttcccttttcaaatcatgccacctaacatcaccaccgttgttgccaatgtcaccaccgagcaattacccaaggctcgtggaggaagtgggcgtgccttcgtgacctttcttgctgggaacggtgattacgtaaagggtgtcgtgggtttggccaaaggactgagaaaggccaaaag

SEQ ID NO: 68184 - DNA, 282 bp, Glycine max
  Clone ID: 700842464H1
ctcctcggacttctcctcgagtacaacaataactgttgtttgttttgccattgtggtgcttcctcttcagtttctccaacctccacactcttcggcatgtcgcatttctcgccaccagtatcaccatcctcgtcctcttcaccacctccttctccattgaaaccccgaagcgtggtttctcctatttctccaatttcccgttacagtgctgtgaatatgaaccctcatcacggggtggtgagttacaaagacatgttcgctgagttggtgaattctttggag

SEQ ID NO: 68185 - DNA, 228 bp, Glycine max
  Clone ID: 700842465H1
accctgttgagcttgactctagtccgactttgtgaaatgacttgagaggtgtaggataagtgggagctggaaacagcgaaagtgaaataccactacttttaacgttattttacttattccgtgaatcggaagcggggcactgcccctctttttggacccaaggtcggcttcggccggtcgttccgggcggaagacattgtcaggtggggagtttggctggggcggcac

SEQ ID NO: 68186 - DNA, 258 bp, Glycine max
  Clone ID: 700842466H1
tgggtgtgtgtgtgcgtgtgtgagagagagagagaaagagagagtgaaacagcgcaaagaagatacaaaattgagacgaggctgaacaaaaataagagtgtttagtttcccttctgatggtcgtgagtggttcctccccactaacttcgaagaggagaagggtcaccaacttttgttccaccgacatggacgctgaaactgctaaggccaagcttgctgctgtgaaagaaagatttggacgagagatccagtttttga

SEQ ID NO: 68187 - DNA, 247 bp, Glycine max
  Clone ID: 700842467H1
gtaaaacaaaacaaaacagtgtctttgattacgagagagagagaacaaaacaatcaacacaatggcttctgagcaaatgcctcgcagagagaacaacagcaatagggtgatagagagagaggttcacgttgagacacacagaaaagagtccctccctgataagggaagggttgtgatagagagtgagaagaaggagaaagagagagagttggcttctgatagatgccagtctggaaatatagttaag

SEQ ID NO: 68188 - DNA, 252 bp, Glycine max
  Clone ID: 700842468H1
ggtggaggtgccttttcagggaaggaccctaccaaggttgacagaagtggtgcctatatcgtgaggcaggctgcaaagagtgttgtggcaaatggccttgccagaaggtgcattgtccaagtttcctatgccattggtgtccctgagcccttgtcagtgtttgtggacacttatggaactgggaagattcctgacaaggagattcttcaaattgtgaaggagaatttcgacttcagacctggaatgatcacc

SEQ ID NO: 68189 - DNA, 241 bp, Glycine max
  Clone ID: 700842469H1
ggaattttagtggacaaaactggagattggatcacacttatacaaaattctccaattagtaacttgttgagagttgctgcttggaagaaaggctgtttaatggttaaaattgtgatgtctgggaatgcagcagtcaaaaggagtgattgggcctcattggtacaagtgtttttaacaaacagcaacagtacagagcatttcgatgcatgtaagtggacaaaatcggaaccacatcctggga

SEQ ID NO: 68190 - DNA, 251 bp, Glycine max
  Clone ID: 700842471H1
aaacacttttttcactgcttccattacgaacatatatttattatatggctcctgaacttgtccccaccgttgtgaaatccagtgctgcgttcacgaaacccgcgacccttccaaggcgtgtctacgtgacattcctcgccggaaacggtgactacgtgaaaggggtggttggcctcgccaaagggttgcgaaaggtgaaaaccgcgtacccgttggtggtggctgtcctccccgatgtgccggaggagcac

SEQ ID NO: 68191 - DNA, 253 bp, Glycine max
  Clone ID: 700842472H1
gagaagcaaaccgacgaatacggcaaccctgttcatgctgctagtgtcacctatgtagccaccagaactgctgctggtggttacagtgatgacattaataagcaacatgataccaccaatgcctacggcgtagacactggtagacagcattctagtggtggctacgatggtgacactaataaacatcatggcactactggtggctataatgatgacaccaatagacatcatggaactaccggtgtctatggta

SEQ ID NO: 68192 - DNA, 254 bp, Glycine max
  Clone ID: 700842473H1
tcctgttagatcgatgggtgatttaagagttaagaaaaagaaaggaagcaacaagaagaagcatgggtctgtgtctgtcaccgccatcaaatttcttcctaaggagttgcaagtggagatttttgccaaggtggccactcgctccgtatttgaccactgcatgattaaactatgttgcaaagaatttcttcgcgcacggaggataattacgtgtaccgtcacgcctccatggcagattttgcgttggtgccgct

SEQ ID NO: 68193 - DNA, 253 bp, Glycine max
  Clone ID: 700842474H1
ttgcaaattaaaacggccaacagctatggatgaattaatttctttgatgagtttcctttgtattatctttttcatctggacttgatcacgaaacataaggattgaattgtgaacctttgttttctgcagtgtaatgtttggaattgttttgtgtaaggtcttgcgttgcattgagccccgtgcatgatttggcgatgcctctctgggtttttgaattcttatattttctttttctttttatcttttgatgttt

SEQ ID NO: 68194 - DNA, 254 bp, Glycine max
  Clone ID: 700842475H1
gcacaggattctacccgccgctcgatgggaattgcgcttcaaggcgtctcgtagggctaatccgcctcacgagggtcaccaacggcacgtgcctttggggggccgaggcccctactgctggtcggcaaacggacggcgggcgcacgcgtcgcttctagcccggattctgacttagaggcgttcagtcataatccaacgcacggtagcttcgcgccactggctttccaaccaagcgcgatgaccaattgtgcgaa

SEQ ID NO: 68195 - DNA, 256 bp, Glycine max
  Clone ID: 700842476H1
gatagcttcgctggcaatccgaagtgggaatgggcttctcttgaaaggtggcaaagaagctaagcggtcaaatgcaattttgcacaaagtaattactgaggccataccagatactgttggtggaaaacttataggacttgtgacctcaagggaagaaatccctgagctacttaagctggatgacgtaattgatctggtgattccaagaggcagcaacaaacttgtttctcaaatcaagagttccactaaaattcct

SEQ ID NO: 68196 - DNA, 255 bp, Glycine max
  Clone ID: 700842477H1
gtacttccttacaatcaaaaccaacaacaactatggcaagttatcaaaagcactacgatgatcagggtcgcaaggttgacgagtatggcaacgttgagaagcaaaccgacgaatacggcaaccctgttcatgctgctagtgtcacctatgtagccaccagaactgctgctggtggttacagtgatgacattaataagcaacatgataccaccaatgcctacggcgtagacactggtagacagcatctagtggtgg

SEQ ID NO: 68197 - DNA, 257 bp, Glycine max
  Clone ID: 700842478H1
ttgcagagcttttgtcaattttctattgaccttcttggtggaggaattttagtggacaaaactggagattggatcacacttatacaaaattctccaattagtaacttgttgagagttgctgcttggaagaaaggctgtttaatggttaagattgtgatgtctgggaatgcagcagtcaaaaggagtgattgggcctcattggtacaagtgtttctaacaaacagcaacagtacagagcatttgatgcatgtaagtgg

SEQ ID NO: 68198 - DNA, 260 bp, Glycine max
  Clone ID: 700842479H1
tctcgagccgaatcggctcgagcaccacactaaccctacaaaacacataaaccttctggtactacccgttcaaaatgatgcttccacagggctccattggtccaacctccaaaaaaggacccctctaatgcaagtaccagtcctggtggacctcaatggaaaccacttgtgggttaactgtgagcaacactactcatccaaaacataccaagcacccttctgccactccacccaatgctccagagccaacactcaccaat

SEQ ID NO: 68199 - DNA, 261 bp, Glycine max
  Clone ID: 700842480H1
cgcaaggttgacgagtatggcaacgttgagaagcaaaccgacgaatacggcaaccctgttcatgctgctagtgtcacctatgtagccaccagaactgctgctggtggttacagtgatgacattaataagcaacatgataccaccaatgcctacggcgtagacactggtagacagcattctagtggtggctacgatggtgacactaataaacatcatggaactactggtggctataatgatgacaccaatagacatcatgga

SEQ ID NO: 68200 - DNA, 209 bp, Glycine max
  Clone ID: 700842481H1
ttagaatcgtttgcatctgtctcttacaaaagggtgagttggggatgatccaaatgcagaggagcgattagaagagtgggacaatgtagatggtgctctgaaagagtttgtgaggctctttgaggaaataacaggacatgagttatgaaccttgggaaagagagaagacgttccaaaagtaccctttgaagttttaccccattgacatg

SEQ ID NO: 68201 - DNA, 249 bp, Glycine max
  Clone ID: 700842482H1
ttcatagttcagtgtgtcgtttaaagatgtcgcagttgctggataaagccaagaacttcgtgtcggagaaggtaaatgatatggccaagccggaggcgagtgtcactgacgtggacttcaagcgcgtgagcaaagataatgtcgagtacttggccaaggtctctgttcgtaacccttattcaacttccatacccatttgtgagatcaactactctttcaaaagcgcatccagggcgatagcatcaggga

SEQ ID NO: 68202 - DNA, 249 bp, Glycine max
  Clone ID: 700842483H1
ctttgatcttctccgaactatattagcttctcagggtgaaccaaaggtatatcccaacatgaggtcagcattcatggatatcgtccatactcgtggattccaaggcttgtattctggattgtcgcccactctagtggagattataccttatgcaggcctacaatttggcacatatgatacatttaagcgatggggcatggcttggaatcatagatactccaacactgctgcagaagataacctctctag

SEQ ID NO: 68203 - DNA, 247 bp, Glycine max
  Clone ID: 700842484H1
ttacataacaatgtcgttgattccaagtttcttcggcaccgggcgaagaaccaacgtcttcgaccccttctccctcgacgtgtgggacccattccatggcttccccggcaccaccgccctctccgctccgcgctccgtgacggcggccttcgccaacacgcgtcatcgactggaaggagacggcggaggcgcacgtgttgcaagggcagacctgctcggggctcgaagaagggaagaggttgaaggt

SEQ ID NO: 68204 - DNA, 210 bp, Glycine max
  Clone ID: 700842485H1
ttatttggaatctcaacaaatatacaggtgttttgggtctatttaattgccaaggaggtgggtggtgtcccgtaactaggagaaacaagagtgcctctgaattttcacaaactgtgacatgcttagcgagtcctcaagacattgaatggagcaatgggaaaagcccaatatgcataaaagggatgaatgtgtttgctgtatatttgttca

SEQ ID NO: 68205 - DNA, 249 bp, Glycine max
  Clone ID: 700842486H1
tttggatgatgaacggttgaagaagttgggagcgttgggtttgactatgagtaagcctgaggctgtttgggatgaggatacccggaagccgaagaagaagacggtgcaggatgtgctggggaagtttagctttgatgatgatgttatggcgattggggatgtgttctatgctgaagtcgaacgagaatgggtgatgcaaccgggtggaccaattgctcacaaatgcaagactctcattgaacctaatcg

SEQ ID NO: 68206 - DNA, 253 bp, Glycine max
  Clone ID: 700842487H1
ctagctagctagcaagcaagcacagagatggaggcaaagcgaggccatgccctcatgtgcttggcacgtgtttcactcttcctctgcgctctaaccctatccgctgctcacggaagcaccacggttcaagacatcgcgagaaagttgaaactcggggacaacgagcttctgcgcacggagaagaagttcaaggttttcatggagaattacgggaggagctactccacagaggaggagtatttgcgccgtttgg

SEQ ID NO: 68207 - DNA, 251 bp, Glycine max
  Clone ID: 700842488H1
gccaaggctggcatggagaaaaccaaggccactgtccaggagaaggcagaaagaatgacggcacgtgatccgatgcaaaaggagttggcaacccagaagaaagaggcaaagatgagccaggcagagctggacaagcaggcggcgcgtcagcataacacggcggcgaacaggctgccacggcagggcacatgggacaacccatggggacccatcagacgtcagctatgcccggtcatggaaccggacagccc

SEQ ID NO: 68208 - DNA, 253 bp, Glycine max
  Clone ID: 700842489H1
gcagaaacttctctgttttaaatcattgtttgtgatttagctctattttttatggttctgtttgtgattgaacagatgcagatcttcgtgaaaactttgaccggtaagaccatcacccttgaggtggagtcctccgacaccatcgataacgtgaaagctaagattcaagacaaggaagggatcccacctgaccagcagagacttatctttgcgggtaaacagcttgaggatggtcgaacccttgccgactaca

SEQ ID NO: 68209 - DNA, 256 bp, Glycine max
  Clone ID: 700842490H1
tgtgaggacccaattcttcttcttcttcttccgctgcttggatctgcacttttcggtcttttctttcattcccgcacgcgaactccttcacgggtcaattccaattttgctttgcgcgctgtttttttcccgcaccacaaaagctttcgcggaagtatttgttcggtgggtcgaaggtcgagaaaggttctagattgggggcgtggctttggttcgtttcaattcggaagggttttacttgcttcgaaacccacaa

SEQ ID NO: 68210 - DNA, 254 bp, Glycine max
  Clone ID: 700842491H1
cgtgatccggtgcaaaaggagttggcaacccaaaagaaagaggcaaagatgaaccaggcggactggacaagcaggcggcgcgtcacataacacggcggccaaacagtccgccaccacggctgggcacatgggacatggccaccacaccaccggaaccgggactggaaccgccacgtattccaccaccggggaatatggtcagcccatgggggcccaccagacgtcggcaatgcctggccatggaaccgggcagc

SEQ ID NO: 68211 - DNA, 256 bp, Glycine max
  Clone ID: 700842492H1
tgcaatctgccgccaccaggaatgaacaggctggccttgtcggtcaccgggacgtcaccgacgttaccggcgaccgtggcgtcacagtcacagaaactaaagtccctggaagacgcattataaccgaggctgttggtggccaggttgtggagcagtatgtggaggcaacagccggttgaggcagggcgaacagtgcaattaaggagaatgccataacaataggagaggcattggaggcgacggcacagactgtggg

SEQ ID NO: 68212 - DNA, 256 bp, Glycine max
  Clone ID: 700842493H1
gttactttcatttgttgtgcaatcttacaagttccaaacttctctattttgttcttatttgttctcacttctcacacatatagaactctaaaaatttatattatcatggcttctaaggtggtttcggttttggttatagcgatgatgttgtttgccatgaactgtaactgcactagtgtggtaccacatgccttcaaccaaagaggaaggtcacgattttcaggagtctaaagccaagaccacacaaactgcgaac

SEQ ID NO: 68213 - DNA, 258 bp, Glycine max
  Clone ID: 700842494H1
ttcagtttctacctgaatattcaagtcaaaccaaaaccccaaaaacctatggagacaaccaaaccactcaaacaaggcatcaagaacggaacaaaggcaatgataaaccatcaacaatctctttagcaacagctgcaatagctgataaagccgtgtcagccaaaaacaccgtggcttcttcgcttggatatggatatgacgctgacactgaaacaactcaatcaagggaccacgatgagaacacccacggtgaaaaac

SEQ ID NO: 68214 - DNA, 261 bp, Glycine max
  Clone ID: 700842495H1
ctcagtctatttcacagcaaactgtttggaatcaaatggcaacagtgagaacaccattgaattttgatcctagcaagcagagcttttgtcaattttctattgaccttcttggtggaggaattttagtggacaaaactggagattggatcacacttatacaaaattctccaattagtaacttgttgagagttgctgcttggaagaaaggctgtttaatggttaagattgtgatgtctgggaatgcagcagtcaaaaggagtg

SEQ ID NO: 68215 - DNA, 258 bp, Glycine max
  Clone ID: 700842496H1
tgtcagagaaaattgttgattggtcccctggcaagccagagataagatctgttcttcgcgaaataagccggcaaatttcccgatcgccgttggggatctccggccaaccgatttcagttggtgagtcataggttcagtatatggttaagggtttttggattagtgtgttgatgtacacaggtggaagagggaggttctgtttgcttcccctgctcctgttctgttttcctctgttttttggtcagagaatatttaggc

SEQ ID NO: 68216 - DNA, 241 bp, Glycine max
  Clone ID: 700842501H1
tctcgagcgaatcggctcgaggacagaaattatggcaagaagatatcttgaaagtggcgctggagtaaccaagaacaacagaagtgcagaggaaaactactctgcgcccgaatcttcccatgtttatgattctgagacccattggacatcatggctcgtgcccatgtttgtggttgctaatattgctgtctttgttattaccatgtacatcaacaattgtcccaggaacaacattcgtttc

SEQ ID NO: 68217 - DNA, 248 bp, Glycine max
  unsure (1)..(248): unsure at all n locations
  Clone ID: 700842502H1
tctttcccgtgaaaagggaccatggaggcaaattcaggtgccagcgaccgaatttcgagaatcgccggccacctccgcccccagagagaggatgatgtttgtttgaagcgtacgnattgccgtgcaaaaggtggggtctccggattcaaggtggccatattgggtgccgcaggaggcatagggcaacctctggcgatgttgatgaagatgaatccactcgtttcacttctccacctctacgatgttgt

SEQ ID NO: 68218 - DNA, 244 bp, Glycine max
  Clone ID: 700842503H1
gccagtagtcatatgcttgtctcaaagattaagccatgcatgtgtaagtatgaactaattcagactgtgaaactgcgaatggctcattaaatcagttatagtttgtttgatggtatctactactcggataaccgtagtaattctagagctaatacgtgcaacaaaccccgacttctggaagggatgcatttattagataaaaggtcaacacaggctctgcctgttgctttgatgattcatgata

SEQ ID NO: 68219 - DNA, 242 bp, Glycine max
  Clone ID: 700842504H1
ccctcgtggggcccaccctgaaggacgaggtgatgaagatcatgcccgtccactagcagacccgcgccggtcagcgaacccgcttcaaggccttcgtggtggtcggcgacaacaacggccacgtcggtctcggagtgaagtgcagcaaggaagtcgccaccgccatacgcggcgccatcattctcgcaaagctctctgttattcctgtgaggagaggctattggggtaacagatcggaaagc

SEQ ID NO: 68220 - DNA, 244 bp, Glycine max
  Clone ID: 700842505H1
gcaggtacaaagggctggccctcgacgacgccgttttggcggacaacaacgccgaagcgaaggccgttagagatgacggccagggtgacggaacggaaaggcagaccggaaactgggttttgaagattctgcatgtgaagtccgtgtgggaagggaaacagcgcaatgaagaggatggtacggttcatgatcaaactcaaaccaatttcgacgaggaggaggtgtgtgaatgtgatgcttgcgg

SEQ ID NO: 68221 - DNA, 243 bp, Glycine max
  Clone ID: 700842506H1
gcactcaaacattgtttgttgtaggaagaggaatcttgagaaatggcaggggacagcaagagcaagattctgttcatcggagggactggttacatcggaaaattcatcgtggaagccagcgccaaagctggccacccaactttccttttggtgagggagtccactctctccaaccccgcaaaatcacccctcatcgacaatttcaaaggcctcggtgtcaatcttgttttaggagatctatac

SEQ ID NO: 68222 - DNA, 242 bp, Glycine max
  Clone ID: 700842508H1
atacatagtagtgttggtgggttgcaaagatgcttgggggtcttctccataggggtcataagataaaagggacagtggtgttgatgcgcaagaatgtgttggacgtgaatagcgtaaccagcgttgggggagttattggtcaaggtctcgacttagttggctcaacactcgatactcgtactgccttcttgggccgatccgtgtctctccagcttattagtgctaccatagctgatgccaac

SEQ ID NO: 68223 - DNA, 244 bp, Glycine max
  unsure (1)..(244): unsure at all n locations
  Clone ID: 700842509H1
tggccaagccggaggcangtgtcactgacgtggacttcaagcgcgtgacaaagataatgtcgagtacttggccaaggtctctgttcgtaacccttattcaacttccatacccatttgtgagatcaactactctttcaaaagcgcatccagggagatagcatcagggaaaattccagacccaggatcgttgaaggcaaaggacacaacaatggtggatgtgccagttaaggttccatacagcata

SEQ ID NO: 68224 - DNA, 246 bp, Glycine max
  Clone ID: 700842510H1
aatagaattcccctagttgtgtcatacaaaaatttggtcaaacacctccactcaactagtgcgaaaaatgcaaatgctcgtgtgcatactcaaggtggtgattcaattgtaggagcatcagcacaaggggcagtgaaggcaacagaggtgttggagaatgtgggagaaagggctaaggagacagtggacacagctttggatgcagcaaagaagactacagagggtgtgacagagacaacaaccatg

SEQ ID NO: 68225 - DNA, 243 bp, Glycine max
  Clone ID: 700842511H1
aaagtttccttgacaatctaattctgcaaaaatggcaagcaataaggagtctaagttcccagcacagagccagaaaactcagccaggaaaagaacatgtaatgaatccactcccacaagccacaaatcctgatcacaaggccgccaataaactccagggaaaggtggcgttggtgacaggaggtgactcaggaattggcagagcggtttgcctgtgtttcgcaaaagagggtgcaccgtggcc

SEQ ID NO: 68226 - DNA, 242 bp, Glycine max
  Clone ID: 700842512H1
aaaccttcataagtaaccaaataaaggtttgaacctaaagccagaaaaatatgtcaatttctgtagatactcaaaatctaagcaagtacatatataaaaaatacttctttaatgtttagaattcaagtgattcattgtaaatttataacacctgcctttcaatgataaaaagtgatggtagctacgtttaactgaacttgcttccaacatagttaaacatgtacactgacatatagtgtggc

SEQ ID NO: 68227 - DNA, 238 bp, Glycine max
  Clone ID: 700842513H1
taccaggtgattttgtcattggtgttaagttgacaaccataaacaatatgtgtgcatatgggctcaatcctggtatttcaggttctcgtcttttgggcaccattcctcagtctatttcacagcaaactgtttggaatcaaatggcaacagtgagaacaccattgaattttgatcctagcaagcagagcttttgtcaattttctattgaccttcttggtggaggattttagtggacaaa

SEQ ID NO: 68228 - DNA, 246 bp, Glycine max
  Clone ID: 700842514H1
ccggaggattaggcctccgagcattgtccaaagaccaattggacgagattcttaaaccagcagagtgcactattgtagcatcactttcaaatgattatgttgactcttatgttctgtcagagtcaagcctgttcgtctatccttataaaattatcatcaaaacttgtgggactaccaaattgcttctgtccatccctgtcattctcaagttggctgatgctcttgacatagctgtgaaatctgtga

SEQ ID NO: 68229 - DNA, 239 bp, Glycine max
  Clone ID: 700842517H1
ctgcgacgacaccggcaccatcgtcttcaccgctcgcaacgaacaagttgatatgatgaaggctggagctacagtaattattcgcaatgcaaagattgacatgttcaagggatcaatgaggatggctgttgacaaatggggccgtgttgaggtaactgatcctgcagattttgaagttaaagaggataacaacctatctctggttgaatatgaattggtgaacgtggttgaagaataat

SEQ ID NO: 68230 - DNA, 241 bp, Glycine max
  Clone ID: 700842518H1
attcgtgcagatgaaattagtaaaattatccgtgaacgcattgagcaatataatacggaagtaaaaattgtaaatacgggtaccgtacttcaagtaggcgacggtattgctcgtatttatggtcttgatgaagtaatggcgggtgaattagtggaatttgaagagggtactataggcattgctttgaatttggaatccaaaaatgttggtgttgtattaatgggtgatggtttgatgatac

SEQ ID NO: 68231 - DNA, 243 bp, Glycine max
  Clone ID: 700842520H1
gtgcggtttcctttgttggtgttgctgggaactgttttcctggcatcagtttgtgtctcattaaaggtgagagaggatgagaataaccctttctacttgagaagctctaacagcttccaaactctctttgagaaccaaaacggtcgcattcgtctcctccagagattcaacaaacgctccccacaacttgagaaccttcgagactaccggattgtccagtttcagtcaaaacccaacacaatc

SEQ ID NO: 68232 - DNA, 244 bp, Glycine max
  Clone ID: 700841959H1
gaagaaaacctaagcttagaattagaaacaaagaaaagaagaaaggaaagaattgatcgttgaaaatgcagggaggaaagaaagcgggagagtccattaaggaaacagctacaaacattggtgcttctgccaaggctggcatggagaagaccaaggccactgtccaagagaaggcagaaagaatgacagcacgtgatccggtgcaaaaggagttggcaacccaaaagaaagaggcaaagatgaa

SEQ ID NO: 68233 - DNA, 243 bp, Glycine max
  Clone ID: 700841960H1
cccttctccagaacctccgcgtcgtccgatgggaacagaaggttacacttacatggggcgcagtttgaccgaactccgcatcaacgacgattcctcttcctccgccttcagcgactgcaacagtgacagatctggcgaattcgccaccgcttcttcgcagacgcggaggtttctgatcgcctgcgccaccgaaaattccgacgacttggttcgccaactcgtttctgatctccactcctcttc

SEQ ID NO: 68234 - DNA, 244 bp, Glycine max
  Clone ID: 700841961H1
aatacttgtaaacatggtaatttggcttttgtgccaagcatctaagctgatcttgtctctagaaggacggttcttaagataagaaattggaagttcttaaagaaggttcattcaccatcaatcatatagaggtggctgaggtggactggaatgttcctgatggctggaacactcttgaatatgaaaggtctgaatcatcacttagtggtggtggatacaatatggcaaagtgcaagaggtctgt

SEQ ID NO: 68235 - DNA, 247 bp, Glycine max
  Clone ID: 700841962H1
ggcaagtgaggagaaaggatttgaggaatcaagaattcccactgcatttgttgctaccccagaggttgtggcccggaagcccaccttccctgagaatagcaggaccataatggatgtattggtatcattgatatacaagtacggcgatgagcgaactaaagcacgtgcaatgctctgtgatatataccaccatgctcttcttgatgaattctcaattgcccgtgatctgctgcttatgagtcatctg

SEQ ID NO: 68236 - DNA, 132 bp, Glycine max
  Clone ID: 700841963H1
aattcgaacaatgattttttcattttctttttaatacttttttggtttagactccctaagaatctgtcgatatttccaattaaatcttcttgttcctgtgaaggtcctataaaaaaaagggctatgcccttt

SEQ ID NO: 68237 - DNA, 237 bp, Glycine max
  Clone ID: 700841965H1
ctttaaacactcatcaccatggccaagctagaactttccctttgattccttcttttcagtggctgcttcgctctgacagagcaggcacagcaaaatgagtgccagatccaaaagctgaatgccctcaaaccggataaccgtatagagtcggaaggtgggttcattgagacctggaaccctaacaacaagccattccagtgtgccggtgttgccctctctcgctgcaccttaaccgga

SEQ ID NO: 68238 - DNA, 243 bp, Glycine max
  Clone ID: 700841966H1
attcattcattcattcgttcttcttctttcaccaacaacaaagaaaacagagaaactttcatttcatatattttcatcatcgcagcaaaggaatcaatcaatcaaaaaccatggcaggcttcagtggcgacgaaaccgctcctttcttcggcttcctcggtgccgctgcggccctcgtcttctcctgtatgggagcggcgtacggaacggcaaagagtggggtgggggtggcgtcgatgggcg

SEQ ID NO: 68239 - DNA, 240 bp, Glycine max
  Clone ID: 700841967H1
gaccgagctagctagctagcaagcaagcacagagatggaggcaaagcgaggacatgccctcatgtgcttggcacgtgtttcactcttcctctgcgctctaaccctatccgctgctcacggaagcaccacggttcaagacatcgcgagaaggttgaaactcggggacaacgagcttctgcgcacggagaagaagttcaaggttttcatggagaattacgggaggagctactccacagagga

SEQ ID NO: 68240 - DNA, 242 bp, Glycine max
  Clone ID: 700841968H1
gcttcagcaaaagcagctgaacccatctcagactgaagttactgctaaaactaagctgccccagtctaaagtttctttaaccagagaaacttcagaacagttgagcacaaataatttgtcagctgtacctgtcaagagtggaatcatccccaagagatcaatttccagtaatctggattcaagggaggatccatctcagactggggttcaacctactcagtctggcaggcctaccacattaa

SEQ ID NO: 68241 - DNA, 242 bp, Glycine max
  Clone ID: 700841969H1
caaaaccaagcatcctcaattgttgtacgaatcaaagctgtataaaatactgcaaggaggaaatgggattccaaatgtgaaatggtatggtgttgaaggagagtacaatgtgctcgtgatggatttacttggccctagccttgaggatttattcaacttctgtagtcggaaattgtctctcaaaactgttcttatgcttgctgatcagatgctaaatcgagttgaatttgttcattccaaat

SEQ ID NO: 68242 - DNA, 243 bp, Glycine max
  Clone ID: 700841970H1
ctttgaacactcatcaccatggccaagcttgttctttccctttgattccttcttgccagtggctgcttcgctctgagagagcaggcacagcaaaatgagtgccagatccaaaagctgaatgccctcaaaccggataaccgtatagagtcggaaggtgggttcattgagacctggaaccctaacaacaagccattccagtgtgccggtgttgccctctctcgctgcacccttaaccgcaatgcc

SEQ ID NO: 68243 - DNA, 241 bp, Glycine max
  Clone ID: 700841971H1
gtttctctctcctccctcgatgctcagctccagcttagcggagggtccatggtccactttctggatctcaccgtcagcgccacaccttcttctcaatgctcctccttcattctttctccttccccgtgactcacccgcgcgggaagatatcactcactccccaacccattcatttcgatctccattctccctgatactcctctctctctctctctctctctctctctctctatgccagagt

SEQ ID NO: 68244 - DNA, 243 bp, Glycine max
  Clone ID: 700841972H1
cttacacaaaacttccacttgagagaaaagtagtgtattaagactacaaattttcaatttttcaatggcgtcgaggcaacaaaaagaggatcgagctgaggcagctgcgaaagttgctgcgaaagaactcgaacaactcaaccgagaaaaagaccgtgatttcagtgttggtgttgcagaccaacaccaacaagaagaacatcagttagatcaacaaaagcgtggtgtaatcggatccatgtt

SEQ ID NO: 68245 - DNA, 243 bp, Glycine max
  Clone ID: 700841973H1
cacaactactacaagtacttccttacaatcaaaaccaacaacaactatggcaagttatcaaaagcactacgatgatcagggtcgcaaggttgacgagtatggcaacgttgagaagcaaaccgacgaatacggcaaccctgttcatgctgctagtgtcacctatgtagccaccagaactgctgctggtggttacagtgatgacattaataagcaacatgataccaccaatgcctacggcgtaga

SEQ ID NO: 68246 - DNA, 242 bp, Glycine max
  Clone ID: 700841974H1
aatttgaatacttcttatgcaactatagtgaggctaagagattggtccataattaatcaaaatgttggctatattccacaaagcttttgctcatccacctgaagagctcaacagccctgcatcttacaaaggttccaagaagcctaaggttcccgaggaaactctcaaagatttcctttcccaccatcctcacaacacttgctctatgagctttggtgatgctgctgttctagcttatgtcc

SEQ ID NO: 68247 - DNA, 242 bp, Glycine max
  Clone ID: 700841975H1
ctcaagatgccagccacagcaggaagggttcgtatgcctgcgaacaatagggttcacagcagtgcagcgcttcaaacccatggcatatggcaaagtgccattggctacgacccttatgcacccaataaggaagataagaaggattcttctcaaaatctgccaaatgcagaacctgatgctgagaatcatatgctagcttccaggggcttctacagcttgctaagataacaaatgctgaggtg

SEQ ID NO: 68248 - DNA, 241 bp, Glycine max
  Clone ID: 700841977H1
cgttcaccgtcgccattggcagtggcgtggctataatcccctgcggcaataccaccaccgcaattccttacacccgtggtggtggtcaccgaacgagaagaaagctccatctccatgtggcgcgcgcgaagaagcccctgaacggcgacgacgtttccatttacactgagctcctcaaaaccgaagtttccgctttcgaaaataagcccctcggcgacaacgatgccgctttgaagttcgt

SEQ ID NO: 68249 - DNA, 246 bp, Glycine max
  Clone ID: 700841978H1
gccttttgcattctctctctaaatccaacgtttggagtgtttctctctcactcctctctgcaagatccgcaccccaaaccctagcaaacccctaccgcagagggagccgagaagaacaacaacaacacgcaccttcacaaccaccaccctcgcttcttccgatccagttcgactagcttttggaaacaattataatgacaacttcagagcagcaagtccctcccaaaactcctgcagctgatattg

SEQ ID NO: 68250 - DNA, 243 bp, Glycine max
  Clone ID: 700841981H1
aaatttgaagagtttgtttattgtgaaaaaaagaaaaatgcaggcagcaaagaaagccatagagacctttaaggaaaccgcagccaacattggcgcctctgccaagtctggcttggagaaaaccaaggccactatccaagagaagaatgagaagatgaatgcagaagatcaaactcaaatggatatggctaccaagaggaaagaagagaagatcaaccaggctgagatggagaagcagcaggc

SEQ ID NO: 68251 - DNA, 240 bp, Glycine max
  Clone ID: 700841982H1
gcgatactgataagagagataccaacaagaaaagaaaaaaaagaagagttgagattccctttgaagaaaagatggcatcccataggcaaagctatgaagctggtcaaactaagggccgaactgaggaaaagacgaaccagacgatgggcaatattggagagaaggctcaagctgcaaaggagaagacccaggaaatggcccaagctgcaaaggagaagacccaacaaacagcccaagctg

SEQ ID NO: 68252 - DNA, 239 bp, Glycine max
  Clone ID: 700841983H1
cttcttcgccgtttcagctgaagagccatccgcaggtaagcaatggttaagcataataatgttatccccaatgggcacttccggaaacactggcaaaactatgtgaagacttggtttaatcaaccagcccgaaagaccagaagacgagaggctcggcagaagaaggctgtcaagattttccccaggcctactgctggatctctcaggcctattgttcatggccagactctgaaatacaa

SEQ ID NO: 68253 - DNA, 239 bp, Glycine max
  Clone ID: 700841984H1
gggaagggaggacctcaaaattctcagtgtaactacagaggagttaggcagaggacatgggggaaatgggttggtgagattagggaacccaatagaggaagcaggctttggttgggtaccttctcttctgcccaggaagctgctcttgcctatgatgaagctgctagagctatgtatggtccttgtgcacgcctcaattttcccaaaatcacagattatccttctgttaaggaatcgtt

SEQ ID NO: 68254 - DNA, 241 bp, Glycine max
  Clone ID: 700841985H1
gaagaaaggaaagaattgatcgttgaaaatgcagggaggaaagaaagcgggagagtccattaaggaaacagctacaaacattggtgcttctgccaaggctggcatggagaagaccaaggccactgtccaagagaaggcagaaagaatgacagcacgtgatccggtgcaaaaggagttggcaacccaaaagaaagaggcaaagatgaaccaggcggagctggacacgcaggcggcgcgtcac

SEQ ID NO: 68255 - DNA, 239 bp, Glycine max
  Clone ID: 700841986H1
cagtgatcatatattcattcagttctatacaaaatcctcaaaaactcttcctctctgccatgaccatggaatacagaaccttagaactcaacatcatatccgcaaaggacatcaagaatgttaatctcttctccaagatggacgtatacgccgccgtttcgctctccggtgaccctctccaccctcagggcgccaccacccacgtccacaaagacgccggcagcaaccccacgtggaac

SEQ ID NO: 68256 - DNA, 242 bp, Glycine max
  Clone ID: 700841987H1
gttctcacctcaccgctgcatcttcacgtcgtctctaacgcatcttcgtgttgttgcagagggaaaatgagtcgaggaggtgcagcagcagcgaagggaaagaagaagggtgctacattcaccattgactgtgcaaagccagtagaagacaagatcatggacattgcttctctcgagaagtttcttcaagagaggatcaaggttggtggcaaagctggtgctcttggtgactctgttaccgt

SEQ ID NO: 68257 - DNA, 245 bp, Glycine max
  Clone ID: 700841988H1
ctctattaggcaaaaacaccaaatgggagaggaaaaagagcagcctaagatcgaaaccgagaagaagcccgaggaggccgccgcagcccccaagaaagacgacggacccatccctgtcgtttacaaactcgacttgcattgcgagggatgcgtcaagaagatcaaacgcacatgtcgccacttccaaggtgtggaaaccgttaaggcagatctatcgtcgaacaaagtgactgttaccggcaaat

SEQ ID NO: 68258 - DNA, 241 bp, Glycine max
  Clone ID: 700841989H1
agcgttgccattctcatcctcttctttctctctctaccattgccatggatccctacaagcaccggccatccagcgccttcaattctcccttctggactacaaattctggtgctcctatttggaacaacaactcctctttaaccgttggagctagaggtccaattctgctggaggattatcatcttatggagaagcttgcaaattttgatagggaacgtatcccagaacgtgttgtccatgc

SEQ ID NO: 68259 - DNA, 239 bp, Glycine max
  Clone ID: 700841990H1
gcggcgtgttcgaattctgatcgcttttacgcgagacagggggaccaccctctaagcctaagtattcctcaatgaccgatagcgtacaagtaccgtgagggaaaggtgaaaagaaccctatttagggagtgcaatagagaacctgagatccgatgcgaacaatcagtcgaaggagcttagagcctttacttgatatttagtaaagcgcactcactctaacggcgtaccttttgcatgat

SEQ ID NO: 68260 - DNA, 240 bp, Glycine max
  Clone ID: 700841991H1
gtgtatgcaccatatcgctcagttgaaggttttataaatgatatggaggaattctttaatgctggtgataaccagcttgaaatgctcaagactttgcaagagacagcaagatttgaagttgataaaatgatgcttacagatgcaccacttttatttcctcctgggcaggtattggccttggctgctttacgcaactcaaatgcattccacagagtcattgactttgatagttatcttagg

SEQ ID NO: 68261 - DNA, 240 bp, Glycine max
  Clone ID: 700841992H1
cagttcgcaggagctgcgtacttatatgaaaggttcgtgagagagcatataaggaaatatataacggagagacagtatctctatggcaaccaccagcaacaaagcaaaaagtctcccaataacggtggcaaggccaagaaattcgtcgaattcgtcacgcccaagaaaggggatcaggaggcatattgaattggcaattggacggtgctgagcagtgtattttgagttttttaactgagg

SEQ ID NO: 68262 - DNA, 238 bp, Glycine max
  Clone ID: 700841993H1
agcgatgcggatgaggcgccactcgatgtttccatttgcctgcatgcctttggtattgtggggtgtggttcgtttagtggtgtcaagtcttgcgaacgtgagggtgcatgagtggtaatcgggatgtttttgttgcacggctccatgcttgcgcatgcaacgtgtgacatgcatccttttcattgtcaccttagccttcgtggcttaggtgctgacgattggttcctgtgttgcctac

SEQ ID NO: 68263 - DNA, 245 bp, Glycine max
  Clone ID: 700841994H1
ccgccatggcacgcgtatcccggtcctcccccccgcgcctcctctactccctctgctgcaccactgcatcgcggtcaccggcgtcgtccctcatcggcggcgccttccatctccgccacttttcagccgggaacgcggcgcgcaccaagccggacaaggagccgtggtggaaggagtcaatggagcggctccgcaacatcggaatctcggcgcacatcgactccgggaagacaactctgacggag

SEQ ID NO: 68264 - DNA, 160 bp, Glycine max
  Clone ID: 700841995H1
tcgagttgtaacctctctcttcaaccctaacttagggtttatgttctaaaacccttttcaggttgattggaggagataaaaatgctcgtgttgtttgaaacccctgcgggttttgccctgtttaaagtgctggatgaaggcaagctttctaaagttgagg

SEQ ID NO: 68265 - DNA, 249 bp, Glycine max
  Clone ID: 700841996H1
cttgcagaccgagctagctagctagcaagcaagcacagagatggaggcaaagcgaggccatgccctcatgtgcttggcacgtgtttcactcttcctctgcgctctaaccctatccgctgctcacggaagcaccacggttcaagacatcgcgagacagttgaaactcggggacaacgagcttctgcgcacggagaagaagttcaaggttttcatggagaattacgggaggagctactccacagaggagga

SEQ ID NO: 68266 - DNA, 257 bp, Glycine max
  Clone ID: 700842001H1
cacatatatacctctcctcctaatttatatcccaagtttccacctatccaatttcaacgttgctagctcctgtttctttcttttttgtcggacaaaatagtgatagtaatgtcgggtgaggagacacagaggaatgtgtttggcgcggaaacggcgtcgtccttggtgaaggagctgagggacaacttcggtaaaggaaccacgcgaagttacgaatggagagtgtcgcaagtgaaggctctattgaaggcggtggt

SEQ ID NO: 68267 - DNA, 252 bp, Glycine max
  Clone ID: 700842002H1
gtaattatgatcaatatgttcagacacgtgctgaactggaagagaaccagatgaagcagtacaaatgggagcaggagcaaattgcctcgatgaaggaatacattgcccgatttggtcatggatcagcaaaactagcccgccaagctcagagtaaagagaaaactcttgcaaaaatggagcggggtggacttgcagagaaggtggtaagagacaaagttttggtattccgctttgttgatgtgggaaaacttc

SEQ ID NO: 68268 - DNA, 247 bp, Glycine max
  Clone ID: 700842003H1
ggtgtaaatgttgtagttgctatcaacaagttttcaactgacactgaagctgagctaaatgcagttcagagtgctgcattagctgctggagcttatgatgctgtaatttgtacccatcatgcgcacggtggcaaaggagctgttgacctgggcattgcagttcaaaaagcctgcaagaatgtgacacagccattgaagttcctgtatcctgttgaactgagtataaaagagatattagaggcaatag

SEQ ID NO: 68269 - DNA, 250 bp, Glycine max
  Clone ID: 700842005H1
ctaaattgaaaagctttctagctggtcataatatcaccattactgatggtattgacgaaactagtgcaactttgcaatttagaaagttagcagattgttattttcttaagagaaactttaagcagatgtctaatgttttgtgggtggctcctgaggacaaggcaagtttatggtcacaacttcattatgtttcgtgtaataatctggaaatgcaagaagcttatcttgtcaatctcgtaaatgtgttacg

SEQ ID NO: 68270 - DNA, 249 bp, Glycine max
  Clone ID: 700842007H1
acaacatcaacaccaatgaaagcaacaacacaaatgcaactgacaaaaggtttaagaccttgcctgctgcggagacactcccccgcaatgaggtgcttggaggatacatctttgtctgtaacaatgacacaatgcaggaagacttgaaacgtcagctatttggtttgcctccaaggtatcgagattctgttagggcaataacaccagggctatcagtatttctttataactatactactcatcagctgc

SEQ ID NO: 68271 - DNA, 252 bp, Glycine max
  Clone ID: 700842008H1
attcggggatgcacctaacaacatgcgacagtttcaaaaccaagatattttccacgatttggccttcaccccattaaccatcaccctgcagggagagtacaacgtgagagtcaactcaataagaatcaaccagcacagtgtgttcccactgaacaagatatcatccaccatcgtagggtcgacctctggaggaaccatgattagcacctcaactcctcacatggttctccagcaatccgtgtaccaggcttt

SEQ ID NO: 68272 - DNA, 253 bp, Glycine max
  Clone ID: 700842009H1
atggcttccatcctccactactttttagccctctctctttcttgctcttttcttttcttcttatccgactcagtcacccctacaaaaccaataaaccttgttgttctacccgttcaaaatgatggttccacagggctccattggaccaacctccaaaaaagaacccctctaatgcaagtaccagtcctggtggacctcaatggaaatcacttgtgggttaactgtgagcagcagtactcatccaaaacgtacc

SEQ ID NO: 68273 - DNA, 248 bp, Glycine max
  Clone ID: 700842010H1
gtttttgcttgaaattgaagaacggttatgatgatggtatatgtgccctttggcccaccccctttaagtttttttgtctcctttctctcgaacgcgagtttcaattcgagttgttttctggaaaaaagtgaactttcgtcagatcaactttgtgagatactactggtattttatagtagtagtagagtagtcaaggctggtgctttttgaaagggaggtcttttaaactgggataggcttccatctga

SEQ ID NO: 68274 - DNA, 253 bp, Glycine max
  Clone ID: 700842011H1
gaaaacctaagcttagaattagaaacaaagaaaagaagaaaggaaagaattgatcgttgaaaatgcagggaggaaagaaagcgggagagtccattaaggaaacagctacaaacattggtgcttctgccaaggctggcatggagaagaccaaggccactgtccaagagaaggcagaaagaatgacagcacgtgatccggtgcaaaaggagttggcaacccaaaagaaagaggcaaagatgaaccaggcggagtg

SEQ ID NO: 68275 - DNA, 251 bp, Glycine max
  Clone ID: 700842012H1
gaacgaatacaccctttggacaaagaaagcacgaagacagagagagagagagagagacacacactaagagagtgagagagagtctgagacccccccaccacccatatttcctcaacactagttattaaaagtattgaaaaaaagttaacgaatttggagaatttcgcgaaatggaattcgaggatcaagaggagcaggacgaggagctgtgtatgggtggtggagcgggcatagatccgacacagatgaag

SEQ ID NO: 68276 - DNA, 257 bp, Glycine max
  Clone ID: 700842013H1
ctcactgacctcaccatggcgaccagagccaagctttctttagctatcttccttttctttcttttagccttgatttcaaacctagccttgggcaaacttaaagaaaccgaggtcgaagaagatcccgagctcgtaacatgcaaacaccagtgccaacagcaacggcaatacactgagagtgacaagcgaacatgcttgcaacaatgtgacagtatgaagcaagagcgagagaaacaagtcgaagaggaaactcgcga

SEQ ID NO: 68277 - DNA, 255 bp, Glycine max
  Clone ID: 700842014H1
atgggattctcatttctagtgtggtgtgatggctcattccttcaacaaagatgcattgcatgcccaatagcttccgttttcacatttaacggatcctaggcggtgttgtccttgctgaggtgttgttggctgattcacgattcactcgaccggatatgggttttcacccaacaaaactcaatttcgtgcctagcgatgcggatgaggcgccactcgatgtttccatttgcctgcatgcctttggtattgtggggt

SEQ ID NO: 68278 - DNA, 249 bp, Glycine max
  Clone ID: 700842015H1
tttttaagtgtggagtgctgtgcaggtcaaggcccttttacttgttcgtccggttgttcccatcttctctctcgtaccaatcaaatcacacttttgtgttgtgttgggaaaccctaaaccccgttttcggtgagatcgagatcgatcgaacatggatgaggagtacgatgtgatcgtgttgggcacgggtctcaaggagtgcattctcagcggtcttctctccgtcgatggcctcaaggttctgcatat

SEQ ID NO: 68279 - DNA, 264 bp, Glycine max
  Clone ID: 700842016H1
caaaaacaaaaacaaagtaagagttcactcaatctcactgtgttgtgagttgtgtgtgagcaccaaccaacaatggtgtctctgactccgttatgtttctttattaccttgttgatcgctggtgcagacgcagcggcggagccccaaacggtgcgttttgacaccggggggttgagcagagacacctttcccaaaggattcttattcggaacggccacgtctgcgtaccaagtggagggtatggcccacaaagacggtcgcggc

SEQ ID NO: 68280 - DNA, 248 bp, Glycine max
  Clone ID: 700842017H1
tttcggtttcttcaggctatcaatgagagacctgacataacggaaggattgaagagattaaaatgtcgtacgcttatttttgtcggggacacttctcctttccattcggaggctcttcatatgacttcaaaacttgataggagatacactgcattggttgaagttcagggttgcggatcaatggttacagaggaacagccacatgcaatgctggtccctatgtagtactttttaatgggatattgctt

SEQ ID NO: 68281 - DNA, 247 bp, Glycine max
  Clone ID: 700842018H1
caaagcctttctgactcggcctggcccggtcgccctacgcgactggcgcttcaaaaggtagttgacttgcttactcgttagagtaggggtctcgagagagcagagcgtaccgccctgccatagtcgcgagtctgtttatagtcgcgactgttgtactattcaacaaggttgaaacttctaggaaatgacttcgatttgggagggcgatcctcccggtgaactgaccgtaccccaaaccgacacagtg

SEQ ID NO: 68282 - DNA, 250 bp, Glycine max
  Clone ID: 700842019H1
ccgcaaaggagtccattagaagagtaaaggatttgcctcacgaagggctgcatccaatgttcatgaatgtgttggaaacaggggagttaacggcacttgcatttactgagcatttgaaaaagtttaggccaaagcagaccattttggaagctgaaggggaagcagctaaattagagcatcaacagggcccttctggccaatgggccgatgtgatgaaaaggcaaaagagccattcatgataatattataa

SEQ ID NO: 68283 - DNA, 248 bp, Glycine max
  Clone ID: 700842020H1
cttccttataaccaaaaccaacaacaactatggcaagttatcagaagcactacgatgatcagggtcgcaaggtcgacgagtatggcaatgttgagaggcaaactgacgaatatggcaacccggttcatgccactagtgtcacttatgtagccaccaaaagtgttggtggctacaatgatgacgctaataagcaccatggtattactggtgtctatcccgagaaagacaccggtagacgtcattttggt

SEQ ID NO: 68284 - DNA, 130 bp, Glycine max
  Clone ID: 700842022H1
gcagcaagtgagggaaaacaattcttaattgttggtacaaaacacaaagcagcggatttactagcacgggctgcaatgagagctcggtgtcattatgttaataaaaagtggctcggcggtatgttaacga

SEQ ID NO: 68285 - DNA, 182 bp, Glycine max
  Clone ID: 700842024H1
ctaagaatcaccacagcaagagcaattacaaaaaggacaaaaaaataagactttctcttgaatcatctttaccatgaaagattccattgttcaatattcagcttttggaagtggacaccttgtttcaatggtggatctaggtaaactcatactaggccaccacccttcactttccatcacca

SEQ ID NO: 68286 - DNA, 235 bp, Glycine max
  Clone ID: 700842025H1
caccattgaattttgattctagcaagcagagcttttgtcaattttctattgaccttctcggtggaggaattttagtggacaaaactggagattggatcacacttatacaaaattctccaattagtaacttgttgagagttgctgcttggaagaaaggctgtttaatggttaaaattgtgatgtctgggaatgcagcagtcaaaaggagtgattgggcctcattggtacaagtgtt

SEQ ID NO: 68287 - DNA, 248 bp, Glycine max
  Clone ID: 700842026H1
acaattcacaatcaatcacatttcaaaggcatgttttttcaacaaagttcattctacccacgagtcgattcaacaaacccagacgctaattctcccttctctatccccgcaccatcttcttcttcttcttccatttatccctcagtggaaacaacagagaatctcatttgggaagagccaaacacgactacagaagaagccatggaaaacgttctggtcacggtcccgggtgcgattctgcatctgat

SEQ ID NO: 68288 - DNA, 250 bp, Glycine max
  Clone ID: 700842027H1
aatggccgcctcagcgatggtgttggatccgccgcccttcctcccgtcgacaaagtccgcctacctccaaggcggcgacgccacggccttcgatgaggaagatctctacagccgcctcaaatccctagtgcgtcagctcgagttcgtcgacatccaggaggagtatgtgaaggacgaactgaagaatctcaggcgcgagctcctccgcgcgatggaggaggtgaagcggatccagtcggtgccgctcgtc

SEQ ID NO: 68289 - DNA, 253 bp, Glycine max
  Clone ID: 700842028H1
cacaactactacaagtacttccttacaatcaaaaccaacaacaactatggcaagttatcaaaagcactacgatgatcagggtcgcaaggttgacgagtatggcaacgttgagaagcaaaccgacgaatacggcaaccctgttcatgctgctagtgtcacctatgtagccaccagaactgctgctggtggttacagtgatgacattaataagcaacatgataccaccaatgcctacggcgtagacactggtaga

SEQ ID NO: 68290 - DNA, 255 bp, Glycine max
  Clone ID: 700842029H1
gaaagaacttccttataaccaaaaccaacaacaactatggcaagttatcagaagcactacgatgatcagggtcgcaaggtcgacgagtatggcaatgttgagaggcaaactgacgaatatggcaacccggttcatgccactagtgtcacttatgtagccaccaaaagtgttggtggctacaatgatgacgctaataagcaacatgatattactggtgtctatcccgagaaagacaccggtagacatcattttggt

SEQ ID NO: 68291 - DNA, 223 bp, Glycine max
  Clone ID: 700842031H1
gtgaaagaaacaacagtctccactgctgtggctgataaaactatctctgctgttgaaacagctgtactggaaaagcccccaggttcatctgtgctaatgccatccaaaagttttacaatagatggtaaacctcaagttaggacagctgattggtccaaagttgaaaagaaggttgatgtaccaacctctataacttcatccgtctctgatcctatttttaagc

SEQ ID NO: 68292 - DNA, 97 bp, Glycine max
  Clone ID: 700842032H1
gtccatatttgtatgctatcgtgcatgatagttcagggtctacaataccaggtgattttgtcactggagtaaagccgacaaccacgaacactatgtg

SEQ ID NO: 68293 - DNA, 249 bp, Glycine max
  Clone ID: 700842034H1
ctttctctttctgggtctccattaaatttttcttctctcccttctttctctctctctctctctgaccattctcttcttcttctttttcttctcctctctctctctcccctccgccatggctgaggataaggagatgtctacctctgtcatcaatgggaatgattccctaactggtcacatcatatctacaactattggaggcaaaaatggggaaccaaacagactattagctacatggcagaacgggtt

SEQ ID NO: 68294 - DNA, 244 bp, Glycine max
  Clone ID: 700842036H1
aaattaatgtaaatttaattttgcagtcttttgtttaattttataaatattatatacggatatgttaacatactttaacttattcttttatagatccaaattaggattggatctagcgggatgggtagtccttcacaacttggggaacagagtttcgaatttgagacaatgttgtaattcaagaatatcaacgttatttgctaacttacatctttaggagtatattagcaagttatacattgat

SEQ ID NO: 68295 - DNA, 221 bp, Glycine max
  Clone ID: 700842038H1
cgcctagaaacactcaaggtgtggctgggttaggccaagcaccaatttctcttccaaaccaactcgcttcccactttggcctacaacgccaattcaccacttgcctttctcgctaccctacttcaaagggtgctataatattcggggatgcaccttacaacatgcgacagtttcagaaccaagatattttccacgctttggccttcacgcattaaccatca

SEQ ID NO: 68296 - DNA, 245 bp, Glycine max
  Clone ID: 700842039H1
accaaaacactcaagttaacttcaacacctttaattttctgaacgaaattcagccacagaatatcaaagggagcgaagatgagtcaggagcagccaaggcgcccccaaggccaagaccccatcaaatacggcgacgtttttgacgtctacggtgaccttgcacagatgcccattgcaccggaagatgctgccatgatgcaaagcgcggaagctcgagtactcggaaaaacccaacccggcggagt

SEQ ID NO: 68297 - DNA, 179 bp, Glycine max
  Clone ID: 700842040H1
gttcgctcggagttccgctcgagggaccaacaccgtgcacaccggtactggtcccagaagtggaacacacgggcggcaccggttctggaggccatggtgccactggttatggaccaactggtggcactggctatgggagtggaactgggtatggagtcaccactgggggtgcgctcact

SEQ ID NO: 68298 - DNA, 245 bp, Glycine max
  Clone ID: 700842041H1
gctttgaatgctgcatattaccatgtagttaaccccttgaccaacactgctgttggtgctgaagtgaaccatagattctcaactaatgagaacactctcacccttggtacccagcatcagttggatccattgaccacattgaaggcacgtgtgaacaactttggaaggacaagtgctcttatccagcacgagtggcgtctcaatacgttctttaccatttctggtgatgtagtcaccaaagccat

SEQ ID NO: 68299 - DNA, 245 bp, Glycine max
  Clone ID: 700842042H1
cccaactaaccaaaccagctatggcggcgatgcagaggccactcaagagaaccattgcaatcgccaagctacgcgcgtgcttttcctctctccgacccgccgccgccgccgacatcgtcgcgtctcctccgccgcagctcccgccgttcgatcaccagccgcacccttacaacggtcccttcgccgatgaagtcctcgccaagcgcaaaacgttcctcggtccttccgtcttccactactataag

SEQ ID NO: 68300 - DNA, 250 bp, Glycine max
  Clone ID: 700842043H1
caaaaaacaccatgatgcttgcgtgagacccaccgcccaaatccaaccgtacacgtgccaccgtgggcgccggagatcttctcaccatacaccggcaatgccgattactctccgtactccatgcaagaagcacttagtgcacttcagcactacgaatccaccgatgctgagtcagactcggaggttccgtctcgggaaccggaagtcacggtggacgcttactcctgcgaccatttccgcatgttcgagt

SEQ ID NO: 68301 - DNA, 248 bp, Glycine max
  Clone ID: 700842044H1
ggtaattataataactctatgatgggtccaggtagttatggtcaacagccatatggtagttatggtcaacagccatatggcggctaccgatgagatagaacactatgcctagatagcaaggtgaagtatgactgattgttttttgctacaagttgtgaaagagaaatgccaataccagtgctactagtagtagtctacattttgggtttatagcggtgtatcattaaagctgcaattttctgtaaagt

SEQ ID NO: 68302 - DNA, 253 bp, Glycine max
  Clone ID: 700842045H1
caaaaacaaaacaaaacagtgtctttgattacgagagagagagaacaaaacaatcaacacaatggcttctgagcaaatgcctcgcagagagaacaacagcaatagggtgatagagagagaggttcacgttgagacacacagaaaagagtccctccctgataagggaagggttgtgatagagagtgagaagaaggagacagagagagagttggcttctgatagagccaggtctggaaatatagttaaggaggac

SEQ ID NO: 68303 - DNA, 254 bp, Glycine max
  Clone ID: 700842046H1
ggtggctataatgatgacaccaatagacatcatggaactaccggtgtctatggtatagacaccgataggcaacaacatgggactactggtggctatgccggtgacactggtaggcaacatgggaacatcggtggcccttactatggaaccaacacctcagacaccggtactggtcccagaagtgggaccacgggcggcaccggttatggaggcactggtggcactgattatggaacaactggtggcactggtta

SEQ ID NO: 68304 - DNA, 180 bp, Glycine max
  Clone ID: 700842047H1
cttctctccctctctattgcagcatggtgtcttcctcccaacacattctggtcaccggtggtgccggtttcattggcacccacaccgtcgttcagcttctcaaagctggcttcagcgtttcaataatcgacaatttcgataactccgtcatggaagcagtggaccgcgtccgccaagtgg

SEQ ID NO: 68305 - DNA, 189 bp, Glycine max
  Clone ID: 700842048H1
acaatattttggtacgtaagtcttttaaaaagtttgcatctcctctttggttttccttagttctgaaagttatctcctaagaagacaatcatatgtactgtacgtagtgtgaagatatagtattgtatgctgcagaatatgattgtctaataaggtggactagctgtaataaaagatatttccaggttg

SEQ ID NO: 68306 - DNA, 83 bp, Glycine max
  Clone ID: 700842050H1
cgaacaaagaggagaaacaaagaagttgtccaagacggccagtagtcgcagaggaagcacgaccactgggagctacacaactg

SEQ ID NO: 68307 - DNA, 244 bp, Glycine max
  Clone ID: 700842051H1
ggatcacacttatacaaaattctccaattagtaacttgttgagagttgctgcttggaagaaaggctgtttaatggttaaaattgtgatgtctgggaatgcagcagtcaaaaggagtgattgggcctcattggtacaagtgtttttaacaaatcgcaacagtacagagcatttcgatgcatgtaagtggacaaaatcggaaccacattcctgggaattgatcttcccaatagaggtatgtggtcc

SEQ ID NO: 68308 - DNA, 84 bp, Glycine max
  Clone ID: 700842052H1
ctagaaagagagagaagacgctaagaatagcaaagattcaatcctcataggatgagttgcgccacatggctagtgctgccaagg

SEQ ID NO: 68309 - DNA, 70 bp, Glycine max
  Clone ID: 700842053H1
gaagccgcagagtcatggtcagaatgggctatagagtgactcactgacggtcgtggcattcgacatgctc

SEQ ID NO: 68310 - DNA, 247 bp, Glycine max
  Clone ID: 700842056H1
cctcgagcgcatcggctcgaggcgttgccattctcatcctccactgtctctctctctcacccattgccatggatccttaccaagctccggccatccagcgccttcaattctcccttctggactacaaattctggtgctcctgtttggaacagcaactcctctttaaccgttggagctagaggtccagctctccttgaggattatcatcttgtggagaagcttgcaagctttgacacggaacgtatcc

SEQ ID NO: 68311 - DNA, 241 bp, Glycine max
  Clone ID: 700842057H1
atcacacacaactactacaagtacttccttacaatcaaaaccaacaacaactatggcaagttatcaaaagcactacgatgatcagggtcgcaaggttgacgagtatggcaacgttgagaagcaaaccgacgaatacggcaaccctgttcatgctgctagtgtcacctatgtagccaccagaactgctgctggtggttacagtgatgacattaataagcaacatgataccaccaatgcctac

SEQ ID NO: 68312 - DNA, 242 bp, Glycine max
  Clone ID: 700842058H1
tcaaagtgctgaagtttactttgacttcttccctgtggaggttgatagtcaagagggagttgctcacattggtgaattgaaatctggtgtctatgttccactgcctacaaaaactaatttggtggaaactcccaaggaatggcaactggatctaccttgtgacaaaattcctagtgttttgactacaactgatgagagattggtaggcacagaacatgagggatatgatccttttcttggtg

SEQ ID NO: 68313 - DNA, 248 bp, Glycine max
  Clone ID: 700842059H1
atttatatatggaggtgtaggtccactgcattcagatgttaccatagcaggcattgcaaaagcttttggtgttcgtttggctcctgatgaagaatttgaagaatatctcaggcatattattggtgatcagtgtactggtgaccgaaatgagatggctcaattgcctgagggcataactgaattgtggcatcatgacaaattgtctgtgcccttgatcaagtgcgaaaatgtaataattcttagtgcaa

SEQ ID NO: 68314 - DNA, 249 bp, Glycine max
  Clone ID: 700842060H1
tattgaccttcttggtggaggaattttagtggacaaaactggagattggatcacacttatacaaaattctccaattagtaacttgttgagagttgctgcttggaagaaaggctgtttaatggttaagattgtgatgtctgggaatgcagcagtcaaaaggagtgattgggcctcattggtacaagtgtttctaacaaacagcaacagtacagagcattttgatgcatgtaagtggacacaatcggaacc

SEQ ID NO: 68315 - DNA, 78 bp, Glycine max
  Clone ID: 700842061H1
gagacagtagcaagctgcagaagacgttgtcgatgccgtcgacaccgacaaccccgatgactcccacgactccaacga

SEQ ID NO: 68316 - DNA, 256 bp, Glycine max
  Clone ID: 700842063H1
ggaaatgaggattctgatggtaggtctcgatgctgctggtaagacaaccatcttgtacaagctcaagcttggagaaatcgtcaccactatccccaccatcggatttaatgttgagactgtggagtacaagaacatcagcttcactgtgtgggatgttggtggtcaggacaagatccgtccactgtggaggcattatttccagaacactcagggtctcatttttgtggttgatagcaatgatagagatcgagtggtt

SEQ ID NO: 68317 - DNA, 241 bp, Glycine max
  Clone ID: 700842067H1
gcaagggtacatgcattctctgtatgtgatgcacccagattacttccacaactttgctcaaggcttgcttaatggactcaaggctggcgttagctcaagagatattgtccacattcaaaacgccaagggtcttggctatgcaatgaatacatcggaggagcttaattttgtcaaagaagttgctcccactactggtgttgttcttgacccagtatacagtggtccagccgcttatgcaatg

SEQ ID NO: 68318 - DNA, 241 bp, Glycine max
  Clone ID: 700842069H1
ccagtttcaccgcacgaatatcttgttgtttggagcgatccgagaacaactctgtaaacatgttggtttaccaggacctccttacaggtgatgagcttctctctgactccttccgttacaaggaaattgagaatggaatgctgtgggaagttgaggggaagtgggttgttaaaggagcagttgatgtagacattggtgcaaacccttctgctgagggtggaggagaaaatccaggagttga

SEQ ID NO: 68319 - DNA, 73 bp, Glycine max
  Clone ID: 700842070H1
gcagcaagtgagggagaacaattcttacttgttggtacaaaaagaaaagccgcggattaagtagcccgggctg

SEQ ID NO: 68320 - DNA, 124 bp, Glycine max
  Clone ID: 700842071H1
accaagacactcgagttcacttcaacacctttaattttctggacgaaattcagccacagggtatcaaagggagcgaagatgagtcacgagcagccaaggtgccaccaaggcgaataccccatca

SEQ ID NO: 68321 - DNA, 237 bp, Glycine max
  Clone ID: 700842072H1
ggaaccaacaccgcagacaccggtactggtcccagaagtggaaccacgggcggcaccggttatggaggcactggtggcactgattatggaacaactggtggcactggttatggaagtggaactgggtatggagtcaacactgggggtgcgcacactgaagcaggatataggaaggaacatcgtgcgcatgaccaatctcatggtgatcagaacgagaagaaagggattatggacaag

SEQ ID NO: 68322 - DNA, 240 bp, Glycine max
  Clone ID: 700842073H1
ctctgtttcacagcatcaagtctttgtttatgaacaagccgttgattatagtctgcaacaagactgacttgcagccacttgaggggatatctgaggaagacatgaagttggtcaatgagatgaaagcggaagccttgaagactctagttggtcaaggtggtgagcctacagacaataacagtgtattgttgaccatgagcactttgacagaagaaggggtaattgctgtgaaaaatgcag

SEQ ID NO: 68323 - DNA, 244 bp, Glycine max
  unsure (1)..(244): unsure at all n locations
  Clone ID: 700842074H1
cccatggccaccacctccgcattcctcctccttcccctcctcctgctgctccacctcgccatcgccgctcacggcatcggcatcaactacggcacgctcggcgacaaccttccaccgcccgcggcgtggcngaacttcctgaagacgaagacgaccatcgaccgcgtgaagatctacgacgtgaacccggacatcctgcgggccttcgccggcagcggcatctccgtgacggtgaccgccccca

SEQ ID NO: 68324 - DNA, 86 bp, Glycine max
  Clone ID: 700842075H1
ggagttcccatcaggcaacaacggttctgcctgatcctacttaagcatgcatattatgtcagtggagacttggtgtgaagccttgg

SEQ ID NO: 68325 - DNA, 244 bp, Glycine max
  Clone ID: 700842076H1
gacaaattccatacacaatgatgaagtttgcttcttttgagaccattgttgagctgatctataagcatgccatgccaacaccaaagaatgagtgcaccagaagcctgcaacttggtgtcagttttgctggtggatatgttgctggtgtactttgtgcaattgtgtctcatcctgctgataatcttgtctcttctctgaacaatgcataaggagcaacagttggtgatgcggtgaagaagcttgg

SEQ ID NO: 68326 - DNA, 247 bp, Glycine max
  Clone ID: 700842077H1
gagaagctgaggcaatctcttgttaatgaggggaatgaaactggtggaacattttttaactctgaagctgacaatgatgacaatgaatatgatggtggaaatcctgattttgatatgccggacaatgcttacatggaagaagatctaccatctttcagtaatgagcatgaatttgatgatgctcatgtcaaccctgatgaagctgtggatctttctcagactagtttggaagatctttgccgctctc

SEQ ID NO: 68327 - DNA, 249 bp, Glycine max
  Clone ID: 700842079H1
ggacgatgacttgatggacgaggacggcgcccccgacgccgacgcttctccgcctcaacctaagctcaaatccgccatcaccgccgccgccgcccccaaaaagaccaagggtcgcggattccggcaggacaccgacgccaaccgtgacactcgcctctccggctccgacttcgactctctcaccaccgagggacgccctggccctcaaagatccattgaaggatggatccttctggtcaccggcgtgca

SEQ ID NO: 68328 - DNA, 255 bp, Glycine max
  Clone ID: 700842080H1
ttcggatctagagtcttcagtttctcctcgttgttcttcgctttcctgttttcagatttcgattctttcgttaatttaataagatgtttgggagggcaccgaagaagagcgataatacgaggtactacgaaatccttggcgtctccaagaacgcttcgcaggatgatctgaagaaggcttacaagaaagccgccattaagatatcacccgacaagggcggtgatcccgagaagtttaaagagctggcgcaagtta

SEQ ID NO: 68329 - DNA, 83 bp, Glycine max
  Clone ID: 700842081H1
catgcgcaacgatactgcatatgatgattaccacaggatatttgtccctgatgggggtcctttgaaggctgctcccagagagc

SEQ ID NO: 68330 - DNA, 237 bp, Glycine max
  Clone ID: 700842085H1
attctccaaacactctagaatttgcatgcactgttcttcatacaatggcattacgcgagcttcttatgatggggatattgctgctggtatgtcttgctaaggtttcatctgatgttaacatgcaaaaggaagaagatgaagaacttcgctttcctaatcaccctcttatcgtgagagacgggaacagaaggctaatgcaagacatagattgcggaggattgtgcaagacaaggtgca

SEQ ID NO: 68331 - DNA, 204 bp, Glycine max
  Clone ID: 700842087H1
aagacggcctgtaggagaggcccgaggaggccgacgcccagcgccgcaaggaggctgccgccgacctatacgacatcttcgacatgcgagttgacaggcactggagcgataagaatctggaagagctgacagagccggcttagcgtatcttcagagaagactataagatctcctacaagggttccaatattcctcgtcctatga

SEQ ID NO: 68332 - DNA, 237 bp, Glycine max
  Clone ID: 700842088H1
gctccgacaccattgacaacgttaaggctaagattcaggacaaagagggtatccctccagatcaacagaggctgctctttgctggaaagcagcttgaggatggccgtacccttgctgattacaacatccagaaggagtccactcttcatttggtactccgtctacgtggtggaatgcaaatctctgttaagactctgaccggaaagacaatcacccttgaggtggagagctctgaca

SEQ ID NO: 68333 - DNA, 132 bp, Glycine max
  Clone ID: 700842089H1
ggcttccgcgccttccgccacatgtccgcactcgacgtcctccccaacgaggccaccgtcaccggcgtcgcgcgcctcgctgcggcgaaaggcgacgcggattacgccttcgagttggtgaagagcatgggc

SEQ ID NO: 68334 - DNA, 238 bp, Glycine max
  Clone ID: 700842090H1
ctcgagcgctccaaatgcaactccaaccggctttggaggaactccaggaaatgagagaatatttattgatgaagattttgcaaaagtgactgttcgccatcatgctattgacaaaacttaccggagtggatctctctttccagatcagggtttccttcctgtcgagggtctgatttctgaagttgaagtttggggacttggtgggaaagtagcaaaggaagtgcagaactcttacaag

SEQ ID NO: 68335 - DNA, 245 bp, Glycine max
  Clone ID: 700842091H1
caccctctcttctctcttccatctcctcggttaaactgaaccaattcaatattcccagctagttcttcattgaagaagctatggactttcttaactttatgcttaacttgttggtccctccaggcagtatgctcaccttggctttctcatggccagcactttgcttcctcaatgtttgtgagtggctttataatagtatatatggtgaggatatcgataataaagtcgtcataatcactggggca

SEQ ID NO: 68336 - DNA, 230 bp, Glycine max
  Clone ID: 700842092H1
gaaaaagcaggaaccaaaggtcaaacaaagaagggtggtggtgaagctgccaaagagagaaacaagcaggcaaataaggaggcaacaaaggcaaaagatgtcacaagagagaagggtcaacaaggcaatcttaaaacaggaaatgagacacaagacattggccaaaagggttatggtggagcaaagggtaccattggtagagtggacaacattactacaccacttgctaa

SEQ ID NO: 68337 - DNA, 247 bp, Glycine max
  Clone ID: 700842094H1
ttcatccacaggtcatgatgaacaagaggccattaaccgccgtctacaacaaggcgatccccgatctttgcaatcgagaactcggccaccttcccccaaggaatttcgctctccgtcttggcgcctccgaggtcccacgcttctcctaaccctcttttttcattcattcgttctcgtcaatcgtattattttatttttttgttttctctatctggtcgatccattgggatcttgtccttcgacttga

SEQ ID NO: 68338 - DNA, 255 bp, Glycine max
  Clone ID: 700842096H1
gtaataataatgtgtataatgctacagcagcgggtatggtaaaaaaaatcatacgaaaagaaaaagggggatacgaaataactatagtggatgcattggatgggcgtgaagtgattgatattatacctccaggaccagaacttcttgtttcagaaggtgaatctatcaaacttgatcagccattaacaagtaatcccactgtgggtggatttggtcagggggatgcggaaatagtacttcaagatccgttacgtg

SEQ ID NO: 68339 - DNA, 239 bp, Glycine max
  Clone ID: 700842101H1
gattgcagttccgttgtgccaagttcatgaaaatcacaagggtgaagggactaaggctttgctcgttagaatcctctcctcatgtcgcgtccagactccagacacagacttgtatatatcatggctttctagtttctatacgaaaaattatactgtaatgttgaaaatagctacatgtatcatacttgcatggttagtgtgaaattttcttcagagtaatggagttcgattggttcttt

SEQ ID NO: 68340 - DNA, 203 bp, Glycine max
  Clone ID: 700842102H1
acaccatcttgttcctaccagtcccactgggtattctttattactttgcatctgcttcatcatacatgcatgatgaagattgacaacccctctgaatgcatgcttcggaacgtggtatgtccatccgataccatcttcctgaaaagcatcaatctttcccatctgggtgtgtcccatctctacccattcagaatgtcgattct

SEQ ID NO: 68341 - DNA, 242 bp, Glycine max
  Clone ID: 700842103H1
tgatgttgaaaaggctgaggattggttgaagcctaatgtagtgttggaagcatttgaagctagggcttctaggatgtcagttgcttgtgctcaaaatcttagcaagtttgctaaccctgaagagggttttcaagaactagctgctgatttagttgatgccgcggttgctcattgccagttaattgttgtttccaaatttattgagaagttgcagcaagatatacctggaaagggagtgaaaa

SEQ ID NO: 68342 - DNA, 247 bp, Glycine max
  Clone ID: 700842105H1
gattttctcaagagaaactttaagcagatgtctaatgttttgtgggtggctcctgaagacaaggcgagtttatggtcacaacttcattatgtttcgtgtaataatctggaaatgcaagaagcttatcttgtcaatctcgtaaatgtgttacgagaactgtatttgcacagtccagaggaagctcgccaattgagaaggaaagctctctctcgtattgaatggctgcaaaaagctgatgtgcctacca

SEQ ID NO: 68343 - DNA, 251 bp, Glycine max
  Clone ID: 700842106H1
gaaagcaagaccaatggaagaaacaaaactggaagctaaaggaagagaaaaagctgaaaccaaagagggtggtggtgaggaaaaaggaatgagaagagaagaaataggagaagaaaataaacaatccagcctggaagagatttttaagtacagagctgaagttcaacagaaagttaaggagagaaacgagagagcaaaacaagcagcagaagctgccaaagagagaaacaagcaggcaaataaagggaatg

SEQ ID NO: 68344 - DNA, 247 bp, Glycine max
  Clone ID: 700842107H1
gaaaagacttcatgtgacaatgggtgtaatggaggtcttatgacaaatgcctacaattatttgctcgagtctggtgggttggaggaggagtcttcatatccctacactggggagagaggtgaatgcaagtttgatccagagaaaatagcagttaagatcacaaatttcaccaatatccctgctgatgagaaccaaattgccgcatatttagtaaaaaatggtccacttgctatgggcgtgaatgcaa

SEQ ID NO: 68345 - DNA, 250 bp, Glycine max
  Clone ID: 700842108H1
gaagaacctcactgaagaattaaggagagaaaaatcaacatcaaagttataacgatgaagcccattgacgataaacaagagacagtgacgatcagagcggtgagccacgacgaggaagggagaaagagggtggaaaaaatagagctcaacactcacaacatccacactataaagtacgtcgagaagaagctcatcaacaagggtgtgcagcgcaaggaccggcacccagccgacggcatcagaatcggcc

SEQ ID NO: 68346 - DNA, 243 bp, Glycine max
  Clone ID: 700842110H1
gggtactggagaaactatcaatgacagagatcgctgcccacagtgcaagggagagaaggttgtgcaggagaagaaagtccttgaagttattgtagaaaaggggatgcagaatgggcagaagataacattccctggcgaactgatgaagcgccggacacaattactggggatatcgtctttgtccttcagcagaaggaacatcccaaattcaaaagaaaggctgaagatctttttgtagagcac

SEQ ID NO: 68347 - DNA, 248 bp, Glycine max
  Clone ID: 700842112H1
gaatggagaaagctttaaggccttgctttgagcttacaaatgctgtgcggattggagacttggaactgtttaggaatattgcagacaagtttgccactacctttaatgcagacagaacccataatttgattgttcgtttgcggcataatgtcatcaggactggtttacgcaacatcagcatctcctattctcgcatctctctagctgatgttgcttaaaaagctgaggctgaactctgcaaatcctgt

SEQ ID NO: 68348 - DNA, 252 bp, Glycine max
  Clone ID: 700842113H1
caactcacctgccgaatcaactagccccgaaaatggatggcgctaaagcgcgcgacctatacccggccgtcggggcaaggaccaagccccgatgagtaggagggcgcggcggtcgctgcaaaacccagggcgcgagcccgggcggagcggtcgtcggtagatatcttggtggtagtagcaaatattcaaatgagaactttgaaggccgaagaggggaaaggttccatgtgaacggcacttgcacatgggtta

SEQ ID NO: 68349 - DNA, 254 bp, Glycine max
  Clone ID: 700842114H1
tctcgtagccgaatcggctcgaggattgtttgtctgtcacgagacaccatacattgtgctgacaattatagtaactctctaactctctttccatctctcaagttctgaagaagaaacatgtgtggaggtgctatcatctcagacttcattggtgtgaagcgtgtgcgcaacctcgccgcgcaggaactatggtctgagcttgaccctttctctgacttccttggcttcgataccaccaattccaaaaaccaacc

SEQ ID NO: 68350 - DNA, 254 bp, Glycine max
  Clone ID: 700842116H1
ggaagaagcctaacaatattaagctttatgtccgccgtgtctttatcatggactactgtgaggagttgattcctgagtatttgggctttgtcaagggtattgtggattccgaagatctaccactcaacatttcaagcgaaatgttgcaacagaacaagatcttgaaggtcatcagaaagaacttggttaagaagtgccttgagctcttctttgaaattgcagagaacaaggaggattacaacaagttctatgag

SEQ ID NO: 68351 - DNA, 251 bp, Glycine max
  Clone ID: 700842118H1
aaaaaaaatcaatgatatagaattctaatatgtaaaggtctatgggttatctcataaaaggtagtgtaataaagcatcaatctaaatcaattcatatctatttatatatgaattaatttataacgtaaacaaattaagagctctgaatcaataaaaactgagaatattgattcacgaaaaaacaaatcaatattcgaaaaaaaaaaagattattaattttaagatatgagaaaggctccattgtcgaattc

SEQ ID NO: 68352 - DNA, 249 bp, Glycine max
  Clone ID: 700842119H1
aaatggctgaagcacaactacgagaccagcatggcaaccctgtcccactcaccgatcaatacggtaatccggttatcttaactgacgagcgcggtaatcccgtccaactcactggtgtcgctaccaccgctaccggcacagcaggttctgggtttgggtcctatggtaccggtgcttacggtggtggtgcaagtgcaaccaccgttgcagatcttttggcaacccaaccaaggagtggcagggaggcta

SEQ ID NO: 68353 - DNA, 249 bp, Glycine max
  Clone ID: 700842120H1
ctctattttaagtaattcaatggcttacactgcaagtcttatgttcttacctaccactttccatatcatactactctcctctgctagctatcgctaacggatacaatagaagatacataagccacaacgactgcgacggccaactcatttgcatcaacggcaggtgcaacgacgaccgcgacgtcggaacccacatctgcggcggcggaatgccgccaaatccgccaccaagcggcggaagctgccagt

SEQ ID NO: 68354 - DNA, 275 bp, Glycine max
  unsure (1)..(275): unsure at all n locations
  Clone ID: 700842121H1
gcgtacgaagtcggaatcgngctcgagctcgagcgctgcaatagctgataaagccgtctcagcaaaaaacactgtagcttccaagctcggatacggcgacagcactgaaacaactcaaacaagccatcaagaacagaacacaggcaatgaaaaaccatcaacaatctcatcagcaacctctgcaatcactgataaagctgtaactgccaaaaatgttgtagcttcaaagctcggatatggcgacaacactgaaacaactcaaaccactctagcaa

SEQ ID NO: 68355 - DNA, 249 bp, Glycine max
  Clone ID: 700842122H1
cacgtcgacaccaccctccgcttcctcgccgcccaagccgagggcttcggtcgcttcgctatcggcggcctccacggtccccttcaccccgtcacatctctcgcagatgatggaccggggtcactgcgtgacgcgtgtcgcagaaaagaacctttgtggattgtgttcgaagtttccggcaccattcaactctcctcgtacttgaacgtgtcgtctcacaagaccatcgatggtcgtggccagaggatc

SEQ ID NO: 68356 - DNA, 248 bp, Glycine max
  Clone ID: 700842124H1
tgcagaccgagctagctagctagcaagcaagcacagagatggaggcaaagcgaggccatgccctcatgtgcttggcacgtgtttcactcttcctctgcgctctaaccctatccgctgctcacggaagcaccacggttcaagacatcgcgagaaagttgaaactcggggacaacgagcttctgcgcacggagaagaagttcaaggttttcatggagaattacgggaggagctactccacagaggaggag

SEQ ID NO: 68357 - DNA, 239 bp, Glycine max
  Clone ID: 700842125H1
ttctccttttgtgcttccaactcttttctttgttatattattctctatcactttctgccaacccttggagtcaacatgactatcctcattgagcaatctgatcactttggggctgaagtagaggcaaagactgaaccaataaatgagagagaactggtgttggatggtggatttctgataacacagaccaactcatttgggcacatgtttagggcttataatgatgctgaaagtgagag

SEQ ID NO: 68358 - DNA, 245 bp, Glycine max
  Clone ID: 700842127H1
ctgagtttaagcatatcaataagcggaggaaaagaaactaacaaggattcccttagtaacggcgagcgaaccgggaaaagcccaccatgaaaatcggtcgccctcggcgtccgaattgtagtctggagaagcgtcctcagtggcggaccgggcccaagtcccctggaagggggcgccagagagggtgagagccccgtcgtgcccggaccctgtcgcaccacgaggcgctgtcggcgagtcgggtt

SEQ ID NO: 68359 - DNA, 246 bp, Glycine max; identical to SEQ ID NO: 66724
  Clone ID: 700842128H1

SEQ ID NO: 68360 - DNA, 250 bp, Glycine max
  Clone ID: 700842129H1
ctcactttctctccctccaaacagcgtgcaattcttcttctttctctgcgatacatggagatgtcgtcaatggaggattcgcgctcctacgagattctctccacggttctcgacgctttcctccgacgcggacgatctccacgattaccgaacagttctataccgattgccccacgaatatctccttttacgccctcgttttaaggtcctttcttcgctctccatatctattcgtttatttcgctgttta

SEQ ID NO: 68361 - DNA, 252 bp, Glycine max
  Clone ID: 700842131H1
ctgaacaatggcgtctctctctcacctcaacaaactcctctgcatgccgccgctcaactcttcaccctctacttcgccaccgcgcagcagcgtcggagtttcgaccaaatctgtcggaaggccgaggatggtcgccgatttcgcgaggccggtggggcgtgtccgagcggtgacgagcgacgacgagtggggcccggagaaggaggaagacgcatacggcggaggagtggcggtggaggagaaaccgacgga

SEQ ID NO: 68362 - DNA, 205 bp, Glycine max
  Clone ID: 700842133H1
gagcggcaagacagaggaaaccaaagagaaagtctcggagacggcagaggcgacggctaataaggcggcggagatgaaggaggccaccacggagaaggctgccgggactgcggaagcggccaagaacaaggccgcagaagtaaaggacagagctgcagaaaccgcggaagcggccaagaacaagactggcgatactgccactgca

SEQ ID NO: 68363 - DNA, 249 bp, Glycine max
  Clone ID: 700842134H1
ctctggcgaccaaactcgaagaatccaaacagcaggtttgttgtggaagatgagtggtgttgttagggctgcattgagatccaccactagtgtttgtgcacttgtgcagagaagccatggcctcctcccattgaggtgcttctccactgaggcagaacagccacctttgaattcaacaccccctcctcctccgttctttgagactgaccattcaggtttgacatatggtaatctgcttggtgttcgtaa

SEQ ID NO: 68364 - DNA, 245 bp, Glycine max
  Clone ID: 700842136H1
accaatccctttttcaattctcatagcatagatctccattttccaattcaaaccctttcctctttcttccctttcttttcagaatccaaatgcgatgttgctttcgttattgtgttttagattttgaatatggttcttctgttattgatttttaggttggtaagttatctacaatctgcatcatggaaggtgttattctgagaagggtcattccttcggataacagttgcctcttcaatgctgtt

SEQ ID NO: 68365 - DNA, 246 bp, Glycine max
  Clone ID: 700842137H1
ccaggagtaaaccctgatgaggcagttgccatgctaggtggcattgcacagtggtattctgcgctcggatacttgggcgtttatgcttctgggtgtaccactgctctctctgggtattgagactttgggtggtatctttacaagattgatcaaccgcaacactactattcctacaaagaagagtcaggtcttttcaacagcagctgacaatcaaactcaggtaggtatcaaggtgctacaaggtga

SEQ ID NO: 68366 - DNA, 245 bp, Glycine max
  Clone ID: 700842138H1
acaattttcatcctattcctcagatcagataaagaagatgcagaagggtagagaagttcgagacaataacatttttgaaccaagacggtttgaagattttggcgactttggatttcatagaagtaggatgccaagtctttttggtggcagggatccatttgatgatccctttttcacagacccgtttgatagcttgtttggtccaagttctgcatcaagagcaatgcagaagacaaacagagaaa

SEQ ID NO: 68367 - DNA, 246 bp, Glycine max
  Clone ID: 700842139H1
gctcaacgaacgaacgatgctgctgctgctttggtaattgcatttgctggtgaggtgactcatctctctctctctctcatctctccctctctctcatctctcccttccaaaaaaaagcaccaattttttcgaacgccaacgcgaatcacgaagagggtcaccgagaaaatgggtgtttgtgggtcgaggcccaaagtgaacgaggacctctcagcgaagaagaagaacaaccaccaccgaagaaga

SEQ ID NO: 68368 - DNA, 245 bp, Glycine max
  Clone ID: 700842140H1
agaggatcgacgacatcttgaacaagttcgaccctgtcgttgaaagggtcatcaagaagcgccgtgagatcgtgaggaggagaaagaacggagaggttgttgagggtgaggtcagcggggttttccttgacacttaccttgaattcgctgaggatgagaccatggagatcaaaatcaccaaggaccacatcaagggtcttgttgtcgactttttctcggcaggaacagactccacagcggtggca

SEQ ID NO: 68369 - DNA, 244 bp, Glycine max
  Clone ID: 700842141H1
aaaattcttaaaaaatatagaaataagtgagaaaaagttattgagagacatgaataaaaacatttagataaatttaataactttttgattaagatttgtttgattgaaatattataaaataatattagtgacaatttatattaaatactataaaataatatattatgattatttcattggacattggatctaatacaatgaccgtaaattattttgatcaattttaggtcatacacgtgtaatt

SEQ ID NO: 68370 - DNA, 243 bp, Glycine max
  Clone ID: 700842142H1
ttcattttaatcctaattctgcacttcttgatcattcgatttttctcctcaagatgcagatattcgtaaaaactttgaccggcaagaccatcacccttgaggtggaatcctccgacaccattgacaacgtaaaagctaagattcaagacaaggaagggatcccacctgaccagcagagacttatctttgcgggtaaacaacttgaggatggtcgcacccttgccgattacaacatccaaaagg

SEQ ID NO: 68371 - DNA, 240 bp, Glycine max
  Clone ID: 700842143H1
tatgaaagtaattatgatgtttttgtcaaagctgagggtggtggcctgtctggtcaggctcaggcaatctctcttggcattgctcgtgccttgctgaaggtgagcgaagatcatagagtacctttgagacaggaaggacttcttacaagagattccagagtggttgagaggaagaaagttggtctcaagaaagctcgtaaagcccctcaatattccaagcgttgaggttgggatgttaca

SEQ ID NO: 68372 - DNA, 244 bp, Glycine max
  Clone ID: 700842144H1
aaagaaaggaaataattgatctttgaaaatgcagggaggaaagaaagctggagagtccatcaaggaaacagctgcaaacattggtgcttctgccaaggctggcatggagaaaaccaaggccactgtccaggagaaggcagaaagaatgacggcacgtgatccgatgcaaaaggagttggcaacccagaagaaagaggcaaagatgagccaggcagagctggacaagcaggcggcgcgtcagcat

SEQ ID NO: 68373 - DNA, 243 bp, Glycine max
  Clone ID: 700842145H1
caccgaatgcggcgacgttttcggtgtctccaccgccgcggacactcacgctgcgccggtggtgtccgccggtatcggttcggctgccatagatggcgaccccataaccatcggagaagctctggaagcggcggcaatatcgatcggcgataaaccagtggaccaaaatgacgccgatgcgattggcgtcgcggagattagggccaccggagagaataaggtgaggtccggtggggtgggtga

SEQ ID NO: 68374 - DNA, 245 bp, Glycine max
  Clone ID: 700842146H1
ggcagatgctgcagcagaacaactccaagcttgacactaatctccctttgcgcaaaggtctttcctacaattctgctcacaacttgttgtctgtgggtgacaaagatgaggatatcattttctgaatgtgctgctgctgctgctgctgatgggtgagactgagactactctgctattgtttaggtctcagttgagtgtatcatgaataaaggatgatactggttagtatatgtttatttatttct

SEQ ID NO: 68375 - DNA, 248 bp, Glycine max
  Clone ID: 700842147H1
gtcactacgattgttctaaaagcaattattactcttgagaagaattaaaatatcatcatcacaataacaagatgagttcaggaattagagcatggagtgtggcagctagtgttggagttgtggaggccttgaaagaccaaggcatatgcaggtggaatcatgctttaagatcagctcaacaccatctcaaaaaccatgttggctcattctctcaggctaacaagctttcttctactgctatgatctcc

SEQ ID NO: 68376 - DNA, 252 bp, Glycine max
  Clone ID: 700842148H1
agaaatcgcgttggttcgttggtttatgacttggagtgaaaccctaactaatattgaagatgagcattcggaggttgagtgccgaagaatcgcaaacactttactctctcctcagagcagagcaacgttcgctccatgagatcctctcccaattcaacgctgcaatcccttccacccgccatttcactctctcttcctatctcctcatcctattgcaggacaataaggtgctcagcaccactgagcggttaa

SEQ ID NO: 68377 - DNA, 250 bp, Glycine max
  Clone ID: 700842149H1
tgggtatcagcctcatcttatagctccagaacaaggatatcgtcgtctaattgaatcttctctaataactattaggggccctgctgaggcagctgttgatgcggttcactcgctgttaaaggacttggttcacaaagctatcagtgagactttggacttgaagcagtatcctggtctccgggttgaggttggggctgctgctgttgattcactagaaagaatgagggatgaaagcaaaagagcaacactg

SEQ ID NO: 68378 - DNA, 176 bp, Glycine max
  Clone ID: 700842150H1
catggctcaccctcgactcactaactcgctctgttcttctccgctgcgaagccgttcgtgcatttttgaggtgccgctgtcatgtttgggcgtggtggaccaaggaggagtgataactccaaatattatgatattctcgggatttccaaaaatgccagtgacgatgaaatcaagaa

SEQ ID NO: 68379 - DNA, 245 bp, Glycine max
  Clone ID: 700842151H1
gttgcgtttgagttggcgattccgaaatggaggacgacggttccaactcgatccgccgcatgtcaagccgaacgcgaaaagttgcgtccaaaatggccgccgcgcttgccagcgctgacaaccgcactcaggcggcacttgcacgcttggatgcattggagaatgacaatgcgggttttgaaatcgcagatgccaataatgatgacgatgacgcttctctagacgaggaggatcaatgtttatat

SEQ ID NO: 68380 - DNA, 243 bp, Glycine max
  Clone ID: 700842152H1
aacattttctgttcatgatcaggttcctgaacatgatgatgcagccaactaatatacaattaatactaacttcattgccgagttatggtagaggaggagaataaaagttatatgtgccattatgtggctaacatgttacatatctcttacttgatcattacaattttccggcatcttgagtatgtgcataatttctctaaaaaaaaaaaaaaaaaaaaaagaaaaaaaaagaaaagagaagag

SEQ ID NO: 68381 - DNA, 246 bp, Glycine max
  Clone ID: 700842153H1
cggctcgaggaggaagagatggaggcagaggcagaaggtgaagaaggtgcgaactaagcatttacaaggcggcgagaagcataaagcgaagagagaactcgtttgtacaacgcactgagatccatctaccaagactccatcttcgtctccgagatctctcttctatggcctcagctccctctcctcgccaacctccgctgcggcctctggtactcccgccccgccgccttccactccacctgctat

SEQ ID NO: 68382 - DNA, 242 bp, Glycine max
  Clone ID: 700842156H1
gaccagctcacagaatcagaatcttgctcccttctctggtgtaatggcacatacaaattctttgcccagtgctctgttgtcttcaccagttcaaacagcaagagaagatatcccatacttacccttccctgcaacacaatcgatgcctacaaaatatagtgacattgcttcttcaattggtggttccaccataaccatgtcagaggctctaagggctagcggcatttctgcacctcaaccta

SEQ ID NO: 68383 - DNA, 240 bp, Glycine max
  Clone ID: 700842158H1
ggaattagcagacaagatagtgcaaatgagtcaacagaagtttgcctccaatgttgtggagaaatgtttgacctttggaggtccttctgaacgccaattactagtgagtcagatgcttggcaccaacgatgaaaacgaacctcttcaggcgatgatgaaagatcaatttgcaaattacgttgtacaaaaggtgctggaaacttgtgatgatcaacagcgcgactgattctttcccgaatt

SEQ ID NO: 68384 - DNA, 242 bp, Glycine max
  Clone ID: 700842159H1
ctcgagccggaaaacctaagcttagaattagaaacaaagaaaagaagaaaggaaagaattgatcgttgaaaatgcagggaggaaagaaagcgggagagtccattaaggaaacagctacaaacattggtgcttctgccaaggctggcatggagaagaccaaggccactgtccaagagaaggcagaaagaatgacagcacgtgatccggtgcaaaaggagttggcaacccaaaagatagaggca

SEQ ID NO: 68385 - DNA, 245 bp, Glycine max
  Clone ID: 700842160H1
cttttctccaaaaccatccaacaagggaaacagaatattattccattttttcacttccacactttcttgcatataatccccattttcaactatggcctcttcagctcaattttccaccactttggtcgtactatgtctcttccaattcctagcaggttcatattcaacgacattcacaattgtgaacaagtgcagctacacagtttggcccggcattttaaccggcgccggaacctcaccgctct

SEQ ID NO: 68386 - DNA, 246 bp, Glycine max
  Clone ID: 700842161H1
aatttggccagctgcataatggagttttcatgcaacaggatgctgaagaatgttggacacaacttctatacactctctctcagtccctcagatcccttggaattagtgaaaatcccgatgctgtgaaggcactctttggcatagaacttattagcaggattcattgtcaagagagtaatgaagaaagctcagaaacagagtctgtttattcacttaaatgccacatatcacaggaggtgaaccatt

SEQ ID NO: 68387 - DNA, 245 bp, Glycine max
  Clone ID: 700842162H1
agatgttccaaatgaatggggtaaagctacattttacagaaaatgctctaagatcaattgccagaaaggcaatatctaaaaatactggtgctcggggattacgatcgatactagaaaatgtgttggtagatgccatgtatgagattcctgatattagaacagacgatgatgttatagatgctgttgtcgttgatgaagaggccgttggaggtgaggggcgtgggagaggggctaaaatcctgtat

SEQ ID NO: 68388 - DNA, 246 bp, Glycine max
  Clone ID: 700842163H1
caaccactttgtgtcaaagaccatcatggagaagatggttgatgaggtttttgctttcttcaatcttagagaggaggagaagcaagagtatgctggtaaggatgtgatggaccctgtgaggtatggcaccagctccaatgtttctatggacaaagtcttgttctggagggattttcttaaaattgtggtgcatccagaatttcactcacctgacaaaccacctgggttcagagagacatcagcaga

SEQ ID NO: 68389 - DNA, 253 bp, Glycine max
  Clone ID: 700842164H1
ctttgtttgcttctcaagtctctcgaagcctctttctctctcttactagaagctatctgtgtttggtgttactaagtctccaacaagcaaagtacatggttgatttggaaatccaggtccccaccccattcgacccgtttgccgaggcgagagaatcggatgcccccggagcaaaggagtatgtgcatattcgaattcagcagaggaatgggaagaagagtctgaccacagtgcaagggctgaagaaggagtt

SEQ ID NO: 68390 - DNA, 249 bp, Glycine max
  Clone ID: 700842165H1
cactggtaggcaacatgggaacatcggtggcccttactatggaaccaacaccgcagacaccggtactggtaccagaaaacgcctcccaggaggagaccggtatggacgcaatggtggcactgattgtggaacaactggttgcactggttatgggaatggaactgggtatggagtcaacactgaggggtcgcacaatcaagcaggaattaagaaagaacatcgtcaggatgaccaatctcaaggtgatca

SEQ ID NO: 68391 - DNA, 244 bp, Glycine max
  Clone ID: 700842166H1
tccactgcggctactgacgaatctcttatcttcttctgcttcctaaatgtgagttcattcatttgatgttgcaacttaaagttttgttttgtatgaaattgaaatagtgaagtaaaatggagtctggagctggaggcctagtgtcgtcgtctgagaaagaaggagcctcgtatacctattgggttaggaaaataacggaagatgcagcgcctttgcctctgcctcgtaagctcaacccagaaga

SEQ ID NO: 68392 - DNA, 243 bp, Glycine max
  unsure (1)..(243): unsure at all n locations
  Clone ID: 700842167H1
ctttgcacaagccactcatgcgcgacaagactgtgctggtatccgccggcactacggtattccggtcctcttagctgacgagcgcggtaatcccgtctaactcactggcgtcgctgaccatcgcgaccgttcctccgaggtttctatccaacgnatcagggagcttgccggcgaatttgggaacaacctctcctttcacaaggtggacctacgggacagggatgcactagagcaaatttttgt

SEQ ID NO: 68393 - DNA, 242 bp, Glycine max
  Clone ID: 700842168H1
gagatgtcatcatcttcagacctggacaggcaaatagagcagttgaagaggtgtgagcctcttaaggagtctgaagtgaaggtgctctgcctcaaagccatggaaatcctcgtcgaagagagcaacgttcaaagggtcgacgctcctgtcaccatatgtggtgatattcacggtcagttttatgacatgaaggagcttttcaaagtaggaggggattgccccaaaactaactatttattcct

SEQ ID NO: 68394 - DNA, 236 bp, Glycine max
  Clone ID: 700842169H1
tgaagaaggtgttgtttcccagagaggactaattgctttgtcacatggctgtccagaactcgaatacttggccgtctacgtatccgacattacaaatgcatctctagaacacattggtactcacttgaaaaacctttgtgattttcgccttgtcttgctagaccgcgaagagagaataactgatttgccacttgaccaccgaacaagggctctactgaggggttgtgactagctca

SEQ ID NO: 68395 - DNA, 242 bp, Glycine max
  Clone ID: 700842170H1
ctcgagccgaatcggctcgagtgcatcgtgatgtgaaaccacatactgtaatgattgatcatgagcagcgtaagcttcgccttatagattgggggcttgcagagttctatcatcctgggaaagaatataatgttcgtgtggcatcaagatatttcaaaggtcccgagcttcttgttgatcttcaagactatgattactctctagatttatggagtcttggttgtatgtttgctgggatgata

SEQ ID NO: 68396 - DNA, 241 bp, Glycine max
  Clone ID: 700842171H1
aaagaaaggaaataattgatctttgaaaatgcagggaggaaagaaagctggagagtccatcaaggaaacagctgcaaacattggtgcttctgccaaggctggcatggagaaaaccaaggccactgtccaggagaaggcagaaagaatgacggcacgtgatccgatgcaaaaggagttggcaacccagaagaaagaggcaaagatgagccaggcagagctggacaagcaggcggcgcgtcac

SEQ ID NO: 68397 - DNA, 240 bp, Glycine max
  Clone ID: 700842172H1
cagaagaagctccagaacattggagaaaactacatccgattttcgcgaacaacgcaacgacggcgatgggagcgtccacttcggcggacgagtagtgtcggcggacagaaagaggcggaggccgtcacagcctccaccggagctctccccctgcttcagaaagccttctccaagctcgctaatcccgagaccaacgccgttcccttagaaaatctccagcaatgctacagtttcggtcgc

SEQ ID NO: 68398 - DNA, 240 bp, Glycine max
  Clone ID: 700842173H1
cttcaacaagttgaatcaaacagtgaaagtaaaacattgtgcaataaatcatcaactgcaagtagccagtgcataagatcaatggcgtcaagacagcaattcaaggaagacagagccgaggcagctgcaaaactcgcagcgaaagacatcggcgacatcaacagaacaaacgagcgcgacgaggggtacgacttgcacgacgaagccaacttcaagcaagcacgagctgaagcagctgca

SEQ ID NO: 68399 - DNA, 239 bp, Glycine max
  Clone ID: 700842174H1
tcattcctagaccgagaatcgagtctcaaactttgattaggaattcaagtgtcaaatcacttgtactaaccattttttggttaatttgaggttcagtgcattgcaacatggggaagcaagttggctttgaggatgttcttagatatttcgacgaagatggtgatggaaaggtttcaccttcagagctgaagcacgggctgcgaatgatgggtggggagcttttgatgaaggaagctgag

SEQ ID NO: 68400 - DNA, 126 bp, Glycine max
  Clone ID: 700842175H1
gccacaacgaacttggtttcgtggcaaccaccgccatcacctattacatcctttacggaaagtgcgtctccaccatggactttttttgacgagatcgaaacccttggggtacacagtactacgcag

SEQ ID NO: 68401 - DNA, 242 bp, Glycine max
  Clone ID: 700842177H1
gaaggttgctgcagaataagcgatgttcttgctcttctttctcttggaagaagaatggtgttgaatcagtttcaagtggtgggatcatattcatatataatagtagaatcccgtctccttaaaggagcgatctctccctcaaagtagaacgagcataatcgaagacagatggtagcgtattctaagtagttgatctcacgtgctatccgaaagtattattagtcttcgtctgctctcaatgc

SEQ ID NO: 68402 - DNA, 244 bp, Glycine max
  Clone ID: 700842178H1
tacagagcattttccaacacgattacacgaccgaatcaaacccctctttctctccgaagctgcttttaatatcgtactggccttcgattgttctcctctttaatacatactgttctctcttcgatttgagggaacagtacaagagtctgagcatcggttaacccaactgcacaggttttaaactgccgtcatggtatcatcgtggtgttgcgggaaattgtggacaaatgtgcccgttgtggct

SEQ ID NO: 68403 - DNA, 244 bp, Glycine max
  Clone ID: 700842179H1
cttatctctcttctcacttctgttgttataagtaacttccctcatcattacaaaacaatcctccacaggtttcaaaatgctgaaatcgggcatgggaattgaggagagaaagcaagtgaagaagccagcacaagccagctcgagaaaagggtgtatgagagggaaaggaggtcccgagaatgctagttgcacctacaaaggtgtgaggcagagaacatggggaaaatgggttgctgaaatccgt

SEQ ID NO: 68404 - DNA, 179 bp, Glycine max
  Clone ID: 700842180H1
gttgttgtttacttgtaacattttcatcatcatcatcatccttgcttgaactgtaacttgaaaccgtagctggttttgttagcttgagttctttgtaaatcatcaccttcagtttagtgtcttcaaatttcaaataataatttatgatgattcctttagtttgctttgctgctgcagct

SEQ ID NO: 68405 - DNA, 240 bp, Glycine max
  Clone ID: 700842181H1
cttgcttcccaagatcgtgattatcttctctctccaactggggctcaggtgaaagtttctgatcttgaagggagagtagtgggtctattattcgctgcgaattggtacccaccatgccgtggattcacccaaatcctagttggaatctacgaggagctgaaaagcagagtccctcaattggagattgtgtatgtgtcctctgatgaaaacttggatgcctttaatagcttctatggaaac

SEQ ID NO: 68406 - DNA, 243 bp, Glycine max
  Clone ID: 700842182H1
gtttctcttcctcccttggagaaaaagaagagccaccgctgcgacgccgttcgtgcatttttgaggtgccgctgtcatgtttgggcgtggtggaccaaggaggagtgataactccaaatattatgatattctcgggatttccaaaaatgccagtgaagatgaaatcaagaaggcctatagaaaggcggctatgaagaaccatccagataagggaggagatcctgaaaagtttaaggagttagg

SEQ ID NO: 68407 - DNA, 241 bp, Glycine max
  Clone ID: 700842183H1
gaaaaaaaacaccaaatttgctaaacctttgtcactctactcactgcaactgcaacatcctctctttcccatggattaccttaaatctgcgcttccttctcaaataatgtcagatcgatgctccaatcttgttgttatcatcccaggttctgctaatgttaagattggcttggcttcacaggatacccctattaatattcctcattgcattgctcgccataccgatcaaattcctaacttt

SEQ ID NO: 68408 - DNA, 235 bp, Glycine max
  Clone ID: 700842184H1
agggtcgccacgtttagcaacaaccaaaccctctctactctttcttcttctcttcgctagggttttagcttcttcctcttcacttcgttcttctggcctctacaatgagcaacgacaaggacaccttcaacgtcgctgatctcacttccgctctcaacgaggacaatagagcagaccttgtcaatgctctcaagagcaagatacagagtttggctggacagcattctgatattct

SEQ ID NO: 68409 - DNA, 239 bp, Glycine max
  Clone ID: 700842188H1
ctcgagccgcacagagaagggtcagaaatgacttagaaaattctctaccaaaaccatacttaccaagagcattgaaagctcctgatacgggtcacccaaatggaacagcaggccacaggcaccacaacttatctgttcttcagcagcattgtgctttttttgatcaagatgacaatggaatcatttacccttgggaaacttacatggggctgcgttctattggatttaatgttgttgca

SEQ ID NO: 68410 - DNA, 238 bp, Glycine max
  Clone ID: 700842190H1
aaagaatcaaagaaaggggtggtggctgcttcgaaagcttaataatttgtttatttccagaacatcatagttttcgcagcagcaaactaacaaattactcatatcatataataagatggcccgttctctctcgcaagccaaacgtattggtgtccttgttgctcaatctatctccctaattcccgttcatcggcgaggttacgcagtggcaagagttggattgggtaatattgggcga

SEQ ID NO: 68411 - DNA, 246 bp, Glycine max
  Clone ID: 700842195H1
atcacacacaactactacaagtacttccttacaatcaaaaccataaacaactatggcaagttatcaaaagcactacgatgatcagggtcgcaaggttgacgagtatggcaacgttgagaagcaaaccgacgaatacggcaaccctgttcatgctgctagtgtcacctatgtagccaccagaactgctgctggtggttacagtgatgacattaataagcaacatgataccaccaatgcctacggcgt

SEQ ID NO: 68412 - DNA, 249 bp, Glycine max
  Clone ID: 700842196H1
cggggctacccgctgagtttaagcatatcaataagcggaggaaaagaaactaacaaggattcccttagtaacggcgagcgaaccgggaaaagcccaccatgaaaatcggtcgccctcggcgtccgaattgtagtctggagaagcgtcctcagtggcggaccgggcccaagtcccctggaagggggcgccagagagggtgagagccccgtcgtgcccggaccctgtcgcaccacgaggcgctgtcggcga

SEQ ID NO: 68413 - DNA, 233 bp, Glycine max
  Clone ID: 700842201H1
cccaaactgaagaaatacaaaaaaatggcttgagatcaagcctaaccacgaaaaaagagaaaagaaaaaatgaccaggggcttgggaatgcttgagtctaataagtctagacttttttaagtctagacttttagatgatatggtactttccaaacttaaaaatgttaaacgcctgtattaatccaacaaaaaatgggcctttgaaactaaagaaaaacaaactaagattggcc

SEQ ID NO: 68414 - DNA, 255 bp, Glycine max
  Clone ID: 700842202H1
ctcgagcgtctattgattaattaattaattaattaatatatttattttcttcttataacccttcattgtatcatcaaatctctattgtttctctttctctggcttggtgcagctacaaccgtgtctacctctgctctatctcagttctcaagagttcagactgtggttacactcaggaaaatgattcaaaattttcagtatacttctgaagttcctacctttggtacacatgtatgtacatattcttcagctgtg

SEQ ID NO: 68415 - DNA, 256 bp, Glycine max
  Clone ID: 700842203H1
cttgttcttcatgtagaaaagctcagcagaaatgtcaatgaagggcatttgaaagaaattttcagtaactttggtgaggctataagtgtggagttggcaatggatcgaactgtcaatcttccaaaagggtatggatatgtgcagttcaagacaagaggggaggctgaaaaagcattattgtacatggatggtgcccaaatagatggcaatgtcatcaaggcaagatttactctacctccaaggcagaaagtttcac

SEQ ID NO: 68416 - DNA, 254 bp, Glycine max
  Clone ID: 700842204H1
gaagataagggatgtttgggttaatcggaagaaaggccaatttgttggtaggatcgggaacaagaagaaggtggttgagcttcgcagcaacagccacaaccacttctaatggtggtgccatggacggcgttgctttcgcaactccaatctaatgtccaaaaggctcttgctggtggaggacccgaggcagtgaagaggaacaagagtaggaacaaatttctgccccgccaaagaatcgatcgcctccttgatcc

SEQ ID NO: 68417 - DNA, 253 bp, Glycine max
  Clone ID: 700842205H1
atcaagagatcatttgaagttgaagtctgagtttcaagatggaaatggaaagaaaattgtcgattcaattgaacagctacctgctgtggaagtggttcttggtcagcatgtctttttcactgtgggggacattcccttgctggaaaatctgactgatcatattttccaagtgttcctttttgatcttttatccagtttgcatgctatctgtttgcaagattaggaatacagaatatacccaggcatgcctaat

SEQ ID NO: 68418 - DNA, 254 bp, Glycine max
  Clone ID: 700842206H1
cggacctactatccctactactactctactctatttacacggaagaacaaaaaactatccccctcccccaaaaaaaaccccaaagcggctcggttagggtttagttttgtaccatttcgtgtaatctaatttttcatccgtaaaaatctaattttgaggcggcgagatggcggagattcaggtgcagcatcagagtccggtgtcggcggctcctcctccaaacggcggcgtggcgaacgcccgaacaacgcgaa

SEQ ID NO: 68419 - DNA, 254 bp, Glycine max
  Clone ID: 700842207H1
ccagactgaagttctgcatttgctcgagtcgccagaagccctgaaagcaaaggtggcggaggcaatggacgtcctaagaaatgttgctcagcaacaggctggcggtactgcggatcagctggcttcattatctcttaatgacaaccttgtttcttaaggtttatattttggatttatttagtgacgatgggttgttattttcggcactggctctgatacagtttcaggttgcgtttgtttcgttagattagaca

SEQ ID NO: 68420 - DNA, 257 bp, Glycine max
  Clone ID: 700842208H1
ctcatctttctctcttctctctccacccaaaccctaactcccgaccctgttcccctctcgtatccgtcatgaaaggaggaaagtccaagaccgaatctaagagagccgatcccaaacttgctgtgaataagaagggagccgccaccaaggctaggaaacccgccggcaaggggaaggcagcgaaagaccctaacaagccaaagaggcctccaagtgctttcttcgttttcatggaggagttcaggaaggtattcaac

SEQ ID NO: 68421 - DNA, 256 bp, Glycine max
  Clone ID: 700842209H1
aggtgatcatactagtcaaataaccaaagaacacctagagcccaacttagaagggctcactgtagatgaggcaattcaaaacaagagattgttcctactagatcatcatgacccaatcatgccatatttgaggcgaataaatgcaacctccacaaaggcttatgctaccagaaccatccttttcctgaaaaatgacggaactttaaggccacttgccatagagttgagtttgccacatcctcagggagatcaatct

SEQ ID NO: 68422 - DNA, 255 bp, Glycine max
  Clone ID: 700842210H1
cgcgatactgataagagagataccaacaagaaaagaaaaaaagaagagttgagattccctttgaagaaaagatggcatcccataggcaaagctatgaagctggtcaaactaagggccgaactgaggaaaagacgaaccagacgatgggcaatattggagagaaggctcaagctgcaaaggagaagacccaggaaatggcccaagctgcaaaggagaagacccaacaaacagcccaagctgccaaggacaagactt

SEQ ID NO: 68423 - DNA, 257 bp, Glycine max
  Clone ID: 700842211H1
caaagacacaacccagaagacctagacaagaagaaccacgtgaaagaggatgcgagacaagaaacggggttgaggaaaatatctgcaccttgaagcttcacgagaacattgctcgcccttcacgcgctgacttctacaaccctaaagctggtcgcattagtaccctcaacagcctcaccctcccagccctccgccaattccaactcagtgcccaatatgttgtcctctacaagaatggaatttactctccacattgg

SEQ ID NO: 68424 - DNA, 257 bp, Glycine max
  Clone ID: 700842212H1
cgcacggcaagttccgtgccacgttgattaacgtggcaggtgtagcagtagcaaaaagaccagcgcatgcacatataacccaatgatatagtagtatatttctatgccacatcctttgtgttcaatttcaaatacgctcatcacataacaattgcagtgatggggtaccactattactactacggaacctacctttactttcatcacacacagacgaagccagataaatgccttgcccatttgccctggatcttgat

SEQ ID NO: 68425 - DNA, 258 bp, Glycine max
  Clone ID: 700842213H1
cgcttgataatgttgaagttgatccaaaatatgctgcattaagctctgtagcaacaaatgatgaagatgagggccccccagacctttcttctaaagatattggaatcatgaagaggcgcattgcaaatgttcttgaacctggggaaacggtcttgcaagccttaagaaggttaaaaggtaacagtgatagaaaggcaaaaatgtctgctgagactaagattgtatttgaccagctaactgaggatgctatgaagctga

SEQ ID NO: 68426 - DNA, 261 bp, Glycine max
  Clone ID: 700842215H1
caacaactatggcaagttatcaaaagcactacgatgatcagggtcgcaaggttgacgagtatggcaacgttgagaagcaaaccgacgaatacggcaaccctgttcatgctgctagtgtcacctatgtagccaccagaactgctgctggtggttacagtgatgacattaatcagcaacatgataccaccaatgcctacggcgtagacactggtagacagcattctagtggtggctacgatggtgacactaataaacatcatg

SEQ ID NO: 68427 - DNA, 261 bp, Glycine max
  Clone ID: 700842216H1
cattgatctttgaaaatgcagggaggaaagaaagctggagagtccatcaaggaaacagctgcaaacattggtgcttctgccaaggctggcatggagaaaaccaaggccactgtccaggagaaggcagaaagaatgacggcacgtgatccgatgcaaaaggagttggcaacccagaagaaagaggcaaagatgagccaggcagagctggacaagcaggcggcgcgtcagcataacacggcggcgaacaggctgccacggcag

SEQ ID NO: 68428 - DNA, 177 bp, Glycine max
  Clone ID: 700842217H1
ggtactgatttggggacaaccaattcatgtgttgccgtgagggtatgcctgtacgccttagttattgatcagtctaatggtgcacgaagatcaccatcggtgggtgctttcaacctgagaggggagctgctgtaggtaccccagcttagcgtcaagctgtaactaacgcacctgaca

SEQ ID NO: 68429 - DNA, 255 bp, Glycine max
  Clone ID: 700842218H1
gttcagtgtgtcgtttaaaaatgtcgcagttgctggataaagccaagaacttcgtgtcggagaaggtaaatgatatggccaagccggagggcagtgtcactgacgtggacttcaagcgcgtgagcaaagataatgtcgagtacttggccaaggtctctgttcgtaacccttattcaacttccatacccatttgtgagatcaactactctttcaaaagcgcatccagggagatagcatcagggaaaattccagacc

SEQ ID NO: 68430 - DNA, 254 bp, Glycine max
  Clone ID: 700842219H1
gcgaaagggaaatggaagcggaaaccttcatttgagttgccattgccaccaccgtttcccatggcgtctgtttggacactgcacttccgctctctttctcttcgcccatgcctctacattagtagcaattgcagtagcgctgccactagaaatcgcattagcatcagaaatcgaatctccaattggcgctcttgcgcccaacaactcaaacacgattccatcaattccattaccaaatttcaccatcaacttgt

SEQ ID NO: 68431 - DNA, 253 bp, Glycine max
  Clone ID: 700842220H1
attcctcagtccatttcacagcaaactgtttggaatcaaatggcaacagtgagaacaccattgaattttgattctagcaagcagagcttttgtcaattttctattgaccttctcggtggaggaattttagtggacaaaactggagattggatcacacttatacaaaattctccaattagtaacttgttgagagttgctgcttggaagaaaggctgtttaatggttaagattgtgatgtctgggaatgcagcag

SEQ ID NO: 68432 - DNA, 253 bp, Glycine max
  Clone ID: 700842221H1
caggtcttgatgatgttttaggttcctccagcagaactagaggccttgctactgactcatcctgctattttagatgccgctgttatcccgtaagtctttcagcaatttcatctaccacacctgattaataatgaatatatagaaggagaagagcacttgaatcggagcagttctgagtggtgaatgtttttgtaatgatcaggtatccagataaggaagctgggcagcatccaatggcatacgtggtgaggaa

SEQ ID NO: 68433 - DNA, 251 bp, Glycine max
  Clone ID: 700842222H1
cgatcttaaggcacagatctcaacacttgtagagaaaggcaaggagatgagcaaggcagagactgaggcaggggatgaaggtcctattgtgactgaagctgacatacagcatattgtctcatcctggactggtattcctgttgagaaagtctcaacagatgaatctgatcgcctcctgaagatggaagagactttacataagcgagtcattggtcaggatgaagcagttaaagccattagtcgggctatcc

SEQ ID NO: 68434 - DNA, 246 bp, Glycine max
  Clone ID: 700842223H1
ccattcctcagtctatttcacagcaaactgtttggaatcaaatggcaacagtgagaacaccattgaattttgatcctagcaagcagagcttttgtcaattttctattgaccttcttggtggaggaattttagtggacaaaactggagattggatttctcttatacaaaattctccaattagtaacttgttgagagttgctgcttggaagaaaggctgtttaatggttaagattgtgatgtctggga

SEQ ID NO: 68435 - DNA, 254 bp, Glycine max
  Clone ID: 700842224H1
ctgcactgcagagcttgtctcagtctcaacgaagtgccattcaactggtactgaagagatgagaatttagtgttatctttgagtgccgtctcaaggatgggttgataataccagagagtgaaacaaagtgatggttggaaaccaatattttccattgttcaggttggggaatctgtctgcagttctgaaaggtattctctttctgctgcagtgttcccccttgtatgtctattgattctttttattggatgtgt

SEQ ID NO: 68436 - DNA, 254 bp, Glycine max
  Clone ID: 700842225H1
cgaatcgaagtctttttcttcttcttcctcctcttacgaactcccgagatttctttgtcctcactcaagggttagggatgcggcggaacagtccagcatactacagtcctccgcggcgaggatacggtggcggtggccgaggaggagggtccggcaggaggggattcggtggaggcaggcgcagggacagcaatgggagcctcttggttcgtaacattcccctcgattgcagacccgaggagcttcgcgtccct

SEQ ID NO: 68437 - DNA, 254 bp, Glycine max
  Clone ID: 700842226H1
catctacatttcatcacaatcttcctcaatcatgtcttcagaaacaaaagcagaaacacaaactttgaccaccccctcttactcctcagatgttgacaatggtatagtgaaggatgtagtcctatggagaagaaagaaaataaatataagcgttcttgttgcggcaacagcggcatgggtgttgatggaagtgtttgaattcaacttcctcactctcatatcatgggtggccatactcggtcttgcttcaatat

SEQ ID NO: 68438 - DNA, 255 bp, Glycine max
  Clone ID: 700842227H1
ccgatactgataagagagataccaacaagaaaagaaaaaaagaagagttgagattccctttgaagaaaagatggcatcccataggcaaagctatgaagctggtcaaactaagggccgaactgaggaaaagacgaaccagacgatgggcaatattggagagaaggctcaagctgcaaaggagaagacccaggaaatggcccaagctgcaaaggagaagacccaacaaacagcccaagctgccaaggacaagacttg

SEQ ID NO: 68439 - DNA, 253 bp, Glycine max
  Clone ID: 700842228H1
ccaaagtaaagaacgtggatcacacccgtattgaatgttaatgtggacaggtcagaaagggcgtacagcagcaaaacaaaagacggttgaatcttggtagttgtggtcgtgacaggcactcgggctgacagccatcttagtgaggtagtatatttcgttgaagtagcgggtctcccccatctggtacttctcgttctagtcaacgaaggaacaatctttcgaggaataaccttttatgtagttggactaccag

SEQ ID NO: 68440 - DNA, 255 bp, Glycine max
  Clone ID: 700842229H1
cctgaagataccattcttcattggttccgaaaaggaacaaactccaagggcaggcaaacctttgtgaaggcgctggaaccctttgttaattggctggaggaggctgaagaggaggagtaagtgtggtggagttcagggctgaagaaattaccttgtctttcagctcttgtaccatttagctaagatatttggctcgaattctcttaaattcggttctgcctagtagtactgattatcttttaatttgtatttgtg

SEQ ID NO: 68441 - DNA, 260 bp, Glycine max
  Clone ID: 700842230H1
cgcaagatagcaaagatgacgcaggtgacgctgcacagaatgtcagtagattatgcacgtgatgcagtgcagtgagagatcgagtattctggtgatgcttctcacaagagcaaagaggcgtcggatcaggccattgcgacggctaagaagacccaagattcggtcggtgatgctgctcagagaagcaaaggggctgctgcatatgctagtgctgcggctcagaggtccaaagagtaggctggtgatgctagcacagagat

SEQ ID NO: 68442 - DNA, 259 bp, Glycine max
  Clone ID: 700842231H1
ctttgaatacattccttgtagtttatactgaaagatgggtttgaagatggcgttactgatcctaggcctttccctcatgctccttttggtctcctctgaggtggcatccacgaatacaaaagaggaggcaaatggagtggatgatgccaaatatcccggtggaagctatggagggggttacccaggtcatggcggtggcggttatcctggccatggcggtggcggttatcctggccatggcggtggtggtggctatcct

SEQ ID NO: 68443 - DNA, 256 bp, Glycine max
  Clone ID: 700842233H1
ctttgatataatatagaaagagacagagagagagagacagacaagaagaacaaagatgcaatcttcaaaggagaagctgaaaaacatgaccagtgctgccaaggagcaagtcgacatctataaagcaaaatagacgagaagacagagaaagcaacggcaagaacagaagaggagagggtgattacccatgaacgtgcaaaggcaaaggaagctgaagcaaagatggagctggctgaagcaaaagccaggcatgcag

SEQ ID NO: 68444 - DNA, 251 bp, Glycine max
  Clone ID: 700842234H1
cgaaaccacagccaagggaacgggcttggcggaatcagcggggaaagaagaccctgttgagcttgactctagtccgactttgtgaaatgacttgagaggtgtaggataagtgggagctggaaacagcgaaagtgaaataccactacttttaacgttattttacttattccgtgaatcggaagcggggcactgcccctctttttggacccaaggtcggcttcggccggtcgatccgggcggaagacattgtc

SEQ ID NO: 68445 - DNA, 233 bp, Glycine max
  Clone ID: 700842235H1
tatctcttcacgtagaacagctcagcagaaatgtcactgaaaggcatttaacagacattttcagtaactttagtgaggatctaagtgtggcgttggcactggatcgaactgtcactcttccaaaagggtatggatatgtgcagttcaagacacagaggggcggctgaaaaagcatcatagtacatggatggagcccaaacagatggccatgtcatcacggccagatttactct

SEQ ID NO: 68446 - DNA, 178 bp, Glycine max
  Clone ID: 700842236H1
gatagcaataaccagagcatgtcaatcccctagcagtatatgctgatgatatagcaaaagtagagtgaggttcagcttagataaatacacatactagaaggctcttgaggcaaagttctgcaatggtgttgaggtactctgctctgatggcactgatgcgctccttcgtcgtaatatg

SEQ ID NO: 68447 - DNA, 252 bp, Glycine max
  Clone ID: 700842237H1
ccacgaggcagtttatgcaaaggaaacaaagatgggtgaatatgcagattatgcgactcagaaggcgagggaaacgaagcagaaggctggggagtatacagactatgcggctcagaaagcaaaagacaccaaagactatgctgctgagaaggctaagaatgctaaagataccactgtgcagaaagctggagagtacaaggattataccgctgagaaggctaagaatgcgaaagataccactgtgcagaaagc

SEQ ID NO: 68448 - DNA, 251 bp, Glycine max
  Clone ID: 700842238H1
gcagggaggaaagaaagctggagagtccatcaaggaaacagctgcaaacattggtgcttctgccaaggctggcatggagaaaaccaaggccactgtccaggagaaggcagaaagaatgacggcacgtgatccgatgcaaaaggcgttggcaacccagaagaaagaggcaaagatgagccaggcagagctggacaagcaggcggcgcgtcagcataacacggcggcgaagaggctgccacggcagggcacat

SEQ ID NO: 68449 - DNA, 251 bp, Glycine max
  Clone ID: 700842239H1
ccaacacaaacacaagcacaaggacagtgatctctctttctatctttttgtctgtctctctgaacacgttgatggattccccctctcgcccctccgtcatcatcgtaggtgccggcatctccggtatcgcggcggcgaaggtgttggccgagaacggcatagaggacctggtgatcctggaggcttcggaccgcgtcggcggcaggatccgcaaggagagtttcggcggcgtgtcggtggagctcggtgcc

SEQ ID NO: 68450 - DNA, 252 bp, Glycine max
  Clone ID: 700842240H1
caaaattctccaattagtaacttgttgagagttgctgcttggaagaaaggctgtataatggtcaagattgtgatgtctgggaatgcagcagtcaaaaggagtgattgggcctcattggtacaagtgtttttaacaaacagcaacagtacagagcattttgatgcatgtaagtggacaaaatcagaaccacattcctgggaattgatcttcccaatagaggtatgtggtcctaataatggttttgaaatgtgg

SEQ ID NO: 68451 - DNA, 221 bp, Glycine max
  Clone ID: 700842241H1
attcggctcgagaagaacctaagtgagtaaccaagaaaggccttaattgctctttaaaaatgctcagtggagataaagctgttgagtccatcaaggtgttagttgtagatatatcatgcttctatcaatgcttgatatggaggcaatcaaggccactgtccagagaggacggctgactagacatgacggatacgtgatccgatgcaataaggagtttgcaa

SEQ ID NO: 68452 - DNA, 253 bp, Glycine max
  Clone ID: 700842242H1
gttacgccatggacgattcctctcaactcctccaagcagcttctgattttgttcactatccagggcctcacagcgctgattcctccagggactttctcaatcgttttccctctcccagttatcatcaatgcattccagactcagtgcgatatgcctggcctagctcatactcttgttgcatgccttgaaaggttattccatacgacgttgggtgcttctctgatcccacagtatatgcctttggttcaagttg

SEQ ID NO: 68453 - DNA, 253 bp, Glycine max
  Clone ID: 700841614H1
ctcgaggttggttctctgtctagggtctattgttaaaaaatgtcgtcgcagttaagccaagaactttgtgaaatgatatggccaagaactttgcttgatacccatctgtgagatcaactactctttcaaaagcgcatccagggagatagcagcagggacaatagcagacccaggatcattgaaggcaaaggacaagacaatgggggatgtggctgcatgttaaggtgccatagagcatattgatgagcttggc

SEQ ID NO: 68454 - DNA, 250 bp, Glycine max
  Clone ID: 700841616H1
ctgcagaaaatcccagccttcctcagccaggcattcggcagcaacaggacaacttctttcgcagtcaaggaatcactatggaaggaaacttctatgaagaagccaacatgcccaacaatcatcacatgtttgcaagagaggaaagtcaatttgaccggttcaaagctttgaatgcaccaccctttgagagcaatcacaacaataacttccatttgatgtttgggtccccttgtgatttggcatcctttga

SEQ ID NO: 68455 - DNA, 109 bp, Glycine max
  Clone ID: 700841617H1
aatgcggctcgaagatcggacaagttgaacttcgtgacgagcatgggaacccagttgaactaacagatgcatatgggaatccggtttggttaacggacgagaaaggcaa

SEQ ID NO: 68456 - DNA, 126 bp, Glycine max
  Clone ID: 700841618H1
tgttgtttggtctcttctctcttatccatggcatcaacgtttctcaccctaccaactcccttcctacacaaaaccaatgccatcagtttctctaacaagagaccctcatttttgcagaggagctct

SEQ ID NO: 68457 - DNA, 246 bp, Glycine max
  Clone ID: 700841619H1
gcaaaaagaaagaatcccaggcgaggagaaagatggaggggaaggagcaggatgtgtcgttgggagcgaacaagttccccgagagacagccgattgggacggcggcgcagagccaagacgacggcaaggactaccaggagccggcgccggcgccgctggttgacccgacggagtttacgtcatggtcgttttacagagcagggatagcagagtttgtggccacttttctgtttctctacatcaccg

SEQ ID NO: 68458 - DNA, 176 bp, Glycine max
  Clone ID: 700841621H1
gagaaagcttgaataatttttttcagatggttgctggacactttactggggaaactccacatctgataagtgcagcagccaaaggtttagcccgtttggcttatgagttctctgatcttgttttaactgccttcaaattgctcccaggcacacttactctcctgaggagtgataat

SEQ ID NO: 68459 - DNA, 246 bp, Glycine max
  Clone ID: 700841624H1
gtaaaatatccacaacaattggggcgtctgctaatcttgtgttcgcatataatacaggaatgcttcctgagatacaggcgacaatcaggcagccagtagtcaagaacatgatgaaagccctgtattttcagtttactgttggagttctgccattatatctggtaacctttgcaggatactgggcttatggatcttcaacagctacctatttgatgagtgatgtcaatggtccagtttgggctaagg

SEQ ID NO: 68460 - DNA, 249 bp, Glycine max
  Clone ID: 700841625H1
catggctagggttttggctcagtctgttaatgtccctggtctagtggctgagcataggcatggtcagcaaaacgggatcaggaaaattaaaaagatcgaccaaaatgatgagtgctttacggacaaatggattaagaatgtcaggtttctcagggcttcgtactttcaatcctttggatactatgttgagacctggcatagattttcattctaaggtatccattgcaacgtcttcgcggcaagcaagag

SEQ ID NO: 68461 - DNA, 246 bp, Glycine max
  Clone ID: 700841631H1
ggaaagagcaacatcagcatgatgagaacaaacccggtgtgatagggtccatgtttagagccgccaaggaagccgtggttgggaagcctcaccacgaggaagtttatgcaaaggaaacaaagatgggtgaatattcagattatgcgactcagaaggcgagggaaacgaagcagaaggctggggagtatacagactatgcggctcagaaagcaaaagaaaccaaagactatgctgctgagaaggcta

SEQ ID NO: 68462 - DNA, 134 bp, Glycine max
  Clone ID: 700841633H1
agaaaatcggaaagtccacgcgccgccccggctcgtcctccaaggcccgcgtctacgccgatgtcaacgtcgttcgccccaaggaatattgggactacgagtccctcaacgtccagtggggggagcaagatgat

SEQ ID NO: 68463 - DNA, 103 bp, Glycine max
  Clone ID: 700841634H1
catctataaagccaaaatagacgagaaggcagagaaagcaacggcaagaacagaagaggagagggtgatagcccatgagcacgcaaaggcaaaggaagctgga

SEQ ID NO: 68464 - DNA, 131 bp, Glycine max
  Clone ID: 700841635H1
ggatgaggcgccactcgatgtttccatttgcctgcatgcctttggtattgtggggtgtggttcgtttagtggtgtcaagtcttgcgaacgtgagggtgcatgagtggtaatcgggatgtttttgttgcacg

SEQ ID NO: 68465 - DNA, 244 bp, Glycine max
  Clone ID: 700841636H1
agaagaacctgttttcggaactaaccgacgacatcgttctgaacatcttctacaaactcgaagacgatcctcgccactgggctcgcttagcctgtgtctgcaccaaattctcttccctcgttagggatttctgttggaagaccaaatgctccctcaccatcccccaagacctcctctccgccgccgcctccgacccccctctctccctccacaaactctccttctgctgccccggcctccgcca

SEQ ID NO: 68466 - DNA, 241 bp, Glycine max
  Clone ID: 700841637H1
aatttccaccccctctagattttctctctaactggttttccttagatctctcacaatgacctttaatcttatgcttttgttctgtttggttgcagtgatcaacaatgttgttgttccaactagtgcaagacaactcatgagtaccaccactacttcaccagacgagacagaagtgatgatgaatattggcactgcaaatagagggcatgatgaaaaacatgatcatcaagtacaagtagat

SEQ ID NO: 68467 - DNA, 244 bp, Glycine max
  Clone ID: 700841640H1
gaggaaaaaggaatgagaagagaagaaataggagaagaaaataaacaatccagcctggaagagatttttaagtacagagctgaagctcaacggaaagtagaggcagagaaagcaagaccaatggaagaaacaaaactggaagctaaaggaagagaaaaagctgaaaccaaagagggtggtggtgaggaaaaaggaatgagaagagaagaaataggagaagaaaataaacaatccagcctggaag

SEQ ID NO: 68468 - DNA, 242 bp, Glycine max
  Clone ID: 700841642H1
cactcttcctttctctcgctccatctctccactcttatctcgttccctttcacaactcaaacaattcccaaaatcccacccttgtcccctctggtcctcctccttctccttctgcctccacacactccgcaagtccacttcccctattcgcgcctcttcttctttttctccctccatggctgcttcttctccgctaaacgacgccgtcgaaggcaatcctcttctgcagaacttcgacttcc

SEQ ID NO: 68469 - DNA, 240 bp, Glycine max
  Clone ID: 700841646H1
gctctacactggcgtcaatggcggcttcccgtcatcgaataatgccgccggcggtattgcgccgccgttggaggtggacgggctgccggagaattttgattggagagagaaaggagctgtcaccgacgttaagttacagggtagatgtggatcatgctgggctttcagcaccacaggatctatagaaggagccaattttcttgccaccggaaagctcgtcagtcttagtgaacaacagct

SEQ ID NO: 68470 - DNA, 235 bp, Glycine max
  Clone ID: 700841647H1
gagactcatacattgtgctgccaattatagtaactctctatttctctttccatctctcaagttctgaagaagaaacatgtgtggaggtgctatcatctcagacttcattggtgtgaagcgtggccgcaacctcgccgcgcaggaactatggtctgagcttgaccctttctctgacttccttggcttcgataccaccaattccaaaaaccaaccacccctgcagaaaattccagac

SEQ ID NO: 68471 - DNA, 255 bp, Glycine max
  Clone ID: 700841648H1
ttcggctcgagctaatttccctttttcctgccttgtcgttttgatccctcccccaacctaaacgacccctctcctcttccggaaccttcgccaccattctccgcccaattttcccgcgctttctcgaacctccgacgccactccggccaccgcagagtgaacaaggtcgtggaagatgagcaacgtgttcgagggttacgaacgccaatactgcgagctctcggcgaatctagcgaaaaagtgcactgccgctgg

SEQ ID NO: 68472 - DNA, 110 bp, Glycine max
  Clone ID: 700841649H1
cggaaagtagaggcagagaaagcaagaccaatggaagacacaaaactggaagctaaaggaagagaaaaagctgaaaccaaagagggtggtggtgaggaaaaaggaatgag

SEQ ID NO: 68473 - DNA, 240 bp, Glycine max
  Clone ID: 700841651H1
atgagatttcatggttcaagacagaagccaacaagtggggtatttcactttctgacgttgttcctcagcaggctaacaaaaactattgtgggttgctggaaagtttaatgagtccagacgcggaatatactgtggctattacagcattttgggctattgaaacggtgtatcaagagagctttgcccactgcattgaagaaggctccaaaaccccaccagaactgaaggagacttgtgtaa

SEQ ID NO: 68474 - DNA, 241 bp, Glycine max
  Clone ID: 700841652H1
gaagacattccaaaccatggaagcatccactttgtttgcaattcgtggatttacaatgccaaactcttcaaaagtgaccgcattttctttgccaaccagacatatcttccaagtgagacaccagctccactagtcaaatatagagaagaagagttgcataatttaagaggagatggaactggagaacgcaaagagtgggaaaggatctatgattatgatgtctacaatgatttaggtgatc

SEQ ID NO: 68475 - DNA, 242 bp, Glycine max
  Clone ID: 700841653H1
tttcaacctgcaagagtaattgatatgtgcttcttcaggtgtgataagagtcacaagtcccaactagaaaagcagcaataagatatattggggaaaacttcaattgattatgtgttacttagagatgctagtctttttgtggacatttacaaaagttttatgctaaatgttaaactatataacgtggaaagaggtgatataatttaaatagttctcagcaatgaactaaagcaaaggaagat

SEQ ID NO: 68476 - DNA, 240 bp, Glycine max
  Clone ID: 700841654H1
gtggcagaagacacttgaaaggattatgttcaagtatgtggagctttgcgtcgacatgcgaaaaggccgttttgcaaaagatggtcttattcagtatagaattatatgtcaacaagtgaacgttagttcactggaggaggtcataaagcattttatgcagctttctaccgagaaagctgaacaagcccgtagccaggcgcaggcactagaagaagcccttgatgttgatgatttagaggc

SEQ ID NO: 68477 - DNA, 239 bp, Glycine max
  Clone ID: 700841656H1
cctgccagtagtcatatgcttgtctcaaagattaagccatgcatgtgtaagtatgaactaattcagactgtgaaactgcgaatggctcattaaatcagttatagtttgtttgatggtatctactactcggataaccgtagtaattctagagctaatacgtgcaacaaaccccgacttctggaagggatgcatttattagatagaaggtcaacacaggctctgcctgttgctttgatgat

SEQ ID NO: 68478 - DNA, 240 bp, Glycine max
  Clone ID: 700841657H1
agaagactaaggactatgcaagtgatgcaactgatgctgcaaaaaagactaaagattatgctgctcagaagaccaaggattatgcaagtgatgcaactgatgctgcaaaaaagactaaggattatgctgcgcagaagaccaaggactatgccagtggtggtgcgcagaagaccaaggactatgccagtggtgctgcgcagaagaccaaggactatgcaagtgatgctgcgcagaggacca

SEQ ID NO: 68479 - DNA, 240 bp, Glycine max
  Clone ID: 700841658H1
agctaacttcaacacctttaattttctaaaagtaattcagcggctgaataccaagcggagaagatgagtcaggagcagccacggcgtcccaaaggccaaaaccccatcaaatacggcgacgtttttgtcgtctccggcgaccttgcacagaagcccgtcgcaccggaagatgctgccatgatgcaaagcgcggaaactcgagtgctcggacaaacccaacccggcggagcagcttccgtc

SEQ ID NO: 68480 - DNA, 237 bp, Glycine max
  Clone ID: 700841660H1
ggaaatcaggacaaagggtaattggagagcccgttgcctctgggttagcccttgatgaatcttggctttggcatcctgactttgagactgctgcaaagtatgtcatgagtccccctattaggaaacgaggacatgataaggcccttcaagctgccctttcaacaggagttttgcagctggtaggaactgatcattgtgcctttaattccacccagaaagctcttggaattgatgact

SEQ ID NO: 68481 - DNA, 239 bp, Glycine max
  Clone ID: 700841662H1
atcagatcttaacccctaagaaaagtatcgaaaaaagactcatagtccatcacccagcaagaaaaaagaaaatcgaagaggaagagcaaggacacaacacaaagaagcaaaagaagacatggcgttgcagtggctgattctcacttacgtggtcgcagctgaggctgccgtggccattctgctaacccttcccacgcccaaactcctaagggaccgtttcgcctctctcgtttccctca

SEQ ID NO: 68482 - DNA, 200 bp, Glycine max
  Clone ID: 700841663H1
gtattctcgtcattcggctcgagaaaatacacatttttatgtttctttttccctatatatataataataataataataataataataataataataattgttatttttaggtttggaattagtcaattaggcatggtttaactgggttgagggaaattgtgagtgtaaacattttgatacctatctatctggtttgaaat

SEQ ID NO: 68483 - DNA, 251 bp, Glycine max
  Clone ID: 700841664H1
tgctcatgagcatgaagtcgatggaactcctgatacttcaatgcggagaggaatcaacgatgaagaacattaaataattaaaactgaacccgtctttgtgcctgaaattaagaaaaggaaacgccttagccttagtcagcttaaagaggtgaaagaggagtcacatgggaagcaaagcagtagcaagcctaagagaaagaagcatgatagtagggatagatggtcagctgagaggtatcaattggctgagc

SEQ ID NO: 68484 - DNA, 121 bp, Glycine max
  Clone ID: 700841665H1
cccacactcacactcacgccactccattgagaaagttggttgcagcagcatgatggaggaagaagaagaccagcagaagcttccagattgcaacatgcagtaaagatgcagttagtttcga

SEQ ID NO: 68485 - DNA, 129 bp, Glycine max
  Clone ID: 700841666H1
atttaatgaaattaaatatttaaattaataaaattagtcgtgttttattcgattttttgaattggtttttttttacagtagctaatgctagtcaccgaacttagtcaatgagctagaatgggttataaa

SEQ ID NO: 68486 - DNA, 240 bp, Glycine max
  Clone ID: 700841670H1
gccaaaaacacagtctcttccaagctcggatacgctgacaacaacaccgaaacaactcaagcaagccatcaagagaacacacaaccatcaacaatctctttagcaacagctgcaatagccgataaagccgtctcagcaaaaaacaccgtagcttccaagctcggatatggcgacaacactgaaacaaaaacaactcaaaccactcaaacaaggaatcaattaaagaacacaggcaatgag

SEQ ID NO: 68487 - DNA, 237 bp, Glycine max
  Clone ID: 700841673H1
gcggggctaccgctgagtttaagcatatcaataagcggaggaaaagaaactaacaaggattcccttagtaacggcgagcgaaccgggaaaagcccaccatgaaaatcggtcgccctcggcgtccgaattgtagtctggagaagcgtcctcagtggcggaccgggcccaagtcccctggaagggggcgccagagagggtgagagccccgtcgtgcccggaccctgtcgcaccacgagg

SEQ ID NO: 68488 - DNA, 232 bp, Glycine max
  Clone ID: 700841677H1
gccggagaatgcaaaagtgaatgaagtgaaggcttctatggaaaatggggttcttactgttactgttcctaagaaagaggttaagaatcatgatgttaaggccatagaaatctctggttaagcagaagcaaatgttgttggtcttttttgtttgaagtcgtgtgcttttctttgttctaatatgatgtgagtgggagttgtgattgtacaaacaaataaaatagttgtataa

SEQ ID NO: 68489 - DNA, 236 bp, Glycine max
  Clone ID: 700841679H1
gcaaaggattctacccgccgctcgatgggaattgcgcttcaaggcgtctcgtagggctaatccgcctcacgagggtcaccaacggcacgtgcctttggggggccgaggccccctactgctggtcggcaaacggacggcgggcgcacgcgtcgcttctagcccggattctgacttagaggcgttcagtcataatccaacgcacggtagcttcgcgccactggcttttgaaccaagcg

SEQ ID NO: 68490 - DNA, 127 bp, Glycine max
  Clone ID: 700841681H1
cagcttctctctgactccttccgttacaaggaaattgagaatggaatgctgtgggaagttgaggggaagtgggttgttaaaggagcagttgatgtagacattggtgcaaacccttctgctgagggtg

SEQ ID NO: 68491 - DNA, 83 bp, Glycine max
  Clone ID: 700841682H1
gctaacttcaacacctttaattttctaaaagtaattcagcggctgaataccaagcggagaagatgagtcaggagcagccacgg

SEQ ID NO: 68492 - DNA, 237 bp, Glycine max
  Clone ID: 700841684H1
ctcattcgttcacatcatcacctcaacactccaatcttgcatatcctttgctttcacaatgctccatcagttcacactcttcgctccgattttttccggcggaaacaacgccggccgttgctcgtttgccggaaattcgtccgtccgtgacgtgaggtcgttgaggtttatgaagcaagcatcgggaagacaatcgaacaatgaacatggtgtttttagcgagacaatggatcgtgc

SEQ ID NO: 68493 - DNA, 61 bp, Glycine max
  Clone ID: 700841685H1
gtttttccataatttttcttccttccataatttttcaatagagtgcagcgcacagaatttt

SEQ ID NO: 68494 - DNA, 237 bp, Glycine max
  Clone ID: 700841686H1
tgcggcatagttgatagttggttgaagcgtgaaggaagggtccgcgcgccatggctggcatcacaaccttccccttcaaactctctcactgtcctctcttctctacttccgattccaaactcttcggccttcccctctccaatccctattccatcaaattcgacccttcttctctctccagtacctctctcccctacgtcaccgcccgctactacggcggcggcggcggcgcctctc

SEQ ID NO: 68495 - DNA, 233 bp, Glycine max
  Clone ID: 700841687H1
gcaaaatcactttgtcctggtgcatggtataggccatggtgcctggtgttggtacaagcttaagccactgttggaatccgccggccacaaagtcacagtccttgaccttgcagcttctggcatcgacacacacgacattgaagacatccacacattttctgagtattctaagcctttgttggatctcttggcgtcgcttgctcctaatgaaaaagtggtccttgtcgggcata

SEQ ID NO: 68496 - DNA, 232 bp, Glycine max
  Clone ID: 700841689H1
atttttatttttgtttatctttctcactttctctcttccgcttttgcttctgcttctgctttgtatctctgtaacatactttgcttaatatggcggctgagaagtcaaacattgcaaaagatgtgactgaattaattggcaaaactccattggtatatctcaaccacatcgtggatggttgtgttgccaaagttgctgccaagcttgaaatgatggaaccttgctccagtgt

SEQ ID NO: 68497 - DNA, 135 bp, Glycine max
  Clone ID: 700841690H1
aacaaaactaaattttgagtgttacttgtgtgaacatattcaacttgtttgacttgctaattcattggctgttttcagttatggctattcaatcttgaggagatttttgcctgaagagaaggttgaggctgtgaa

SEQ ID NO: 68498 - DNA, 233 bp, Glycine max
  Clone ID: 700841694H1
cgatccatctacacggtcaaaaagaaaatcgttttccttgagaaaatacggacacagagacagagagagggagagagagaaggaaatgggaagcacaaagtttctattgttggtgatggtgtttctcgcagtgtgcgtggggacatgcaggccttggggtgatgatgtagttgaagatggagaggaggccaaacattttgcagcaaaagccgtgcatgatgtcgaggaagaga

SEQ ID NO: 68499 - DNA, 236 bp, Glycine max
  Clone ID: 700841695H1
gttgttggctacaacaaagacgaagaagcaaaacaagcctgctgcattgcttcacaaatctgtgatgaagaaggagtacaggaggatggcaaaggctgttgaaaatcaggtggcagaaaattactacaggcccgatctcaagaaggccgcccttgcaaggttgagtgctgttcacagaagcctcaaagttgccaagtctggtgtcaagaagaggaatagacaggccgtgaaggtcg

SEQ ID NO: 68500 - DNA, 267 bp, Glycine max
  Clone ID: 700841702H1
attttggcatcctatgagtttttgtgtagtaaatgcttaaactatttgagttatactcttttggtggtatttgttttgaagaaacacagataagggattggaagagaagttgagacctgaagaatttcgcttagcacccaaggtgttgaatctacttagcgggaagatcccgcttagcatgaggaagttgcttggagaacttgaagtcacgtgaagacgtgcttagcacgaaatcacgaaaactcatagcagagtgatgtttaagtg

SEQ ID NO: 68501 - DNA, 258 bp, Glycine max
  Clone ID: 700841705H1
ctcactcatctcacacttcctcttcctctctcactcagattcagcaattttctattttcttctctcatggcttcagattccaaaaaggatttccctgctgatgacaaagctggaacagcagagaataaagcatccaaagatgaaacgtcatctaaagattctccagcagcacaaagagctactacagctacttctggacctgcaactggttttccaggcaacccttttgatttctctgcaatgtctggcctgctcaat

SEQ ID NO: 68502 - DNA, 256 bp, Glycine max
  Clone ID: 700841707H1
gtaccatcacacgttgcacttcccactaccctttttaccacatgtcctccctcatgcaaaccccacctcttccaaaccgccaacgttaacccttcccttctcctttttaatcacacttccattcccatgcacaccccacacacatcctactaaaaaacattgcccttgttctttcaaagttaccaaacacaagtacacaacacaacagcaacatatggcgtctgaacaattggctcgcagagagaacaccaccacc

SEQ ID NO: 68503 - DNA, 252 bp, Glycine max
  Clone ID: 700841709H1
gcttcatcggctccgagccgaagccgagcaacgttcgcttcgccaccatccccaacgttatccctttccaatcttagatagcctccgatatccccgctttcttcaaagccgtcgtcaccaacatggaacctcccttcgaccacctcctccgccgccttcaccctcccgtcaccgccctcgtcgccgacgtcgagcttcacttccctgtcgccgtcgcccgccgcagtaatattccggtcgcgctgctttgga

SEQ ID NO: 68504 - DNA, 252 bp, Glycine max
  Clone ID: 700841710H1
gcgcgacaagaagcggcggcgttacccaaaccttgggcttcaagccgtaccgtcacctgaaaactctaaccgaccatgaaaacgcggtgtcgtgcgtgaagttctcgaacgatggaaccctcctagcctcggcctccctggacaaaaccctaatcatatggtcctccgccaccctcaccctctgccaccgcctcgtgggccactccgagggcatctccgacctagcctggtcctccgactcccactacatct

SEQ ID NO: 68505 - DNA, 250 bp, Glycine max
  Clone ID: 700841711H1
ggaaggtggaatccaagtggatcaactgtttttccacgaccctgatgggttcatgatcgagatatgcaactgtgatagcctccctgtgattcccttagttggtgaggtggcaagatcatgttcccttgtgaatcttgagaagatgcagaatcagcagcagatacagaaaatgctccagcaactttgatgagccttttctgttatgttatgtgatcagagcatcctcacggatcacgaggacttgttgctt

SEQ ID NO: 68506 - DNA, 250 bp, Glycine max
  Clone ID: 700841712H1
ccaaagtttggatgagtttctgaacaatattaattcaggaaaggccgtgattgtgtctctttctccccagtcaagggcttctattgcttttcattttggcatttctccaattcagggttctcacttgaaataaatttgggaagaaaaatccaaatttcttcttgtttcccctggctgaaagtcaaactcttgccattgcaggctttcaaaaagctgacaagattttttaaatccttgggagtgaaggcaa

SEQ ID NO: 68507 - DNA, 182 bp, Glycine max
  Clone ID: 700841713H1
gtgtttttctactaaaaaaacactgctttattacgctgataaaaaatacacataaacaaccactgttgcaattacaaagatacgggtgaagtcggttggatatcagaaccaaaagcatcaaggcagagacaatccatccccatggcattgatgatgactccgatgactccacatctgcatca

SEQ ID NO: 68508 - DNA, 256 bp, Glycine max
  Clone ID: 700841714H1
gatgaattccatgcaaacggcgtcatcccaaggggagccaatgcttctttcattactttaattcctaaagtgtccgaccctcattgcctcaatgatttcagacctatcttgctcataggttgcgtttacaagatagtggctaagttactagccaacagagtgaagagggtaatgccatctattatagacgaatgccaatccgctttcatagctggaagacacctcttgcacagcgtagtcatcaccaatgtagtgg

SEQ ID NO: 68509 - DNA, 262 bp, Glycine max
  Clone ID: 700841718H1
gaaaaacatggcaagtgctgccaaggaacaagtcgacatctataaagccaaaatagacgagaaggcagagaaagcaacggcaagaacagaagaggagagggtgatagcccatgagcacgcaaaggcaaaggaagctggagcaaagatggagctgcatgaagctaaagcaaggcatgcagcagagaagctaagcgccaaccaatcacattatggtctccaccatggccacaacaaccctcccttagtaggaacaactcagact

SEQ ID NO: 68510 - DNA, 260 bp, Glycine max
  Clone ID: 700841719H1
cactcaccgccgtatcgttcacactgaaccaatccaaaccccactctctctctctccgccgcaaacgacccttctccggggcggcgccaccgtacaacccccgatttaactaaaggagcaacagaaggagctgcttggttacaaatggcggccaccgcaagcaacaatgacgtcgccgccgccaacgacggtcccgtgatgagccttatcaacaagcgcctccgcgctctccgcaagaagctgaaccgcatcctcgccat

SEQ ID NO: 68511 - DNA, 252 bp, Glycine max
  Clone ID: 700841722H1
aaacactctagaatttgcatgcactgttcttcatacaatggcattacgcgagcttcttatgatggggatattgctgctggtatgtcttgctaaggtttcatctgatgttaacatgcaaaaggaagaagatgaagaacttcgctttcctaatcaccctcttatcgtgagagacgggaacagaaggctaatgcaagacatagattgcggaggattgtgcaagacaaggtgcagtgcccattcgaggccaaacgt

SEQ ID NO: 68512 - DNA, 250 bp, Glycine max
  Clone ID: 700841723H1
ctcgagccgcgtctataccgtaaaattgattttcgacggaatgaaaaaaacatatatggtagaatcgtaaccatagaatatgaccctaatcgaaatgcatacatttgtctcatacactatggggatggtgagaaaaaatatattttacaccccagaggggctataattggagataccattgtttttggtacagaagttcctataaaaatgggaaatgccctacctttgaccgatatgcccttaggcacgg

SEQ ID NO: 68513 - DNA, 80 bp, Glycine max
  Clone ID: 700841724H1
ggcggagagagaaaaagagagaggtagagaaaagcgaagagtctctctcttcctatctctctctttcaatgtcagggcac

SEQ ID NO: 68514 - DNA, 253 bp, Glycine max
  Clone ID: 700841728H1
cacgatactgataagagagataccaacaagaaaagaaaaaaagaagagttgagattccctttgaagaaaagatggcatcccataggcaaagctatgaagctggtcaaactaagggccgaactgagaaaatgagtaaccttccttatgttttaggaaaagacgaaccagacgatgggcaatattggagagaaggctcaagctgcaaaggagaagacccaggaaatggcccaagctgcaaaggagaagacccaac

SEQ ID NO: 68515 - DNA, 255 bp, Glycine max
  Clone ID: 700841729H1
acaaaatctagcactctcttcagccttgttgctccttttggtcggttttgcaacctcagacatcaatcaagacaaagcagaatgtacggataaacttcttggtctagctggttgtctttcctatgttggtggcgaagcaaagtccccaccatggattgttgctctggtatcaaagaggttattaacaagagcaagaggtgcctctgcatcctcatcaaggatcgtgatgatcctagtcttggcctcaagatcaac

SEQ ID NO: 68516 - DNA, 257 bp, Glycine max
  Clone ID: 700841730H1
cccaagtccaatgggaatgctgccaagagtccgaatccgaagaagaaggaatccggtagcaggaatgtggcttctgctaagaaaccgaagcctgaaacaaatccggagccggcgccggtgccgtccttggagtttaaggagtctgaaaggatggagattgatcaaaagcctgatggtggtgatgcatgtttgtttttgcgcgaattggttcgatacaaagagggtgccaatgtttctaggctggatgaggatgatgt

SEQ ID NO: 68517 - DNA, 262 bp, Glycine max
  Clone ID: 700841731H1
aaaaccaaaacagtaaagctaacttcaacacctttaattttctaaaagtaattcagcggctgaataccaagcggagaagatgagtcaggagcagccacggcgtcccaaaggccaaaaccccatcaaatacggcgacgtttttgtcgtctccggcgaccttgcacagaagcccgtcgcaccggaagatgctgccatgatgcaaagcgcggaaactcgagtgctcggacaaacccaacccggcggagcagcttccgtcatgcaa

SEQ ID NO: 68518 - DNA, 112 bp, Glycine max
  Clone ID: 700841732H1
ggtaccaaagctagggaaagaggctgcagtagaggccataaaggagtggggccagccaaagtcaaagattacccacttgatcttctgcaccactagcggtgtggacatgcct

SEQ ID NO: 68519 - DNA, 143 bp, Glycine max
  Clone ID: 700841733H1
ggcacaccaccaccaacaagcaaatggctgctaccattggcgttggcgccgcaaaagccatatcaatcgcaatagcagttaggcacctccgaacaaaaccttacgcagcagcaacaacaacagcacttgctcttctttcactc

SEQ ID NO: 68520 - DNA, 258 bp, Glycine max
  Clone ID: 700841735H1
gtaaagatgggaaagaagccgcagagtcatggacagaatgggctaaagagaaactcactgaaggtcttggcttcaaacatgatcaagaatccaccactaagaaagtctctgactatgccggtgatgctgctcagaaatcaaaggactatgccggtgacactgctcagaaaaccaaggactatgccggtgacactgctcagaaaaccaaggactatgccggtgacactgcacagacatcaaaggactatgccggtgatg

SEQ ID NO: 68521 - DNA, 254 bp, Glycine max
  Clone ID: 700841736H1
cttccacgcaaccatgcttgactgtgcctcctaccattccaaacacgcttgctactccttttctcaatgtttcgtcaccaagaagttaccttgtgaagaaaaagcatgtgaaatttagcaaaaaaatcagtgctgctgctgttgcaacaacaacaacaactgaggaaattcaagagtacaagcttccatcatgggctaagtttgaaattgggagggctgctgtctattggaaaaccatgaatggcctccctcct

SEQ ID NO: 68522 - DNA, 252 bp, Glycine max
  Clone ID: 700841737H1
ctccaaagagtttgcctatggatacatcggtttatcgacaagcaattttacattcaaaatctggacttggcagtgcaggattaaatcaaggagttacaggtcttccgttgaagggttggcctctagcatctggaattgatcaactaagacctaatttgggtgtccaaattccgaagcccaatttgacagcccagaatcaatttgttttggcatcacaacagcaacaggtcttggcacaggctcaggcacaaa

SEQ ID NO: 68523 - DNA, 248 bp, Glycine max
  Clone ID: 700841740H1
ctctccttcgcacgtgtttcgccccgtgccggttcggccgattgctgaaacggcgtcgttgcaagacgatgccgacgatgccggacccgcgacttcgctgtcgctgtctcttcccggtgtggagtctgcggaaataccaaatcgcgcaactacggtgccggtgatgccggtgaataccgttgcggctccggcaccggttccggcggaggttggattgggagcgttgaatttgagtggagagtttatgg

SEQ ID NO: 68524 - DNA, 249 bp, Glycine max
  Clone ID: 700841741H1
ctccgcaccagtttcaccgcacgaatatcttgttgtttggagcgatccgagaaaaactctgtaaacatgttggtttaccaggacctccttacaggtgatgagcttctctctgactccttccgttacaaggaaattgagaatggaatgctgtgggaagttgaggggaagtgggttgttaaaggagcagttgatgtagacattggtgcaaacccttctgctgagggtggaggagaagatgagggagttgat

SEQ ID NO: 68525 - DNA, 250 bp, Glycine max
  Clone ID: 700841743H1
gatagatagagtgatacacatcacattttctcaaagtaatttattaattaataaataaatggcggcggcggcggcagtgacggtgctactcccacctaggattccgaccgccaccaacgttacccgctgctctgctttgccttctctgcctcctcgcggcaccaacactaaaaccactttgctcttatcttccctcaaccacttctcagtgtcccgaaaatcttctctgcttcagaccagagcttcttca

SEQ ID NO: 68526 - DNA, 253 bp, Glycine max
  Clone ID: 700841745H1
tctcgagccgaatcggctcgagatatcagagcagaaggtggctcacttggcattgaagccgttggggaggaacaatgcaattgatggaacgtgtggagttggaacgaaagaaccccagcttattttcgcttctgcagacagtgagtcttatattgtatacttaggatcacattctcatggcccaaacccttcagcaagtgatcttgagtctgcaacgaattcccattacaaattattaggctcacacttgggg

SEQ ID NO: 68527 - DNA, 246 bp, Glycine max
  Clone ID: 700841748H1
gcagatattttcgccgagtggaaccgaggggaacttgagaccttcttaattgaaattaccgcagatatttttaaagtgaaggatgaagatggtgaagggtttttggtggataagattttggataagaccgggatgaaggggaccgggaaatggacggtgcagcaggcggcggactttcgatagcggcgcccacgattgcggcttcgttggattgccggtacttgagtgggttgaaggaggagaggg

SEQ ID NO: 68528 - DNA, 253 bp, Glycine max
  Clone ID: 700841750H1
gtgcaatctgtgttgatgcgttccacgttttgctgtcacttgaacctttcacccgtcatgattatgaagggcttctctgctcccatttcatcatatgtttcgcctcgagctcaagccgttactgaggcaccggcgcggattggctttttgggcctcggaatcatgggctccccaatggcccacaatctccttaaagctggtgttgatctcactgtttggaataggaccaagagcaagtgtgaccctctaatca

SEQ ID NO: 68529 - DNA, 255 bp, Glycine max
  Clone ID: 700841751H1
cgatgatcagggtcgcaaggttgacgagtatggcaacgttgagaagcaaaccgacgaatacggcaaccctgttcatgctgctagtgtcacctatgtagccaccagaactgctgctggtggttacagtgatgacattaataagcaacatgataccaccaatgcctacggcgtagacactggtagacagcattctagtggtggctacgatggtgacactaataaacatcatggaactactggtggctataatgatga

SEQ ID NO: 68530 - DNA, 79 bp, Glycine max
  Clone ID: 700841753H1
agtgttttgacttgtttggtgtgcaaaagtaaaaatgtggtttcttggttggaaaggggcatcagggttctcagcctct

SEQ ID NO: 68531 - DNA, 244 bp, Glycine max
  Clone ID: 700841754H1
tttgactttaattataaatttactgacaaaatgaggagaatcaagattcctcttcctcccgtggatgattagatacaagtaattgaggatgttgacaaggacagaagatatgctattgatgcctcaattgtgcgtattatgaagagtagaaaagttttgggctaccaacaattagtcgttgagtgtgttgagcagttaggtcgcatgtttaagcctgacgtcaaggctattaaaaagcggattg

SEQ ID NO: 68532 - DNA, 247 bp, Glycine max
  Clone ID: 700841755H1
ctcgagccgggggctttgtctgtcaaactaacaccagaagatatggcggaacttgagtcccttgctgctctagatgctgtcaagggtgatagatatgcggatgatggtttatctacgtggaaggactctgaaactccaccactttcttcttggaaagctgcatgatgaagtgcattgcttaatgcttatacatgtgatccttaaatatttgatggtgctactttaagaaacagattagtccgaggga

SEQ ID NO: 68533 - DNA, 248 bp, Glycine max
  Clone ID: 700841757H1
ctagttcttactaaatatgagtaacttatacaaactactccaaaaatttatgaaaattacacttgacatctgttgttttaatacatttctttgcttcaaacaaagttaactaatgggaacacttaaaaagactaaaaaatcccttttctttttgttgtgagaaaccctcccctctaatgggcagtacccttttttgcaacaccccgcactcagcactcacaccaatattgtgttcgattctagaaaaa

SEQ ID NO: 68534 - DNA, 247 bp, Glycine max
  Clone ID: 700841758H1
ggtggataagcctgcggctagtcgttctgaatcagctgagatatatgttttggggcttaaatataaggcccctgccaaaattgatccgcggcttcttgatgtgaagcatctctttcagggatctgtggaaccgcagcctaatgtggtggatgtacttagagatagtaagcaaaaaatgcaccgtgatggctatgaagatggagacacaactttgaggaagctgtcttcagctgcaaatttcatttgg

SEQ ID NO: 68535 - DNA, 249 bp, Glycine max
  Clone ID: 700841759H1
cgtcggtgagggcttcatggacgcgcttcagcggtccaggaactcgttcaagcttctcttcgtttacttgcattcccccgatcaccccgatacgccgtccttttgccagaggacgctctgctctgagaccattgcggcgtttgtgaacgagaatttcgtgtgctggggtggcagcattcgcgccagcgaagggtttaagatgagtaacagcttgaaggcttctcgcttccccttctgcgccctcgtcat

SEQ ID NO: 68536 - DNA, 249 bp, Glycine max
  Clone ID: 700841760H1
gtgagaacaagaaaaagaggcgcaagatgagtggtagggtttctgggaaggtgaagtggttcaatgatcagaaggggtttggattcataagccctgacgatggcagcgacgatctcttcgttcaccaatctcagatcaaatctgacggtttccgaagcctcgccgaaggagagtccgttgagttcgccattgaatctgaatctgacggacgcgcgaaggctgttgatgtcactggccccgacggcgcca

SEQ ID NO: 68537 - DNA, 252 bp, Glycine max
  Clone ID: 700841761H1
gcttgaagagaaagagaaacaaaggagagaagcattgttgggtagagctgctgctgaaccagctcctcctgcccgtccattggaatcggatctgctgctcctgcggcagctgccgccgccgccgctgctccaacacctgggaaatacgtacctaagttcaggcgagagagaaccgaaagcgcaggagctgcgcctcctccagaaacagatcgctggaacagtagcagcaggccagatggtgacaggtggcga

SEQ ID NO: 68538 - DNA, 259 bp, Glycine max
  Clone ID: 700841762H1
tctcgagccgagttcggctcgagcaggtgagaacaccattgaatttacattctagcaagcagaccttttgtcaattttctattgaccttctcggtggaggaattttagtggacaaaactggagattggatcacacttatacaaaattctccaattagtaacttgttgagagttgctgcttggaagaaaggctgtttaatggttaaaattgtgatgtctgggaatgcagcagtcaaaaggagtgattgggcctcattggt

SEQ ID NO: 68539 - DNA, 87 bp, Glycine max
  Clone ID: 700841769H1
gaaaaataaaccgattgcaaggaatattcattttgaacatgatcaacaggtaacgaggttgggtttctcactttgaaagttgcttcc

SEQ ID NO: 68540 - DNA, 245 bp, Glycine max
  Clone ID: 700841772H1
cgaggtagaagacagaagcatggtgaagatgtggtgcattctttaaaggtttccttggaggacgtttataatggcacaacaaagaaactatctctttctagaaacatattatgcccaaaatgtaaagggaaaggttcaaaaagtggaactgctggtaggtgttttggatgcaaaggcactggtatgaaaattacaagaaggcagattggactaggcatgattcaacaaatgcaacatgtctgtcc

SEQ ID NO: 68541 - DNA, 246 bp, Glycine max
  Clone ID: 700841773H1
cctcagtctagtgatctttattgtggttgcttctttgaaaactggtgcatctatcccaaacttatcaaatctcactttaattgcaaacctcccaacatctccacctgttctaggagttcaacgaaatttatatatgttgatgaagagcttgattattttgctttttaagtacacatcaccggttccaaaatcaaccatgaatgcttgcaaagaggcttgtataggaaactcctcaacttttccttt

SEQ ID NO: 68542 - DNA, 248 bp, Glycine max
  Clone ID: 700841774H1
tcaagccgcagagtcatggacagaatgggctaaagagaaactcagtgaaggtcttggcttcaaacatgatcaggaatccaaagaatccaccactaacgaagtctctgattatgccactgacactgcacagaaatccaaggattatgcaactgacactgctcagaaatcaaaggactatgcaggtgatgctgctcagaaatcaaaggactacgcaggtgatgctgctcagagaaccaaagactatgcca

SEQ ID NO: 68543 - DNA, 247 bp, Glycine max
  Clone ID: 700841776H1
caaacagcatccgcggcagcgacggtaaccctccaacaacaacacttccgctgcgaaaaatgtctctggtggcgaacgaggatttccagcacattctgcgtgtgctgaacaccaacgtggatgggaagcagaagataatgttcgcaatgacctccatcaagggtattggaaggagattcgccaacatcgcttgcaagaaggctgatgttgacatgaacaaaagggctggtgagttgactgctgctga

SEQ ID NO: 68544 - DNA, 251 bp, Glycine max
  Clone ID: 700841777H1
aaaacattgcccttgttctttcaaagttaccaaacacaagtacacaacacaacagcaacatatggcgtctgaacaattggctcgcagagagaacaccaccaccgagaaggagattcacgttgagaaacacagggttcccaagatggccacccacttcgagcaccttgcggacaagctaaagaatctgacatcaccgctgggaaggatactccgcagggtagcatagaagccttgcaagctggagagagggt

SEQ ID NO: 68545 - DNA, 254 bp, Glycine max
  Clone ID: 700841778H1
ctcaccattgtgttgagacacactctctttctttcttgttattctctttctctttcatcatttggcttaaaacacacacacaaaaggtggccaaaatgagcagtgtctgtgccaagcagcacaagttttacccctctcactaactcctttctccaaagaaaaccctcagagaaattgacatccctccaaggaagctcctcactcgccgtgccgccgcatgcgtcggcggcaccgacgtgtactcctccgaggag

SEQ ID NO: 68546 - DNA, 254 bp, Glycine max
  Clone ID: 700841779H1
atagccaaggccctcctgctatcattccttcccagcctggatttggctatcaacaacaacttatgcctggtatgaggccaggtgcagctcctgtgccgaattttttcgtgccaatggttcagcagggacaacagggacagcgtcccggtggaaggcgtccaggtgcagttcagcagtcccagcagccagttcctatgatgccacagcagatgcttcctaggggacgtgtctatcgttatcctcctggtaggggt

SEQ ID NO: 68547 - DNA, 258 bp, Glycine max
  Clone ID: 700841781H1
gccagaaatagaccgattttatatcacctttcaattcgaattagcaaaagcaatgtctccttgcataatatggattccaaacatccatgatctggatgtgaatgagtcgaattacttatccctcggtcttttagtgaactatctctccagggattgtgaaagatgttctactagaaatattcttgttattgcttcgactcatattccccaaaaagtagatccggctctaatagctccgaataaattaaatacatgcat

SEQ ID NO: 68548 - DNA, 247 bp, Glycine max
  Clone ID: 700841784H1
ggcttttcagcaaatcaggcttggggcaaaagcaaatttatgccaccatgcattttttatgcatatactccagatcaacctgccttatctggtgaaactaagaaatcatcagctaagaagaaaatgtgtttaatctttgtttgcgttccggttagtcctggtaaaagcagattgatatggtgcttcccaagaaactttggattgtggatggacaaaattgtaccacgatggatatttcatgtgggac

SEQ ID NO: 68549 - DNA, 245 bp, Glycine max
  Clone ID: 700841785H1
gttctcttctgtgttagtgagagaaagttctctctgcttctctctcttagactcaaaaccctattgcgtgctttgcactcgaccccgattatggccaacagtaacctccctcgaagaatcatcaaggaaacgcagcgtttgctcagtgagccagcacctggaattagtgcgtccccttcggaagacaatatgcggtatttcaatgtgatgatccttggcccaactcagtcgccttatgaaggggg

SEQ ID NO: 68550 - DNA, 245 bp, Glycine max
  Clone ID: 700841787H1
tccaaatacagaaatatcattttccgagacaatcccatcttccatttccatcttcaatatttcttctcatcgagaagcttcgcgaacgaaaacaaagaaccctagacagatccattccatagccatgtcaggtgttggccctctatctcaggattgggaacccgtcgtcctccgcaagaaggctcccaccgccgccgccaagaaggacgagaaagccgtcaacgccgcccggcgctccggcgcgg

SEQ ID NO: 68551 - DNA, 242 bp, Glycine max
  Clone ID: 700841788H1
ggcggcgaagggacaagagagggtgctgagggaactggacgaggttctggacaagtacagctttctgtcgaaggagaaactgaagggggttggaggttgggaagttttggatggttcagtttcgacggagacatcgccggattagttacaaggatcggaagagaggaaggaagtggtggaggagcgttctggggcatactggacgacgttggcgccaaacgtggaggattacagtgggagtt

SEQ ID NO: 68552 - DNA, 245 bp, Glycine max
  Clone ID: 700841789H1
cagatgcatatgggaatccggtttggttaacggacgagaaaggcaaaccggtgcacctcaccggtgtggcaaccactgcacacaaatgtttgcaagagaatgacacaccacaagagcttcctcactccaagagctcaagctctagctcttctgaggatgaagagcatggagggaggagcaagaagggactgaaggataaaatagaagagaagttgccaggaggagaagaaggagagggaaaggag

SEQ ID NO: 68553 - DNA, 244 bp, Glycine max
  Clone ID: 700841790H1
ggcggggctaccgctgagtttaagcatatcaataagcggaggaaaagaaactaacaaggattcccttagtaacggcgagcgaaccgggaaaagcccaccatgaaaatcggtcgccctcggcgtccgaattgtagtctggagaagcgtcctcagtggcggaccgggcccaagtcccctggaagggggcgccagagagggtgagagccccgtcgtgcccggaccctgtcgcaccacgaggcgctgt

SEQ ID NO: 68554 - DNA, 244 bp, Glycine max
  Clone ID: 700841792H1
attcgcacatggcaaaagcatctggaaattgtgttttgtgccttgggttcgagtaagagagcgttaactgaaggccatttccggagggcaagaaaggcactgatggatttagcattggcaatgcttgatgaaaaagagtctggatcagttttttctcagcgtaataggtcttttgggcgacataactctggcaaggatcatcactcctcatcagggcattcaagatcgcattcgtggagtgtct

SEQ ID NO: 68555 - DNA, 174 bp, Glycine max
  Clone ID: 700841793H1
cactgcttccaataacgacatatatttaatatatggcaccttgacttgttcccaacggtgtgaaattcagtggtgggttcaaggaaaccgggaacctttcaaagcgttgctaagtgaaaattctcggcggaaaaggtgactaagtgaaaagggttgttgggcttggcaaaaggg

SEQ ID NO: 68556 - DNA, 257 bp, Glycine max
  unsure (1)..(257): unsure at all n locations
  Clone ID: 700841795H1
tgttcttcatagttcagtgtgtcgtttaaaaatgtcgcagttgctggataaagccaagaacttcgtgtcggagaaggtaaatgatatggccaagccggaggcangtgtcactgacgtggacttcaagcgcgtgagcaaagataatgtcgagtacttggccaaggtctctgttcgtaacccttattcaacttccatacccatttgtgagatcaactactctttcaaaagcgcatccagggagatagcatcagggaaaa

SEQ ID NO: 68557 - DNA, 263 bp, Glycine max
  Clone ID: 700841796H1
aaagaaaggaaataattgatctttgaaaatgcagggaggaaagaaagctggagagtccatcaaggaaacagctgcaaacattggtgcttctgccaaggctggcatggagaaaaccaaggccactgtccaggagaaggcagaaagaatgacggcacgtgatccgatgcaaaaggagttggcaacccagaagaaagaggcaaagatgagccaggcagagctggacaagcaggcggcgcgtcagcataacacggcggcgaacaggc

SEQ ID NO: 68558 - DNA, 250 bp, Glycine max
  Clone ID: 700841801H1
aagctctccattcttagagaagttgaagaagaagggatacgaggttctttatatggttgatgccattgatgaatatgctgttggtcagctcaaggaatttgagggcaagaagcttgtctctgccaccaaggaagggctcaagcttgacgagagtgaagatgagaagaagaagcaagaagagttgaaggagaagtttgacaacctctgcaaggtgatcaaggatgtttgggtgacaaggttgagaaggttg

SEQ ID NO: 68559 - DNA, 259 bp, Glycine max
  Clone ID: 700841802H1
cacacaactacaagaaagaacttccttataaccaaaaccaacaacaactatggcaagttatcagaagcactacgatgatcaaggtcgcaaggtcgacgagtatggcaatgttgagaggcaaactgacgaatatggcaacccggttcatgccactagtgtcacttatgtagccaccaaaagtgttggtggctacaatgatgacgctaataagcaacatgaattactggtgtctatcccgagaaagacccggtagacatca

SEQ ID NO: 68560 - DNA, 257 bp, Glycine max
  Clone ID: 700841803H1
cacacaactactacaagtacttccttacaatcaaaaccaacaacaactatggcaagttatcaaaagcactacgatgatcagggtcgcaaggttgacgagtatggcaacgttgagaagcaaaccgacgaatacggcaaccctgttcatgctgctagtgtcacctatgtagccaccagaactgctgctggtggttacagtgatgacattaataagcacatgataccaccaatgcctacggcgtagacactggtagacag

SEQ ID NO: 68561 - DNA, 251 bp, Glycine max
  unsure (1)..(251): unsure at all n locations
  Clone ID: 700841804H1
gttttcattaatcaagaacgaaagttgggggctcgaagacgatcagataccgtcctagtctcaaccataaacgatgccgaccagggatcagcggatgttgcttttaggactccgctggcaccttatgagaaatcaaagtctttgggttccggggggagtatggtcgcaaggctgaaacttaaaggaattgacggaagggcaccaccaggagtgggcctgcggcttaatttgactcaacacgggganactta

SEQ ID NO: 68562 - DNA, 255 bp, Glycine max
  Clone ID: 700841805H1
ccaacctcttcagtgatctttgattagtactaagctaaaccatttcttattccctcaaaatcaaaacctttttctttctagctatttcccttttcaaatcatgccacctaacatcaccaccgttgttgccaatgtcaccaccgagcaattacccaaggctcgtggaggaagtgggcgtgccttcgtgacctttcttgctgggaacggtgattcgtaaagggtgtcgtgggtttggccaaaggactgagaaaggcc

SEQ ID NO: 68563 - DNA, 254 bp, Glycine max
  Clone ID: 700841806H1
gaaagaggtgccccataagcaaagccatagtagcataatagcaatgcctcaagaacgacaatgcgcaattcaaagttgtgtgcagcgtctcttctcatagcacgtaccaagtccctccaacttcaccatcaccgccacgtgcgtcactgcttccccttcttcttcttaaaccgcaatcccactcttcaggtttcacccttggctctcttcctgtgcaacgcgaaatcactcatcaccacgcgcctcttctccag

SEQ ID NO: 68564 - DNA, 247 bp, Glycine max
  Clone ID: 700841808H1
aaagatcttagtgcaagtaattaacatggaatctcagcaagcaaaccgtgaagaacttgatgagaaggcaaggcaaggtgaaactgttgttcctggaggaactggtgggaagagtcttgaggctcaagaacatcttgctgaaggaaggagccgtggagggcagacgaggaagcagcagctagggtcagaggggtatcatgaaatgggaccaaaggagggcagacaaggaaggaacagtggggagaga

SEQ ID NO: 68565 - DNA, 245 bp, Glycine max
  Clone ID: 700841810H1
tgatttggtctttagatagcattcttgctgacttgggtagccagcaaaatgtggccaagggttccaaaaaggccgtgcaacaagtgtcctcaaaatctcaggttgcaatgttcgttgttttagcaatggtattgcgtcggaagcctgatgctcttatatctgtattgcccacattgagggagagtacaaagtatcaagggctagtaagcttccagtcattgtatggatgatagctcaggctgctg

SEQ ID NO: 68566 - DNA, 245 bp, Glycine max
  Clone ID: 700841811H1
ggccttcgggatcggagtaatgattaacagggacagtcgggggcattcgtatttcatagtcagaggtgaaattcttggatttatgaaagacgaacaactgcgaaagcatttgccaaggatgttttcattaatcaagaacgaaagttgggggctcgaagacgatcagataccgtcctagtctcaaccataaacgatgccgaccagggtcagcggatgttatccctctagatcgcgggcggccgccg

SEQ ID NO: 68567 - DNA, 248 bp, Glycine max
  Clone ID: 700841812H1
gttcagtgtgtcgtttaaaaatgtcgcagttgctggataaagccaagaacttcgtgtcggagaaggtaaatgatatggccaagccggagggaagtgtcactgacgtggacttcaagcgcgtgagcaaagataatgtcgagtacttggccaaggtctctgttcgtaacccttattcaacttccatacccatttgtgagatcaactacctttcaaaagcgcatccagggagatagcatcagggaaaattc

SEQ ID NO: 68568 - DNA, 247 bp, Glycine max
  Clone ID: 700841813H1
tattttttcatgcagaaacgagggatcatctaattaaaccagctttcatcagggtgtgggtgatttattgtaagctttttcttattatcttcgattgtgtttacacgtgtgtgttaaaggtggcgaatcctaaagagaagggaaatgaggttgatgacaataaggaattgatattattccatgaagggataatgaacaaccctacttgtcaaggctatttccgggtttgaatagggagagggagatg

SEQ ID NO: 68569 - DNA, 249 bp, Glycine max
  Clone ID: 700841814H1
tttcccctcactggtaaaatcttgcatggttcttggaacgttttgtgtcaaaatcaaattcctccatctcttaaaatgcctcactttcaatatttcaatagtttcacaaactcaaccaagaccacctttctctattcaatccaaatcaaatcaacaccaagtttcattgtcgagtgccacaatcatcaatgacaaagaccaaacatcgaagttgctggctctgctatcaaaattcaccaagatgtgtga

SEQ ID NO: 68570 - DNA, 256 bp, Glycine max
  Clone ID: 700841816H1
agcgaaaagataggtacaatgcttccatatgttcgctgcccatttcggaggtctatcaacagaggacttggaaacaggagatatcttcttgaaagcaatgacttttttgctcttagagatttgattgatctttccagaggagtctttgctgaatatccgtttttggaactggtctgataaatctctctctgccctatggattttcatgatggaccaatgtagtatcttcatgcacattgtgtatcgaggaaaatca

SEQ ID NO: 68571 - DNA, 266 bp, Glycine max
  Clone ID: 700841817H1
gaattggccacagacggattagttgtgggggagggtgagaaggttttgggtgatgaagctgcagggcaagaagctgatactagctcggagaagggtgttgatggacatgaagcaagcaaccaggtgcctggtggttctgacagtgcagcagaaaatggtagtcaaaaggaggaggtgccaccagctgaggagacaaaagttcacagagtccagttatggaagatataagatcatctcttcgaactattgaggatatgatgagtgtt

SEQ ID NO: 68572 - DNA, 261 bp, Glycine max
  Clone ID: 700841818H1
gacagaaagatccaacactcactcttccaacttccactctctctctttccgaccaaaatgtcgatcaacagcgaatctacgccgccaccggtgatcggaaaaatcgggccttacaccgtcttcatgacgccgccgtctacacccaaacccgccgacgacaaccccgttaccaccaccaagatcgcacctccgccgcctcagattcccaaagccgttcttcccccaaacccaaacctctctccgattccgacgattccgttt

SEQ ID NO: 68573 - DNA, 256 bp, Glycine max
  Clone ID: 700841819H1
cgagctagctagctagcaagcaagcacagagatggaggcaaagcgaggccatgccctcatgtgcttggcacgtgtttcactcttcctctgcgctctaaccctatccgctgctcacggaagcaccacggttcaagacatcgcgagaaagttgaaactcggggacaacgagcttctgcgcacggagaagaagttcaaggttttcatggagaattcgggaggagctactccacagaggaggagtatttgcgccgtttgg

SEQ ID NO: 68574 - DNA, 251 bp, Glycine max
  Clone ID: 700841821H1
ggcgcagaggcacagaagccccttgacttgaccgaggagcttctgaaatggaccaacagcaccatctccatgatgatgctcggcgaggctgaggagatcagagacatcgctcgcgaggttcttaagatctttggcgaatacagactcactgacttcatctggccattgaagcatctcaaggttggatagtatgcgaagaggatcgacgcatcttgaacaagttcgaccctgtcgttgaaagggtcatcaag

SEQ ID NO: 68575 - DNA, 249 bp, Glycine max
  Clone ID: 700841822H1
caaaaatggtgaaaaaggcaaaaggagatttgtttctggggatggtgaagagatgacattgattccgggaaccagcgttgaagaggcttacaacaagctaatagttgaacttgagaaaagtgttcctacattggttggcattgaatgtcccaaggatgagaaacttcctcgtcgcaaaatttttgataaacctaagacgcgctgcttcctattctccctatggagtttaatcttgtggttcgtcagaag

SEQ ID NO: 68576 - DNA, 246 bp, Glycine max
  Clone ID: 700841823H1
gaaaaagttgtattgaaattttcacaagaggaatttcttacagcttggtcaactcaggtgcgtcctgcaacaactctgttggctgatgggtgtccatatttgtatgctatggtgcatgatagttcattgtctacaataccaggtgattttgtcattggtgttaagttgacaaccataaacaatatgtgtgcatatgggcttaatctggtatttcagttctcgtcttttgggcaccattcctcagtc

SEQ ID NO: 68577 - DNA, 245 bp, Glycine max
  Clone ID: 700841824H1
gccaaaatgtgtttacttgcagttccatcttccctcccctgttaattcaccaaataaataccaaattgcatcacggattagttgatccctcctttgaaaacaaaacgatgccgattttcaaaaccccgttcaacggctactccgtaaagttcagccccttctacgagaaccgcctggccgtggccaccgcccagaacttcggcatctgggcaacggccgcctccacgtcctcgacctctccccgg

SEQ ID NO: 68578 - DNA, 235 bp, Glycine max
  Clone ID: 700841826H1
aaaggatgagatcaattcagaagtactttttgtattttttatttatttaaagaaatgttaaaatgtattttattttttctttattaaatgtatttattttaaaatttgtttttttagaacagacagaattcaataggtctaattcagaaccgtccgataaaatcgaatattatctaccttagagatgtatcaaggataaataatcggaccggtccttagatttttttaaggcttt

SEQ ID NO: 68579 - DNA, 244 bp, Glycine max
  Clone ID: 700841827H1
ggacagactcgtgaacatgctctgctttcattcacccttggtgtgaaacagatgatttgctgctgtaacaaaatggatgctactacacccaagtattccaaggccaggtatgatgaaattgtgaaggaagtctcttcctacttgaagaaagtaggatacaaccctgacaagattccttttgttcctatctctggttttgagggaacaacatgattgagaggtccacaaaccttgactggtacaa

SEQ ID NO: 68580 - DNA, 246 bp, Glycine max
  Clone ID: 700841829H1
ccttgtgttgcttcttttctccctcttaggtctctcttctagttccagcatatcaactcatcgttccatattggaccttgacctaaccaagtttaccacacagaaacaggtgtcttcactgttccaactatggaagagtgagcatggacgtgtctaccataaccacgaagaagaggcaaagagacttgagattttcaagaatacttgaactatatcagggacatgaatgcaaacagaaaatcaccc

SEQ ID NO: 68581 - DNA, 251 bp, Glycine max
  Clone ID: 700841831H1
ctaagtgagaaacaaagaaaggaaataattgatctttgaaaatgcagggaggaaagaaagctggagagtccatcaaggaaacagctgcaaacattggtgctactgccaaggctggcatggagaaaaccaaggccactgtccaggagaaggcagaaagaatgacggcacgtgatccgatgcaaaaggagttggcaacccagaagaaagagcaaagatgagccaggcagagctggacaagcaggcggcgcgtc

SEQ ID NO: 68582 - DNA, 216 bp, Glycine max
  Clone ID: 700841832H1
ggggaagctttcattgaatatatcaatgcccgagacttttatctgaagcagctatgttccactctcaaagttaaaccagaagaagtgacaacaaggatagaaaacctattagaggagttaagggcagtgagaaatgaaaattctgctgttcatgcaaaagcagcaatctacaaagcttcagtcattgcaagcaaagtaatgttggtggggaatcaa

SEQ ID NO: 68583 - DNA, 263 bp, Glycine max
  Clone ID: 700841833H1
cacaagttgaacttcgtgacgagcatgggaacccagttgaactaacagatgcatatgggaatccggtttggttaacggacgagaaaggcaacccggtgcacctcacggctgtggcaaccaatgcacacaaatctatgcttcagaatgacaccccacaagagcttcctcactccaagagttcaagctcgtctgaggatgaagggcatggagagaggatcgaagggactgaaggataacatagaagaaaagttaccagctggaga

SEQ ID NO: 68584 - DNA, 258 bp, Glycine max
  Clone ID: 700841834H1
ggccaaaaaaccatctcaacctcaggaagctgaagagaggccatcagaaggaattggcgaaactgtgaggcagtatgcacaaaaaccaaagccaagtgaaagaaaccctcagaaggagggaaccggaagcatcgtgtttacagcaataggcgaaacagtaagcagtgccggtgagaaggtaaagaaaccgtttaaaaacactatgggaggagagtgaaggaggaggagggaaagaagaggggaagagtgtcattggtt

SEQ ID NO: 68585 - DNA, 255 bp, Glycine max
  Clone ID: 700841835H1
cacaaaagtgttccacttgagtgaaaagtagtgtgttaagaactaaacaatttttcaatggcgtccaagaaacaagaggagcgagctgaggcagctgcgaaagttgctgccaaagaactcgaacaagtcaacagagaaagaagagaccgtgatttcggtgttgttgctgaacaacaacaacaacatcatcaggaagatcaacaaaaacgtgtgtaatcgggtccatgtttaaggcggtgcaagacacctacgaga

SEQ ID NO: 68586 - DNA, 248 bp, Glycine max
  Clone ID: 700841838H1
acgagatcgtgaatgaagaaattgaaagcgcgcgcgagaatttggagtggaaactgacgatggagaacggattcgctcgcatggacgacgaggttcatcgccggagccagagcaaccagaccttcacctgcaggtgtgagctccagactcctcactgcgacgccgtcggatccaccgccgtcgtcgccgtcgtcacgccggacaaatcgtcgtctctaactgcggcgactcccgcgccgtcctctgcc

SEQ ID NO: 68587 - DNA, 242 bp, Glycine max
  Clone ID: 700841839H1
cggctcgagaaagccttcaagatggactgtgacaaatctgaatgatgttaactggaatttgtatctgaatactctattttggaatctcaactattgggactccataagtactcttgctggagacatagaaaatccgaagaaaactcttccgaaggctttgttttatgctgtgatcctagtagttctagggtacttctttcctctctaattggtatggtgctgttcctgtcaaccgtgagttg

SEQ ID NO: 68588 - DNA, 242 bp, Glycine max
  Clone ID: 700841840H1
aaaacagtaaagctaacttcaacacctttaattttctaaaagtaattcagccgctgaataccaagcggagaagatgagtcaggagcagccacggcgtcccaaaggccaaaaccccatcaaatacggcgacgtttttgtcgtctccggcgaccttgcacagaagcccgtcgcaccggaagatgctgccatgatgcaaagcgcggaactcgagtgctcggacaaacccaaccggcggagcagct

SEQ ID NO: 68589 - DNA, 240 bp, Glycine max
  Clone ID: 700841841H1
tgcagaccgagctagctagctagcaagcaagcacagagatggaggcaaagcgaggccatgccctcatgtgcttggcacgtgtttcactcttcctctgcgctctaaccctatccgctgctcacggaagcaccacggttcaagacatcgcgagaaagttgaaactcggggacaacgagcttctgcgcacggagaagaagttcaagttttcatggagaattacgggaggagctactccacaga

SEQ ID NO: 68590 - DNA, 240 bp, Glycine max
  Clone ID: 700841842H1
aaaacacttgctccattattattttctcattcattcgttcatcatggttcggttcagcaacaacgtgatcggactcctgaacttcctgaccttcctcctctccatcccgatcctggtggccggagtgtggctgagcaagcagggcgccaccgagtgcgagcggtggctggagaagccggtgatcgcactcggcgtcttcccatgctcgtctcactcgccggcctcttcggcgcgtgctgt

SEQ ID NO: 68591 - DNA, 242 bp, Glycine max
  Clone ID: 700841846H1
cgcagaaaaagaaaaaagcgatcatagtttcacttcggccttatccagtttagggtttcggttctctaccctatctttcacgtatcgaaaccttaaatttacgatcaggtctgagcaatctggttggtagaacctttggtcttagtgagtcaagttttatgtctgaattagacgatcaaattcctactgccttcgatcctttgctgatgcaaatgctgatgactcgggtgctgggtcaaagg

SEQ ID NO: 68592 - DNA, 243 bp, Glycine max
  Clone ID: 700841847H1
ttccttgacaatctaattctgcaaaaatggcaagcaataaggagtctaagttcccagcacagagccagaaaactcagccaggaaaagaacatgtaatgaatccactcccacaagccacaaatcctgatcacaaggccgccaataaactccagggaaaggtggcgttggtgacaggaggtgactcaggaattggcagagcggtttcctgtgtttcgcaaaagagggtgcaacgtggcctttaca

SEQ ID NO: 68593 - DNA, 249 bp, Glycine max
  Clone ID: 700841848H1
gtggaatacgaacctgcgtggaagctgtcttactggttgaattgttcaaacatcctcatttgttgctgttgcaaataagaaattccatatataaacttcctggtggccgattaaggccaggtgaatcagatactgatgggttgaagcgtaactggcaaggaagctctctgtgaatgaagatggggacgggtcagaatgggaggtggggaatgccttggaatgtggtggaggcctgattttgaaacatta

SEQ ID NO: 68594 - DNA, 247 bp, Glycine max
  Clone ID: 700841849H1
ctcatctcccacaccaaccccttcgcaccctcctccgaagacgaaccctcccaaaccctagactctctttccaccacctcttccccacaacaccctctctccaacgaagaaacaacagaagaagaatccgactccaaccataacaccatctctactcctcttttccgtttcaacagtgacggcgctgcttcctctgttcgctcttctgttaactccttaacagcagcagttatcgttccacaagcag

SEQ ID NO: 68595 - DNA, 250 bp, Glycine max
  Clone ID: 700841850H1
ggattaggtgttgcgcagtcgcaggcatggccatggctttggtgagcctcaacaccattcatacatcgccttcttctttttcgttttcatctcccaaaccttattcttcctccaactatgcaccacctctcaccctccttccacgatttcggaggcacctcgttcgtatggctcccgacgaggagaagatgactcgccgttcccctctcgattccccatcgagtgggaaaggcctaagcctggacgaaga

SEQ ID NO: 68596 - DNA, 251 bp, Glycine max
  Clone ID: 700841851H1
cgcacaggcatcaggtgagtttgttgtgatttgaatggagggaagtggaggtggcggtggcagtggcggtggttcaccttctgcacctgtgaagcaatacttgcaggaattctcgaagctttttcagtactatctggataaatccactccccatgccctctacagatggattgggactttcgtgattgcatccatctacgttctgcgcgggattatttgcaggggttttacattgtctcctacggcctcgg

SEQ ID NO: 68597 - DNA, 250 bp, Glycine max
  Clone ID: 700841852H1
aaaaatatattttacaccccagaggggctataattggagataccattgtttctggtacagaagttcctataaaaatgggaaatgccctacctttgaccgatatgcccttaggcacggcaatacataacatagaaatcacactcggaaagggtggacaattagctagagcagcaggtgctgtagcgaaactaattgcaaaagaggggaatcggccacattaaaattaccttctggggaggtccgtttgata

SEQ ID NO: 68598 - DNA, 244 bp, Glycine max
  Clone ID: 700841853H1
gaagagagaacaacatgtcaagcaattcagatgcagcagcagcgacggtgcatgctcatggccgtttggccatgctcgccgctcacctcctcccctctcaactcactcatcacggcgccctccaccctctccatctctcctcccagttgccgccgccgcccaacctcgccggcactttgaccgtcgtcgacgaaaggaccggcacaagtaccagcttcatgtctccaaagaaggcactgtcaaa

SEQ ID NO: 68599 - DNA, 241 bp, Glycine max
  Clone ID: 700841856H1
caagtacttccttacaatcaaaaccaacaacaactatggcaagttatcaaaagcactacgatgatcagggtcgcaaggttgacgagtatggcaacgttgagaagcaaaccgacgaatacggcaaccctgttcatgctgctagtgtcacctatgtagccaccagaactgctgctggtggttacagtgatgacattaataagaacatgataccaccaatgcctacggcgtagacactggtaga

SEQ ID NO: 68600 - DNA, 241 bp, Glycine max
  Clone ID: 700841857H1
agacgagctagtggggctactgttaccatacaagaagcaagaggtgttcctggggagatgacagttgaaatcagtggaactgcttctcaagtccaaacagcacagcaactaatacagaattttatggctgaagctgcagctgcagctgcagctaccagcacagccgcaaacaactgtgcctgctgcagaccaaggatacattcttaccctgcccatggttctgtctatgcctctcctcctt

SEQ ID NO: 68601 - DNA, 241 bp, Glycine max
  Clone ID: 700841858H1
ttccagatccacgaaatccattttcattgaagccaggttccatctctgcgcttacttctaacttaaaagcatctgaagtggataaatcatcaagcataagtctggccatagctggggcacaagcagcagccactcagttctcaaagaaggatgagaattcccatagtactgcttggaacaatgcacctactaacatgaatctaataatgaggatacagaagttgcaagatcttataatcta

SEQ ID NO: 68602 - DNA, 242 bp, Glycine max
  Clone ID: 700841859H1
gaacgggaggaggagtcgaagaggctaagacttcagaaaataaccgaagaagcggaacaaagaaggcttgccactgagtatgaacagagaaagaatcagaggatccttagggagatagaggagagagaaaatgaagaagcacaagctttactccaggaagctgaaaagcgtattaaaaagaagggaaagaaaccaatcataagggggtaagttgaagtctgcctttcgttaaactcctgatt

SEQ ID NO: 68603 - DNA, 241 bp, Glycine max
  Clone ID: 700841861H1
aaggaaataattgatctttgaaaatgcagggaggaaagaaagctggagagtccatcaaggaaacagctgcaaacattggtgcttctgccaaggctggcatggagaaaaccaaggccactgtccaggagaaggcagaaagaatgacggcacgtgatccgatgcaaaaggagttggcaacccagaagaaagaggcaaagatggccaggcagagctggacaagcaggcggcgcgtcagcataac

SEQ ID NO: 68604 - DNA, 221 bp, Glycine max
  Clone ID: 700841862H1
tcttcttctaatctgcatgttatgttcaagttctgttcatcttttgaaatcatagataatattctgaaagaatctgattttcttattcaggtattcttcccctttgttcctatttgacagtagaacaggagggacaatgatacctgttagagtttgttagctagttttctgttatctgttagtttccatcaacttaatttatacttcagtttttgtttttc

SEQ ID NO: 68605 - DNA, 244 bp, Glycine max
  Clone ID: 700841863H1
caagtacttccttacaatcaaaaccaacaacaactatggcaagttatcaaaagcactacgatgatcagggtcgcaaggttgacgagtatggcaacgttgagaagcaaaccgacgaatacggcaaccctgttcatgctgctagtgtcacctatgtagccaccagaactgctgctggtggttacagtgatgacattaataagcaactgataccaccaatgcctacggcgtagacactggtagacag

SEQ ID NO: 68606 - DNA, 163 bp, Glycine max
  Clone ID: 700841864H1
ctcgagccgaatcggctcgagcacttctacctctaatctaggaataggaaaaagatgggcagcactagtgcgagtgcccataggctatcgtcgatggtcagcgtgtccccgaattgcaattgctcatcgatgacgcttatgaagacgtcggcgatggcgatgg

SEQ ID NO: 68607 - DNA, 258 bp, Glycine max
  Clone ID: 700841865H1
gtatcgaggtcgaataagaccaacagaatagtcgcggaagctactcaaggtcttacttacagggacgccggcgtggacatcgacgccggctccgaactcgtgcgcaggatagcgaagatggcgccagggattggaggcttcggtggtttattccctctcggtgactcgtacctcgttgctggtaccgatggcgtgggaacgaaggtgatgcttccttcgaaactggaatccacgatactattgggattgacctggttg

SEQ ID NO: 68608 - DNA, 251 bp, Glycine max
  Clone ID: 700841866H1
aggcaacatgggaacatcggtggcccttactatggaaccaacaccgcagacaccggtactggtcccagaagtggaaccacgggcggcaccggttatggaggcactggtggcactgattatggaacaactggtggcactggttatggaagtggaactgggtatggagtcaacactgggggtgcgcacactgaagcaggatataggaaggacatcgtcagcatgaccaatctcatggtgatcagaacgagtag

SEQ ID NO: 68609 - DNA, 249 bp, Glycine max
  Clone ID: 700841867H1
cagatagtgaaatcctaagattgtttagttggaagatggaggcagtggaatcaatagcggttccggaaccggacgaagacgatccttcatcgacgcttctggatctctcgagttaccagctccacgaccttgactcggtcgagttgccacccagcctcaccgagttggacctcaccgcgaatcgcttgtccacgctggacccgcgatagggaacctctcccatctcaagaagctctccctccgccaaaa

SEQ ID NO: 68610 - DNA, 243 bp, Glycine max
  Clone ID: 700841870H1
aaagaacttccttataaccaaaaccaacaacaactatggcaagttatcagaagcactacgatgatcagggtcgcaaggtcgacgagtatggcaatgttgagaggcaaactgacgaatatggcaacccggttcatgccactagtgtcacttatgtagccaccaaaagtgttggtggctacaatgatgacgctaataagcaacagatattactggtgtctatcccgagaaagacaccggtagaca

SEQ ID NO: 68611 - DNA, 235 bp, Glycine max
  Clone ID: 700841874H1
gttgaagaacatgtttagatccatgctccaagtagtacttggtggcagtgctgctgctaatggttcaaacattgaacatgatgaaagttcatcatcatcatgggaaaggagggtgtcaataactcagtacaagtcattgtgccacagccacgacataggaggaacaagtatggctatggtggagtgctgcgtttgttgtgtcgttttgaagccaatcaagaggtcagtgagttgc

SEQ ID NO: 68612 - DNA, 238 bp, Glycine max
  Clone ID: 700841875H1
aatttccattgcctccgcttccacctcgcaaccatgatcatcccggagaagaaccgcaaggagatctgcaaatacctcttccaagagggagtttgcttcgcgaagaaggacttcaatttggccaagcaccctgagatcgacgtgccgaatctgcaggtgattaagctgatgcagagtttcaagtctcgcgagtacgtggagaaacttttgcttggatgcactattactggttcctcac

SEQ ID NO: 68613 - DNA, 239 bp, Glycine max
  Clone ID: 700841876H1
ggcacaattcctacctgactgggaatcagctgagcagcgattgcagtgatgtgccaatcataaaggctttgcaacgaggtgtgcgagtaattgaactagatttatggccaaattcaactaaagatgatatcgacgtagttcatggaaggacacttactgctcctgtctcacttatccaatgtttaaagtccataaaaggtatgcttttgctaaatctgactacccagtcatcataactt

SEQ ID NO: 68614 - DNA, 238 bp, Glycine max
  Clone ID: 700841877H1
caactctctttttcttccaaaagggaaaacgaatctcaaacttcacaagtgtttgaggcgccatggcggatcggttgacgcgtattgccatcgtcagcaacgacaggtgcaagcccaaaaagtgccgccaggagtgcaagaagagttgctccgtcgtcagaaccgggaggttgtgtattgaggttacttcctcgtccagattgctttcatttcggaggaattgtgtattggatgcggt

SEQ ID NO: 68615 - DNA, 242 bp, Glycine max
  unsure (1)..(242): unsure at all n locations
  Clone ID: 700841879H1
gcatttcgttactttcatttgttgtgcaatcttacaagttccaaacttctctattttgttattatttgttctcacttctcacacatacagattcccgncttttatattatcatggcttctaaggtggtttcggttttggttatagcgatgatgttgtttgccatgaactgtcactgcactattcacccccacatgccttcaccaaagaggaaggtcacgattttcaggagtctaaagccaag

SEQ ID NO: 68616 - DNA, 95 bp, Glycine max
  Clone ID: 700841880H1
gcattgcatttcgttactttcatttgttgtgcaatcttacaagttccaaacttctctattttgttattatttgttctcacttctcacacatacag

SEQ ID NO: 68617 - DNA, 248 bp, Glycine max
  Clone ID: 700841883H1
ggaaaaacgaagttgaagaaagggaaaggctcgttgaagagggacttcgacggatccctcattctccccatgggtggccacggaggtgacgtcgtgctctacgccgacgagtccaaagacacgctgctggagtttcacaacaaaggccgctaccacgccaaacgcggtggcaacgttgatgccatgggcgttttgacttcgatgctcgcgatggacttgctgcaccgacgctgcgtattgctgttcct

SEQ ID NO: 68618 - DNA, 241 bp, Glycine max
  Clone ID: 700841886H1
aaaatatcctatatacgtaggtgggaacaggggaaggggtcagatttatcttgacgggagcaagagtaataataatgtgtataatgctacagcagcgggtatggtaaaaaaaatcatacgaaaagaaaaagggggatacgaaataactatagtggatgcattggatgggcgtgaagtgattgatattatacctccaggacagaacttcttgtttcagaaggtgaatctatcaaacttgatc

SEQ ID NO: 68619 - DNA, 237 bp, Glycine max
  Clone ID: 700841887H1
aatggctgaagcacaactacgagaccagcatggcaaccctgtcccactcaccgatcaatacggtaatccggttatcttaactgacgagcgcggtaatcccgtccaactcactggtgtcgctaccaccgctaccggcacagcaggttctgggtttgggtcctatggtaccggtgcttacggtggtggtgcaagtgcaccaccgttgcagatcttttggcaacccaaccaaggagtggc

SEQ ID NO: 68620 - DNA, 237 bp, Glycine max
  Clone ID: 700841888H1
gaaaaattgatgcgtgaaaggacacacctgctgttggcttgttgttcaaggatggcaatttgtaagaaagatgtttggagagttgaatgtggaatcccttctggatttccgctcacagttatttgcaatagcatttttaatgagatgctcattagatatagctatgaaaaattactgcgccaggctaaagctccaagatgtttttgcaatccttcaaaaattttgtttctttgtgtg

SEQ ID NO: 68621 - DNA, 234 bp, Glycine max
  Clone ID: 700841889H1
gcttggtaaagtttccatctttcttcgtcctcctcttcttttttctatctgatcactttctgtatcacttgccatgtcatgatttttatgtttctcacaaatcacgattggttctgattagacctacatttttctgggtttgcgggtaaaagctcctttgggttcaagttgttacagtgttaaatttgaggggatcatatttcttggttctgaaggccaccgttatggctgtac

SEQ ID NO: 68622 - DNA, 115 bp, Glycine max
  Clone ID: 700841890H1
cggaagcgaaccccaaaagaggagagaaagcagaagacacactcgagaaatttctcacatagggtttggatttttcgagcaatcttctctctccgccacttcacctcacgcgatc

SEQ ID NO: 68623 - DNA, 236 bp, Glycine max
  Clone ID: 700841891H1
cggctccgttaggttttccttccgcgtgtttgctcggaactactcctccactcatcgtttaaaatgtctgacgtggaagagtttcgttgcttcattggtggccttgcatggtcaacgtctgatagaaagttaaaggatacatttgaaaagtttggcaagcttattgaggcaaaggtggttgttgacagtttctctggcgttctcgtggttttggatttgtcacatttgatgacaag

SEQ ID NO: 68624 - DNA, 237 bp, Glycine max
  Clone ID: 700841892H1
ccggtcgtactcataaccgcatcaggtctccaaggtgaacagcctctggtcgatggaacaatgtaggcaagggaagtcggcaaaatggatccgtaacctcgggaaaaggattggctctgagggctgggcacgggggtcccagtcccgaacccgtcggctgtcggtggactgctcgagctgcttccgcggcgagagcggtcgtcgcgtgccggtcgggggacggattgggaacgggcc

SEQ ID NO: 68625 - DNA, 240 bp, Glycine max
  Clone ID: 700841894H1
cgctctctcagtttcttttccccaaattgtttttcatctaacaatttactttgcagaaccctaaccctagccccttcgcctaccttgtaaccttcctttcgatccttcatctcgcagacaatgggtgaaactaaggacgaagcatacgaggaagagcttctcgattacgaggaggaagacgacaaggcccccgactccgcggagctaaagtcaacggcgaactaccaagaagggctatgt

SEQ ID NO: 68626 - DNA, 245 bp, Glycine max
  Clone ID: 700841895H1
gaaaacaccacaacaccacccagaattgttgggttccattctcaaaacagagaacaagaagaagaagaaagagagagagtgaaaacgggaaaagcaaaaagttgtttctgtgattgattctctgcaaccgaatcatcatcagccacttcttcccgtttcatctctcccatttcttcttttcttccgctctggttcagtaagggaagagggttaacgttattcataatggttgcaacagccgctac

SEQ ID NO: 68627 - DNA, 243 bp, Glycine max
  Clone ID: 700841901H1
ctgcgggatcggatgcgctgaggagaagctgtctcatcgaacgacgtcgctttgttgtcctcggagatggagaagttcctgtgcgagttgttgctggattcctcgcagccaatttccgagcgggtcagagcgctcgtctctctccgcaacctcaaaggccccgtccctcgcaacgcccttatttgcgccacaaggattcgtcgaatgtgtgggcgcacgaagcttcatgtgcgtggggtccat

SEQ ID NO: 68628 - DNA, 277 bp, Glycine max
  Clone ID: 700841903H1
tcgcacgcacgcgtatgcagctccagaatacaagacagcacgttgcagattgtaacttgtaacaacaactatggctagcgatggcagcgaagagttcaggctagtgtcaccggcgttcaaaaacggggggaagttaccgaggcactacaccgacgatggtcagggtacgaagaagaacatatcccctccattggagtggtataacctcccggaggggacgaagactcttgccctcgtggtggaggatattgatgcgaccgcattctggtgggcccat

SEQ ID NO: 68629 - DNA, 250 bp, Glycine max
  Clone ID: 700841904H1
caaagaaaggaaataattgatctttgaaaatgcagggaggaaagaaagctggagagtccatcaaggaaacagctgcaaacattggtgcttctgccaaggctggcatggagaaaaccaaggccactgtccaggagaaggcagaaagaatgacggcacgtgatccgatgcaaaaggagttggcaacccagaagaaagaggcaaagatgagccaggcagagctggacaagcaggcggcgcgtcagcataacac

SEQ ID NO: 68630 - DNA, 250 bp, Glycine max
  Clone ID: 700841905H1
gcggcagagagtgagggagttcgaggagaggagggagctcgagaagaaggccgaggagttgcagagtcgcgttggagaggaaggcgaggaggaagaaaccgaggaagaaaagaggatgagagtcaggaaagagctcgaaaaggtagctaaggaacaggcagagaggagggccactgctcagttgatgtttgatttgggtcacaaggcttatgggaagggatcctatggacgtgccattgagtttcttgaa

SEQ ID NO: 68631 - DNA, 250 bp, Glycine max
  Clone ID: 700841908H1
gttcctcactgacctcaccagggcgaccagagccaagctttctttagctatcttccttttctttcttttagccttgatttcaaacctaaccttgggcaaacttaaagaaaccgaggtcgaagaagatcccgagctcgtaacatgcaaacaccagtgccaacagctacggcaatacactgcgagtgacaagcgaacatgcttgcaacaatgtgacagtatgaagcaagatcgagagaaacaagtcgaagag

SEQ ID NO: 68632 - DNA, 251 bp, Glycine max
  Clone ID: 700841910H1
cttctgataaaaaagaaagaaggatttcagattattcaatattaaatcaaatcatatctatagatcattgtcattttacacatcctactattttccatgatactacggatttattagcaaagaggcggagaaatagattaattattccatttcaattccaatcgattcaagaacgagacaaagagctaatgttagcttccagtatctcgattgagataccaatcaatggtatttttcgtagaaatagcatt

SEQ ID NO: 68633 - DNA, 248 bp, Glycine max
  Clone ID: 700841911H1
cttttagcaagttaacaacacttttgtcttcgttccattatctagttctcaattctcttcaccctttgcctctgaaagaaatgggtagtcttgaagcggaaagaacaacagtaggattggcagcaagagacccttcagggattctctccccatacacctacaatctaagaaacacaggccctgatgatgtttacattaaagttcactactgtggaatttgccattctgatctccaccagattaaaaat

SEQ ID NO: 68634 - DNA, 249 bp, Glycine max
  Clone ID: 700841912H1
ttgggcctcattggtacaagtgtttttaacaaacagcaacagtacagagcattttgatgcatgtaagtggacaaaatcagaaccacattcctgggagttgatcttcccaatagaggtatgtggtcctaataatggttttgaaatgtggagttctgagtgggcaaatcaaacttcatggcatttgagtttccttattgacaatcccaaacagtctacagtttttgatattctcttgggaatctctcaaga

SEQ ID NO: 68635 - DNA, 253 bp, Glycine max
  Clone ID: 700841914H1
gttgcaatcgcataataataaccatccaaagtttattgagagaaatttgcaagtttgaaaagaaacatggcatctcatcaacaaaacaagcaagagcttgatgaaagggcaaggcaaggagagactgttgttccgggtggcactggtggcaagagccttgaggctcagcaacatcttgctgaaggcaggagcaggggagggaaaacaaggaaggagcagctggggacagaagggtaccatgaaatgggacgca

SEQ ID NO: 68636 - DNA, 256 bp, Glycine max
  Clone ID: 700841915H1
caggcaagccccactcaaccaccacacctctcctcgttcacgctacccctttctgctcttcttctacctttcaagttttaaaagtataaagatggcagagacattcctatttacctcagagtcggtgaacgagggacaccctgacaagctctgcgaccaaatctccgatgctgtcctcgacgcttgcctcgagcaggacccagacagcaaagttgcctgcgaaacatgcaccaaaaccaacttggtcatggtcttc

SEQ ID NO: 68637 - DNA, 138 bp, Glycine max
  Clone ID: 700841916H1
ggcagatgcaggaagcttatcggtacattttcttcaactgatttgaggggatgccacatagccacgctgaaatcatggttgggaataagtgcactagcattcactgaagatgttgcatcgagtcctttgtacacagaa

SEQ ID NO: 68638 - DNA, 249 bp, Glycine max
  Clone ID: 700841917H1
ttcatccgttattcttcatcacagtccggatgacagaactcgatcaggaagatccagagcatcaaggtgtttcgaaggcttcacgccctgtttcagcggagagcatggattcccctggcacctctcttccacagcttggcacgtttaaagaaggtgcctacactataatgtacaaagtggcataaagtgattcttttcgggttcggtcaggagggacaaagagagatgctttctatcagtcaaaagcag

SEQ ID NO: 68639 - DNA, 248 bp, Glycine max
  Clone ID: 700841918H1
caatgatgtttatcttccaagagatgaggcttttggacacttgaagtcatctgactttcttacttatggactaaaatccgtatctcaaaatgttcttccattattgcaatctgcttttgatttgaatttcacaccccgtgagtttgatagctttgatgaagttcatggactctattcaggcggaattaagctgccaacagatataatcagcaagattagtccactacccgtgcttaaggaaatcttcc

SEQ ID NO: 68640 - DNA, 151 bp, Glycine max
  Clone ID: 700841919H1
aaaaacaggctgagaataataaatagaaagtaaagaaaagaaggaaggcaatggtgtgtcgtatatgtgttggtgcatctgcatgacaccaaatcagtgaagaaactgagtaatattactgccagctcaaatttctcatttataacaagcc

SEQ ID NO: 68641 - DNA, 248 bp, Glycine max
  Clone ID: 700841920H1
ctcgagccgcaagtacttccttacaatcaaaaccaacaacaactatggcaagttatcaaaagcactacgatgatcagggtcgcaaggttgacgagtatggcaacgttgagaagcaaaccgacgaatacggcaaccctgttcatgctgctagtgtcacctatgtagccaccagaactgctgctggtggttacagtgatgacattaataagcaacatgataccaccaatgcctacggcgtagacactggt

SEQ ID NO: 68642 - DNA, 249 bp, Glycine max
  Clone ID: 700841921H1
gaaaactactgagaaggagatctctgatgatgaggatgaggaagagaagaaggatgaggagggtaaggtggaggatgttgacgaagagaaggagaaggaagaaaaaaaagaaaaagaagattaaggaagtgtcacatgaatggtccttggtgaacaagcagaagcccatttggatgagaaagcctgaggagatcacaaaggaggagtattctgctttctacaagagtctcaccaatgactgggaagagc

SEQ ID NO: 68643 - DNA, 247 bp, Glycine max
  Clone ID: 700841922H1
ccaaattatagtaactctctttctctatctgaagaagaagaagttctgaagaagcatgtgtggaggtgctatcatctcagacttcattggtgtgaagcgtggccgcaacctcgccgcgcaggaactgtggtccgagcttgaccctttctctgacctccttggcttcgataccaccaccaccaccaccaaccaaccaccccttccagacaaaaaagtggtgtcatcatgtgagaagaagaagaagaaa

SEQ ID NO: 68644 - DNA, 247 bp, Glycine max
  Clone ID: 700841924H1
gcctacaattatttgctcgagtctggtgggttggaggaggagtcttcatatccctacacgggggagagaggtgaatgcaagtttgatccagagaaaatagcagttaagatcacaaatttcaccaatatccctgctgatgagaaccaaattgccgcatatttagtaaaaaatggtccacttgctatgggcgtgaatgcaattttcatgcaaacatacattggtggtgtctcatgccctctcatatgta

SEQ ID NO: 68645 - DNA, 252 bp, Glycine max
  Clone ID: 700841925H1
cgattgcccttgttctttcaaagttaccaaacacaagtacacaacacaacagctacatatggcgtctgaacaattggcgcgcagacaggacaccaccaccgagaaggagattcacgttgagaaacacacggttcccaagatggccacccacttcgagcaccttgcggagcaagctaaagaatctgacatcaccgctgggaaggatactccgcagggtagcatagaagccttgcaagctggagagagggtcaa

SEQ ID NO: 68646 - DNA, 248 bp, Glycine max
  Clone ID: 700841926H1
cttaaaagaaaaagaataacctgagaagagagagcgaatatcatattatgaaacgtgatgtttgattattaagtttatcagcttaatggagaatttgaggttatattccctcagtttgaataataagattataagagcaaattaacaaaatttgtaaacatcgtttatttagcacgtatctgccaaacaaactttcaagtgattggttattccacacacagaagggtcgtactttaccaccaagtacc

SEQ ID NO: 68647 - DNA, 248 bp, Glycine max
  Clone ID: 700841927H1
gcactgttgcatcatcatcttcattgcaaaaccctaaacttcaccttcaaccatgaccacacaagtaccaccacacagtgtccaagtccacacaacaacacaccgctacgaagctggcgtcgtcccccccggagcccgtttcgaaccgccgcgttatgaagccggcgtcaaagcgccctccatttaccattccgagagaggtccaacgacttcccaggtcctcgccgtcctcgccggcctcccggtcg

SEQ ID NO: 68648 - DNA, 246 bp, Glycine max
  Clone ID: 700841928H1
aacatttttcatataaataaaatatattcattcattcacacatcgtaataatcattatctatcattctctctctttcaattttagacagaagactaaaagagtgaagagaacaaacagagcaatggaaggaggaggagctgctccgccggccgacaccgtgatgtccgacgcggcgcctccgccgcagcaagcgatggctatggggatcgtgaatattccggcgacgctgagccacggtggcaggt

SEQ ID NO: 68649 - DNA, 249 bp, Glycine max
  Clone ID: 700841929H1
ccgttaatgcagttagaggcttctattaactcacttatctgtctatctccttccccaccaaaactcaacacaacaacatcactcttacagcttccgaaccctccatcatggccttgtcaagtccacacatacaaagatagatcttatgcaagcttcatagccgctccaccgccaagaacagacacagaaacagcttcaccgccacaaccaccaccaggagcagttgctgctctgccatagccattgatg

SEQ ID NO: 68650 - DNA, 237 bp, Glycine max
  Clone ID: 700841930H1
ggctcgaggttgacattgtgttggcacttctcaaagaagccctttaccttgtttttagaagaaactggctacaccgaagaaaacgttctccttcgagaagcaaaagcaggaattttgaaaccagcttttacaataatagctgatcatgagatgggatgccttttgttattgattcgtggcacgcatagtatcaaggatactttaacagctgttactggaaatgtggtaccatttcat

SEQ ID NO: 68651 - DNA, 157 bp, Glycine max
  Clone ID: 700841931H1
gagtaatcgagaaagagaagaagcatatatatcaaaatggctgcagagatggagagggagtcattgataactgaagctcctaatgcaccagttactgcacagagaagggtcagaaatgacttagaaaattctctaccaaaaccatactggccaagag

SEQ ID NO: 68652 - DNA, 269 bp, Glycine max
  Clone ID: 700841932H1
tgcggctcgagcacacacaactacaagaaagaacttcctgataaccaaaaccaacaacaactatggcaagttatcagaagcactacgatgatcagggtcgcaaggtcgacgagtatggcaatgttgagaggcaaactgacgaatatggcaacccggttcatgccactagtgtcacttatgtagccaccaaaagtgttggtggctacaatgatgacgctaataagcaacatgatattactggtgtctatcccgagacagacaccggtaga

SEQ ID NO: 68653 - DNA, 250 bp, Glycine max
  Clone ID: 700841933H1
gccagtagtcatatgcttgtctcaaagattaagccatgcatgtgtaagtatgaactaattcagactgtgaaactgcgaatggctcattaaatcagttatagtttgtttgatggtatctactactcggataaccgtagtaattctagagctaatacgtgcaacaaaccccgacttctggaagggatgcatttattagataaaaggtcaacacaggctctgcctgttcgctttgatgattcatgataactcg

SEQ ID NO: 68654 - DNA, 153 bp, Glycine max
  Clone ID: 700841934H1
aagataaattgatgatcacctagaaggttttgctccatccattttgattgttttgttctgatgtggctaacccaccaccatgaataagcattgctcgccgctctctgcaacatatttggttgtttcttcttctgtcttctgtgttatctcttt

SEQ ID NO: 68655 - DNA, 242 bp, Glycine max
  Clone ID: 700841936H1
gaaaaaagcgatcatagtttcacttcggccttatccagtttagggtttcggttctctaccctatctttcacgtatcgaaaccttaaatttacgatcaggtctgagcaatctggttggtagaacctttggtcttagtgagtcaagttttatgtctgaattagacgatcaaattcctactgccttcgatccagttgctgatgcaaatgctgatgactcgggtgctgggtcaaaggagtatgtgc

SEQ ID NO: 68656 - DNA, 245 bp, Glycine max
  Clone ID: 700841937H1
gaggtttgggaaggaagctgctgagatggacaagaggtctttcaagtatgcctgggtgctggacaaacttaaggctgagcgtgaaagaggaatcaccattgatattgctttgtggaagtttgaaacaacaaagtattattgcacagttattgatgcgcctggacatagggatttcattaagaatatgattactgggacatcccaagctgactgtgctgttcttatcattgattcgaccactggtg

SEQ ID NO: 68657 - DNA, 247 bp, Glycine max
  Clone ID: 700841938H1
gtcttctctttcctccaatgggttcccagaactctcaccaagacccaacaatgtctttgcccaaagggaccaaaacaaaaacttgttcttgtgcagggctgaggctgctgcagcctcctttggggaaccagaaagtgagaaacaaaagtttttgggtattgaagttgccaccttgaagaagattgtgcctctggggatgaggttcttttgcatcctcttcaactatacaattttaagggacacaaaa

SEQ ID NO: 68658 - DNA, 244 bp, Glycine max
  Clone ID: 700841939H1
cacacaactactacaagtacttccttacaatcaaaaccaacaacaactatggcaagttatcaaaagcactacgatgatcagggtcgcaaggttgacgagtatggcaacgttgagaagcaaaccgacgaatacggcaaccctgttcatgctgctagtgtcacctatgtagccaccagaactgctgctggtggttacagtgatgacattaataagcaacatgataccaccaatgcctacggcgtag

SEQ ID NO: 68659 - DNA, 245 bp, Glycine max
  Clone ID: 700841940H1
agcttatggtggatacctaggcacccagagacgaggaagggcgtagtaagcgacgaaatgcttcggggagttgaaaaggctgaactcgagggaataacaagagtggtggtgggaagagagtgcagcaaagaggagaaacaaggaagaacaagagagaaagtagaggcagagaaagcaagatcaatggagaaaactagagatgaagctaaaggaagagaacaagctgaaaccaaaggtcaaaccaa

SEQ ID NO: 68660 - DNA, 250 bp, Glycine max
  Clone ID: 700841941H1
aataaatgcaacctccacaaaggcttatgctaccagaaccatccttattcctgaaaaatgacggaactttaaggccacttgacatagagttgagtttgacacatcctcagggcgatcaatctggtgcttttagtcacatgtgtctgactgcagataaaggtgttaaaagttctatttggctgctagcaaaggcttatgtagttgtgaatgactcgtgctatcatcaacttatcagccattggttaaacac

SEQ ID NO: 68661 - DNA, 245 bp, Glycine max
  Clone ID: 700841942H1
agccattgttggtggtggttacattgccttggagtttgctggtatctttaatggtttgaaaagtgaggttcatgtatttatacggcaaaagaaggttttgcggggatttgatgaagagattagagattttgttgaagaacaaatgtctgtaagaggtattgaattccataccgaggagtctcctcaagctatcacgaagtcagcggatggctcattctctttaaagaccaacaaagaacttaggc

SEQ ID NO: 68662 - DNA, 244 bp, Glycine max
  Clone ID: 700841943H1
cagatgcatacaaggtaagattcctgtctgcccctaaaatttggagcttgcagttcttccttctagtttaacattttgatgagtttttcttctctgttttcaggttttgaggcttcttgattttcttgcgagcttgttggagcatccacttggaaagggcctattgttgagggagggcactcttcagatgctaacaaaagtactggatagatgttttgttattgttgatgttgatggaaagcag

SEQ ID NO: 68663 - DNA, 246 bp, Glycine max
  Clone ID: 700841944H1
caagatggcacaagttgaacttcgtgacgagcatgggaacccagttgaactaacagatgcatatgggcatccggtgtagctaacggacgagagatgcaacccggtgcacctcacggctgtggcaaccaaggcacacaaatctatgcttcagaatgacaccccacaagagcttccgcactccaagagctcaagctcgtctgaggatagagaggatggagagaggatcacgaagggactgcaggataa

SEQ ID NO: 68664 - DNA, 245 bp, Glycine max
  Clone ID: 700841945H1
ataagatggcccgttctctctcgcaagccaaacgtattggtgtccttgttgctcaatctatctccctaattcccgttcatcggcgaggttacgcagtggcatccgatgtatcggtaagagttggattgggtaatattgggcgaaggaatggaatcgtgggaggtgtagaagagaagcctgatacaagagatggttcaaaagcctactcaactgattgggccccagacccagtaacaggttactat

SEQ ID NO: 68665 - DNA, 247 bp, Glycine max
  Clone ID: 700841946H1
gcttcttcgagtttcacagccaagtcgtaaaagggtttcaagggatggaaaacatgcagagcttctggcaattgggtgatgaactccgtgggcactcaaaagcatcggaggatcacaagtggttaatggttgcctcgaaactggccgaacagacaagattgaagggggagcgtgtgaacaaccttgatctttcaaagggacccattgaaacaaggtcaagggataaatttgggttccaggaagagaa

SEQ ID NO: 68666 - DNA, 252 bp, Glycine max
  Clone ID: 700841947H1
cttcctccaagagaagtaaacaaccctcacattcaccacagcagcacacacagacaaagacaaccttgtttgtctccaatcaaaacctttcaagctggcgttcgaaaaccaagacaaccctgtccgagaaatcaagcccaagaataggagaatcatgggtgctggaggccctgatgatgaggacaacaacaggtggccaccgtggctgaagcctctgctaaaagaaagtttctttgttcaatgcaagcttca

SEQ ID NO: 68667 - DNA, 83 bp, Glycine max
  Clone ID: 700841948H1
cgtggccatgttgactctgggaagtccactaccactggccacctgatctacaagcttggaggcattgacaagcgtgttattga

SEQ ID NO: 68668 - DNA, 244 bp, Glycine max
  Clone ID: 700841949H1
cacaactacaagaaagaacttccttataaccaaaaccaacaacaactatggcaagttatcagaagcactacgatgatcagggtcgcaaggtcgacgagtatggcaatgttgagaggcaaactgacgaatatggcaacccggttcatgccactagtgtcacttatgtagccaccaaaagtgttggtggctacaatgatgacgctaataagcaacatgatattactggtgtctatcccgagaaaga

SEQ ID NO: 68669 - DNA, 244 bp, Glycine max
  Clone ID: 700841950H1
gaagggagacaccacctgtgagatatgccaccagcaattcaagcctggttatactgctcctccaccactatttcagtttggacgtattccaatgagttttaggggaaattgggagatttcaagaagagacttgaatagtactcatttggttagcatggtccccagtgatcagaaccttaccacttctaactatgatcagtattcagcctctgctactggaagtttgatttgctgtcgttcaatt

SEQ ID NO: 68670 - DNA, 244 bp, Glycine max
  Clone ID: 700841955H1
gttgcagaccgagctagctagctagcaagcaagcacagagatggaggcaaagcgaggccatgccctcatgtgcttggcacgtgtttcactcttcctctgcgctctaaccctatccgctgctcacggaagcaccacggttcaagacatcgcgagaaagttgaaactcggggacaacgagcttctgcgcacggagaagaagttcaaggttttcatggagaattacgggaggagctactccacagag

SEQ ID NO: 68671 - DNA, 248 bp, Glycine max
  Clone ID: 700841956H1
caaagctgaacaaaactcattttccaactacatttcttccaccaactcataaaatacgtcatatctgttcccaaaagcttgtttgtgagaatggcttcgggtgaaaagaaattcccacctcaacaacaacaaacacagcctgggaaggagcatgctatgaatccagtaccccaattcactagccctgactacaagccttcaaataaactgcaaggctagatagcattagtgactgggggtgactctgg

SEQ ID NO: 68672 - DNA, 244 bp, Glycine max
  Clone ID: 700841957H1
caagagtttgatgggggagaaaggacagttaagaagcttcggttgtcgaaagccctcactatatctgaggtgacgacggtttctgaagcgtgccgtagaatggccgctcggcgtgtggatgctgttttgttgactgattcaaatgttttgctctctggaatcatgactgacaaggacattgctactagagttatagcggagggtttacggcccgagcagacaatggtgtcaaaagtaatgactc

SEQ ID NO: 68673 - DNA, 243 bp, Glycine max
  Clone ID: 700841958H1
catttctccttcttagttttctctctgtcactctgtctctctgtttttcattcatcgcaggaaaagaaagaaaggaagcaaaaaaccctaatctcccgaatagcgttggattggagcgttttcagggcatcaatggagtgaagcagatcaagaggaggaagagacgcagaaatggggtctactgataaagaattggaagagcagcttctcgaagccggtaacaagctcctagatcctccctcc

SEQ ID NO: 68674 - DNA, 238 bp, Glycine max
  Clone ID: 700841280H1
caatgtcgttgattccaagtttcttcggcaccgggcgaagaaccaacgtcttcgaccccttctccctcgacgtgtgggacccattccatggcttccccggcaccaccgccctctccgctccgcgctccgagacggcggccttcgccaacacgcgcatcgactggaaggagacggcggaggcgcacgtgttcaaggcagacctgccggggctgaagaaggaagaggtgaaggtggagat

SEQ ID NO: 68675 - DNA, 126 bp, Glycine max
  Clone ID: 700841281H1
cgcgtacgtgagcgcgagcatcgggattcgagcgcgagccacagacacttggggtctcagcgcatcagtgctagttctacctcgtttactgttgcactaggaatccaagatgaatagcaactacga

SEQ ID NO: 68676 - DNA, 234 bp, Glycine max
  Clone ID: 700841282H1
aaggacttcaggaagagatgggatagacaatctcaagcattttacaacttattcagacaggctgatagggttgacaagcttgctgacattatccaaagactggagcaaggtgatctaaagctcgagttcgaactttggaatctgagagggcattccagcgtgttgctgctgtccagaagactatagggagtgcagtagctgctgggagcctaatcaatcttgcaacagttttgt

SEQ ID NO: 68677 - DNA, 233 bp, Glycine max
  Clone ID: 700841283H1
tggggctacccgctgagtttaagcatatcaataagcggaggaaaagaaactaacaaggattcccttagtaacggcgagcgaaccgggaaaagcccaccatgaaaatcggtcgccctcggcgtcgaattgtagtctggagaagcgtcctcagtggcggaccgggcccaagtcccctggaagggggcgccagagagggtgagagccccgtcgtgcccggaccctgtcgcaccacg

SEQ ID NO: 68678 - DNA, 231 bp, Glycine max
  Clone ID: 700841284H1
gcacgcagcttatcaagcttcttcgaagatgttacaagttgttgctccctcattgtcccttgtctcctcccaaccttctacttccatagatgccgaatccgcctccgctgctaacatggatttgatgttgatctaacaatcggggggcgcaatctttcctctatgctgcagaagctccttcttttggagttgatactctttatcgtagttaaggtagatgcgaagatgcgt

SEQ ID NO: 68679 - DNA, 226 bp, Glycine max
  Clone ID: 700841286H1
tgatgatgaatgtcatagggctgagtctgagtctggtgttaacttcactggcagcagcgagcaccatcgtcaaagaagggcacagagttgtcgtggttgaatacgaccaaggtggccacagaacaccaaaatctcaatatcaccagaacaacctacgcatgctaatcttaaagatcccatttgcgacgcctatggaaaatgcaagcacaaaatcgtggatgcaatg

SEQ ID NO: 68680 - DNA, 230 bp, Glycine max
  Clone ID: 700841287H1
aagcaacatgataccaccaatgcctacggcgtagacactggtagacagtattctagtggtggctacgatggtgacactaataaacatcatggaactactggtggctataatgatgacaccatagacatcatggaactaccggtgtctatggtatagacaccgataggcaacaacatgggactactggtggctatgccggtgacactggtaggcaacatgggaacatcggt

SEQ ID NO: 68681 - DNA, 230 bp, Glycine max
  Clone ID: 700841288H1
ctaggcagctgtcatatcatgaatttggcagaagggaaaagggtagatgttttcagtgtggccaactatttggtcttcatgcctaggtgcctcaaagaaagtatgataatcgtgattttgcgtgaaaaggggagattgttatttgttaaaaatggtaatcctaggaggaaggacagtgggaaggatatggctactatcagatcttggttccccaatttcaccattgtgga

SEQ ID NO: 68682 - DNA, 230 bp, Glycine max
  unsure (1)..(230): unsure at all n locations
  Clone ID: 700841291H1
aagaccatctatcagatggcttttatgatgcaggacgagatcggctgtttatgcctcttgagtgttatgagcaaaatcnattgtttgcttctcgtgaagtcatccttttggacagaaaaacgatgaagagttggatgctgttatgctagctgctcaggcattggtttataatttgaagaagttaaatggtttaagcagatatgggaaccaggatggggttgataacttgc

SEQ ID NO: 68683 - DNA, 233 bp, Glycine max
  Clone ID: 700841292H1
ccagaagccagcctctgggcaagtttttcttgtttatgggttgcttgtaaaaccatcatttagaaaaattctagtgcattctggtgcggacataaaattgaatgtctctcatgatggtgtcttcttccaatgagtcaatctcttgttaaatataagaaggggacaaatgctcaaacagctactgcactagaccgagctaatgctgaggatgccttgcttccaattcctaaggt

SEQ ID NO: 68684 - DNA, 56 bp, Glycine max
  Clone ID: 700841293H1
ggaactaatgacaaagtgtttgctgatgctcctctggattctaatcattagttccg

SEQ ID NO: 68685 - DNA, 187 bp, Glycine max
  Clone ID: 700841294H1
attttgtgccagcagatatacagggagtttatgaacacacaacattggcttctccaccaactatagagcagaactctgcttctcataatcaacttgatgctgatgacattgaggagaggaagttggttcagtgcataggggtctaagaggctcgctgagtggtggtaatgacgctgctgttgctcgt

SEQ ID NO: 68686 - DNA, 235 bp, Glycine max
  Clone ID: 700841295H1
accactgcttggattagttctgcagttaacaatcgctcctcagatatcaacagtaagattcgcacagcacttgggaaaggtaagaaaattgtttttcttactagagttgatccttttccagtgctttactggctgttctttttggcgttaagaatgaaattctgagttctaacgccactaatcctatgctgacgcgacttcttgagaactgtaagagtctcaaatatctggttga

SEQ ID NO: 68687 - DNA, 239 bp, Glycine max
  Clone ID: 700841296H1
gaaaggaaataattgatctttgaaaatgcagggaggaaagaaagctggagagtccatcaaggaaacagctgcaaacattggtgcttctgccaaggctggcatggagaaaaccaaggccactgtccaggagaaggcagaaagaatgacggcacgtgatccgatgcaaaaggagttggcaacccagaagaaagaggcaaagatgagccaggcagagctggacaagcaggcggcgcgtcaca

SEQ ID NO: 68688 - DNA, 280 bp, Glycine max
  Clone ID: 700841301H1
tttcatacgcaaagacctcaatattgagtaatcacgatgttcaagagaatatggtgagatagatatacattacagggtatcacacaaatctgaaagaaatttgtcaaacattctatgattcagaacgctgatatgagactcgaatcagggacttgtaatgtgtgctcagctgcttgttcatcttgcatgcatcctaaccgagctctcatggggtcaaaggctgaagaattctctgatgaaaactgtcgcttaggggaggttaatcagtattgtgatgaga

SEQ ID NO: 68689 - DNA, 272 bp, Glycine max
  Clone ID: 700841302H1
ctccaactcaactaagttcaactatattcatagagcatcctctgaaggacttcctaatgagttggttgaagactcaaaatttgttcctttgaatgaggaggatcctatatatggtccacctgtaagtcatggccttattgttgttgggctttgaagcagatgaagctttgaagattcgacagcttttgaaagagttggatggtgaattcctaaaggtcatctattgtactgaagacatgattatgcgttcgctttgggaggcaatgcataca

SEQ ID NO: 68690 - DNA, 271 bp, Glycine max
  Clone ID: 700841303H1
gcgaagacccctttttctggttattaacagagtcataaaaaaccaaagttttctattctctgtagctcacatggtgggctaagaatatctgactttggggtggaaagtatggttggcaaggagagtttgagaactgaggtcttgaacttgagctttgagaagcttatgatggttgaatgtggtggaaatagtgggcaaggagtgaacattaaagctggtgtgatcacggagtggaaggatattccagttgagcttctgatgcaaattttgt

SEQ ID NO: 68691 - DNA, 272 bp, Glycine max
  Clone ID: 700841304H1
gtacagaccacctgagttgctgctaggaacaacaaagtatgggccagctgtggatatgtggtctgttgggtgcatttttgctgagcttcttcaagggaagcctatatttcctggaaaagatgagccagaacaattaaataaaatatatgagctgtgtggagcaccaaatgaagtcaattggcctggggtttccaagataccttattataataaatttatgccaacaaggccgatgaaaagacgtttgagggaagttttcaggcattttgatc

SEQ ID NO: 68692 - DNA, 271 bp, Glycine max
  Clone ID: 700841305H1
cacaactactacaagtacttccttacaatcaaaaccaacaacaactatggcaagttatcaaaagcactacgatgatcagggtcgcaaggttgacgagtatggcaacgttgagaagcaaaccgacgaatacggcaaccctgttcatgctgctagtgtcacctatgtagccaccagaactgctgctggtggttacagtgatgacattaataagcaacatgataccaccaatgcctacggcgtagacactggtagacagcattctagtggtggc

SEQ ID NO: 68693 - DNA, 270 bp, Glycine max
  Clone ID: 700841306H1
gcaaggcaagcgcttctcctctttgtgttctggctatgcttcttggcaagagttagatcggacgaggattgcgtgtacacggtgtacgttcggacgggttcgatcatcaagggaggcaccgattcagtaattggtctgaagctatacgacaagtccggctacggcatatacatcaccaacctcgaggcatggggcgggttaatggatccgggtcacaactactacgagcggggcaacctcgacatattcagtggtagaggcccttgcttg

SEQ ID NO: 68694 - DNA, 268 bp, Glycine max
  Clone ID: 700841307H1
gattcttttgagagaggaagcagggtcattgcaatactagatccaataacgactgacaaaagccaatacaaggcggagttggattcgtcaccaaatgaggatcacgacgatgattgggatggtgaagatcctgatgagggcatcatttatgtggaatagatgtctccctatgtaactctatcactactgtgcatctttcatatggacaaacctttcactgttgataggtatgtattgatcaaggattacattacttttggataatcat

SEQ ID NO: 68695 - DNA, 273 bp, Glycine max
  Clone ID: 700841308H1
tggagttctcagcgaatcagttcgatcgaggaaagatttttggggcttgcatatgccactggtttgtccagatggcgctgtggttgcgtatgcgtggaaacgacaacttgcaggacaagcaggtgcttcggccgttgacaggaccaggttagctctcaaagctttcactgatcagaaaaggcgttttttcccacatcttgatgatggacttgaaactagtgaatcagcatcgaagaaatgttgtgggtctgaagaaattgcagtggatcccaa

SEQ ID NO: 68696 - DNA, 270 bp, Glycine max
  Clone ID: 700841309H1
aaggggtattattttttcatgcagaaacgagggatcatctaattaaaccagctttcatcagggtgtgggtgatttattgtaagctttttcttattatcttcgattgtgtttacacgtgtgtgttaaaggtggcgaatcctaaagagaagggaaatgaggttgatgacaataaggaattgatattattccatgaagggataatgaacaaccctacattgtcaaggctatttccgggtttgaatagggagagggagatgtctgctatggtct

SEQ ID NO: 68697 - DNA, 265 bp, Glycine max
  Clone ID: 700841310H1
attcggttcaaccaccaaccttcctctgaatcacttctcttactctgctacaacgtcgctttcctacttcttcttcgtcttcttcttactttgctcacccggctcagttcgagctatcagtaaaacgcgctcaagtgtcggcgatttctgcaaattcagctaaggtatcactctcgccgcgatctctcatcctagctcgtcgagttcgggttctaatcgcagcgtctaagttcactgtttctctgaatcgaagacaggacttcgt

SEQ ID NO: 68698 - DNA, 274 bp, Glycine max
  Clone ID: 700841311H1
agaaaacctaagcttagaattagaaacacagattagaagaaaggacaggcttgatcgttgacaatgcagggaggaaagacagcgggagagtccattaaggatacagctacaaacattggtgcttctgccaaggctggcatggagaagaccaaggccactgtccaagagaaggccgaaagaatgacagcacgtgatccggtgcaaaaggcgttggcaacccaaaagagcagatgcaaagatgaacccgggcggagctgcgacaagcaggcggcgc

SEQ ID NO: 68699 - DNA, 269 bp, Glycine max
  Clone ID: 700841312H1
cacacaactactacaagtacttccttacaatcaaaaccatagaaaactatggctagttatcaaaagcactacgatgatcagggtcgcaaggttgacgagtatggcaacgttgagaagcaaaccgacgaatacggcaaccctgttcatgctgctagtgtcacctatgtagccaccataactgctgctggtggttacagtgatgacattaataagcaacatgataccaccaatgactacggcgtagatactggtagacagcattctagtgg

SEQ ID NO: 68700 - DNA, 264 bp, Glycine max
  unsure (1)..(264): unsure at all n locations
  Clone ID: 700841313H1
agagaattacagagcattttccaacacgattacacgattgnatcaaacccctctttctctccgaagctgcttttaatatcgtactggccttcgattgttctcctctataatacatactgttctctcttcgatttgagggctcagtactagagtctgtgcatctgttaacccaactgcacaggtagtctccaaataatggagcctcatgatgatactggatgctcagctcctgaacgctccattcttcgcattaataattgtggc

SEQ ID NO: 68701 - DNA, 269 bp, Glycine max
  Clone ID: 700841314H1
tgggcttcaagggatggaaaacatgcagagcttctggcaattgggtgatgaactccgtgggcactcaaaagcatcggaggatcacaagtggttaatggttgcctcgaaactggccgaacagacaagattgaagggggagcgtgtgaacaaccttgatctttcaaagggacccattgaaacaaggtcaagggataaatttgggttccaggaagagaacaaatttgattctcttaacttgagcatgttgaacctggactctaaatttactg

SEQ ID NO: 68702 - DNA, 267 bp, Glycine max
  Clone ID: 700841315H1
gaaatggctgaagcacaactacgagaccagcatggcaaccctgtcccactcaccgatcaatacggtaatccggttatcttaactgacgagcgcggtaatcccgtccaactcactggtgtcgctaccaccgctaccggcacagcaggttctgggtttgggtcctatggtaccggtgcttacggtggtggtgcaagtgcaaccaccgttgcagatcttttggcaacccaaccaaggagtggcagagaggctagagagcttcgtcgttcc

SEQ ID NO: 68703 - DNA, 268 bp, Glycine max
  Clone ID: 700841316H1
gttcagtaacaccaccaataacaataagatgatcgaacaacaaggacaacctagttgggtgttcgatgacgatgtggacgatgatttggtttcggagttcaaagatctacccatgaagttccaacaaacactgatcccagatctggaacgaatctccacaacctcaaaagcctacataacaaaagccaacaaagagatcacgagagggttcaaaccctacgttggcaacaagtacgcacccaccatcagcactttactctcttgcgca

SEQ ID NO: 68704 - DNA, 274 bp, Glycine max
  Clone ID: 700841317H1
gatggcacaagttgaacttcgtgacgagcatgggaacccagttgaactaacagatgcatatgggaatccggtttggttaacggacgagaaaggcaacccggtgcacctcacggctgtggcaaccaatgcacacaaatctatgcttcagaatgacaccccacaagagcttcctcactccaagagttcaagctcgtctgaggatgaagggcatggagagaggatcaggaagggactgaaggataacatagaagaaaagttaccagctggagaagga

SEQ ID NO: 68705 - DNA, 272 bp, Glycine max
  Clone ID: 700841318H1
ccaaattcattttaatcctaattctgcacttcttgatcattcgatttttctcctgcagatgcagatattcgtaaaaactttgaccggcaagaccatcacccttgaggtggaatcctccgacaccattgacaacgtaaaagctaagattcaagacaaggaagggatcccacctgaccagcagagacttatctttgcgggtaaacaacttgaggatggtcgcacccttgccgattacaacatccacaaggaatcaaccctgcatctggtgcttc

SEQ ID NO: 68706 - DNA, 183 bp, Glycine max
  Clone ID: 700841319H1
tctggttctgacttcccaagttcagtacatttatgacatcaatctccggggggatgtttggttgctgtttgttgatgtagctgtttatgtgatctgaatctagtccattcccttcatcagaaatatataaaacattgcctgttagggaagagatcctgagagccctccttaattcggatttga

SEQ ID NO: 68707 - DNA, 268 bp, Glycine max
  Clone ID: 700841320H1
ctgatgatttgccactttgtgcctccgcttccgatgaaatgatcgagatagaaggcagagtgtcatctgtaaagacggcacttgttgcggtctcccaacggcttcaagattgtccctctgttaatagaataaagatgatgggaaacaaaccttatgggatagttcagtatgagactttagatgcagttcctcgtgagattttaactgcagctccacgtaggactttaactgtagtaccacatgagactgtagatcatcttttgcttag

SEQ ID NO: 68708 - DNA, 267 bp, Glycine max
  Clone ID: 700841321H1
tattgatgtacttcgtgagagacacttgcgctactcttactgtgccttccttcaaaatcttgggatgtggctcaacttgcctcaaactaccattgggacagccatggttctgtgccaccggttttttgttcgacgatcacatgcttgccatgacagatttctgattgctactgctgccctttttcttgttggatagtcagaggatacaccgtgtcctttgaataatgtgttgcaagcatccagtgagatcttacatgaacaagattt

SEQ ID NO: 68709 - DNA, 268 bp, Glycine max
  Clone ID: 700841322H1
ggagcttcctgtttccatttcctctcacaaaaatcacttattatgaacacacgaaaagacatggaccggatcaaaggcccatggagcccggaggaggacgaggctctgcagaagctggtggagaaacacgggcccaggaactggtccctcatcagcaagtccatcccgggccgctccggcaagtcctgcaggctccgctggtgcaaccagctgtccccccaggtggagcaccgggccttcacccacgaagatgacgacaccattatcc

SEQ ID NO: 68710 - DNA, 268 bp, Glycine max
  Clone ID: 700841323H1
ctctccttttctctctctagaattctcagatttgcggggcgagatgatgcagcagccaggacccggcatggcacctcccaccatgggccagcagccgcagcaacagtaccagcagcagcctccgccgcagcagcaacaaccctacgtcatgatgccgccgcagcatcaggcgccgcagcctatgtgggctccatccgcccagcctccgctgccgcagcagcctgctagcgccgacgaggtccgaaccctctggatcggggatctgcag

SEQ ID NO: 68711 - DNA, 275 bp, Glycine max
  Clone ID: 700841324H1
tgaggattttgtatgtatgatgtgttctgacagtgaccaactactcaatcacaatcctgatcttcttaagaagctggaactctcggatggtctcggttcgccgtagctcagttaactaggcaagcgaactcgtgaatcactatttgaggatccagccagagatatgactagcttgctcaaaatatggtacctgaacatatgctctggagttgtctgtttatgttactgccaatgttctggttggtgcgagatatagtagaaaacccgcatccatg

SEQ ID NO: 68712 - DNA, 271 bp, Glycine max
  Clone ID: 700841325H1
tcgcgattgcaatcgtttccactcccgccgctgattgggtttctcacaggaacagcttcttgcgcggttaaaggagcttcaggttccattttcccagtatgagcatcctgttgttttgaccgtcgacgctcaggctcaatatgttggacatttggggggtggcctcagcaagaatttgtttctcaaggacaagaaaagcaggttgtatattgtttctgctttagctggtaccaaagtagatctcaaagtgttatctcagcggcttggtttg

SEQ ID NO: 68713 - DNA, 243 bp, Glycine max
  Clone ID: 700841326H1
tcattaatgtgtgcgtgtcacgatacccatagtgctggcaaattatagtaactctctttctctatctgaagacgatgaagttctgaagaagcatgtgtcgaggtgctatcatctcagacttcattggtgtgaatcgtagccgcaacctcgacgcgcaagaactgtggtccgagcttgaccctttctctgacctcctagacttcgataccaccaccaccaccactagatcaacaggccttcgag

SEQ ID NO: 68714 - DNA, 258 bp, Glycine max
  Clone ID: 700841328H1
aacctctcctcaatgggtagacacgaagccgccatttccatcctcaccaacgtcgcccccactgccttcggcctgggcgcacggccaccgccgtctcctcttccctctacaccgtcgacggcggccagcgcgccgtcctcttcgaccgcttccgcggcatcctggactccaccgtcggcgaacggacccacttcctcatcccctgggtccagataccctacatcttcgccatccgcactcgtccccacacctgctgct

SEQ ID NO: 68715 - DNA, 91 bp, Glycine max
  Clone ID: 700841329H1
cgggtatttgtcacatctgctctcaagactgtgaattatggaatcctgcttgcactatagccatgagtatgtcatgcgatccatacccggg

SEQ ID NO: 68716 - DNA, 257 bp, Glycine max
  Clone ID: 700841330H1
tttagattctcgggttgcgctggttgggcccaatggtgctgggaagagtacactactgcagctaatgacatgtgacttgctgcctagtgatggcatggtccgacgtcataatcatcttcgaattgcacaatatcaccagcgtttggccgaacagctacacatggaactgtctgctctccagattctgattagcgcataccctggcaacgcggcagaggagatgacggcggcgattgggaagtttcggctgtcaggta

SEQ ID NO: 68717 - DNA, 269 bp, Glycine max
  Clone ID: 700841331H1
tgataatttgaggtcgtacgtctgaattctcactggatatcttggatgatagagtcagagtgcgagcatcttatcatgacctgctctgatgctctagtattcctgataacgggtgtcttctatgtctgaaatccggttactcgcgagtacaggttgcttcccaagagtagggacaggcatgttactcgatttcacccggattgcgaggctaccttagttagtgtcgcctatgattcagcatatcggaagttcagtgttgtactagcggg

SEQ ID NO: 68718 - DNA, 276 bp, Glycine max
  Clone ID: 700841333H1
ggcttgactcctctcatcagaagaaagcgaaaaaagcaaaaatgcaatctatgtccctgacgctgagcaagaggctctccaattcaaagcctctcttcagaatctcttccagcctcgtcgctcacgcatcctccgccacaacctctccgccgccaccttcgccgccagtcccctctccctccgccctcaacagcctcctcaccgctccgtggtccgccactcagtcacgcggaatcacgctttccggatctgatattagagtcgggaatctcattg

SEQ ID NO: 68719 - DNA, 271 bp, Glycine max
  Clone ID: 700841334H1
atccgcgcatattctcatttcaatttgcatttgcatttgcgtttcatttggcgttttgtttctttctggaagcttcgttcgggcatcaatggcgtccttcgatgaagctcctcccggaaactccaagaacggcgagaagatcttcaaaaccaagtgcgctcagtgccacaccgtcgacaaaggtgccggccacaaacaaggacccaatctgaatggtttgtttggtagacaatctggtacaactcctggatattcctattctactgctaac

SEQ ID NO: 68720 - DNA, 270 bp, Glycine max
  Clone ID: 700841335H1
agacaagatctccatatctgttcccaaaagcttgtttgtaagaatggcttccggtgaacagaaattccctcctcaacaacaacaaacacagcctgggaaggagcatgctatgactccagtaccccaattcactagccctgactacaagccttcaaataaacttcaagggaagattgcattagtcactgggggtgattctgggattggacgagcggtgtgtaacttgtttgccttagaaggtgctaccgtggccttcacgtatgtgaaggg

SEQ ID NO: 68721 - DNA, 265 bp, Glycine max
  Clone ID: 700841336H1
ctcgagccgaatcggctcgagtctgaggctcccctcagctctcactccgaaatccccaaattgcctgtgaatgctagaaagccctaggcacgttcgatttgatgctctcccatttgcaatcaagggcgagcgcattcggttcttgcacgcaaggctggtactaccgctgcatcggcctcgatccctgaattcatcattctttctcgcaccatctttttctattccgattcgatttgttgttgttgttgttgttgttgtgcttttg

SEQ ID NO: 68722 - DNA, 268 bp, Glycine max
  Clone ID: 700841337H1
agaaaacctaagcttagaattagaaacaaagaaaagaagaaaggagagaattgatcgttgaaaatgcagggaggaaagaaagcgggagagtccattaaggaaacagctacaaacattggtgcttctgccaaggctggcatggagaagaccaaggccactgtccaagagaaggcagaaagaatgacagcacgtgatccggtgcaaaaggagttggcaacccaaaagaaagaggcaaagatgaaccaggcggactagacaagcaggcggc

SEQ ID NO: 68723 - DNA, 258 bp, Glycine max
  Clone ID: 700841339H1
cacacacaactactacaagtactaccttaaaatcaaaaccaacaacaactatggcaagtcatcacaagcactacgatgatcagggtcgcaatgttgacgagtatggcaacgttgagaagcaaaccgacgaatacggcaaccctgttcatgctgctagtgtcacctatgtagccaccagaactgctgctggtggtcacagtgatgacattaatacgctacatgataccaccaatgcctacggcgtcgacactggtagac

SEQ ID NO: 68724 - DNA, 269 bp, Glycine max
  Clone ID: 700841340H1
atggcagccatgttcttaaccagaagcgcgctttttcgcgtttcaaagtctctcccttatgccccttcactctcccttaaacccaccatggtcaccttctcctctactcccaattcaggctggagaaatgcagcagaaggaggaagaagagacggaagaaccaattggacgtatgattctgccgaggcaagacgcgaggcagatgaaatgtctgagagtgccaaagcgacgatgaatgaaggctatgacagggccaaggatcatgcgcg

SEQ ID NO: 68725 - DNA, 269 bp, Glycine max
  Clone ID: 700841341H1
gcctcgagccgaatcggctcgacggctcgagctcatttcttcatcgttcgattcttctcctactaaagatgcagatcttcgacaaaacttagaccggtaagaccatcacccttgaggtggagtcctccgacaccatcgataacgtgaaagctaagattcaagacaaggaagggatcccacctgaccagcagagacttatctttgcgggtaaacagcttgaggatggtcgaacccttgccgactacaacatccaaaaggaatccactctc

SEQ ID NO: 68726 - DNA, 265 bp, Glycine max
  Clone ID: 700841342H1
tcttcttctacattagttctcgttattcattattcattctcagcttcttgtcttctgggggccaaaaggggtcacttttcagatccgagattgagctcctttacccatcatcatcatggagctcctcgggtacctgaatcagggtcacccttctagaggaacaacacttgttattactctttcattggtgctttcgacacttgtgtccttctccactttcacacatgccttctctccttctgcgtttccggaactgaatcctata

SEQ ID NO: 68727 - DNA, 264 bp, Glycine max
  unsure (1)..(264): unsure at all n locations
  Clone ID: 700841343H1
ccagattgagacaaagaatagatcctcaatacaatgaggttcaggctcagatggaaacaaatttgtttaaattgtctcttgatgatgttgaaactcctaaaggttccatgttggatcttaaaatttctcaatctaaaattgcacttcccaagaacacagttggaggaaccattctgcgtagtgatctattggcaaattttttgacagagggcaattttagagcaagtgttgatttgcaaaggggnatcgtattagaggaatgat

SEQ ID NO: 68728 - DNA, 265 bp, Glycine max
  Clone ID: 700841344H1
cacacacagctagcagatattacatacacgtgaatcactaattaagccatggagtagaaatcaatagctgggttgtgcttcctcttccttgttctctttgttgctcaagaagttgtggtgcagactgaggcaaagacttgcgagaacctggctgctacatacaggggtccatgacttccacgcactggcagctgcgatgatcactgcaagaacaaagagcacttgctcagaggcagatgcagggacgattttcgctgttggtgca

SEQ ID NO: 68729 - DNA, 264 bp, Glycine max
  Clone ID: 700841345H1
gtgaacttaaaggatgctgtggctgggctcatgagcttgcatgacaacgccagatacagggtttacaagctcaatgatcaaacagcaaagctttttgtgcgatcaagacagtttgcacctaccggaggcacatattctgattgctggtgatcctgcaactggttgccttgttgattttggactctatgtctaccacagctactcagcattccggcgcactcaaggtgctagctttggctctttcgtatatcttcgcaagatgga

SEQ ID NO: 68730 - DNA, 264 bp, Glycine max
  Clone ID: 700841346H1
ctaaaagaaaagcagttataaaaaaaattgaaaaaattaaaaaggggcttgtaatttcagagacaaatattcattcaaacaaaacaacttatgatagtaaaagggtagaattcgaaaaaaaaaaaattgcagatattacaaagaagaagagatgctcgattaacgcggaaatcacatacggtgtgagaaattttccatggaaagggtatcctgagatatattactcactatccgttgtattccgaggatcagtatccaactttt

SEQ ID NO: 68731 - DNA, 269 bp, Glycine max
  Clone ID: 700841348H1
ctgaaattttaattgacttttctcccctcatacaaaaaacctaccaatggctcccgcaaaggcagagaataagcccgcggagaagaagccggcagagaaggccccagcggagaagaagccgaacgcgtagtagaagatatcgaaggaatgaggacagcgagcagaagccgacgtgaccaaagacgagcgttgagacctacaagatctacatcttcaaggtgttgacagcaagtgcaccccgacatcgggatctccagcaaggctatggg

SEQ ID NO: 68732 - DNA, 270 bp, Glycine max
  Clone ID: 700841349H1
caaaaacaaaacaaaacagtgtctttgattacgagagagagagaacaaaacaatcaacacaatggcttctgagcaaatgcctcgcagagagaacaacagcaatagggtgatagagagagaggttcacgttgagacacacagaaaagagtccctccctgataagggaagggttgtgatagagagtgagaagaaggagatagagagagagttggcttctgatagagccaggtctggaaatatagttaaggaggactaagaggttgaagaagg

SEQ ID NO: 68733 - DNA, 267 bp, Glycine max
  Clone ID: 700841350H1
ctattctcatgaatatgccaaatgctgttctttcaatgtggagatattttgttggagatctcgtctttgaagtttctaagatgacttctccctacattaaatgtacagtctctttcttcatagcatttggaaatttggctgatgacaccatcaattttgaggcttttccccacaagctggtgcagtttggagagattcaggaaaaagttgtattgaaattttcacaagaggaatttcttacagcttggtcaactcaggtgcgtcctg

SEQ ID NO: 68734 - DNA, 71 bp, Glycine max
  Clone ID: 700841351H1
ctacaacacagccattacgaagacgaagaattatcaaagaagtcgagtgaggtttttctgagccggtacct

SEQ ID NO: 68735 - DNA, 266 bp, Glycine max
  Clone ID: 700841352H1
ggattactccagttctttactcagtgtaggtgtaatgtacgagaaatcgatcttcgtttgcctctagacctcaacaaccaccatctctcagagatggcgaggaatttcgaggggctaacgagcgttaggcttcagagctgttgcctcgttagcggcgagggcttgaaggccctcgccgcagcgttgaaaggcctggaagaattggcgcttgttaactgtgacgtggttgaaacagaaccgggtctgcttgccacattggggcagca

SEQ ID NO: 68736 - DNA, 265 bp, Glycine max
  Clone ID: 700841353H1
ctgtgctcttttagcatggctatatgatgaggagggaaaatggacaatagagcctggacttgcagcaattttaatcatggagcatgtcctcttgttgactaagttcggtttctctcgcttcattcctgaggtgattgttttgcttcccatccactatcattcttccatttcaaagatgctttatgagagattatgacaggctatggtactgttttctttgaaggaacctgcttgggtaagagccaaccgtgcaaaacacactaca

SEQ ID NO: 68737 - DNA, 263 bp, Glycine max
  Clone ID: 700841354H1
agtaattctcccaagggaacggaagacgcatgagtatcatgaagccataaatagacgctataagcacctccctgaagttaaccgtatcgcaagacatagacacttgccaagaccaatattcacagcttctgctttaatgcgcgttatggcggatgctaagagtaggaaggttgagaagaggatagctcacagtgctccagggagtattaccacacagccattacgaagacgaagcattatcgtaatagtcgcgtgaggttttt

SEQ ID NO: 68738 - DNA, 267 bp, Glycine max
  Clone ID: 700841356H1
ccgctcgagcggctcgagcggctcgagcacaactactacaagtacttccttacaatcaaaaccaacaacaactatggcaagtgtatcaaaagcactacgatgatcagggtcgcaaggttgacgagtatggcaacgttgagaagcaaaccgacgaatacggcaaccctgttcatgctgctagtgtcacctatgtagccaccagaactgctgctggtggttacagtgatgacattaatacgcaacatgataccaccaatgcctacggcg

SEQ ID NO: 68739 - DNA, 266 bp, Glycine max
  Clone ID: 700841357H1
gtgagctacaaagaaaggacataattgatctttgaaaatgcagggaggatagaaagctggatagtccatcatggaaacagctgcaaacattggtgcttctgccaaggctggcatggagaaaaccaaggccactgaccaggagaatgcagaaagaatgacggcacgtgatccgatgcaaaaggagttggcaaaccagaagaaagaggcaaagatgagccactgcatagctggacaagcaggcggcacgtcagcataacacggcggcg

SEQ ID NO: 68740 - DNA, 262 bp, Glycine max
  Clone ID: 700841358H1
cttgtgttcgttctactatagcacccgatgccgccgacgccgttaccgccaacggtataaagagaagacgctatcttcctcacaataatgcagtgtagaagaagggttcgtagcctctgcggcctggcgtgcaaggctttttcatcacttgcgatggcggcagagaacaccaagcctctcgtgaagctctcaatattctcgattccttttatgaagagctagttgatggggaaaaggagttacccagcaaatgtttaaataa

SEQ ID NO: 68741 - DNA, 263 bp, Glycine max
  Clone ID: 700841359H1
ggcaggttgactacttcattgattgccactactccagagaagctgaaaaactatgggtgattggaggcactaatgctggtactatgggctactttcctgtaaattacaaaggagtggcaacgattggagctgcagaagcaattcttgaaggtggccacacaagtgttattaggagtgttttacccatgtcaacaattcctagtggacctactaatagtcctagccaaggcattttcggttggacgggtggggaagatggtcgg

SEQ ID NO: 68742 - DNA, 264 bp, Glycine max
  Clone ID: 700841360H1
tctacaagtgaatattttcgccaagaaatgaatcctaattttaggatgaccgaccccattaatccagtccatatcatgtcctttacgggagctagaggaaatgcgtctcaagtagaccaattagtgggtatgagaggattaatgtcggatccacaaggataaatgattgatttacctattcaaagcaatttgcgcgaagggctttctttaacagaatatataatgtcttgctacggagctcgtaaaggggttgtagatactgct

SEQ ID NO: 68743 - DNA, 262 bp, Glycine max
  Clone ID: 700841361H1
atcttcatctaaacataaaaatcactttcccctgctagattctcgctagtacaatcataggttagtaatccgtcccatgatgttttgtttttttcttgttgttctggggtctgtgtctttcgttagatgttctggtatttgctaagtgtgttcctttagctgatgtgtgtatttttgtggtgagttcagaatccgagtttttgtgggttgcattgttgtgagtagatgagaagagttggtggtgatgttttgaacgtggatt

SEQ ID NO: 68744 - DNA, 265 bp, Glycine max
  Clone ID: 700841362H1
cgggaatcccacgccgcttgtaactccatctcggtgtttgattctctgctacttccttcattccccttcggaatcgattcgaaccatcttcctcttccaatggcaacccctaccgacaataatcacaacctctgcacaggaaaaccctaacaaaaccctataccccaccgaaccagatccaatccctgccactgaggacgccaccgccactaagggctccgacgccaaggactccgccgacgccgacgccgacgccataacttct

SEQ ID NO: 68745 - DNA, 263 bp, Glycine max
  Clone ID: 700841364H1
ctggagagtccatcaaggaaacagctgcaaacattggtgcttctgccaaggctggcatggagaaaaccaaggccactgtccaggagaaggcagaaagaatgacggcacgtgatccgatgcaaaaggagttggcaacccagaagaaagaggcaaagatgagccaggcagagctggacaagcaggcggcgcgtcagcataacacggcggcgaacaggctgccacggcaaggcacatgggacaaccatggggacccatcagacgtc

SEQ ID NO: 68746 - DNA, 265 bp, Glycine max
  Clone ID: 700841366H1
ctcacttctgttgttataagtaacttccctcatcattacaaaacaatcctccacaggtttcaaaatgctgatatcgggcatgggaattgaggagagaaagcaagtgaagaagccaacacaagccagctcgagaaaagggtgtatgagagggaaaggaagtcccgataatgctagttgcacctacaaaggtgtgaggcagagaacatggggaaaatgggttgctgaaatccgtgtacccaatcgaggtactaggctcttgctcggg

SEQ ID NO: 68747 - DNA, 266 bp, Glycine max
  Clone ID: 700841367H1
acaattcatactgatgataacattggttgttagtgtaaaattcttttacactaattaatggtatcggtatgaagtatgatttattactttgtggatgcttaagatgcttcataaatgatgattgcaggtacgagtgataactaggaaaacttgtgaaccactggaggaagattccttcaggccaatccttcaccactatgagggtcccaagttccgtcttgagctgaatgtgcccgaggtattttatttttatcttgctgaatatt

SEQ ID NO: 68748 - DNA, 261 bp, Glycine max
  Clone ID: 700841369H1
ccgtgatttcagtgttggtgttgcagaccaacaccaacaagaagaacatcagttagatcaacaaaagcgtggtgtaatcggatccatgttcaaggcggtgcaagacacctacgagaacgccaaggaagctgtcgttggcaagaaagaaccttcgacgacgactaactcgtacagtaccagagaggttatacacgacgttgacattcaacccgatgacgcggctgcagcgagggaagtgagagacaaatcagcctcaaagtc

SEQ ID NO: 68749 - DNA, 261 bp, Glycine max
  Clone ID: 700841370H1
caaaacctctaatttgattattcggtttcattcgtatgtattgatggacccggagcagacgttcatacgcgtgcaggagaggttttcgcagatgctgactcccaaagtcagagttgctttggagtatctctacctattcatcgccataaccttgttctgcattctcgttgttatgcatgccaattacgttcaacagcctggatgttcaagtgagctatctggagtcgtgacatcagaagcccaacttattcagattaagat

SEQ ID NO: 68750 - DNA, 84 bp, Glycine max
  Clone ID: 700841371H1
ctcctcaactcacatcagatatcaaccttctctctctccaaactctcgcacctgtctgctctggccttcagttgattcaggtcg

SEQ ID NO: 68751 - DNA, 130 bp, Glycine max
  Clone ID: 700841372H1
ggtgtttctaatgtggctggaaacttctaaatctgaagggcactttttggagtctgaagggtgtctaatgttgctggacacttaatcaatttatgtctctgagtactctaggagatttttggaataagat

SEQ ID NO: 68752 - DNA, 258 bp, Glycine max
  Clone ID: 700841377H1
cacacaactactacaagtacttccttacgatcaaaaccaacaacaactatggcaagttatcagaagtactacgatgatcagggtcgcaatgttgacgagtatggcaacgttgagaagcaaaccgacgaatacggcaaccctgttcatgctgctagtgtcacctatgtagataccagaactgctgctggtggttacagtgatgacattcataagcgacatggtaccaccaatgcctacggcgtagacactggtagacag

SEQ ID NO: 68753 - DNA, 83 bp, Glycine max
  Clone ID: 700841378H1
catggcgattgtctctgcttatggactcgaacctgggtgatctatccattaccaggatgaaacatgggtgaaactaagtggag

SEQ ID NO: 68754 - DNA, 261 bp, Glycine max
  Clone ID: 700841379H1
ctagttcacagctctcagttcgtatttgatgatcctgtgtaattaaggctgacggcgtggatctgttggatacatgggctagcatgcttgggatgctggttaggattgcatcaactgataagggtgttgagtatgaatacaagggagaaaatctcaggatcaagagtcctatgcttttgcaaatgaacccaattcacaagataattccagttctgatccataatggcacaccaatttgtgaatctgcaattatagtgcagt

SEQ ID NO: 68755 - DNA, 258 bp, Glycine max
  Clone ID: 700841380H1
ccaacagagtacaagagctgctcaacagaagacctcagagatgggccagtccacgaaggaatcggcccagtcagggaaggacaacacccaagggttcctgcagcagacaggggagaaggtgaagggcgcagccaaggagctacagaggctgtgaagcaaacccttggcttgggcgagcatgatcaagacaaccgcagaaattactaataccataattggaagtgctttcttgtagtagtggattacgcagcatggctt

SEQ ID NO: 68756 - DNA, 263 bp, Glycine max
  Clone ID: 700841381H1
gataactttttcccgagcccaattttcaagctcgttctcatccactccaggcccaccgccacctccgctgtgggcttcgccggccctgtgtttgcaggagccgctgaggtcttgcctattgtagattccgatttgagatagattggcgccagagtcctcgaaaccgctaaacaactttgcatcaacaaatccgtaaatgatgtgacagcagaagtggtggaaggtgatcctagacatgttctttgtgatgctgtagataagta

SEQ ID NO: 68757 - DNA, 265 bp, Glycine max
  Clone ID: 700841382H1
aatgcttctttcactctcttcttcccttgctctgtgtcgccgtaacacaaaaaagggaagagagagaaagaaccacccacccaacagcttttgttcttaacaagacaaagcttcgcgtgtgtttgggtttcttttcatcgttccagcttggaaggattgaagtttctgtctttttctgatctccgcgtgcgtggtttggttttgttgttgaagatgttggtagctaatagctttgatctatggcgaaaggacgcttttttctctg

SEQ ID NO: 68758 - DNA, 260 bp, Glycine max
  Clone ID: 700841383H1
ctcgagccgcaaaatcaatactggaaacaattctgggaaactgattgggcacacaaacatgacagcaaccattaaagggacaaatgaacatgcttcacaccatttagttgtaggttccctagtcgaggtcctctctcaagacggtgggatgagaggatgctggttcagagcttctgtcattaagaagaataaagataaagtcaaggtgcaatatcaagatattcaggatgctgtcgatgaaaccaagaagcttgaggaat

SEQ ID NO: 68759 - DNA, 259 bp, Glycine max
  Clone ID: 700841384H1
acagaaaggcaataattgatctttgaaaatgcagggaggaaagctagctggagagtccatcaaggaaacagctgcaaacattggtgcttctgccaaggctggcatggagacaaccaaggccactgtccaggagatggcagaaagaatgacggcacgtgatccgatgcaaaaggagttggcaacccagaagaaagaggcaaagatgagccaagcagagctggacaagcaggcggcgcgtcagcataacacggcggcgaac

SEQ ID NO: 68760 - DNA, 254 bp, Glycine max
  Clone ID: 700841385H1
caagtacgtcatcttggaaccaggcccagcatgtgttggtcatcgcactcactgttagagttagagttagagttagagttggatggagtcgttaacgttgtgaagcatacgcaacaacacaacatgagattgaagaggaacaagttggaggacattccggaggaaacagaacttcctcctattggtattgatactaatccagcagagcttgctgaaacgggccttcacttggaaacagctttggaaatactgca

SEQ ID NO: 68761 - DNA, 132 bp, Glycine max
  Clone ID: 700841386H1
ctatgatcatagatgtgaaatcttgttaccgacaattggccttaaatagactgcgatgatcctgagacagttgtgaatcgtatcacaagctggattgactctgtcagagtccatggcgcctcggctgtcaag

SEQ ID NO: 68762 - DNA, 207 bp, Glycine max
  Clone ID: 700841387H1
gagcgagcgaaagtagaatctgaaaaacaatggcggcgaagctagacacccacgccgtggcttccgatctgatcgacttcctcaacgcttctccaacggctttccacgccgtcgacgaggctcagaggcgtttgcgtagcgcggggtaccaccaactctctgagaaggaagtgtcggaactgcaaccgggccacaagtacttcttca

SEQ ID NO: 68763 - DNA, 263 bp, Glycine max
  Clone ID: 700841388H1
caactacaagaaagaacttccttataaccaaaaccaacaacaactatggcaagttatcagaagcactacgatgatcatggtcgcaaggtcgacgagtatggcaatgttgagaggcaaactgacgaatatggcaacccggttcatgccactagtgtcacttatgtcgccaccataagtgttggtggctacaatgatgacgctaataagctacatgatattactggtgtctatcccgagatagacaccggtagacatcattttgg

SEQ ID NO: 68764 - DNA, 85 bp, Glycine max
  Clone ID: 700841389H1
agttcggttcgagcaccaaacttcctctgcatcacgtctctgtactctgcatggaacgtcgcttgccttcttctgcatcgaggtc

SEQ ID NO: 68765 - DNA, 260 bp, Glycine max
  Clone ID: 700841390H1
cagaggtgaatgcaagtttgatccagagaaaatagcagttaagatcacaaatttcaccaatatccctgctgatgagaaccacattgccgcatatatagtcaaaaatggtccacttgctatgggcgtgcatgcaattttcatgcgaacatacattggtggtgtctcatgccctctcatatgtagctagaaaaggctgaaccatggtgtgttacttgtgggatatggtgcaaaaggcttctcaattcataagcttggcaaca

SEQ ID NO: 68766 - DNA, 266 bp, Glycine max
  Clone ID: 700841393H1
cacgagccgcagtaaaacctcaagctatacaattagggaacacgcgactacgaagaagcagtcagaattgatcgttgaaaatgcagggaggaaagatagcgggagagtccattaaggagacagctacaaacattggtgcttctgccaaagctggcatggagaagaccaaggccactgtccaagagaaggcagaaagaatgacagcacgtgatccggtgcaaaaggagttggcaacccagaagatagaggcaaagatgaaccatgcg

SEQ ID NO: 68767 - DNA, 262 bp, Glycine max
  Clone ID: 700841401H1
gggatccttctggggagtttctggcatctgtcagtgaggactctgtcagagtttggactcttggatcagggagtgaaggggagtgtgttcacgagcttagctgtaatggcaacaagtttcactcatgtgttttccatccaacatattcttcgctgttggtcgttggttgttaccagtcattggagctctggaacatgactgagaacaagacgatgacactatctgctcatgaaggtcttattgcggcattggcggtttctac

SEQ ID NO: 68768 - DNA, 263 bp, Glycine max
  unsure (1)..(263): unsure at all n locations
  Clone ID: 700841402H1
agcattccatagttctcagatagagnacgtctctcgcggcctcttctctccctcgcgccgcccacactaaaaggttattcgtctattattgtttgacgatggctgatgctcatgggactgataagaacattgaggtgtggaaaatcaagaaattgatcaaagctcttgaggctgccagaggaaatgggacaagtatgatttcccttatcatgcctccacgtgatcaaatatctcgtgtcaccaagatgcttggtgatgagttt

SEQ ID NO: 68769 - DNA, 262 bp, Glycine max
  Clone ID: 700841406H1
tctcgagccgaatcggctcgaggtgttattcagtggaacttgtctctggtggatgacgtgactatgggccttaattacgggccttgagtccattctcttgctcgccatgctttgctacttcttcctctgctgtggttgtactctctaatcctcttttttttttttatttcacggatttattttagtttgtttttctatttcatggatgaatcgtagttatagcttaaaatattttctaaggttagttgtgtcggaattgtat

SEQ ID NO: 68770 - DNA, 256 bp, Glycine max
  Clone ID: 700841411H1
gcagcggcggcaacagggagagaagatgaagttcaatccacgtgtgtcgagcagccgccgcaagagccgaaaggctcatttcacggcgccatcgagcgtgcggcgggtgcttatgagcgcccctctgtcggcggactgcggtctaagtacaacgtgaggtcgatcccagtacggaaggaggacgaggtgcaggtgatgcgaggaacatacaagggtcgcgaggggaaggtgactcaggtctaccgtcgaaagtggg

SEQ ID NO: 68771 - DNA, 256 bp, Glycine max
  unsure (1)..(256): unsure at all n locations
  Clone ID: 700841412H1
cttccttccacactccataccaaataattncacgactccttcatagatctctctctcgcccataatcgacccatggtccatacgtgaaatttagacgcggcgatagagcaattgctgaacgtggagaagcagatgaggctcgccggtgacgtggcaggtaccagaaaggcggctaccgatattttgcagctctgcttcgatgcacgagcctggaaaaccctcaatgaccagattgtcgttttgtcaaaacgacgtg

SEQ ID NO: 68772 - DNA, 253 bp, Glycine max
  Clone ID: 700841413H1
gtactctcgtagtttggaactttcggaagtcgcgcgttgtaattaaccgcaacccgaaacggtgcactgcagtcttgtctaccatcggcgttcactgctctcccagagagaggcgagagcactgaaacaaaacaaccatcaaatcaagtttaaatttcagttctgttctgcttctaatggtaatggggagtttcagaaacgctgcaatcaacgtcgtcagagtgatcaattccaacaaagccaccatcgctgc

SEQ ID NO: 68773 - DNA, 254 bp, Glycine max
  Clone ID: 700841414H1
aactgagcatatactgcatacgtaatggagttcccttcttcttcttcttcttcatcctccatcttctccccgcgcccatcagacgacaccgttttctacgccatataccctgtctcacccaccgcaaccaccaccgtgacgctccagtccctccacctcaaaatcctcgaaaccctatctcccttcacccaagactacatatggcagcaccagcccttcgctctctccgtttcaactccgccgaacccctcctg

SEQ ID NO: 68774 - DNA, 259 bp, Glycine max
  Clone ID: 700841417H1
aaacttttcattagtgaatgttgctggtaatgatattgtacaagggaataagaagctcttattggcatttttgtggcagctgatgaggtttactatgcttcaacttctgagaaatttgagatcgcactcacaaggtaaagagattactgatgctgatattctaaactgggcaaacaataaagtgaaaagagcaggaagaacttctcaaatggatagtttcaaggataagaatctttctggtggcgttttcttccttgag

SEQ ID NO: 68775 - DNA, 260 bp, Glycine max
  Clone ID: 700841418H1
aaaatgcaccacacctaaaatcgggtcaaattctaacagttcaaatggattctgtaggaataagatcggctaacccttatttggcgactcctggagcaacggttcatggccattatggggaaatactttctgaaggagatatattagttacatttatctatgaaaaatcgagatcgggtgatataacacaaggtcttccaaaagtagaacaggtattagaagttcgttcgattgattcaatatcgatgaacctagaaaag

SEQ ID NO: 68776 - DNA, 259 bp, Glycine max
  Clone ID: 700841419H1
cacaatcactgtgttccagatttcgatattcacatggatcacgaccacgaataccctattctcacgccttcagccttacctcgccaaaagaaaccctccattgcagacgacgatctcatcgagctgctatggcacaacggccaggtcgtggtgcagagtcagaaccaacgttctctgagaaaacttccgccggtgaccaactctcacgccgcctctcccgccggtccttcaatgacgagagagattcgaccgctggtgg

SEQ ID NO: 68777 - DNA, 259 bp, Glycine max
  Clone ID: 700841420H1
ctcgagccgaaaggaaataattgatctttgaaaatgcagggaggaaagaaagctggagagtccatcaaggaaacagctgcaaacattggtgcttctgccaaggctggcatggagaaaaccaaggccactgtccaggagaaggcagaaagaatgacggcacgtgatccgatgcaaaaggagttggcaacccagaagaaagaggcaaagatgagccaggcagagctggacaagcaggcggcgcgtcagcataacacggcgg

SEQ ID NO: 68778 - DNA, 260 bp, Glycine max
  Clone ID: 700841421H1
atcaatggcttccttatccctctcctctcccccatctctctcttccgcacaccacaacgcctacacgcgccttattctacgcacccctaactcccttaaactgcgcactccaccccactccctccccgccatccgcgccatcaccctcacccaggacgacctcaagagactcgccgccgacaaggccgtggagtccgtcaagagcggcatggtcctcggcctgggcaccggctccactgctgccttcgtcgtcgccaagc

SEQ ID NO: 68779 - DNA, 252 bp, Glycine max
  Clone ID: 700841422H1
agatggtccagattagtaccacaaaaatggagaaatataataactgaatatcgtatagctcaaaataaagatttaaccaaatgcaattcatatgaaaaaagccaattaattctttacaaagaacaacaagtaaacgcattaaaaaaaaaaaattagaaaacaatatagatacgatcttttatcctataattttatcaattatgcagataagaaagactcatatatttatggatatagatccctatttcaagt

SEQ ID NO: 68780 - DNA, 259 bp, Glycine max
  Clone ID: 700841425H1
ctccgctctcaactctctctcctccccctccctctctctctccttctccacctcctcccgccgcttctctctcctccctccaccctcacaccaaccctccaaacccctcttcctcaccctcaaatccaaaccctccgacgacattgacacatcgttcttcgacaacatcaacccgcaagacgacatcacattcaatcccccggagcccccggaagggttcgtggcgcctccctccttcgacgacggccctctggagacc

SEQ ID NO: 68781 - DNA, 255 bp, Glycine max
  Clone ID: 700841427H1
cgctttgctaatcctctctctctctcatacgcatcaatttccaaccatgacggactacaaacaagaacaggatatggaaattgaagcattagaagctatacttatggatgagttcaaagaaatacattctggtgaaagcggcctaagtacttccaatcgatgcttccaaataaaggttgttgcgcaggatgacgatgcagatgggccaataactaatccagctcaactggctttgatcttttcacacacagaaac

SEQ ID NO: 68782 - DNA, 253 bp, Glycine max
  Clone ID: 700841429H1
aaaggggaaagggtttcgatttcggaagaggaacaataaggagagcttctgaaagagagggttcagtgttcctaaaatgaagacgacgaagggcggcaaggtcatgaaccctaccgatgcttaccgaaaggagcttcggaagaaagaattgaaaaggaataagaaggaaagaaagaaggtgagggaggtggggattttgaagaaagatcctgatcaattgaagaagcagattgacaacttggaaatgatgaag

SEQ ID NO: 68783 - DNA, 179 bp, Glycine max
  Clone ID: 700841430H1
ccaaacatctttgagatttcatgagactttctttctttattttcttacaaattgtcatgcttttcttttcccatcacacataatcccctgtctctttgttgaaagcggtaaacattcataattttttttactctttctgactaatggtcaacatgtccttaaacgtgtgatatgagaga

SEQ ID NO: 68784 - DNA, 250 bp, Glycine max
  Clone ID: 700841432H1
attaatgtgtgtttgtcacgagacccatagtgctgccaaattatagtaactctctttctctatctgaagaagaagaagttctgaagaagcatgtgtggaggtgctatcatctcagacttcattggtgtgaagcgtggccgcaacctcgccgcgcaggaactgtggtccgagcttgaccctttctctgacctccttggcttcgataccaccaccaccaccaccaaccaaccactccttccagacaacatag

SEQ ID NO: 68785 - DNA, 258 bp, Glycine max
  Clone ID: 700841435H1
ccgagctagctagctagcaagcaagcacagagatggaggcaaagcgaggccatgctcctcatgtgcttggcacgtgtttcactcttcctctgcgctctaaccctatccgctgctcacggaagcaccacggttcaagacatcgcgagatagttgaaactcggggacaacgagcttctgcgcacggagaagaagttcaaggttttcatggagaattacgggaggagctactccacagaggaggagtatttgcgccgtttg

SEQ ID NO: 68786 - DNA, 248 bp, Glycine max
  Clone ID: 700841436H1
agaaaacctaagcttagaattagaaacaaagaaaagaagaaaggaaagaattgatcgttgaaaatgcagggaggaaagaaagcgggagagtccattaaggaaacagctacaaacattggtgcttctgccaaggctggcatggagaagaccaaggccactgtccaagagaaggcagaaagaatgacagcacgtgatccggtgcaaaaggagttggcaacccaaaagaaagaggcaaagatgaaccaggc

SEQ ID NO: 68787 - DNA, 254 bp, Glycine max
  Clone ID: 700841437H1
atctgattcaggctggggttgatgggttgagggttggaatggggtctgggtccatttgtactactcaggaggtttgtgctgtggggcgtggtcaggcaactgctgtttacaaggtctcgtccattgcttataaaagtggtgttcctgtgattgctgatggtggcatctcaaactctggtcatattgttaaggctttgtcattgggagcgtcaactgttatgatgggaagcttcttagctggtagtcttgaggct

SEQ ID NO: 68788 - DNA, 258 bp, Glycine max
  Clone ID: 700841439H1
cacaaaagtgttccacttgagtgaaaagtagtgtgttaagaactaaacaatttttcaatggcgtccaagaaacaagaggagcgagctgaggcagctgcgaaagttgctgccaaagaactcgaacaagtcaacagagaaagaagagaccgtgatttcggtgttgttgctgaacaacaacaacaacatcatcaggaagatcaacaaaaacgtggtgtaatcgggtccatgtttaaggcggtgcaagacacctacgagaac

SEQ ID NO: 68789 - DNA, 255 bp, Glycine max
  Clone ID: 700841440H1
aggtggctcctgaggacaaggcgagtttatggtcacaacttcattatgtttcgtgtaataatctggaaatgcaagaagcttatcttgtcaatctcgtaaatgtgttacgagaattgtatttgcacagtccagaggaagctcgccaattgagaaggaaagctctctctcgtattgaatggctgcaaaaagctgatgtgcctaccatagcacagattgaagagtttcattcgatgcagaggatgatgaatgctcctg

SEQ ID NO: 68790 - DNA, 254 bp, Glycine max
  Clone ID: 700841442H1
cttccttacaatcaaaaccaacaacaactatggcaagttatcaaaagcactacgatgatcagggtcgcaaggttgacgagtatggcaacgttgagaagcaaaccgacgaatacggcaaccctgttcatgctgctagtgtcacctatgtagccaccagaactgctgctggtggttacagtgatgacattaataagcaacatgataccaccaatgcctacggcgtagacactggtagacagcattctagtggtggc

SEQ ID NO: 68791 - DNA, 253 bp, Glycine max
  Clone ID: 700841443H1
ccttcatctcttaaaagacaaacttctccactacgcactcatcgacctctccaaaaaacatggtcccttattctctctctactttggctccatgccaaccgttgttgcctccacaccagaattgttcaagctcttcctccaaacgcacgaggcaacttccttcaacacaaggttccaaacctcagccataagacgcctcacctatgatagctcagtggccatggttcccttcggaccttactggaagttcgtg

SEQ ID NO: 68792 - DNA, 250 bp, Glycine max
  Clone ID: 700841444H1
tatggctgccacggtgaattcaatgtctttgatcgtgtcactgttcggcgtggtgtccttcattttgggtgttgttgctgaaaacaagaagcctgcggcaggaacacccgtgcctggtttggatggtgtctctgtcacctgcaagtacccagctgatccaactgttgcattggggtatctttctacagcatttcttgttgcatccactgtgactggatatctgtctttgttttacccttacaaaggaaag

SEQ ID NO: 68793 - DNA, 250 bp, Glycine max
  Clone ID: 700841445H1
gcggacacgcgaactgatgtgtattcgaatcctaggagctagtaatcgacgatatgcttatattggtgacattgttgttgctgtaatcaaacaagcagtaccaaatacgaacttagaaagatcagaagtgatcagagctgtaattgtacgtacttgtaaagaactcaaacgtagcaacggtataataattcagtatgatgataatgctgcagttgtcattgatcaagaaggaaatccaaaaggaactcga

SEQ ID NO: 68794 - DNA, 254 bp, Glycine max
  Clone ID: 700841446H1
aagagaacaacagcaatagggtgatagagagagaggttcacgttgagacacacagaaaagagtccctccctgataagggaagggttgtgatagagagtgagaagaaggagaaagagagagagttggcttctgatagagccaggtctggaaatatagttaaggaggacaaagaggttgaagaaggaataagaggaaaagaaagtggtggtggtggtggtgttcagcatgagaggaagtttgaaacgaaagttgaa

SEQ ID NO: 68795 - DNA, 257 bp, Glycine max
  Clone ID: 700841448H1
gggcttcttgggcgttgtaattttaaagctgatatgcttgaccgaaaagtttcactattgagtggtggtgagaaggcacggctggccttttgcaaattcatggtaaagccatcaactatgcttgtgttggatgaaccaaccaatcacttggatataccttctaaagaaatgctcgaggaagcaataaatgaataccagggcactgttatcacagtatctcatgaccgatactttataaagcaaatagttaatagagt

SEQ ID NO: 68796 - DNA, 255 bp, Glycine max
  Clone ID: 700841451H1
aagagagagaagaagaaaagaagaacaaagatgcaatcctcaaaggagaagatgaaaaacatggcaagtgctgccaaggaacaagtcgacatctataaagccaaaatagacgagaaggcagagaaagcaacggcaagaacagaagaggagagggtgatagcccatgagcacgcaaaggcaaaggaagctggagcaaagatggagctgcatgaagctaaagcaaggcatgcagcagagaagctaagcgccaaccaa

SEQ ID NO: 68797 - DNA, 255 bp, Glycine max
  Clone ID: 700841454H1
caatagcaagaagcgccgccatgctccgcccgcggcacccgacgccgttttccgaatagtgtgtccggctgcaaagacggcggacgtagcggctatcggcggcgacggagctaagattctggtggaggacttggtcggcgcggaggagcgcgtggttgttatcgtgggcgacgagtctgctgcgcaggttgcgttgattagggttttggagagaacgatggatgaagaaactaagaattcgacagtgtcgtgtaa

SEQ ID NO: 68798 - DNA, 253 bp, Glycine max
  Clone ID: 700841457H1
tggcagccatgttcttaaccagaagcgcgctttttcgcttttcaaagtctctcccttatgccccttcactctcccttaaaccctccatggtcaccttctcctctactcccaattcaggctggagaaatgcagcagaaggaggaagaagagacggaagaaccaattggacgtatgattctgccgaggcaagacgcgaggcagatgaaatgtctgagagtgccaaagaaacgatgaatgaaggctatgacagggc

SEQ ID NO: 68799 - DNA, 251 bp, Glycine max
  Clone ID: 700841458H1
agacaattgaagctttagatcatcttaagggaatgccttctcgcggtgattttgagcttggggagattccttccttaatggaccttggccttaatccatctgcaacaatgtcacaggttttgtattttaaccaccttttcctccttcccaaccaaccttatatctccgcttattatctgtaacttgttgtgtctttgtttctatgcattcttgtgttagcatcaatggtttatatatatattggttgctaa

SEQ ID NO: 68800 - DNA, 252 bp, Glycine max
  Clone ID: 700841460H1
agcagtagccgagattccgtgagttgcaaaaatgaagacgattctttccaccgagaccatgaacatcccggacggcgtgagcatcaaagttcatgccaaggtcatcgaagttgagggcccccgcggaaaattggtgcgagacttcaagcatttgaatctcgattttcagctcattactgacgaaaacggtaaaagaaagctgaaaatcgacgcgtggtttggttctcggaaaacatccgccgccattcgcac

SEQ ID NO: 68801 - DNA, 252 bp, Glycine max
  Clone ID: 700841462H1
tgatgttgaaactcctaaaggttccatgttggatcttaaaatttctcagtctaaaattgcacttcccaaaaacacagttggaggaaccattctgcgtagtgatctattggcaaattttttgacagagggcaattttagagcaagtgttgatttgcagcgcactcatcgtattaaaggaatgattaaaatggtggccacagttggtattcctgagaatacaggtatagcattggcctgtgctatgaatagttc

SEQ ID NO: 68802 - DNA, 252 bp, Glycine max
  Clone ID: 700841463H1
ccacactacaacctgaacgcgaacagcataatatacgcattgaatggacgggcattgatacaagtggtgaattgcaacggtgagagagtgtttgatggagagctgcaagagggacgggtgctgatcgtgccacaaaactttgtggtggctgcaagatcacagagtgacaacttcgagtatgtgtcattcaagaccaatgatacacccatgatcggcactcttgcaggggcaaactcattgttgaacgcatta

SEQ ID NO: 68803 - DNA, 255 bp, Glycine max
  Clone ID: 700841464H1
gcaaaaatggcagcttctggggttcattctagcaagcaaatgaggaggttggaatcgaggaagtcacattcttggtggtgggatagtcacatcagccccaagaattctaagtggctttcagaaaaccttgaagagatggaccggagtgtgaagcgaatgttgaagctgatagaagaggatgcagattcatttgccaaaaaagctgaaatgtattatcagaagaggccagaattggttgctctggttgaggagttt

SEQ ID NO: 68804 - DNA, 253 bp, Glycine max
  Clone ID: 700841467H1
tgcagaccgagctagctagctagcaagcaagcacagagatggaggcaaagcgaggccatgccctcatgtgcttggcacgtgtttcactcttcctctgcgctctaaccctatccgctgctcacggaagcaccacggttcaagacatcgcgagatagttgaaactcggggacaacgagcttctgcgcacggagaagaagttcaaggttttcatggagaattacgggaggagctactccacagaggaggagtattt

SEQ ID NO: 68805 - DNA, 252 bp, Glycine max
  Clone ID: 700841468H1
cgaaagtgaaataccactacttttaacgttattttacttattccgtgaatcggaagctgggcactgcccctctttttggacccaaggtcggcttcggccggtcgatccgggcggaagacattgtcaggtggggagtttggctggggcggcacatctgttaaaagataacgcaggtgtcctaagatgagctcaacgagaacagaaatctcgtgtggaacaaaagggtaaaagctcgtttgattctgatttcca

SEQ ID NO: 68806 - DNA, 250 bp, Glycine max
  Clone ID: 700841469H1
gctcgaaatgcaatagagaatttgaatggatctgagcttcttacccaaaccatttatgttgactgggccttcagcagtggacctattaacgagtcagtcagaagaaagaatgctagaccacctcgtgaacggcgttccaggagcccccggaggagatattgacatgtgtagtgagtaaatgtttgtgttgatgtgtgtgaacccgtaagtgagcggcttggtttctattgctatagctgtggaggatttt

SEQ ID NO: 68807 - DNA, 254 bp, Glycine max
  Clone ID: 700841470H1
cggctcgagcggctcgagtaacattttaaagtagataagccttccccgcccactagaaatagagagaaggtaaggagggtttggttttgggtactttacaaattacaataattagcgaaagagagaagacatagcacatagagtcatagagacatcatcatcgtatgggaatggaagaggagagtagcaacaacagcagcatcatagaaggtggtgcttcgctgccatcaacgggttcagacgccaagaagcga

SEQ ID NO: 68808 - DNA, 254 bp, Glycine max
  Clone ID: 700841471H1
gtttcattcatctttgtgtttcattcatctttctcagtcaaccatgaactctcgatcactctttgccttcctcttcgcaatttgcgcgcactccgtcgccgttgccgacacctcctccgcgtatccttccatccccggcacggaaaccggtgagtgctccctccgcggcgtgggcgtgggcgacggtgttctggttcctccacggcgagaagtatacgaggaggggcgaatcttcgacatcactcacagatatg

SEQ ID NO: 68809 - DNA, 253 bp, Glycine max
  Clone ID: 700841472H1
tctcgagcgaatcggctcgagatgggaaacaaaactaccctttttcttttgctctttgttatttgccatggagtggccactacaacaatggccttccatgatgatgagggtggtgataaaaagtcaccaaaaagtttgtttttgatgagcaactccacgagggttttcaagactgatgcaggggaaatgcgtgtgctgaaaagccatggtggtaggatattttataggcacatgcacattggcttcatctcta

SEQ ID NO: 68810 - DNA, 250 bp, Glycine max
  Clone ID: 700841473H1
acaaaacagagcaaagagagagtgtgtgaaaagtgaaacaaaaaacagaacaacaatggcgacacttaaggttcctcagcctcttccccccgttgcagatgattgtgagcagctccgaaaagccttctcaggttggggaactaacgaggagctgattgtatcgatcttggctcataggaatgctgctcagaggaagcttatcagagaaacttatgcccagacctatggagaagatctcctcaaggccttg

SEQ ID NO: 68811 - DNA, 250 bp, Glycine max
  Clone ID: 700841474H1
gaatcagcaattcaggcaacggaagcttcaaaaagtcaagcaaaacagcttaaagaagaaaaatgtggtgatcctgatggaaccaatcatgcttggaaagaagagttagaaactgccgttaataattttgcatctgtaattacagaacttgatgttgcaaagcaagaactgagtaaaattcgtcaggggtatgatttatccttggaagcaagagtttctgctctcaagcaaacagcagaagctgaagatg

SEQ ID NO: 68812 - DNA, 246 bp, Glycine max
  Clone ID: 700841476H1
gctgaaaagaagtgtcaagaagtttcaatagcatatgaggttttgaaggatgaggaaaggcgtcaacagtatgatcagcttggtcatgatgcttatgtaaaccaacaaagcactggttttggaggcgagggtggcttcaatccttttgagcagatattccgtgatcatgattttgtcaagagcttcttccatgagaatattggtggagaggatgtcaagacttttattgaactatcttttatggaa

SEQ ID NO: 68813 - DNA, 248 bp, Glycine max
  Clone ID: 700841477H1
ggaaataattgatctttgaaaatgcagggaggaaagaaagctggagagtccatcaaggaaacagctgcaaacattggtgcttctgccaaggctggcatggagaaaaccaaggccactgtccaggagaaggcagaaagaatgacggcacgtgatccgatgcaaaaggagttggcaacccagaagaaagaggcaaagatgagccaggcagagctggacaagcaggcggcgcgtcagcataacacggcggc

SEQ ID NO: 68814 - DNA, 251 bp, Glycine max
  Clone ID: 700841479H1
atcagggtcgcaaggttgacgagtatggcaacgttgagaagcaaaccgacgaatacggcaaccctgttcatgctgctagtgtcacctatgtagccaccagaactgctgctggtggttacagtgatgacattaataagcaacatgataccaccaatgcctacggcgtagacactggtagacagcattctagtggtggctacgatggtgacactaataaacatcatggaactactggtggctataatgatgac

SEQ ID NO: 68815 - DNA, 254 bp, Glycine max
  Clone ID: 700841480H1
ctttgctttatgtttcacaggactcaacttcttcgtctttatgctttcatagaactcaacatcctcgcctttatgttttcatcagactcaacgtcttcgtctttatgtttcacaagactcaacgtcttatgtctttatgtttccataagactctatgtcctttgtccttatgtttcataggactcaacgtcctatgtctttatgtttcataggactcaacatcctctatctttatgtttcataggactcaatgt

SEQ ID NO: 68816 - DNA, 252 bp, Glycine max
  Clone ID: 700841481H1
ctcacaatcagattgacccgcgaacttgtttattcatctaccgtcgggagggaggggatgaccacggcgccccgtgcgcccggcctcctcgtcctcgcgacaaacacaaaccccggcgcttcgtgcgccaaggaactcaaatctgttaagtgcgactcccgggggcccggagacggtgtcccgcgggagtcgtcacgacacaacatttacatacaatgactctcggcaacggatatctcggctcttgcatcg

SEQ ID NO: 68817 - DNA, 250 bp, Glycine max
  Clone ID: 700841482H1
tgcgaaagatttgccaaggatgttttcattaatcaagaacgaaagttgggggctcgaagacgatcagataccgtcctagtctcaaccataaacgatgccgaccagggatcagcggatgttgcttttaggactccgctggcaccttatgagaaatcaaagtctttgggttccggggggagtatggtcgcaaggctgaaacttaaaggaattgacggaagggcaccaccaggagtggagcctgcggcttaat

SEQ ID NO: 68818 - DNA, 252 bp, Glycine max
  Clone ID: 700841483H1
caaaaccaaaacagtaaagctaacttcaacacctttaattttctaaaagtaattcagcggctgaataccaagcggagaagatgagtcaggagcagccacggcgtcccaaaggccaaaaccccatcaaatacggcgacgtttttgtcgtctccggcgaccttgcacagaagcccgtcgcaccggaagatgctgccatgatgcaaagcgcggaaactcgagtgctcggacaaacccaacccggcggatcagctt

SEQ ID NO: 68819 - DNA, 252 bp, Glycine max
  Clone ID: 700841484H1
cttgcacgttggaaaaaggtggtggtactcagaaaccaataagagaagaagagagagagagtgaaagtgaaagatcagcgtgggaacagatttccaactacagtgatcaagccacacaaggtgtgaaggaaaagtacgagagagcaaagcaagcagcaagcgagacactgaacaccacaacacaaaccgcacaagagaaaagcgcacaggcaaagaatcttgcagcacaagcaaaggacgcaacgttagaga

SEQ ID NO: 68820 - DNA, 89 bp, Glycine max
  Clone ID: 700841485H1
gcggaaaacgatataataataacttggtccagagcatctaccattatacctacaatgattggccataccattgctatccacacaacata

SEQ ID NO: 68821 - DNA, 250 bp, Glycine max
  Clone ID: 700841487H1
aaaagaggaaaaaaaaaaaacgaaaatgctgagaatcgccgcaagcgcaaagagaattgttcaaacggcgtcgttggaggcgccaccgttggggattagggttctgccgcgtctctaccacgagagggtggtggaccactacgacaacccccgcaacgttggatccttcgacaagaacgaccccaccgtcggaacgggtcttgttggtgcacccgcgtgtggcgacgtcatgaagctccagattaaggtt

SEQ ID NO: 68822 - DNA, 250 bp, Glycine max
  Clone ID: 700841488H1
gtttccttgacaatctaattctgcaaaaatggcaagcaataaggagtctaagttcccagcacagagccagaaaactcagccaggaaaagaacatgtaatgaatccactcccacaagccacaaatcctgatcacaaggccgccaataaactccagggaaaggtggcgttggtgacaggaggtgactcaggaattggcagagcggtttgcctgtgtttcgcaaaagagggtgcaacgtggcctttacatacg

SEQ ID NO: 68823 - DNA, 246 bp, Glycine max
  Clone ID: 700841489H1
gaagcccaaaatgggaacaatggagagcttgaagttcttggtgtcttcaaagtacatcagagatcttgccactttagtggttgcttatggaatcagcatcaatcttgttgaggttacctggaagtctaagctcaaagctcagtttcctagtcccaacgagtactcttcttttatgggtgacttctcaactgcaactggaattgccacattcacaatgatgcttgtcagccaatttatatttgacaa

SEQ ID NO: 68824 - DNA, 244 bp, Glycine max
  Clone ID: 700841490H1
ggctgaagcacaactacgagaccagcatggcaaccctgtcccactcaccgatcaatacggtaatccggttatcttaactgacgagcgcggtaatcccgtccaactcactggtgtcgctaccaccgctaccggcacagcaggttctgggtttgggtcctatggtaccggtgcttacggtggtggtgcaagtgcaaccaccgttgcagatcttttggcaacccaaccaaggagtggcagggaggct

SEQ ID NO: 68825 - DNA, 245 bp, Glycine max
  Clone ID: 700841491H1
ttcagaagctcctcggagcatttatctgctgccaagaggaattcagagccatcctgttgaataacaaagagcaggtcacaaaacccccccttgatcgcatgatttctgaattctttgagaggtcagtgaaggcgcttgacatttgtaatgctagccgagatgggattgagaagattcgcacatggcaaaaccatctggaaatcctgttttgtgccttgggttcgagtaagagagcgttaactgaa

SEQ ID NO: 68826 - DNA, 245 bp, Glycine max
  Clone ID: 700841493H1
ctactacaagtacttccttacaatcaaaaccaacaacaactatggcaagttatcaaaagcactacgatgatcagggtcgcaaggttgacgagtatggcaacgttgagaagcaaaccgacgaatacggcaaccctgttcatgctgctagtgtcacctatgtagccaccagaactgctgctggtggttacagtgatgacattaataagcaacatgataccaccaatgcctacggcgtagacactggt

SEQ ID NO: 68827 - DNA, 244 bp, Glycine max
  Clone ID: 700841494H1
ctgtttttatacaaacctcatgtaggtgggagagagagtgtctttcttggctcatagcatagcatcactatggctcttctgagtcgagcctcttcacgcttccctcagctggtttcccctcaaagagttgtttccctccacacaacgctcccatatacttaacgcatcaacatccacacccacgcccgccccatatgccccgccaccgcctccgtccgcttcccctcccgccggcgtgtcgaag

SEQ ID NO: 68828 - DNA, 253 bp, Glycine max
  Clone ID: 700841495H1
ccccttactcctccaaactttcccggttccatttcgccggaataatcgttccttctcatgcttccgaaatcagttccctcagcggtaccccaacccaaaacacttgcttccaaaatcaccctaacttcttccctcacctccctcctccaaccccaaaaccctcgcacatggatcctcttcaccgtcctcttcatccagatcctcctcctctgcaacctccatagcttcccttcctcaattccccctcccctct

SEQ ID NO: 68829 - DNA, 251 bp, Glycine max
  Clone ID: 700841496H1
gaagggaagaaggttgagagcgcttccggggatacgaatttccaagctttgaagacttatgggcgtgaccttgttgaacaagcggggaagcttgaccctgttattggccgtgacgaagagattagaagggttgtgaggattctatcacggaggactaagaacaacccggttctcattggagaaccgggtgtgggaaaaactgcggttgtggaagggttggcacagaggatagtaagaggggatgttccaag

SEQ ID NO: 68830 - DNA, 251 bp, Glycine max
  Clone ID: 700841501H1
cccaccgccttctccctcgaaacccttccccacaagccagaaacagactcccctcgacggacccaccatccaagactcgccggaaaccctcgccggcgacgccccctccgttcccaccgccgaaaagcctccgactttggactctgcggaaccggaacccgcggaaatgattgatgggtctgacgggaccgtggtggtgagtaccaattccgagcctttctacgtgagaagggttctgaaagaagcgcttg

SEQ ID NO: 68831 - DNA, 245 bp, Glycine max
  Clone ID: 700841503H1
atttcatatataagaaaaaggaataatccgcccggttcaagatttatcttggataatgagtcggaccgcaccaccatcaatccatttttttctattgatttgagggaaaaaattcaacaatcacttagtaaaaatcatggaactattcgtatgttgttgaatagaaatgaaaaatgccgatctttgataattttgtcatcatcgaattgttttcaaatacgatcattcaaccatggaaaatatta

SEQ ID NO: 68832 - DNA, 239 bp, Glycine max
  Clone ID: 700841505H1
aaaacaaaaagtttacgttacaaatcgcataataaccgtcctaagtttattgagagaattttgcaagtgtgagaaacatggcatctcgtcaaaacaacaagcaagagcttgatgaaagagcaaggcaaggagagactgttgtcccgggtggaactggtggcaagagcctggaggctcagcaacaccttgctgaaggaaggagcaagggagggcaaacaaggaaggaacagctgggtaca

SEQ ID NO: 68833 - DNA, 237 bp, Glycine max
  Clone ID: 700841509H1
gcgcagaacctaaccctcacgaaagcccttttcgattccgataactctcgttgttccgaaaccctaaccctaaccgggttttttcgtttgtttggattgaattggcatcggagggaggcgatcgattggaaattggtagtagtagtttagcgttgaagaacgatgtctgctgctgtgtgcggaagcaagagatctttcttcgaagagcttcctccttctccgccactctccaagagg

SEQ ID NO: 68834 - DNA, 238 bp, Glycine max
  Clone ID: 700841510H1
atacaattctcctcatcgctcttctcttcatcgcccacacctgctgcgcctccaaatggcaacagcaccagcaagagagctgccgcgagcagctcaaggggatcaacctcaacccctgtgagcacatcatggagaagatccaagctggccgccgcggcgaggacggcagcgacgaagatcacattctcatcaggaccatgccgggaagaatcaactacatcaggaagaaggaaggaaa

SEQ ID NO: 68835 - DNA, 238 bp, Glycine max
  Clone ID: 700841513H1
ttctgtaagattaaatggctgaggttttgaccaaggcgagtttggtttcctcttcttcttcctcatggcatggggttggtcaacggcatcatcgaagggtttcaacggtttccaacacttgtagcttcggttctggcgtgggaaagttctcttctttgaagatgaagtctcaggttctcagatcttggtcctcttcttctgagtttcagggtataaagcttgtctttcatgtaaatag

SEQ ID NO: 68836 - DNA, 240 bp, Glycine max
  Clone ID: 700841515H1
gttgcagaaagaaaagaccatcaaagtttcacttcagccttatccggtttagggtttcggtttttgacccaacctttgacgtatcgaaaccttaagtttcggatcaggtctgagcaatctggttggtagaacctttggtcttagagagtcaagttttatgtctgaattagacgatcaaattcctactgccttcgatccttttgctgatgcaaatgctgatgactcgggtgctgggtcaaa

SEQ ID NO: 68837 - DNA, 247 bp, Glycine max
  Clone ID: 700841517H1
aaacaatacaaaataattcctactactgaaactaacttacaaacttttctttttcgtctttttttttacttagttgatatagattcattacatatactccagtaatcttttaaaataaaaatgagtcttatgcgtcaagaatggtcgggatagctcagttggtagagcagaggactgaaaatcctcgtgtcaccagttcaaatctggttcctggcacatgattcatttgtctgaatatctatttaag

SEQ ID NO: 68838 - DNA, 245 bp, Glycine max
  Clone ID: 700841518H1
caaaacagtaaagctaacttcaacacctttaattttctaaaagtaattcagcggctgaataccaagcggagaagatgagtcaggagcagccacggcgtcccaaaggccaaaaccccatcaaatacggcgacgtttttgtcgtctccggcgaccttgcacagaagcccgtcgcaccggaagatgctgccatgatgcaaagcgcggaaactcgagtgctcggacaaacccaacccggcggacagctt

SEQ ID NO: 68839 - DNA, 238 bp, Glycine max
  Clone ID: 700841519H1
gcgatgcattaaattataaagatagtcttcaatcagaattggttgctggttcttctagtactggtgacaatactagtgatgtcgaagatgatattggtgcaaagaatgcaggtagccaatatagtcatgtatgcaggattgatctgcttgaggaaatcattgatgaggcaaaaactaacaagaaaatgttgttttcatcaatggaatctcttatcaacttaatgagagaagtggaact

SEQ ID NO: 68840 - DNA, 235 bp, Glycine max
  Clone ID: 700841520H1
cgaagccttcattttgattttgttcctcgtcactgcgcatcatgtacagagttgcagcttcatcattcagaaggcatctcaagggccatggaggtaacttgggatccattaggttttcaacttcggccgcggtagctgcaaggacttcatctggtggtttgtttagctggcttactggagagcgttctagtgctcttcctcctcttgacataccccttggtggcgttgctctccc

SEQ ID NO: 68841 - DNA, 235 bp, Glycine max
  Clone ID: 700841522H1
cgttatttccctaagcatggcgcataggttgctcagagatcacgaagccgacggttgggaacgctccgacttccccatcatctgcgaatcctgcctcggcgacagcccctatgttcgaatgacaagagctgagtatgacaaggagtgcaagatttgtacacggccattcactgtttttagatggagacctggtcgagatgcaagatataagaaaactgagatctgtcagacatgt

SEQ ID NO: 68842 - DNA, 234 bp, Glycine max
  Clone ID: 700841523H1
caaaaatggtgctaacttcaatttcaatagtctcttcttcatcttcattcctctcagattctccttccacttcttcccctaccaccagaatcagaccattcttcttccattcctccaaccgagcccctgtttttgtgttccccagagcacaccttcccagtgctaccctcagagcctcttcttcttccgtttccacgccgcatgaaaatgggtcgccggaacagttcttgaaga

SEQ ID NO: 68843 - DNA, 233 bp, Glycine max
  unsure (1)..(233): unsure at all n locations
  Clone ID: 700841524H1
catcacacatccatcagaaacatacacaatattctctttcaaatggcgcacaacaacaaaatcaccgagacgagttcgggaacgaccagagggcctatgatgtccgccaccgcgatctcgcggtgggnaaccagttcggaagccgaactgccatagaccccgtggcgaactacgcttacgggaacatagggagtggcgggtacggagcgccacccacaggagaaccgtatgct

SEQ ID NO: 68844 - DNA, 235 bp, Glycine max
  Clone ID: 700841525H1
aacaaacccagacgctaattctcccttctctatccccgcaccatcttcttcttcttcttccatttatccctcagtggaaacaacagagaatctcatttgggaagagccaaacacgactacagaagaagccatggaaaacgttctggtcacggtcccgggtgcgattctgcatctgatagaaaaggattccagcgtgcaccttgcttcgggcgacctcaccatatcgaccctcgga

SEQ ID NO: 68845 - DNA, 233 bp, Glycine max
  Clone ID: 700841527H1
ctcgagccgctcgagccgattcggctcaggcggaggaaaagagactaacaaggattccgctagtaaaggcgagcgaaccgggaaaagcccaccatgaaaatcggtcgccctcggcgtccgaattgtagtctggagaagcgtcctcagtggcggaccgggcccaagtcccctggaagggggcgccagagagggtgagagccccgtcgtgcccggaccctgtcgcaccacgaggc

SEQ ID NO: 68846 - DNA, 235 bp, Glycine max
  Clone ID: 700841528H1
acagccttccaatggaaacatacaactgccaagggcactagaatctcagcttgaaatcccactccctgggcttacctcaccgaagcatccaaatttgttggtgggtagagcggaaatgcgtcatgcaaaaagcccggcgcaggagcaagtgaaccaagaccatgggcatcaaaagaagcctcctacacctgctaagaaaaaaatcaaattctgtggtgcatctgtgaggcgatca

SEQ ID NO: 68847 - DNA, 239 bp, Glycine max
  Clone ID: 700841530H1
aaagctttctagctggtcataatatcaccattactgatggtattgacaaaactagtgcaactttgcaatttagaaagttagcagattgtgattttctcaagagaaactttaagcagatgtctaatgttttgtgggtggctcctgaagacaaggcgagtttatggtcacaacttcattatgtttctcgtaataatctggaaatgcaagaagcttatcttgtcaatctcgtaaatgtgtta

SEQ ID NO: 68848 - DNA, 239 bp, Glycine max
  Clone ID: 700841532H1
atcagtacccatttttgtactaagaagcatttgttacatttatgtaaccaaaggaaaatcaaaagtacgcaggaggtgaagctcggtggcgaaatcaacatgcaacgcagtgaaagcatgcgactaaaggagaagaaggtgaaggatttgatggttgacaagaagaggctagtggaggtgccgtacatggcgtccctggcccacacaatgactacactggtggcgaacaaggttgtggc

SEQ ID NO: 68849 - DNA, 234 bp, Glycine max
  Clone ID: 700841537H1
acaagaagggcacgatcgagaaactgcaaccaagcagcgatgttgctcatagccgaaatatcgaatcctcggagatcgaagacaggaagccggagattctgaaaagcggaggaggttgtcttccgccgcctgtgccggtgcctgcgccgccgcaagcgacggcgaagacggattacatgtacttcgacccgtcggattcaatcccgaagctgcacacggactcgagctgttcgg

SEQ ID NO: 68850 - DNA, 232 bp, Glycine max
  Clone ID: 700841538H1
gtttgtttcttcagcaactattctgtgcatctatgtgttttccctctcggctttgtacatcaaggcacaaatcagactacctatgaaaatttccggtacagagctgacggaaggatcaatgtttttaaccggggctgcttaaataattttctggaaatgttttgcacaaaagtaaagccctcaaggaacaatttcagggcatttgctcgagaggaggtaccaccgagaccgc

SEQ ID NO: 68851 - DNA, 232 bp, Glycine max
  Clone ID: 700841540H1
ctcgagccgcgagtaaggagactgagaaaacagaactatacaaaatggaagatacacttgctgcgttgaggtctttgatgctttctcagtctccaccgcttgatgccttagttgttccttctgaagattatcaccagagcgaatatgtgtccgcacgagacaagcgccgcgaattcgtttccggcttcactggaagtgccggcttggcacttataacaaagaatgaagcact

SEQ ID NO: 68852 - DNA, 230 bp, Glycine max
  unsure (1)..(230): unsure at all n locations
  Clone ID: 700841541H1
tncagcgattcggctcagaatctatgaccactaatccaatgggatgggatggatcagtgaatcctaaggtaaaaatgtttgaacaagcacaaaactgccttcttcctatgggaattacctctgaaaatgttgcacagcgctttggggtttcaaggaaggaacaagaccaggctgcagttgagtctcacaggcgagctgctgcagctactgctgctggtaaatttaaagat

SEQ ID NO: 68853 - DNA, 233 bp, Glycine max
  Clone ID: 700841542H1
acgattttcaggaggctaaagccaagacaacacaaactgcgaacaaggccatggaaactggtaaagatgggaaagaagccgcagagtcatggacagaatgggctaaagagaaactcactgaaggtcttggcttcaaacatgatcaagaatccaccactaagaaagtctctgactatgccggtgatgctgctcagaaatcaaaggactatgccggtgacactgctcagaaaacc

SEQ ID NO: 68854 - DNA, 232 bp, Glycine max
  Clone ID: 700841543H1
gtggtgagataaagtcatggtggaaatcctctctagagaaatggttctgttgatcaagggcatatgcatatgctattccatatgtacctggtagtcttgtaagtcatggaaatccttcgattctctgtttcattatttcgacaaaagcatagtgagacacaatcaaatacggaagaaaaaaaaagttactaatagagtgcatcattagtatttttgtgttttttactttgaa

SEQ ID NO: 68855 - DNA, 235 bp, Glycine max
  Clone ID: 700841545H1
gcaaagcaccagcgtccagcgactcaaatctctctctctctctcttcattatcttcacaatcgaagaattgcagtgagtgagatgagttcagcggatcatgactccgaccctcccatccgactcgacttgcctccgctctcaccgagcctcttcgattccgaaccatcatcggagctccaacaacaatccaacggatccgccgcccgaccctcctcctacccctccagccccact

SEQ ID NO: 68856 - DNA, 234 bp, Glycine max
  Clone ID: 700841546H1
agagaaaatgaacagtgatgaagaccagcagaggcctaagaagaaacaagaagaggattgtccgtatattgatttggaggcaaatattgaaaatcaagaaacagttgctgcaagcaattttagtagggatcaaaattcagtaacaattgttgttgatgaagatcagcaaaggcccaagaggaaacagaaagatgatcattatattgacttggaggcaacacttgaagatcaaga

SEQ ID NO: 68857 - DNA, 236 bp, Glycine max
  Clone ID: 700841547H1
ctcaaattaatactacatgtatgtatgaatgtcttccaacaaaaaaatcggcaagttggacctggacaccttaattcttttttatgctgctaatggtaatttgaggctcaactaaaaaacatcctcagattgaaaaaaagaaaagaacccaccatggtttgtgtggctttttgaaaatcgaaaggacaaaataaaaagaacagagattagttagtaagtactacagtacaagacta

SEQ ID NO: 68858 - DNA, 234 bp, Glycine max
  Clone ID: 700841548H1
aagatcatacatagtagtgttggtgggttgcaaagatgcttgggggtcttctccataggggtcataagataaaagggacagtggtgttgatgcgcaagaatgtgttggacgtgaatagcgtaaccagcgttgggggaattattggtcaaggtctcgacttagttggctcaacactcgatactcttactgccttcttgggccgatccgtgtctctccagcttattagtgctacca

SEQ ID NO: 68859 - DNA, 228 bp, Glycine max
  Clone ID: 700841553H1
ggattttcttgtgggtagggggtttctcctctctttctctgcagtttgatggatcgggaaggaggatccaacgccggatcttgctactactccgttctcgggattcgtagggatgcctccttctctgatattcgcactgcctaccgcaaactcgctatgaggtggcacccggacaagtgggctctgaatcccgcaaccgccggcgaagcaagcgccggtttcagcaaa

SEQ ID NO: 68860 - DNA, 227 bp, Glycine max
  Clone ID: 700841554H1
gtgactctggagtttatgacacagaaggacgttatgtgccagcaaatattgagaacatattcagtaagtatgctcgtacagtacctgacaagctcacacttggggagctctgggacttgacagagggaaaccgaaatgcttttgacatatttggctggcttgcagcaaaatttgaatggggggttctgtacattctggcaagggatgaggaaggtttcctgtctaaa

SEQ ID NO: 68861 - DNA, 231 bp, Glycine max
  Clone ID: 700841556H1
attatgacatagggtcaacaataagagacaagattattccccatgctgtatcatggtttactggggaggccattcagggggatgagtttggagatctggaggatgacgaggatgatgaagatattgaagaggatgatgatgaagaggaggaggaagatgaagatgacgatgatgacgaagatgatgaggaagaaagcaagactaaaaagaagttggtgtcaatttatctgt

SEQ ID NO: 68862 - DNA, 231 bp, Glycine max
  Clone ID: 700841557H1
gggaattgaattgcagctgcaggggtggtacaacagatttcaaagggacgaagtggtggcacagtggaaaaaggtgaagggaaggatgtctctgcacgttcactgccacattagtggaggtcattttctcttggatatattagcaaggttaagatacttcatcttctgcaaggagctaccagtggtaagctacttttgcttgcaagcatcaaattatggtttgtttcactg

SEQ ID NO: 68863 - DNA, 231 bp, Glycine max
  Clone ID: 700841558H1
tgtttgttttgtgctttagataaaagttctgccaaatcaagaggggttttaagatcatagtgtgtgttttgcaacaatggctaagttctttgctgctatgatcttggcactctttgccatttccatacttcaaacagtggtaatggctgctaatgaacaaggaggccacttgtatgacaacaagagcaaatatggaagtggaagtgtcaagagttaccaatgcccatcaca

SEQ ID NO: 68864 - DNA, 230 bp, Glycine max
  Clone ID: 700841559H1
caccgagattcattcttcaccaaaacttcgcaaagaaacactacacatccatggcaactgctggcgtgcaagaagttcgtgttccccctctaacttccacctctgagccaccttctctctttgacggaaccaccaggttgtacatcagttatatttgtccctatgcgcacgtgtttggatcactcggaactataagggactacaagacaagatcaaactggttcctattg

SEQ ID NO: 68865 - DNA, 234 bp, Glycine max
  Clone ID: 700841561H1
cgacagtccgtggtgaacttcctggagcgtcgccggccccttcgactacggtcctcccggctggcgccgtcaatgtccggcgtcctctccttctggcgcccgtttcatgggtttggtgatttgagattagggtttatggatgggttcttggtggaatttatttatagttctttaggagagaaaatgacatcaaaaagggaaagggaagcgggtgatagagtagaggatgaaggg

SEQ ID NO: 68866 - DNA, 234 bp, Glycine max
  Clone ID: 700841563H1
tgcccctttcattttctctgcatctgtagtatctatcaccaatcaattccactcttcttcccatcaaacaacaaaaaatcaatctgggaaacaaaaacaaaatgccgtcattagaggaggaactcttcccatcaaccccaggaaagttcaagatcgagcggtcccaccacatgaaccgccaactctatcgctgtttcgcctccaccagcaccatgttcctgtgggccctcttct

SEQ ID NO: 68867 - DNA, 141 bp, Glycine max
  Clone ID: 700841564H1
gtcaaatgagcaccttatttgtgttgcaaggacaaaccatggacactcgtgttggcaactccactttcaaaatcccaccagcttcactgtccatctttgacaccctcagtgtcatattttgggtcccagtgtatgacagga

SEQ ID NO: 68868 - DNA, 239 bp, Glycine max
  Clone ID: 700841566H1
agctgatactgttggttgctgcacattaaaagtagagaatgtgacaagagaaccccccaacaaacttaagtttaacttccttggtaaagattctatcaagtacgaaaatacggttgaggttgagcttcctgtttataatgcaattttgaagttccaaaaagataaaaagcctggtgatgatcttttcgataagctggatacaagtaaactaaatgctcatcttaaggaactcatgcccg

SEQ ID NO: 68869 - DNA, 232 bp, Glycine max
  Clone ID: 700841568H1
gggttcactcccacaagtactgcaacatgctttctcataatagcacctctggttgtgctatggtgttggaagctactaaagtgggtgtggctgaggccaaagagattggagagagcattaagggcacagggccttcaggggaatccctacagcctcttgattggggacactaaggaaatgtacacagtgctcatgcaagctgccagatctcaacaatctacaagttcttttc

SEQ ID NO: 68870 - DNA, 229 bp, Glycine max
  Clone ID: 700841570H1
cgtcgttagggtcttcttcggatcggtggaacttgaccctgccggcgtgaattccgacgctactcgtggcgccgaattgctatagcggtgacgaatatgaaggttttcgttaagactctcaaaggcactcacttcgaaatcgaagtgacgccgcaagacacggtttctgaagtgaaaaaaaatatagaaactgttcagggtgcagatgtctatcctgctgcacagcaaa

SEQ ID NO: 68871 - DNA, 228 bp, Glycine max
  Clone ID: 700841571H1
aattaggaggattcgatgaaaggacatcaattcaaatcctggattttcgaattgagagagatattgagagaaatcaagaattctcgctatttcttagattcatggacccaattcaattcagcgggatttttcattcatatttttttccatcaagatagttttataaaactcttggactcccgaatttggattatcctactttcacgcaattcacagggttcaacaagc

SEQ ID NO: 68872 - DNA, 228 bp, Glycine max
  Clone ID: 700841572H1
gtgagtttgttgttcctcactgacctcaccatggcgaccagagccaagctttctttagctatcttccttttctttcttttagccttgatttcaaacctagccttgggcaaacttaaagaaaccgaggtcgaagaagatcccgagctcgtaacatgcaaacaccagtgccaacagcaacggcaatacactgagagtgacaagcgaacatgcttgcaacaatgtgacagt

SEQ ID NO: 68873 - DNA, 228 bp, Glycine max
  Clone ID: 700841575H1
ctgatggtattgacaaaactagtgcaactttgcaatttagaaagttagcagattgtgattttctcaagagaaactttaagcagatgtctaatgttttgtgggtggctcctgaagacaaggcgagtttatggtcacaacttcattatgtttcgtgtaataatctggaaatgcaagaagcttatcttgtcaatctcgtaaatgtgttacgagaactgtatttgcacagtc

SEQ ID NO: 68874 - DNA, 230 bp, Glycine max
  Clone ID: 700841576H1
gtttgaaagagcaaatagtataaaaatatatccagattcatcaacatttaaacttctttataaggcttacactaaagccaaccagaaggagcttcttgataaattgctgaagcatatggataaagatggtattgtccctaataagaggttcttcttggatgctttgggtgctgttgcgtctttaccagcaaattcagaatctgctaatgctgcaactgattcaaaaacag

SEQ ID NO: 68875 - DNA, 231 bp, Glycine max
  Clone ID: 700841577H1
caaaacttccacttgagagaaaagtagtgtattaagactacaaattttcaatttttcaatggcgtcgaggcaacagaaagaggatcgagctgaggcagctgcgaaagttgctgcgaaagaactcgaacaactcaaccgagaaaaagaccgtgatttcagtgttggtgttgcagaccaacaccaacaagaagaacatcagttagatcaacaaaagcgtggtgtaatcggatc

SEQ ID NO: 68876 - DNA, 229 bp, Glycine max
  Clone ID: 700841581H1
cccacactcacactcacgccactccattgagaaagttggttgcagcagcatgatggaggaagaagaagaccagcagaagcttccagattgcaacatgcagtaaagatgcagttagtttcgacattgaggcgctgtcaggttctgtgggttgaaatcaatcacttcatttcaaacttgcaatattatataatgtttgaagtgttggaggtatcatggtcaaattttttgg

SEQ ID NO: 68877 - DNA, 234 bp, Glycine max
  Clone ID: 700841582H1
gtcgagccgaatcggctcgagggttaacactcttcttcatcgtcgtcgcaatgggacgtgagatccgtgcgcacgtaagggagcaggctcggtcttcaagtcccacacgcaccaccgcaagggccctgcacgcttccggagcctggacttcggggagcgcaacggctacctcaagggcgtggtcaccgacgtcatccatgaccctggccgcggcgcgccgctcgccaaggtcgc

SEQ ID NO: 68878 - DNA, 231 bp, Glycine max
  Clone ID: 700841583H1
tcttgtttaaaaaacgtgttaccatgcatctaccatggaataaaagaaatatctcctaactgagctcttcttctcttgcggctagggttttagcgcacttcttctagatttaaggaagatgggtaaggaaaaggttcacatcagtattgtggtcattggccatgtcgactctgggaaatccactaccactggtcacctgatttacaagcttggaggcattgacaagcgtgt

SEQ ID NO: 68879 - DNA, 227 bp, Glycine max
  Clone ID: 700841586H1
atcatgcttccccaccagctctctgccgaagacatggctctgcgccgccgccaccccaacggtggctccgtcaaccaccacctcctcctcggaggtggaggcttccaggttggagcctagagtggaggagagagatgggttctgggttttaaaggaagagtacaggggaggcatcagccctcaggagaaagtgaagcttgagaaagatcccatgaagcttttcatgg

SEQ ID NO: 68880 - DNA, 227 bp, Glycine max
  Clone ID: 700841588H1
tgatagttcagtgtctacaataccaggtgattttgtcattggtgttaagttgacaaccataaacaatatgtgtgcatatgggctcaatcctggtatttcaggttctcgtcttttgggcaccattcctcagtctatttcacagcaaactgtttggaatcaaatggcaacagtgagaacaccattgaattttgattctagcaagcagagcttttgtcaattttctattg

SEQ ID NO: 68881 - DNA, 228 bp, Glycine max
  Clone ID: 700841589H1
ctttcatcagctgctccagcgtgtacacctgcgcctcacccccactcttcgccacctccgctctctttactttctcctccatctccatccgcataaccgccgcgccctcctccctcgccgccgcatcagccgccatcatccccgtcctctcgtccttcttgctccgactcctctgcttcctcaccgccgccgccaagcacgccagcgagcaaaccagaacgaatatcc

SEQ ID NO: 68882 - DNA, 226 bp, Glycine max
  Clone ID: 700841590H1
atttgggttatgcttcaactccaacaagatcaatgcatatcctagcgtggaccttgtgatggacaagcccaatggtcctgtttggagaatctctggtgaggacttgatggtgcaggcacaacctggggtcacgtgtttgggtgttatgaatggaggaatgcaacctagagctgaaattaccttaggggcacgtcagttggaagagaacctggtggtgttcgatctt

SEQ ID NO: 68883 - DNA, 228 bp, Glycine max
  Clone ID: 700841592H1
tactaccacttcccagtatcttaatctagtccacaaccaccctcagcataatgggcaactgtttggggaagtcggagaagaaattaacggcggagattgttccacgcgacggggccaaagtgtatcccaccgtccgtttacacggctcgcccaagagcattctcgccgcttatatccgtttcgcgcttctccacaagtccgtttcgttggacttggtcgaaacggaaa

SEQ ID NO: 68884 - DNA, 229 bp, Glycine max
  Clone ID: 700841593H1
ggacaatgaccagaagggttatggtggagcaaagtacaccattggtagtgtggaccacattactacaccatttattgtagaggccaatcttaaatcagaaaatcagatacaagacaatggccaaaagggttatggtggagcaaaggacacaattggtagtgtagaccacattactacaccacttgctgaaaaggccaaagctgctggtagcaccactgctcagtatgtt

SEQ ID NO: 68885 - DNA, 231 bp, Glycine max
  unsure (1)..(231): unsure at all n locations
  Clone ID: 700841594H1
tcttcatagttcagtgtgtcgtttaaaaatgtcgcagttgctggataaagccaagaacttcgtgtcggagaaggtaaatgatatggccaagccggagggangtgtcactgacgtggacttcaagcgcgtgagcaaagataatgtcgagtacttggccaaggtctctgttcgtaaccagtattcaacttccatacccatttgtgagatcaactactctttcaaaagcgcatc

SEQ ID NO: 68886 - DNA, 230 bp, Glycine max
  Clone ID: 700841595H1
ggacaatgaccagaagggttatggtggagcaaagtacaccattggtagtgtggaccacattactacaccatttattgtagaggccaatcttaaatcagaaaatcagatacaagacaatggccaaaagggttatggtggagcaaaggacacaattggtagtgtagaccacattactacaccacttgctgaaaaggccaaagctgctggtagcaccactgctcagtatgttg

SEQ ID NO: 68887 - DNA, 137 bp, Glycine max
  Clone ID: 700841596H1
gtttgaaactaaaggtgaaaaaaagaaggatttagtgggaagagagcggaacaaagaggagaaacaaagaagcagtccaagaggaaaagtagaggcagagaaagcaagaccaatggaagaaacaaaggtggaagcta

SEQ ID NO: 68888 - DNA, 110 bp, Glycine max
  Clone ID: 700841601H1
ctgaaatcgggcatgggaattgaggagagaaagcaagtgaagaagccagcacaagccagctcgagaaaagggtgtatgagagggaaaggaggtcccgagaatgctagttg

SEQ ID NO: 68889 - DNA, 249 bp, Glycine max
  Clone ID: 700841605H1
cttcgatcgtgttcaagaggttcctcatgaagggcccatgtgcgatctgttgtggtctgatccagatgataggtgcggctggggaatttctcctcgtggtgctggatatacatttggccaggatatatccgaacaatttaatcactcaaacaagctcaagttaattgctagagctcatcagctggttatggatggatttaactgggctcatgaacaaaaggtggttaccatttttagtgcacctaacta

SEQ ID NO: 68890 - DNA, 149 bp, Glycine max
  Clone ID: 700841606H1
ggagaattacgggaggagctactccacagaggaggagtatttgcgccgtttggggattttcgcccagaacatggtcagagcggcggacatcaggcgctggaccccaccgccgtccacggcgtcacgcagttctccgatctcaccgagga

SEQ ID NO: 68891 - DNA, 247 bp, Glycine max
  Clone ID: 700841607H1
atcacacacaactactacaagtacttccttacaatcaaaaccaacaacaactatggcaagttatcaaaagcactacgatgatcagggtcgcaaggttgacgagtatggcaacgttgagaagcaaaccgacgaatacggcaaccctgttcatgctgctagtgtcacctatgtagccaccagaactgctgctggtggttacagtgatgacattaataagcaacatgataccaccaatgcctacggcgta

SEQ ID NO: 68892 - DNA, 247 bp, Glycine max
  Clone ID: 700841608H1
cctgcacacagtggattacgttaagatcctgaagctgaaggtcaaagagccgaccgcgtcggaggattccctctctctcggcatttgggatgggaacaagttcgttttcaaaacggtgtcgccgcttagttccactgttcccctcatcgataagcttctcaaacttccgtttgttaatactctcgtatcgttcgttaattccgcactcatgttcgttcgctacggcttctcgctctttaagatgcag

SEQ ID NO: 68893 - DNA, 247 bp, Glycine max
  Clone ID: 700841610H1
ggaagttcttcactgagatcagcttctaatgttctgtcagttaggcctgaggggatactatgaggtggcggaggaaggtcactaatggtggattctggttctcggggtggagtggaaggtggaagtttttcttgttctgaagggaaaacaggagaaagaggttttggtttggaattagactctgatgcaatgtatattttgaggccaatctcacccttaacaggtgagagaaaccacttcttttcaa

SEQ ID NO: 68894 - DNA, 157 bp, Glycine max
  Clone ID: 700841613H1
gtacgcgagctacaagttcagatcttccttataaccaaaaccatcaacaactatggcaagttatcagaagcactacgatgatcagggtcgcaaggtcgacgagtatggcaatgttgagaggcaaactgacgaatatggcaacccggttcatgccact

SEQ ID NO: 68895 - DNA, 74 bp, Glycine max
  Clone ID: 700840950H1
agcctataggagtataaaatatagatacaaacttgagttctttgccccatcggggtggtttatgcatctttata

SEQ ID NO: 68896 - DNA, 235 bp, Glycine max
  Clone ID: 700840951H1
ttcgagccgcacgaagagaaaataactgatttgccacttgacaatggggtgagggctctattgaggggctgtaactagctgaggagatttgctctatatctcaggcgtggcgggttgaccgatgtaggtcttggttacattggacagtacagtccaaatgtgagatggatgctgcttggttatgtgggggagtctgatgcagggcttttggaattctctaaagggtgtcctagtc

SEQ ID NO: 68897 - DNA, 239 bp, Glycine max
  Clone ID: 700840952H1
ttgacaacaaaaccggttccaaggtcggagagtacgcagattatggttctcagaaggcgaaagatacaaaagatgcaacgaaggaaaaagctggagagtacacagattatgcttcgcagaaggcgaaggaaacgaaggacaagacaatggaaaaggctggagagtacactgattatgcttcgcagaaggcgaaggaaacgaaggacaagacaatggagaaggctggagagtacacagat

SEQ ID NO: 68898 - DNA, 235 bp, Glycine max
  Clone ID: 700840954H1
tgcagttcaacattgcgaatcccaccactggttgtcagaagaagctggagatcgatgatgacctgaagctacgagcattttgggacaagaggatctcacaagaggttgttggtgatgctctgggtgaggaattcaaaggctatgtcttcaaaattactggaggttgcgacaagcaaggatttccaatgcagcaaggagtgttgacccctggacgtgtgatgctcttgctgcatag

SEQ ID NO: 68899 - DNA, 235 bp, Glycine max
  Clone ID: 700840955H1
taagaaaggggtggtggctgcttcgaaagcttaataatttgtttatttccagaacatcatagttttcgcagcagcaaactaacaaattactcatatcatataataagatggcccgttctctctcgcaagccaaacgtattggtgtccttgttgctcaatctatctccctaattcccgttcatcggcgaggttacgcagtggcatccgatgtatcggtaagagttggattgggtaa

SEQ ID NO: 68900 - DNA, 235 bp, Glycine max
  Clone ID: 700840957H1
gcacaaggagcacaaccaaaggagtcaaaaacagcaacaacatatgagtcagtagaaggaggagagaaccgaacaaggactgacttgctttcaagggaggatcaaggctgcattcaagtggaaaaacttcaggagaaggtccatgatcctgctggcaaaggtggtcctgtctttggtgctggcaaagatgaagacaaacaagaccttggagttactggcacaggctaattaacct

SEQ ID NO: 68901 - DNA, 76 bp, Glycine max
  Clone ID: 700840961H1
ctctgaagatggcttcacgcaggctcgtatcttctctgattcgatcctcccttcgtagatctcaatcgcagccctc

SEQ ID NO: 68902 - DNA, 138 bp, Glycine max
  Clone ID: 700840962H1
cttcattttctttcagcatggagcttgttacttgtaggaactggctaaacaatcgtctacaatatttggatgaatgatagtgagataattcagtctcccagcaagtttacaatcgtctgcaatatttccctgccctct

SEQ ID NO: 68903 - DNA, 239 bp, Glycine max
  Clone ID: 700840965H1
gttatttcaattctaaaacggggaaaagtagaggtggatcttttggacattttcccccctacaaaaagatccattgaagctttctctgagcatttcaccaaggaaggattggtggccttggtggactataatgaaaagaaaatttctgaggtgaaacttaaggacatgaagtcttctttaacagcacagctttcagaggcggctgatacatctgaagtcattgagactgtgaagctgcg

SEQ ID NO: 68904 - DNA, 240 bp, Glycine max
  Clone ID: 700840966H1
ctctgattcaatatccagatatccaaacagctgttgtggtcaaggaaaccttggaaggacactgcatatatgatggaggtttttgcaagcttcacatctcgtattcacgtcatactgatcttagtataaaggtgaataatgagagaagtagagactataccattcctaatgtacctccacctgtagttcctgctcagccctcaattttagggcaacatccagttccgatgacgggccctc

SEQ ID NO: 68905 - DNA, 110 bp, Glycine max
  Clone ID: 700840968H1
tggcttgtccccttctctctcgctgtctttcgctgcgtcctcggttatggcttctggcaggctctcatcatctctgctccgaagattcctccgtccatctctgccggaat

SEQ ID NO: 68906 - DNA, 60 bp, Glycine max
  Clone ID: 700840969H1
gtttgttgttcaatctaacaaacatttctatatagtttactttttccacacaacatacga

SEQ ID NO: 68907 - DNA, 237 bp, Glycine max
  Clone ID: 700840972H1
gtcgtggtctttagcatttctcaccgactgcgaagggagagcgaataaaaaaaggcaaatccaattcgagagaaggagagaatttagagagggaaaggatgaagatcacggcgttgttggtgcttaaatgcacgggcgagggatccgatccggtgattctggcaaacgcttccgatgtcagccacttcggctacttccagcgttcgagcgttaaggaattcatcgttttcgttggtc

SEQ ID NO: 68908 - DNA, 233 bp, Glycine max
  Clone ID: 700840974H1
gtgatccggtgcaaaaggagttggcaacccaaaagaaagaggcaaagatgaaccaggcggactggacaagcaggcggcgcgtcacataacacggcggccaaacagtccgccaccacggctgggcacatgggacatggccaccacaccaccggaaccgggactggaaccgccacgtattccaccaccggggaatatggtcagcccatgggggcccaccagacgtcggcaatgcc

SEQ ID NO: 68909 - DNA, 235 bp, Glycine max
  Clone ID: 700840975H1
ccaccaccgagaaggagattcacgttgagaaacacagggttcccaagatggccacccacttcgagcaccttgcggacaagctcacacactctgacatcaccgctgggaaggatactccgcagggtagcatagaagccttgcaagctggagagagggtcaaagatcatgcaggaaaagccatgggagatattggtggacgtgggaaagccagagagactcacgagctgggtgcaca

SEQ ID NO: 68910 - DNA, 232 bp, Glycine max
  Clone ID: 700840976H1
gtacttccttacaatcaaaaccatcaacaactctggcaagttatcaaaagcactacgatgatcagggtcgcaaggttgacgagtatggcaacgttgagaagcaaaccgacgaatacggcaaccctgttcatgctgctagtgtcacctatgtagccaccagaactgctgctggtggttacagtgatgacattaataagcaacatgataccaccaatgcctacggcgtagacac

SEQ ID NO: 68911 - DNA, 107 bp, Glycine max
  Clone ID: 700840978H1
cttgggactttctgcatcaacagattctgcatctggcagagaaacagttagtagttttgagacttcaattacacttgaagatgttgctgactcagattgtaaagctc

SEQ ID NO: 68912 - DNA, 234 bp, Glycine max
  Clone ID: 700840979H1
gctgaagaaaacctaagcttagaattagaaacaaagaaaagaagaaaggaaagaattgatcgttgaaaatgcagggaggaaagaaagcgggagagtccattaaggaaacagctacaaacattggtgcttctgccaaggctggcatggagaagaccaaggccactgtccaagagaaggcagaaagaatgacagcacgtgatccggtgcaaaaggagttggcaacccaaaagaaag

SEQ ID NO: 68913 - DNA, 239 bp, Glycine max
  Clone ID: 700840981H1
taccacacaccacaggagttgtacaacatggagatatctgattttgttcctgtgtgtggtagcatgaagaagtacaggagaaaaatatcaacatatcataagcttaagagcggcacagaggtaagtgatgattgcagtgttgagaatggttgtatgttaaggccaaaagtgaaaatggttgaagaagtgatacagaaagctcatcaaccgaagattaggttatccataaatctttggaa

SEQ ID NO: 68914 - DNA, 240 bp, Glycine max
  Clone ID: 700840982H1
gcaccactgctcagtatgttggggagaaagcagcacaagccaaagatgctactgtgcaaactggcaagagtgctgcaaaagttgcctcagatttgagggacaaggctttggccacagggtggagtgccgtgtcattattctactgagataactgtggagggaaccaaggctgcaacaaacgttgttaagggagttgctgagtatgcaggacagaaggcttctgagcttgcagctatgtca

SEQ ID NO: 68915 - DNA, 72 bp, Glycine max
  Clone ID: 700840983H1
gttgtgcaatcttacaagttccaaacttctctattttgttattatttgttctcacttccacacaacatacga

SEQ ID NO: 68916 - DNA, 235 bp, Glycine max
  Clone ID: 700840986H1
cccaaaagttagaggttcacctgtcatgtataggcgatcatttctagagaagaagggccttacgaaggaggagattgatgaagcttttcagcgtgtgccagattcagctccaacagtgcagacaggtggtgtaaatcaagatggccaattgaaatcgtcatcaaacattcagcaacaagcccaacatcaaactttgcagccgggtttacctgcttctacttctgttaatacttcg

SEQ ID NO: 68917 - DNA, 235 bp, Glycine max
  Clone ID: 700840987H1
tttacgcttctcttctctgcagcaactatgcctaaccctaaggtcttcttcgacatgaccatcggcggtcaatctgctggccgcatcgtgatggagctctacgccgacgtcactccccgcaccgccgagaacttccgcgcgctttgcaccggcgagaagggcgtagggcggagcggcaagcccctccactacaagggctcgtccttccaccgcgtgatcccgagtttcatgtgtc

SEQ ID NO: 68918 - DNA, 234 bp, Glycine max
  Clone ID: 700840988H1
gttcttgaattcattcgagacgtgagctaaactcaaattggagaagaatatggtccgtgggttccttttattggaactttgtttctatttatttttgtttctaattggtcgggggctcttttaccttggaaaatcatacaattacctcacggggagttagctgcacccacaaatgatataaatactaccgttgctttagctttacttacatcaattgcatatttctatgcgggt

SEQ ID NO: 68919 - DNA, 233 bp, Glycine max
  Clone ID: 700840990H1
agattatgcaagtgatgcagtgcagaagagaaaagagtattctggtgatgcttctcacaagagcaaagaggcttctgattatgccagtgagacggctaagaagaccaaagattatgtcggtgatgctgctcagagaagcaaaggggctgctgaatatgctagtgatgcggctcagaggaccatagagtatgctggtgatgctaccaagagaagcaaagaggcttctaatgatc

SEQ ID NO: 68920 - DNA, 234 bp, Glycine max
  Clone ID: 700840992H1
cacacaactactacaagtacttccttacaatcaaaaccatcaacaactatggcaagttatcaaaagcactacgatgatcagggtcgcaaggttgacgagtatggcaacgttgagaagcaaaccgacgaatacggcaaccctgttcatgctgctagtgtcacctatgtagccaccagaactgctgctggtggttacagtgatgacattaataagcaacatgataccaccaatgcc

SEQ ID NO: 68921 - DNA, 162 bp, Glycine max
  Clone ID: 700840993H1
catttccaagtacagagctgaagctcaacaaaattcattcaatgctactgaagctgctaaggaaagatacgagagggcaaaccaagcgacaagtgacactgccaaagagagaaacaagcaggcaaataaggtaggcaacataaggcaaaagcatgctcacaa

SEQ ID NO: 68922 - DNA, 204 bp, Glycine max
  Clone ID: 700840994H1
ttccaagctacgtatttgggagtttgtggagttcagcaagatgatatacctagacggtgatatacaagtgtttgacaatattgaccacttgtttgacttgcctgataactacttttatgcggtgatggactgtttttgtgagcccacttggggccacactctgcagtatcaaatcggatactgccagcagtgccctcataaggt

SEQ ID NO: 68923 - DNA, 232 bp, Glycine max
  Clone ID: 700840995H1
cccgaaccccctgaaattgctcaggaaaatcagtattcatttccatcacattctcatggttttaattatgaaaatgcccaacagccggaggtcccatttcctgtttcacagaccagctcacagaatcagaatcttgctcccttctctggtgtaatgcaggcacatacaaattctttgcccagtgctctgttgtcttcaccagttcaaacagcaagagaagatatcccatact

SEQ ID NO: 68924 - DNA, 234 bp, Glycine max
  Clone ID: 700840996H1
gttaatgggaacttttcttgtggtccaaacaattaccgtcagaaaggtcctcggattgcaaaggttgtccggcgcatcaactgcaatgttgaaccattagaatttggagttgtgctctctggaaagtcttggtgcagtagtcaggctatctttccaaagggatttagaagccgtgttagatacataaatgtcttagatccatccagtatgtgttattatatttcagaaattctt

SEQ ID NO: 68925 - DNA, 251 bp, Glycine max
  Clone ID: 700841002H1
ctcaaaattcttctccttttgtgcttccaactcttttctttgctatattattctctttcactttctgccaacccttggagtcaacatgactatcctcattgagcaatctgatcactttggggctgaagtagaggcaaagactgaaccaataaatgagagagaactggtgttggatggtggacttctgataacacagaccaactcatttgggcacatgtttagggcttataatgatgctgaaagtgagaggc

SEQ ID NO: 68926 - DNA, 81 bp, Glycine max
  Clone ID: 700841003H1
cgaagatgattagtctattcatctgtcgagaggagaccctatggtatctctatccgaatcggtccgtggttcgggctgctg

SEQ ID NO: 68927 - DNA, 251 bp, Glycine max
  Clone ID: 700841004H1
ctgagaagaatgaacttcgcgatcagaaacagaggctcaaggcagagaaggagaagctggagcagcagctgaaatcattgaatggacagcctagtttcatgcctccccctgctgcaatccctgctgcatttgcggtgcaaggccaagcccacggcaacaagttggtaccttttattagctatccaggagttgcaatgtggcaattcatgccacctgctgcagtggatacctcacaggatcatgttctccga

SEQ ID NO: 68928 - DNA, 250 bp, Glycine max
  Clone ID: 700841005H1
ccctgttcatgctgctagtgtcacctatgtagccaccagaactgctgctggtggttacagtgatgacattaataagcaacatgataccaccaatgcctacggcgtagacactggtagacagcattctagtggtggctacgatggtgacactaataaacatcatggaactactggtggctataatgatgacaccaatagacatcatggaactaccggtgtctatggtatagataccgataggcaacaacat

SEQ ID NO: 68929 - DNA, 250 bp, Glycine max
  Clone ID: 700841006H1
ctgctgtgctagggtttctgcatcttccacctccgtcgcgatgtaaccaggcttcatctgattccgatttcccttcgctccttctcctccttaacattcatcttcttcgattcctctacaaattatgattattattatgatgaactccatcttcgcctcgcataaccttcgcgtcttcggtcgcggcttgaatcccttcgcaccttattgcatcgccaatcactcccttttcctttccctttcctctcgc

SEQ ID NO: 68930 - DNA, 248 bp, Glycine max
  Clone ID: 700841009H1
ggatttggttacttggaatgtcatgattagtgggtatttgaagggtaggaaccccggttatgcgatgaagttgtttcgcgaaatgggcaggttgggattgagggggaatgctaggactatggtctgtgtggctacagcttgtgttttatttccgctctttgatgcgtgggtttttccccaacagctacaccttcgtgccactcgttgcttcgtgtgccaaaatgggttgcattggttctgggaaggag

SEQ ID NO: 68931 - DNA, 78 bp, Glycine max
  Clone ID: 700841010H1
tcagaagctagtgatcaatcatcaacacagagctgagtgtgttgctctgtgaatccaccttcttcttccattggagga

SEQ ID NO: 68932 - DNA, 249 bp, Glycine max
  Clone ID: 700841013H1
gttggcaggctgtttgcagtcgtggatgacattttctgtttgtttcaaggtcatcttgagaatgttgctaaccttaagcaacaatatggattgaacaaaacagcaactgaggtgatcattatcattgaagcatacaggactctaagagatcgtggtccctatcctgctgctcaggttgtgagagacttccaaggcaaatttgcatttattctgtatgacagtggttctaagactgcatttgttgctgcg

SEQ ID NO: 68933 - DNA, 248 bp, Glycine max
  Clone ID: 700841014H1
tatttttcttcctcagtagtgtcatttacgcttctcttctctgcagcaactatgcctaaccctaaggtcttcttcgacatgaccatcggcggtcaatctgctggccgcatcgtgatggagctctacgccgacgtcactccccgcaccgccgagaacttccgcgcgctttgcaccggcgagaagggcgtagggcggagcggcaagcccctccactacaagggctcgtccttccaccgcgtgatcctgag

SEQ ID NO: 68934 - DNA, 253 bp, Glycine max
  Clone ID: 700841016H1
caactagctacatagaaagcacaatagtgtaccattaatggcagccaaaatattttgcttccttatgctccttggtctttctgcaagtgttgctatcgcaaccattttcccacaatgctcacaactctcctatatcttcccttcttcccccatacctctcaccagcggtgtcttcaatgtgtgaaaacccaattgttcaaccctacaggttccaacaggcaatcgcaacaggcatcttaccattatcaccctt

SEQ ID NO: 68935 - DNA, 253 bp, Glycine max
  Clone ID: 700841017H1
ctcgagccgaatcggctcgaggtgaggagtgttctcgagaagaaggcgaggatggggaacatgataacaagtctgagagtgaaggtgaagctgaaggaatagctgatgcccatgatgttgaaggagatggaatgtcattgccatattctgaacgctttctactaactgtgaagcctctagcaaagcatgttcctccatgttacatgagaaggacaggaattcacgagttttctatggaaatgattccttttat

SEQ ID NO: 68936 - DNA, 252 bp, Glycine max
  Clone ID: 700841018H1
ctttcttgcgaaaccgagagagcgaaggggcaaacacaattttttttatcttcttttttattttttgtagagagagagagagagaaaatgttggggatcttcagcagttcagtggtgtcgccgccggaggagctggtggccgctggcagcagaacgccgtcgccgaagacgacggcggggaagctgctgaaccggttcgtggagagcaaggcgtcggcggtgtcgctgcaggtgggggaacacgtgcagttg

SEQ ID NO: 68937 - DNA, 157 bp, Glycine max
  Clone ID: 700841020H1
tttagatctgtgggctaaacccagatgaatgaacaatcatcaagaagtcattttgtattcactcttcgaatatacggtgtaaatgaggtaaagattttctattatgacaatgactaaaaccatgttctatattcaatttttaatttccacacaacat

SEQ ID NO: 68938 - DNA, 248 bp, Glycine max
  Clone ID: 700841021H1
tcacaataccacacaacataaaaaatcaaaaaggatcatgggcctctaaatctgcatcctcctaatcccaccgacgtcatctgctacgcctatggaaaatgccaacacaaaatctccgacgccatggagaaggctcaagaggccatccataagaagaaggacaagatttgtaaaactaaagagactgtgtatgctaaagcccatcacgtccctgaatacgcccaagacactgtagaagcagcaaagga

SEQ ID NO: 68939 - DNA, 81 bp, Glycine max
  Clone ID: 700841022H1
gttaaactggaccaattcaatattcccagctagttcttcattgaagaagctatggactttcttaactttatgcttaacttg

SEQ ID NO: 68940 - DNA, 248 bp, Glycine max
  Clone ID: 700841023H1
cagaaggataccatttgtgatgaaatcatgatgctgagggaagaaattggaaggcttagagatgagaatgaggcacagaaggaacaactcaagcagaaggatgaagagaagattgaggtgataagacagctgagtttagcaatagatgtgctgaagcaggagaatgtgaagatgagaaacttcattgctaaggagtccaccaagaaatggaagaacccatttgagatcaacaaacttgtgggagcatt

SEQ ID NO: 68941 - DNA, 249 bp, Glycine max
  Clone ID: 700841024H1
ccaatcccaagaaccacatccaagagaattggaggatccttgacttcttctctcactttccagaaagccttcacatgttcacctttttatttgatgatttgggtgttccacaagattacagacagatagatggttttggagttaacacatatacgctgatcaacaaggctgggaaagcagtgtatgtgaaatttcactggaagaccactagtggtataaagtgtctattggaggaagaggccattaagg

SEQ ID NO: 68942 - DNA, 246 bp, Glycine max
  Clone ID: 700841025H1
attatttggaatggatagcttcatgtctgtagaagatgattccaagcagagacaagaaacagttgccctctcaaatgttagtgtttctcagcatcatcaacaatctcatagtgatcagagttggagagctgggttctcatacaggatgcgtggttatattgatcagatggagcttgtgtcttttgctgcgagaggtatatttctgaataatgatacaaagaactctgctcgccctagcagagagat

SEQ ID NO: 68943 - DNA, 248 bp, Glycine max
  Clone ID: 700841028H1
ctttagtggttctaaattgaaaagctttctagctggtcataatatcaccattactgatggtattgacaaaactagtgcaactttgcaatttagaaagttagcagattgtgattttctcaagagaaactttaagcagatgtctaatgttttgtgggtggctcctgaggacaaggcgagtttatggtcacaacttcattatgtttcgtgtaataatctggaaatgcaagaagcttatcttgtcaatctcg

SEQ ID NO: 68944 - DNA, 248 bp, Glycine max
  Clone ID: 700841029H1
ggaagagtgagcgtgaaagatgccttgggcgaggctttcagggtctccaaggctcgacgttgctattgacatgggcaatccatttctcaatctcactgttgatggtttccttaagatcggagctgtcgcagccacgcgatcagctgctgaagatacttatcatattatccaaaaggggaatatctcaagtcatgatttcgagaaaacgttgaagaagatgtgcaaagaaggtgtatattggggaacta

SEQ ID NO: 68945 - DNA, 250 bp, Glycine max
  Clone ID: 700841030H1
ttctcatagcattttttacacctcagccacagcaaaaagaatttgaaggtaatggagtgatagaaatagtgtgatggatggatttcacattcaggtcttttgtggactacaaagaaaagaaatgggtagggattcctggggaatacatacagtataggatgcagtggcctcatttttttttttttccctttcccctttaaattttttaaccttgccctgattaattacccgtaaagcataactatttggg

SEQ ID NO: 68946 - DNA, 234 bp, Glycine max
  Clone ID: 700841032H1
cgagattgctttgctgtaagtttctgattcctttcttcagaattccaagttttcatttcgttagggacataagattgtgcgatcgagtatggctggctacggcgaaggtcctgctatcggactcgatttgggtacgtcgtcttctagcgtcgacgtgtggccacaggatcgtgttaaatccttcgccaccgatcagggtactagagctaccccatccaacgtggctttctgcga

SEQ ID NO: 68947 - DNA, 254 bp, Glycine max
  Clone ID: 700841033H1
gacttgtgacacagatatttatgtgtctaagaacataaactaaaaaaccaaggcgagtgaaagaaaaaatcatgtcaggtgtgtctctagcagtgtctggtccaccagcagcaacagcggctgaagcagcaggtacaaagcctaaacgaagaacagaacaggcaccaatgggtggcatgatgggttcactgcgcgtgatagaacttcagctggtggccttcatcttggtgttctcagcaagtggcctcgtccca

SEQ ID NO: 68948 - DNA, 237 bp, Glycine max
  Clone ID: 700841035H1
ctagtaaggaaggattaactttcagaggaattcccaacagtatctctatctgaagaggtttgtggttccttaagttttgtggctttgaataaaagatagaagagaaggaatctgaatttcttcatccaacctgcacatggtaatctagtgtgtttgagtgctttcatgtttggctttaataaaataaaagcagttgttttgtaaaatgttcagaatcaataaaagcatttactgctt

SEQ ID NO: 68949 - DNA, 247 bp, Glycine max
  Clone ID: 700841038H1
ataaaaaaccactctacaaaactcttcagttattctgtaaattttattttcttttggtgaaattaacagctctgtgattgatcaatggctccaaaggaaggcaaagccataggtatcgatctcggcacgacctacagctgcgtgggcgtgtggcaaaacgaccgcgtcgagatcatccccagagaccaaggcaaccgaaccactccctcttatgtagacttcaccgacaccgagaggctcttcggag

SEQ ID NO: 68950 - DNA, 247 bp, Glycine max
  Clone ID: 700841040H1
ctaactctttgctttatccttgtcttcattttctttctctctttcctttgttgttgtcaccaaaatggctactagtacactcagccatgcagaagaagtacttcccaatccagcaaaaaatactgatcagaagcaaatccaagttactgaagatcataccaacaacattgactatgtacaaaggggacagtggcttcgtgcagcggttttaggagccaatgatgggttggtttcggtttcttcattg

SEQ ID NO: 68951 - DNA, 248 bp, Glycine max
  Clone ID: 700841041H1
gaagaagaagaagaaaaagggaaaaacgcaagataaatagaggaagatcgatcgagatctccctcgcgtttgtctcagttgaagaaattaaaaagcagaactagagtaactcaacggtctcagaattttcagggttttcagtacttccatattttttcttccggatttgagttggaagaagatcgaagaggtttctagttgcttcaattgttcctctgggtggtggagacttgttatatttttaaaat

SEQ ID NO: 68952 - DNA, 249 bp, Glycine max
  Clone ID: 700841045H1
gtaactgcactagtgttggccacatgccttcaaccaaagaggaaggtcacgattttcaggtggctaaagccaagacaacacaaactgcgaacaaggccatggaaactggtaaagatgggaaagaagccgcagagtcatggacagaatgggctaaagagaaactcactgaaggtcttggcttcaaacatgatcaagaatccaccactaagaaagtctctgactatgccggtgatgctgctcagaaatcaa

SEQ ID NO: 68953 - DNA, 251 bp, Glycine max
  Clone ID: 700841048H1
ggggaagctttcattgaatatatcaatgcccgagacttttatctgaagcagctatgttccactctcaaagtaaaggaagaagaagtgacaacaaggatagaaaaccttttagaggagttaagggcagtgagaaatgaaaattctgctgttcatgcaaaagcagcaatctacaaagcttcagtcattgcaagcaaagtaatgttggtggggaattcaaaacagtacagggtactggttgagtgctttgatga

SEQ ID NO: 68954 - DNA, 250 bp, Glycine max
  Clone ID: 700841049H1
gcagaacttagttctctgttgcatcatcatcatcttcattagtgttagccctaaacttcaccttcaaccatgaccacagtgccaccacacagtgtccaagtgcacacaacaacacaccgctacgaagccggcgtcgtcccgccggctcgttttgaggcgccgcgttacgaagccggcatcaaggcgccctcttccatttaccattccgagagaggtccgacgacctctcaggttctcgcagttgtcgccg

SEQ ID NO: 68955 - DNA, 250 bp, Glycine max
  Clone ID: 700841050H1
attctccaccactattcccttcaccccaatcacactttccgctattagtgtagaagatgagtacgctggatgcaacaagggctgaacttggtcttcttgtgttatatttgggcaaggctgaagcaagggacaaaatatgcagggcaatacaatatggttccaaatttttgagtaatggggaacctggtactgctcagaatgtagacaaaacaaccagcttggcacgaaaagtcttccgtctctttaagtt

SEQ ID NO: 68956 - DNA, 246 bp, Glycine max
  Clone ID: 700841051H1
atctgtaacgctgcttcttctgtgaggcatcaatggagacaaaagctttgtccttcgctctgtctctcaatgacctcaccaacaaccgcttcacttccaatacgccaaatgctctcgccaaagtttccgtctttaccgtcacatgctcttcttcgggtagtggagagaggccttagaagaattcagatgctagacttgtgcttgaagatggttcaatttggagagcaaaatcgtttggtgcttcag

SEQ ID NO: 68957 - DNA, 249 bp, Glycine max
  Clone ID: 700841052H1
tgtttattcatctaccgtcgggagggaggggatgaccacggcgccccgtgcgcccggcctcctcgtcctcgcgacaaacacaaaccccggcgcttcgtgcgccaaggaactcaaatctgttaagtgcgactcccgggggcccggagacggtgtcccgcggggctcgtcacgacacaacatttacatacaatgactctcggcaacggatatctcggctcttgcatcgatgaagaacgtagcgaaatgcga

SEQ ID NO: 68958 - DNA, 249 bp, Glycine max
  Clone ID: 700841053H1
cacacaactactacaagtacttccttacaatcaaaaccatcaacaactatggcaagttatcaaaagcactacgatgatcagggtcgcaaggttgacgagtatggcaacgttgagaagcaaaccgacgaatacggcaaccctgttcatgctgctagtgtcacctatgtagccaccagaactgctgctggtggttacagtgatgacattaataagcaacatgataccaccaatgcctacggcgtagacact

SEQ ID NO: 68959 - DNA, 247 bp, Glycine max
  Clone ID: 700841057H1
gggataaccgtgaccttgtaataatatatataaataaatcttcgatgctgtcatttcgaaatgtccgcttcaaccgcagtttcacctcccaaaaagcaaagttggcttgacgagcgcagatgcgaggaagcgggagcaataaaacaaaaaatctcattcttgtccttccttctacttaaggggcaaagagaagcgcttttgctactgagaaagcgaacgcgcgaaggttcaagacttagccgagcgt

SEQ ID NO: 68960 - DNA, 247 bp, Glycine max
  Clone ID: 700841059H1
agcgggaattggaggccaaaaaaccatctcaacctcaggaagctgaagagaggccatcagaaggaattggcgaaactgtgaggcagtatgcacaaaaaccaaagccaagtgaaagaaaccctcagaaggagggaaccggaagcatcgtgtttacagcaataggcgaaacagtaagcagtgccggtgagaaggtaaagaaaccgtttaaaaacactatgggaggagaaagtgaaggaggaggagggaa

SEQ ID NO: 68961 - DNA, 250 bp, Glycine max
  Clone ID: 700841061H1
gaaaacctaagcttagaattagaaacaaagaaaagaagaaaggaaagaattgatcgttgaaaatgcagggaggaaagaaagcgggagagtccattaaggaaacagctacaaacattggtgcttctgccaaggctggcatggagaagaccaaggccactgtccaagagaaggcagaaagaatgacagcacgtgatccggtgcaaaaggagttggcaacccaaaagaaagaggcaaagatgaaccaggcgga

SEQ ID NO: 68962 - DNA, 120 bp, Glycine max
  Clone ID: 700841064H1
ggctgatgtattcatccctggatttgaccgtgacgggaaggggcatccaaattttgctagcttggtgatggggcacaggctatatcagtcagctgcatcaaagacatttagacctgacag

SEQ ID NO: 68963 - DNA, 248 bp, Glycine max
  Clone ID: 700841065H1
gcttcttcttggatgaaacaaaaggccacgatatagcttatgttcaatttccacacaacataaaaaattaaaaaaagaatgaccattatgcaaattcttatcttgtgagcaatgtgtttgagctagctggaatatgtggatatggagcagccttgtattgtggaactgggtgtttacatcgaagataaagtctttcgggagcttacttgaaagattacaaagcaaaatgggagagcaagccataaaga

SEQ ID NO: 68964 - DNA, 246 bp, Glycine max
  Clone ID: 700841069H1
caaaaacaaaaacaaagtaagagttcactcaatctcactgtgttgtgagttgtgtgtgagcaccaaccaacaatggtgtctctgactccgttatgtttctttattaccttgttgatcgctggtgcagacgcagcggcggagcccaaacggtgcgttttgacaccggggggttgagcagagacacctttcccaaaggattcttattcggaacggccacgtctgcgtaccaagtggagggtatggccc

SEQ ID NO: 68965 - DNA, 78 bp, Glycine max
  Clone ID: 700841070H1
gttactttcatttgttgtgcaatcttacaagttccaaacttctctattttgttattatttgttctcacttccacacaa

SEQ ID NO: 68966 - DNA, 244 bp, Glycine max
  Clone ID: 700841071H1
atcgattccaatattgaaatttttggatatatacgaaaaaatacggaccatctcatcatctacgttttgccaattgagaaatcctaatcctatgattcgatttgaacccatcaccaatagaatacctagattatagatatgaaagaatatttttggtaaaagtaattattgataatttgtaataaaagactcgactcttactacaaatccattttcgaaacttatcttatatatctcctcacaa

SEQ ID NO: 68967 - DNA, 244 bp, Glycine max
  Clone ID: 700841072H1
gtgcttcttatttgcagtcttcttctgctaaagctcaagattggctgaatactgctattggtatctcgaaacagaatttgatggaaagttgttcctctggtggaaagatttccgaaattattactcataaaaagtcatggaagaggtgtgcagctcatgttcacatcagtcatctcatccgtagtttagaagtgtcaaaacgacaggtgggcaaagaacatgagctttgtcctcaaacaagagt

SEQ ID NO: 68968 - DNA, 246 bp, Glycine max
  Clone ID: 700841073H1
ataccaacaagaaaagaaaacaagaagagttgagattccctttgaagaaaagatggcatcccataggcaaagctatgaagctggtcaaactaagggccgaactgaggaaaagacgaaccagacgatgggcaatattggagagaaggctcaagctgcaaaggagaagacccaggaaatggcccaagctgcaaaggagaagacccaacaaacagcccaagctgccaaggacaagacttgcgacacttc

SEQ ID NO: 68969 - DNA, 114 bp, Glycine max
  Clone ID: 700841075H1
aagtaggatacaaccctgacaagattccttttgttcctatcactggttttgagggagacaacatgattgagaggtccacacaccttgactggtacaagggtccaactctgcttg

SEQ ID NO: 68970 - DNA, 248 bp, Glycine max
  Clone ID: 700841077H1
gcaaaaccaagttaatgttgcaatcgcataataataaccatccaaagtttattgagagaaatttgcaagtttgaaaagaaacatggcatctcatcaacaaaacaagcaagagcttgatgaaagggcaaggcaaggagagactgttgttccgggtggcactggtggcaagagccttgaggctcagcaacatcttgctgaaggaaggtgcaggggagttttttaccatccatgagcagctggggacagaa

SEQ ID NO: 68971 - DNA, 245 bp, Glycine max
  Clone ID: 700841078H1
gcagaaagaagagaaaaaaggggaatggcatggttgcagttgcagagaatcgtgaccaagggaggtgctaatttgatctcaccactcccactttcacgattcttctcgaaatcttcttccccctatgttgtgaaagttggaattccagagtttctaaacgggattgggaagggggttgagtcccacgttcctaagcttgaatccgaaatcggtgatttccagaagcttctcctcactcgcaccct

SEQ ID NO: 68972 - DNA, 248 bp, Glycine max
  Clone ID: 700841079H1
caaaaacaaaacaaaacagtgtctttgactacgagagagagagaacaaaacaatcaacacaatggcttctgatcaaatgcctcgcagagagaacaacagcaatagggtgatagagagagaggttcacgttgagacacacagaaaagagtccctccctgataagggaagggttgtgatagagagtgagaagaaggagaaagagagagagttggcttctgatagagccaggtctggaaatatagttaagg

SEQ ID NO: 68973 - DNA, 71 bp, Glycine max
  Clone ID: 700841080H1
atcgtctgtatttaatcgtctcaaaatggaagaaaactctaagggttcgttaagtgcaagttacaatgtta

SEQ ID NO: 68974 - DNA, 250 bp, Glycine max
  Clone ID: 700841081H1
agagaagagaagaaacaggcgacgacaaacaatccagcctggaggagatttctaagcacagagctgaagctcaacaaaaagcaatgagttcaattgaaggtgctaaggagagatacgagagagcaaaacaagaagcaagtaaagcttccaaagagagaaacattcaagcaaataagagggctgaagaagaaagaagaaaagcagaaagtggtaggggtgttcatgtggataagtttgaagagaagaagga

SEQ ID NO: 68975 - DNA, 146 bp, Glycine max
  Clone ID: 700841082H1
gatttattgagtcaatttctcctttttcccatattttgggagaatgtggttatatatttgtagtcagggatgctgtgatttgttactgttggaatttgtacgtcattccagacacttcacatatattataggttgtgctttgttac

SEQ ID NO: 68976 - DNA, 247 bp, Glycine max
  Clone ID: 700841083H1
atcagaattctcaacctcaaggttcacagaatgagaatgatccaaataatacaactatgtttgttggtaatttggatcctaatgtcactgatgatcatctgaggcaagttttcagccagtatggagaattagtgcatgtgaagattccagcaggcaagcgatgtgggtttgtccaattcgcggacaggagctgtgccgaagaggcacttcgggtgttgaatgggaccctgttgggtggtcaaaatgt

SEQ ID NO: 68977 - DNA, 247 bp, Glycine max
  Clone ID: 700841084H1
cgagaacagaaatctcgtgtggaacaaaagggtaaaagctcgtttgattctgatttccagtacgaatacgaaccgtgaaagcgtggcctatcgatcctttagtccttcggaatttgaagctagaggtgtcagaaaagttaccacagggataactggcttgtggcagccaagcgttcatagcgacgttgctttttgatccttcgatgtcggctcttcctatcattgtgaagcagaattcaccaagtgt

SEQ ID NO: 68978 - DNA, 246 bp, Glycine max
  Clone ID: 700841085H1
aagatgaaggaaaaagttttgggctcatctgatcctgattctggtaaaggaaagagcaagatgaagaagaacataactcatggctttcacttggtaaaggggagatcaggtcatgccatggaagactatcttgttgctcaattcaagcaagttgacgacaatgaattgggtttatttgcaatatttgatggccactcaggtcacagtgtacctgattacttgaagtctcatttgtttgataatatc

SEQ ID NO: 68979 - DNA, 245 bp, Glycine max
  Clone ID: 700841086H1
gtgagaggtagaaagggtgctgagaaaacaacaagtctcagtagatggcttgttatgaggatgaaaatggatggcctcaatgcttctatatgccacacctcttgggccacctctttgggttgtcctgctgcaggtgagtacgagtatattgaagtgataacagaggatgatgagaattatgccaaacctatgaggctgatagtggatatagactttaggtcccaatttgaagttgcgaggccaac

SEQ ID NO: 68980 - DNA, 242 bp, Glycine max
  unsure (1)..(242): unsure at all n locations
  Clone ID: 700841087H1
cggctcgagcacacacaactactacaagtacttccttacaatcaaaaccataaacaantatggcaagttatcaaaagcactacgatgatcagggtcgcaaggttgacgagtatggcaacgttgagaagcaaaccgacgaatacggcaaccctgttcatgctgctagtgtcacctatgtagccaccacttctgctgctggtggttacagtgatgacattaataagcaacatgataccaccaat

SEQ ID NO: 68981 - DNA, 242 bp, Glycine max
  Clone ID: 700841089H1
tgcagaccgagctagctagctagcaagcaagcacagagatggaggcaaagcgaggccatgccctcatgtgcttggcacgtgtttcactcttcctctgcgctctaaccctatccgctgctcacggaagcaccacggttcaagacatcgcgagaaagttgaaactcggggacaacgagcttctgcgcacggagacgaatttcaaggttttcatggacaattacgggacgagctactccacagag

SEQ ID NO: 68982 - DNA, 244 bp, Glycine max
  Clone ID: 700841090H1
cttctgcacctatgctttcctctaccaccagaaggagatgctctccgaccgcgttcgcatggacgcttacttcgacgccatttttcaaaacaaacgccacttcgctggcaagactgttttggatgtggggactggaagtggcattcttgctatatggtcggcacaagcgggtgcgatgaaggtgtatgcagtggaaacaaccaagatgtcagcacatgcgcgtgcacttgtcaaagcgaataat

SEQ ID NO: 68983 - DNA, 245 bp, Glycine max
  Clone ID: 700841093H1
gtgaaagacgagggggacagtttggaggacctacagaggatgttcgtggagatggtgggggaagatcatggccatgggatcggctttgacttgaaccaggatcagacggctgggaagcgaggacgcgtaaatggatcaaagggcaacgcgcccaagcgcagcaactcccgcagttagtgtgccgtactgaatccgtcttgtaattttcttacttgacattggatgatgattgaaatgaaaatcct

SEQ ID NO: 68984 - DNA, 245 bp, Glycine max
  Clone ID: 700841094H1
tgttttttcccgcataaaaggagaacttggtttgaaggtatatgtcactgatgacccttcagtaaaatcctcaaaccctattcatgatgtggaaccctctgtggacaccgtccaacactcaaccccagatcaatcaccagtttcattcactaattcaatcctgaacgtcttttctcggaagagaaatgagacaaagcacacatttcatacccttccaaattcaaatgaagaaaaacagcgatgag

SEQ ID NO: 68985 - DNA, 247 bp, Glycine max
  Clone ID: 700841095H1
caagtacttccttacaatcaaaaccacaaacaactacggcaagttatcaaaagcactacgatgatcagggtcgcaaggttgacgagtatggcaacgttgagaagcaaaccgacgaatacggcaaccctgttcatgctgctagtgtcacctatgtagccaccagaactgctgctggtggttacagtgatgacattaataagcaacatgataccaccaatgcctacggcgtagacactggtagacagca

SEQ ID NO: 68986 - DNA, 247 bp, Glycine max
  Clone ID: 700841096H1
tgaaggccgaagaggggaaaggttccatgtgaacggcacttgcacatgggttagtcgatcctaagggacgggggaagcccgtctgatagcgctctgtgcgcgtactccgaaagggaatcgggttaaaattcctgaaccgggacgtggcggctgacggcaacgttagggagtccggagacgtcggcgggggccccggaaagagttatcttttctgtttaacagcctgcccaccctggaaacggctcag

SEQ ID NO: 68987 - DNA, 240 bp, Glycine max; identical to SEQ ID NO: 61371
  Clone ID: 700841102H1

SEQ ID NO: 68988 - DNA, 233 bp, Glycine max
  Clone ID: 700841103H1
gtaagctcccaagcagtgggaggaggctcgggactctgaccgcgtgcctgttgaagaatgagccggcgactcataggcagtggcttggttaagggaaaccaccggagccgtagcgaaagcgagtcttcacagggcaattgtcactgcttatggacccgaacctgggtgatctatccatgaccaggatgaagcttgggtgaaactaagtggaggtccgaaccgactgatgttga

SEQ ID NO: 68989 - DNA, 115 bp, Glycine max
  Clone ID: 700841104H1
gttccttaaaatcggttgtctcggatgccgcttgccctggcgcttgccttgtacaacgcgatgctactactcttaattagctagcgctggcaatgctcgtggcaggtgcttggtc

SEQ ID NO: 68990 - DNA, 237 bp, Glycine max
  Clone ID: 700841107H1
acaagagagagagagaaggtctggaagaatcgcgatggaaggtcaggaacgcagaggcatacggctgagcaagcgaatcgcaaacggcgaggttgcctacaagccgaaatccggcaccgcctggagccactcctatctcaaccagacgccatggcaccctctttcttaccccaaccaacgccgcaagtggatcgccgaacagccccacgccaatcgcgaacgccgcaccgaagaggt

SEQ ID NO: 68991 - DNA, 239 bp, Glycine max
  Clone ID: 700841108H1
accgccttcaccagttttttcattcaaatcctcataacacaacatgttcatgtctctcttcagtcacttcgacatcgcgcatggacagaagtggagattttcctttccctccaccgagtcgaaaaccaccagaaaagattcgcatggatcatcacccgtaggactcaagcaaaacccgcccaggtttgcgccggagttggatggcttgcactgctttgaatccatcgtaccctgttaga

SEQ ID NO: 68992 - DNA, 240 bp, Glycine max
  Clone ID: 700841109H1
acaagccttggcgccgaaaggacggtgtttacatgtacttcgaagataatgctggtgttatcgtgaagcccaagggtgaaatgaaaggttctgctatcactggtccaattgggaaggagtgtgctgatctgtggcccaggattgcaagtgctgccaatgctattgtttaagctaggattttagtttttgtaatgtttcagcttcttgaagttgtttcagatattgttttaggttgaattg

SEQ ID NO: 68993 - DNA, 238 bp, Glycine max
  Clone ID: 700841110H1
cccaagcagtgggaggaggctcgggactctgaccgcgtgcctgttgaagaatgagccggcgactcataggcagtggcttacttaagggaaaccaccggagccgtagcgaaagcgagtcttcacagggcaattgtcactgcttatggacccgaacctgggtgatctatccatgaccaggatgaagcttgggtgaaactaagtggaggtccgaaccgactgatgttgaagaatcagcgga

SEQ ID NO: 68994 - DNA, 236 bp, Glycine max
  Clone ID: 700841111H1
cggcaacgcttcatttgaatcaagactccttcctcttcctctctctcgtccattttagttcaactttgaataattctccttcgtatcaagtcttcctcatcttcaccaccttgttatatatatgtgtctaagaacataaagtaaaaaaccaaggcgagtgaaagatgaataatgtcaggtgtgtctctagcagtgtctggtccaccagcagcaacagtggctgaagcagcaggtac

SEQ ID NO: 68995 - DNA, 239 bp, Glycine max
  Clone ID: 700841112H1
cgaagagcggtcacgaaatctcaaaaacaccatcctcttctaagagaacactaagccagggttcagttgatatatatgctgctcagtgcaaaaattgtttgaaatggagagagattgatacacaggaagagtttgaagagattagaagtaaagtgactgaggaaccttttctttgcagcagaaaggctaatagttcctgtgatgaacctggtgatattgaatatgattccactcggacg

SEQ ID NO: 68996 - DNA, 241 bp, Glycine max
  Clone ID: 700841113H1
tcgataacatatttcacttgagacagttatctttatctacgcaagagaagaatagaaaatggatatcaggttgatggatttggactctccattgttcaacactctgcaccgaatcatggatctgacagaggacgcagagaagaacttgaacgctccgacgcggacatacgtgcgcgacgcgaaggcaatggctgcgactcctgcggacgtgcaggagtactctaactactacgtgttcgtg

SEQ ID NO: 68997 - DNA, 242 bp, Glycine max
  Clone ID: 700841114H1
attgaatcaaacagtgaaagtaaaacattgtgcaattaatcatcaactgcaagtagccagtgcataagatcaatggcgtcaagacagcaattccaggacgaccgagccgaagcagctgcaacactcgcagcgcaagacatcggcgagatcaacagaactaacgaccctgacgacgggtacgacttgcacgacgaagccaacttcaagcaagcacgagctgaagcagctgcaaagctggcggc

SEQ ID NO: 68998 - DNA, 244 bp, Glycine max
  Clone ID: 700841115H1
caattttccagaaggaatggcagtgttccttggatccttaaagggcctccgtgttggcctcaatttagcattagccattgctctgcacaatatcccagagggtgttgctgttgcacttcctgtttattttgcgacacaaagtaaatggcaggcattcaaattagcatcactttctggctttgctgaacccctgggagttataatcgtagcctatctattccctagcagcttaagtcctgagatt

SEQ ID NO: 68999 - DNA, 243 bp, Glycine max
  Clone ID: 700841117H1
ctctctctctctgactcgctttcaccgaagaataacttggcattcccgaactccacctgagaaaaagatacccttaattcgcaggcgcgtcttgtgttggacaacaaccacaagatgattaacttcgaagaaaccgagttgcgactcggcctccctggcaacgactcagcactcaagggaagtgctgccaagagaggcttctctgaaactgcttctgttgatttgaagcttaatctttcttct

SEQ ID NO: 69000 - DNA, 224 bp, Glycine max
  Clone ID: 700841118H1
ctacagatgagccctaatttattcaaaaagaaaagatgaaccctaatttcctctgtctctgaacttggaagatctagtttccattatctcctccatcttcacgttccgaaattgtagagagcagatcacacttgctcaattcccttctcaagttattgttggttggcaatgcaagatccaaggattcctttgtcagaggagatcgtgaataataaaccaaggaa

SEQ ID NO: 69001 - DNA, 231 bp, Glycine max
  Clone ID: 700841119H1
cgaaggaatcagattgcagtggtgacatggaagtcatattggggggcatggcttctctggaggatgagatttcatggttcaagacagaagccaacaagtggggtatttcactttctgacgttgttcctcagcaggctaacaaaaactattgtgggttgctggaaagtttaatgagtccagacgcggaatatactgtggctattacagcattttgggctattgaaacggtgt

SEQ ID NO: 69002 - DNA, 237 bp, Glycine max
  Clone ID: 700841121H1
cctccatatacaaaaccccctcttttcaactcttcaaaagaccagccgccacaaccacctccgttttcttcaacacccttccccgtacccgtaacgccacactctcttccgttccttccgccattgacaacccatccattctcaccgatcaacccttaaagggcttaactttggacgaccttagtaatagcgaccaatttggctatgacttcgaacccgacaccaacgttagcgacc

SEQ ID NO: 69003 - DNA, 238 bp, Glycine max
  Clone ID: 700841123H1
cgtggatgtacaacaatgaagacactcctgttgttgccgtttctattattgacaccaacagcttggagaaccagctcgaccagatgcctaggagattctatcttgctgggaaccaagagcaagagtttctaaaatatcagcagcagcagcaaggaggttcccaaagccagaaaggaaagcaacaagaagaagataacgacggaagcaacatattgagtggcttcgcccctgaattctt

SEQ ID NO: 69004 - DNA, 237 bp, Glycine max
  Clone ID: 700841124H1
ccaccacttcctcttctcaccttcttctcctcctaacccctcctaacccctcttcgtctcttacaccaaatccggaaataggttggccagtgaggacaataaaatcttgcttgacaagtatggctgcgatgttgacgctgatgagtacttttctcagtcgtcttctaagtccaagaggagataggactcaaaggagcaaccaaggagacagaggagggaagcaagtgctggacccac

SEQ ID NO: 69005 - DNA, 236 bp, Glycine max
  Clone ID: 700841126H1
aacaaattagcggaacgttgaattgaacaagaagagagaagaatgatgatgaatgttttagggttgagtctggtgttaacttcactggcagcagcaggaatattctctcccaatcccagaacagagaagcatggagccagcaccattgtcaaagaagggcatcgagttgtggtggttgaatacgaccaaggtggccatcagaaaaccaaaatctcaatatccccagagcaacccac

SEQ ID NO: 69006 - DNA, 236 bp, Glycine max
  Clone ID: 700841128H1
aaccgtttaacggtagcagttgtgtgtgttaattataactactgtcccacttcctgctctgcatggggagaagttgtatttctaatgttgatcccatagtactaggtgattgtggaaagtaactaggacggccaagaaacatcagaaactcaactaccactgttcggtttagttgtagaaagacttaccgtgtttacattatatgcttatcttgggatcgaactgaaggaaaacaa

SEQ ID NO: 69007 - DNA, 69 bp, Glycine max
  Clone ID: 700841129H1
cgcatggctcttgctacatccacaatttccagcgttactggtttttctcccaaccccagtgtagggggt

SEQ ID NO: 69008 - DNA, 257 bp, Glycine max
  Clone ID: 700841130H1
acgcaattcgacgcgagcacaagcactccgatgatcagggtcgcaaggttgacaagtatgacaacattacgaaacaagctaacgaatacggcaaccctattcatcctgctagtgtcacctcatgtaccccaccaaaccacctactggtagttacagtgatgacattaataagcaacatgataccaccaatgcctacgacgtagacactcgtaaacagcattctagtggtagctacgatggtgacactaataaacatc

SEQ ID NO: 69009 - DNA, 243 bp, Glycine max
  Clone ID: 700841131H1
ctcctaatgaacataacgaggctggggttgatgctaaccctcacaactaagaaggcaacttactaaagcttatatataggtttaagtgatcgcaataaataaaacttcatgagaaggttagttgtaatagaagtggaaaactttgtaaaggaataataccgttcatgaatttccttatctttatgatgtctctggttctgttttgctaaactcaaatacagaaaattgtataatagtgtctaa

SEQ ID NO: 69010 - DNA, 256 bp, Glycine max
  Clone ID: 700841132H1
cggctcgacccgagctagctagcaagcaagcacagagatggaggcaaagcgcggccatgccctcatgtgcttagcacgtgtggcactcttcctctgcgctctaaccctatccgctgctcacggaagcaccacggttcaagacatcgcgagacaggtgacactcggggacaacgagcttctgcgcacggtgaagcaggtcacggttttcatggcgaatgacgggcggcgctactccacagaggcggcgtagtggcgc

SEQ ID NO: 69011 - DNA, 145 bp, Glycine max
  Clone ID: 700841133H1
cggctcgagcacgagacccatagtgctgccaaattatagtaactctctttctctttctgaagaagaagaagttctgaagaagcatgtgtggaggtgctatcatctcagacttcattggtgtgaagcgtggccgcaacctcgccgc

SEQ ID NO: 69012 - DNA, 243 bp, Glycine max
  Clone ID: 700841134H1
aagaaaacaagaagtagtgagaagaagggagagaatggaggaaaaggcaaaagctgagcagaagaagataggtatgaccgagacttggttgaagaagcaccgtcttctttacaatggagccactagacaccctcttattattagcattcgcgatggcaccatcaacactgcttccttcaaaacatggctcgcacaggattacttgttcgttcgggcgtttgtcccatttgcggctagtgtgct

SEQ ID NO: 69013 - DNA, 234 bp, Glycine max
  Clone ID: 700841135H1
cgactcttgagttgagtgtgtctggtcggaccagtatgcagttcagtatcacatcacaattccttcatatcttctctcttaccatcttcattatcattacctcttcactttcacaatccagccagttttgtgatgcgggaactgaaattccatcatccaagctgttgatcaagggtggcacggttgtgaatgctcagcaccaccagattgctgatgtttacgtggaagatggca

SEQ ID NO: 69014 - DNA, 239 bp, Glycine max
  Clone ID: 700841136H1
ctcgagccgcggcaagcaaggtttctgtttcagtctcagagggagaaatgggtcgttgcagagctgcgtcgcgccccggtgacgatgaccccaaggacagagcagagagacaaagggctgctctgaatgtagcaaattcagaaactttacctactggccaaggagtaactaatagcaaggtatctccttatcactgcaattatggtaacagagatatgtcggggaagatgcgcatcaag

SEQ ID NO: 69015 - DNA, 236 bp, Glycine max
  Clone ID: 700841138H1
taagggactgatgactgagatagcggtgattcaattgcatcatcacaatcacaacattgcttattgacattcatatcctctcattctctccctttttctttctcttcaattccaaacctatggcggatcagaggcccaaaccagagaccttcgaactcaacaatggcagcatgcaagtcctcctcagcaatctcggctgcaccatcatctccttatccgtacccggaaaagatgga

SEQ ID NO: 69016 - DNA, 236 bp, Glycine max
  Clone ID: 700841143H1
ctttcctttgttggtgttgctgggaactgttttcccggcatcagtctgtgtctcattacaggtgagagaggatgagcataaccctttctacttgacatgctctaacagcttccaaactctctttgagaacctaaacggtcgcattcatctcctccagagattcaacaaacgctccccacaacttgagcatcttcgagcctaccggattgtccagtttcagtccaaacccaccacaa

SEQ ID NO: 69017 - DNA, 239 bp, Glycine max
  Clone ID: 700841146H1
cacacaactactacaagtacttccttacaatcaaaaccaacaacaactatggcaagtgatcaacagcactacgatgatcagggtcgcaaggttgacgagtatggcaacgttgagaagcaaaccgacgaatacggcaaccctgttcatgctgctagtgtcacctatgtagccaccagaactgctgctggtggttacagtgatgacattaataagcaacatgataccaccaatgcctacgg

SEQ ID NO: 69018 - DNA, 242 bp, Glycine max
  Clone ID: 700841147H1
cgtacccgttggtggtggctgtcctccccgatgtgccggaggagcaccgtaagatcctggagtctcagggctgcatcgttcgcgagatcgaacccgtttacccacccgaaaaccaaacccaatttgccatggcttattacgtcatcaactactccaagcgccgtatatgggagtttgtggagtacagcgagatgatatcacttggacggagacattgcggtatatgagcacatagacgacct

SEQ ID NO: 69019 - DNA, 253 bp, Glycine max
  Clone ID: 700841148H1
gcatgccactcgagccgagctcttacactcgtctggcgtcaagactctggaggaaccttatcccgatccgcaagaacacgcaaacatcgatcaattaatttactgcatgctagatggggagtgcatcagagtgcgacccagcgcttgcgctttcccacaaattccctgatactacgtactctgataccgaaagggatgcagcactttatgccctaagcgtaggggtgtgtttgtcggacgctcttgacgctga

SEQ ID NO: 69020 - DNA, 241 bp, Glycine max
  Clone ID: 700841150H1
ggaaatgcaagaagcttatcttgtcaatctcgtaaatgtgttacgagaattgtatttgcacagtccagaggaagctcgccaattgagaaggaaagctctctctcgtattgaatggctgcaaaaagctgatgtgcctaccatagcacagattgaagagttccattcgatgcagaggatgatgaatgctcctgattcaaatgataatattgatctactgttgagcattgatttgttgggttta

SEQ ID NO: 69021 - DNA, 103 bp, Glycine max
  Clone ID: 700841151H1
gccagaaggtgcttcctaatggtcaaagttggcggcctctcttgttgctcttatgctactcaatgaagattctttctgaagccagtaacgtttcaaaaagtca

SEQ ID NO: 69022 - DNA, 224 bp, Glycine max
  Clone ID: 700841152H1
cattctggtgctcttagtcaagtttttctgcctgcagatgaaggtgttgaaagttctatttggctgctagcaaaggcttatgtagttgtgaatgactcgtgctatcatcaacttgtcagccattggttaaacactcatgcagttgttgagccattcatcatagcaacaaacaggcatctcagtgttgttcaccctatttataaactccttcaccctcactatcg

SEQ ID NO: 69023 - DNA, 233 bp, Glycine max
  Clone ID: 700841155H1
aagcccaccaagattcactctcgctcacgtgcccgccgaatgaaggaagccaagaggcaaggacgtcactctggatatggtaagcgtaagggtacaagggaggcaaggcttcccactaaaatcctttggatgaggagaatgcgtgtgcttagacgcttgcttcgcaaatacagggaatctaagaagagtgacaagcacatgtatcatgacatgtacatgcaggtcaagggtaa

SEQ ID NO: 69024 - DNA, 234 bp, Glycine max
  Clone ID: 700841160H1
acccatactccatggaatggactggtttggccaatagattactgagcaagggcaacgatattctgtgttgcgattatgctagttttgacggtctgattaccaagcaagttatgagcaagatggcagacatgataaacagtctttgtggtggtgatgaaaaattgatgcgtgaaaggacacacctgctgttggcttgttgttcaaggctggcaatttgtaagatagatatctgga

SEQ ID NO: 69025 - DNA, 237 bp, Glycine max
  Clone ID: 700841161H1
cccaaaggcaccgtcacaaaccctcacgtgcgagtcacgtgtttttgtgaattctctttgccatggctctcgaccagctttcgaatcccaacgccgttgacggtgccggtaacggcgcgacgccgtgctccgctgtggacggcggcatcgaggacgggaggccggctgcgaggctaccgcggtggacgcggcaggagattctggtgctgattcagggaaagagcgatgcggagagcc

SEQ ID NO: 69026 - DNA, 237 bp, Glycine max
  Clone ID: 700841162H1
caaaagcactacgatgatcagggtcgcaaggttgacgagtatggcaacgttgagaagcaaagcgacgaatacggcaaccctgttcatgctgctagtgtcaccgatgtagccaccagaactgctgctggtggttacagtgctgacattaataagcaacatgataccaccaatgcctacggcgtagacactggtagacagcattctagtggtggctacgatggtgacactaagaaacat

SEQ ID NO: 69027 - DNA, 240 bp, Glycine max
  Clone ID: 700841163H1
ctgacccatacctgaacatattccgtggacttattccccctctgggaggaacgctggatctctctcccatcctagcattcttggtcctaaatgccttcaccagcactgcttctgcactccctgctgagcttccagtcacagaacaatccaaacaaggccttgcagcaccattgcactccactaaccttactgattcacagaagaaatggttgacacggtttcaagggaacaggtcaagga

SEQ ID NO: 69028 - DNA, 242 bp, Glycine max
  Clone ID: 700841164H1
cattcataaagacataaaaacaaaagagaagcacgaacagtaactttagaagatcgatcatcatcaatggctgtccaagtttatattgtgtactactctatgtacgggcatgtggagagattagcagaagaaataaagaaaggagctgattcggtggaaggcgttgaggccaaactatggcaggtagctgagatattgccagaagaggttcttggcaaaatgggagcaccaccaaagagtga

SEQ ID NO: 69029 - DNA, 240 bp, Glycine max
  Clone ID: 700841166H1
cccaaggccgctttagagaaaattgtgaacgttaggttaagcgctgcgcaaccgaagaacgttccgaagcagaacaccgatgcgaagtatataaaatacaaaccctcacagcaatccgcggcgttcaattcgggtgctaaggagagggttattaggatggttgagatggcggtggatcctcttgagcctccgaagttcaagcacaagcgtgttcccaaggcgtcggggtctccgccggtg

SEQ ID NO: 69030 - DNA, 236 bp, Glycine max
  Clone ID: 700841167H1
cgactcttgagttgagtgtgtctggtcggaacagtatgcagttcagtatcacatcacaattccttcatatcttctctcttaccatcttcattatcattacctcttcactttcacaatccagccagttttgtgatgcgggaactgaaattccatcatccaagctgttgatcaagggtggcacggttgtgcatgctcagcaccaccagattgctgatgtttacgtggaagatggcatc

SEQ ID NO: 69031 - DNA, 220 bp, Glycine max
  Clone ID: 700841168H1
catcaggcaagtttttgtttcctaataaacttttttgttgacaatttttgttgtgaaaataaaaaaacaatatgaacagtttgtcttgtctgtttaggtagttttcctgacttgtatgacactagtcacatgaggacgatcttaagaattgatagattaaatcagtgcttttcctctcaattttcttttacaaagaatggaagaatttagacagcattac

SEQ ID NO: 69032 - DNA, 238 bp, Glycine max
  Clone ID: 700841169H1
cacatgtggtagtggacgtggtggtttacccaccactgcttggattagttctgcagttaacaatcgcgctcagatatcaacaaaaggattcgcacagcacttgggaaaggtaagaaaattgtttttctgactagagttgatccttttccagtagctttactggctgttctttttggtgttaagaatgaaatgctgagttctaacgccactaatcctatgctgacgcgacttcttgaaa

SEQ ID NO: 69033 - DNA, 239 bp, Glycine max
  Clone ID: 700841171H1
ggtattctgtggaaatgtctgctgtagtttacaaggattgggtttttacagatcaagcattgcctgctgatcttataaaaagaggaatggcaattgaggatccatcgtgtcctcatggcattcgccttgtgatagaggactacccttatgctgttgatggacttgagatatgggatgctatctagacatgggtccatgactacgttttcttgtactacaaatcagatgacacacttaga

SEQ ID NO: 69034 - DNA, 238 bp, Glycine max
  Clone ID: 700841172H1
caattctatgtgagtgaattgggaggatgctgtgtctgggtcgattcggcggggtctctcactacccaatcaaatccggttcgagtcggagggacgacaccaataacaggcccagatacgtgtttgatggccgcccaggaatccgacactacttttgcaccctctcttgactccgacaaaagcgcctctgctggattctgcatcattgaaggtgcagaaacggtacaggattttgcca

SEQ ID NO: 69035 - DNA, 233 bp, Glycine max
  Clone ID: 700841175H1
cttggcagttgcacttgcacatggatttgctctatttgctgctgtttctgcaagcatgcatgtatcaggtggccatgtcaacccagctgtgacatttggtgctctcattggaggcagaatttctgttctccgtgccgtatactactggattgctcaaattctaggtgctatagtggctgccctcgttctcaggcttgtcactaataacatgagaccatcagggttccacgtgg

SEQ ID NO: 69036 - DNA, 232 bp, Glycine max
  Clone ID: 700841177H1
catggctcttgctccatccaaagtttccaccttttctggtttttctcccaaacccagtgttgggggtgctcagaaaaacccaacttgctctgtttctctgagctttttgaatgagcaacttggaagcagaaaccttagggtttgtgcctcaacggtgcctctcactggggtcatttttgaaacgtttgaggaggttaagaagagcgagcttgctgttccaactgctccccaa

SEQ ID NO: 69037 - DNA, 109 bp, Glycine max
  Clone ID: 700841180H1
ccacaatggcaaacccatttgtgaatccctcattgctgttcagtacattgaggcggtttggaatgacagaaatcccttgttgcctactgacccttagcagagagctcag

SEQ ID NO: 69038 - DNA, 237 bp, Glycine max
  Clone ID: 700841183H1
cactggtggctatgccggtgacactggtaggcaacatgggaacatcggtggcccttactatggaaccaacaccgcagacaccggtactggtcccagaagtggaaccacgggcggcaccggttatggaggcactggtggcactgattatggaccaactggtggcactggttatggaagtggaactgggtatggagtcaacactgggggtgcgcacactgaagcaggatataggaagga

SEQ ID NO: 69039 - DNA, 226 bp, Glycine max
  Clone ID: 700841184H1
caatctggtgcttttagtcaagtttttctgcctgcagatgaaggtgttgaaagttctatttggctgctagcaaaggcttatgtagttgtgaatgactcgtgctatcatcaacttgtcagccattggttaaacactcatgcagttgttgagccattcatcatagcaacaaacaggcatctcagtgttgttcaccctatttataaactccttcaccctcactatcgtg

SEQ ID NO: 69040 - DNA, 240 bp, Glycine max
  Clone ID: 700841185H1
tcttgattcggatctagagtcatcagtttctcctcgttgttcttcgctttcctgttttcaatttcgattctttcgttaatttaataagatgtttgggagggcaccgaagaagagcgataatacgaggtactacgacatcctcggcgtctccaagaacgcttcgcaggatgatctgaagacggcttacaagaaagccgccattaagaatcaccccgacaagggcggtgatcccgagaagtt

SEQ ID NO: 69041 - DNA, 182 bp, Glycine max
  Clone ID: 700841186H1
acgttggtgatgatgttgtcctgaacgcggttccgtgttcggttagtgcggcggcgcacgagcactcgagttcgacgacgtcgtgttcggggaagaacaagaggaagctgacgcagtatctggaggggttactgagggaagtgatagagaagcaagagacgctgcagaggaagttcgtggaa

SEQ ID NO: 69042 - DNA, 243 bp, Glycine max
  Clone ID: 700841187H1
tctcagtgaaagagaatccgaggcgaagagaagagatcaattaagctggaggggaaggagcaggatgtgtcgctgggagcgaacaagttcccggagagacagccgattgggacggcggcgcagagccaagacgacggcaaggactaccaggagccggcgccggcgccactggttgacccgacggagtttacgtcatggtccttttacagagcagggatagcagagtttgtggccacttttctg

SEQ ID NO: 69043 - DNA, 230 bp, Glycine max
  Clone ID: 700841188H1
cttcagtgtgtcgtttaaaaatgtcgcagttgctggataaagccaagaacttcgtgtcggagaaggtaaatgatatggccaagccggaggcgagtgtcactgacgtggacttcaagcgcgtgagcaaagataatgtcgagtacttggccaaggtctctgttcgtaacccttattcaacttccatacccatttgtgagatcaactactctttcaaaagcgcatccagggag

SEQ ID NO: 69044 - DNA, 233 bp, Glycine max
  Clone ID: 700841189H1
cgtcatcaaagccagaaaggaaagcatcagcaagaagaagaaaacgaaggaggcagcatattgagtggcttcaccctggaattcttggaacatgcattcagcgtggacaagcagatagcgaaaaacctacaaggagagaacgaaggggaagacaagggagccattgtgacagtgacaggaggtctgagcgtgataaaaccacccacggacgagcagcaacaaagaccccagga

SEQ ID NO: 69045 - DNA, 229 bp, Glycine max
  Clone ID: 700841190H1
caacaaactcctctgcatgccgccgctcaactcttcaccctctacttcgccaccgcgcaacagcgtcggagtttcgaccaaatctgtcggaaggccgaggatggtcgccgatttcgcgaagccggtggggcgtgtccgagcggtgacgagcgacgacgagtggggcccggagaaggaggaggaggcataacgcggcagaatcgcggtggaggagaaaccgacggagacg

SEQ ID NO: 69046 - DNA, 234 bp, Glycine max
  Clone ID: 700841193H1
caggggaagaacaagacatgaagaagatgagcaatctcgagctttgtaccagctctccgcgctcgttctcaacctccttcgctcgcctctgtcgtcgttgacgttctctgacgaggttccgccgttggcggcgtcacggcgtcccgggctgggtcagctatcgccggcgggattcgcctccttgctgttgggaatatcgctggcgttgatgctttgtggatcggtgacgttctt

SEQ ID NO: 69047 - DNA, 239 bp, Glycine max
  Clone ID: 700841196H1
gttcagtgtgtcgtttaaaaatgtcgcagttgctggataaagccaagaacttcgtgtcggagaaggtaaatgatatggccaagccggaggcgagtgtcactgacgtggacttcaagcgcgtgagcaaagataatgtcgagtacttggccaaggtctctgttcgtaacccttattcaacttccatacccatttgtgagatcaactactctttcaaaagcgcatccagggagatagcatca

SEQ ID NO: 69048 - DNA, 240 bp, Glycine max
  Clone ID: 700841201H1
ctggtgcaaagaatgctattctcatgaatatgccaaatgctgttctttcaatgtggagatattttgttggagatctcgtctttgaagtttctaagatgacttctccctacattaaatgtacagtctcttcttcatagcatttggaaatttggctgatgacaccatcaattttgaggcttttccccacaagctggtgcagtttggagagattcaggaaaaagttgtattgaaattttcaca

SEQ ID NO: 69049 - DNA, 90 bp, Glycine max
  Clone ID: 700841202H1
attttctacttctttcgttgtcgccgttcgttcacagcgtagcctctgctctcgaagatggctcctcccagaggtggtggtgggttcagg

SEQ ID NO: 69050 - DNA, 239 bp, Glycine max
  Clone ID: 700841203H1
ctcgttttctttctctctctctaaaacacgatttccaattttctttctctagaaatgggaacagcaatccttcgttcccacgattgcctccaaggccggttcctccacaacgaagccttagcgatcgcccgtcacgtgttgcatcgcgaagaaaccctaactctaacaacaataaccataatagcttcgcctcctccgcaaaccagaataaccgccggaagcggagtccggtcaccgat

SEQ ID NO: 69051 - DNA, 238 bp, Glycine max
  Clone ID: 700841204H1
gagaaagtagaggcagagaaagcaagatcaatggagaaaactagagatgaagctaaaggaagagaacaagctgaaaccaaaggtcaaaccaagaagggtggtggtgaggaacagggaagaagaagagagaaataggagaagaaaataaacaatccagcctcgaagagatttctaaatgcagagctgaagctgaagagaaagttaaggagagaaaggagagatcaaaacaagcagcaag

SEQ ID NO: 69052 - DNA, 210 bp, Glycine max
  Clone ID: 700841205H1
gccacggctgagaaaatagcgacgcggaagcacgatcgtctacacgatccggcgcggcgagtcactgcgattccgctctccgacgagacggcgaaaggtacagaatcgcgcgattcgtctggaaatcagattctagcacgattcataccagatatagagattcaaccacgattctggagacgcaaacgaaacaacatccgattcgtcatc

SEQ ID NO: 69053 - DNA, 224 bp, Glycine max
  Clone ID: 700841206H1
cacgagacccatagtgctgccaaattatagtaactctctttctctatctgaagaagaagaagttctgaagaagcatgtgtggaggtgctatcatctcagacttcattggtgtgaagcgtggccgcacctcgccgcgcaggaactgtggtccgagcttgaccctttctctgacctccttggcttcgataccaccaccaccaccaccaaccatccaccccttccat

SEQ ID NO: 69054 - DNA, 236 bp, Glycine max
  Clone ID: 700841207H1
gaaaccctaattcgatatcctcctcctcagaagaagaaggatcgatgtgggcagcttcttgcctggcgtcatgctgcgcggcctgcgcatgcgacgcctgcaggaccgtcgtatcgggaatcagccgccgttccgccaggatcgcctactgcggcctcttcgccttctctctcgtcgtcgcctggatcctccgtgaggtcgccgctcccatcatggaatcccttccctggatcaat

SEQ ID NO: 69055 - DNA, 235 bp, Glycine max
  Clone ID: 700841208H1
ctcgagccgcagaaaacctctctctctctctctctctctctcacccttctcagtgatctactcaacgatgttagagcagttactgatattcacgcgcggagggctcatcctctggacctgcaaccacccagcaacgccctgaggggatctccgatcgacacgttgatcagatactgcctccttgaggagagatccggtgatgcctccttcaactacgacgcacatggagacgtat

SEQ ID NO: 69056 - DNA, 236 bp, Glycine max
  Clone ID: 700841210H1
ttcgagcgaatcggctcgagggctcgaggagtaacaaaacaagtatgtcagaatcaaacgcaattgcaaatggtttgactgctgcaggtggtggaattattgctcaaatcataacttatcctcttaaacggtaaacacgcgccagcaaactgagagaacactcaagaggaacaagcaaagtttgccctccaactcaaccactgctcctggcactcttcttcagatctttcaggtca

SEQ ID NO: 69057 - DNA, 234 bp, Glycine max
  Clone ID: 700841211H1
agggaatgaaggaaccaacaatgagaagacatccaatctgactcaaacaaagttggagaagaggtttggacagtctccagtatttgtggcctccacactcttggataatggtggagttccacagggcgtgagtcctgcatcacttttaaaagaagccatccaagtcatcagttgtggttatgaagacaaaactgaatggggaaaagaagttgggtggatatatggttctgtgac

SEQ ID NO: 69058 - DNA, 236 bp, Glycine max
  Clone ID: 700841213H1
tagatttctgtggggtgttcctcatgtcacggaagtaaaggcaaaaggaggtttctcttcttacctatatgaacttttggtgttgaatttggttggtgtttaaattattgaagagtgtattggaggatttggagaaggaagtgttgaggttgattgtggagttgaaaaggattgaacttgttttgttgattattgtttgttgaagtttggttttgttctcaatggctgtagaggag

SEQ ID NO: 69059 - DNA, 240 bp, Glycine max
  Clone ID: 700841214H1
tgagagagcgagcgagcgagcagtttcaaagagaggatttgggattgggaaggcgagggattgcgctgcgtctcttcctcttctctttcgattcatccctcattcataatcttccaatccaacaacctagcctcacactcacacatacacacatctgaacgcgtatcgtccctcccatggcttcaaagcgcatcctcaaggagctcaaggacttgcagaaagacccaccaacttcttgca

SEQ ID NO: 69060 - DNA, 242 bp, Glycine max
  Clone ID: 700841215H1
gagcgagcagtttcagacacagagagaggggtttgggattggagggattgacgctgcgtctcttcctcttctctttcgatccatccctcattcctaatcctccaatccaaccacctcagcctcacactcacatatacacatatctgaacgcgtatcgtccctcctatggcttcaaagcgcatcctcaaggagctcaaggacttgcagaaagacccaccaacttcttgcagcgctggtccagt

SEQ ID NO: 69061 - DNA, 245 bp, Glycine max
  Clone ID: 700841216H1
cttccttgaagaaggaaaatgttcctgtgaagagacttattgtcaaccagattcttccaccgtctacatctgattgcaagttttgtgctatgaaaagaaaggtactttaattgttttctctttaattgatatgtaacagaactgatagctgagcataccaaagaagaacttgaaggagaaggggaagaaaaactcttgtgtcttgtacgttatgttcatttttatttaaagagctaaaacttgca

SEQ ID NO: 69062 - DNA, 261 bp, Glycine max
  Clone ID: 700841217H1
cgcgaacgcgaacttcggctcgagcacgactacaaggaagaacttccttataaccaaaaccaacaacaactatggcaagttatcagaagcactacgatgatcagggtcgcaaggtcgacgagtatggcaatgttgagaggcaaactgacgatatggcaacccggttcatgccactagtgtcacttatgtagccaccaaaagtgttggtggctacaatgatgacgctaataagcaacatgatattactggtgtctatcccga

SEQ ID NO: 69063 - DNA, 238 bp, Glycine max
  Clone ID: 700841218H1
cttcgagtttcacagccaagtcgtaaaagggtttcaagggatggaaaacatgcagagcttctggcaattgggtgatgaactccgtgggcactcaaaagcatcggaggatcacaagtggttaatggttgcctcgaaactggccgaacagacaagattgaagggggagcgtgtgaacaaccttgatctttcaaagggacccattgaaacaaggtcaagggataaatttgggttccaggaa

SEQ ID NO: 69064 - DNA, 239 bp, Glycine max
  Clone ID: 700841219H1
caccattgaattttgattctagcaagcagagcttttgtcaattttctattgaccttctcggtggaggaattttagtggacaaaactggagattggatcacacttatacaaaattctccaattagtaattgttgagagttgctgcttgagaagaaaggctgtttaatggttaagattgtgatgtctgggaatgcagcagtcaaaaggagtgattgggcctcattggtacaagtgttttta

SEQ ID NO: 69065 - DNA, 62 bp, Glycine max
  Clone ID: 700841220H1
ctttcattgcatttccgtattgtctccacaaacgtctctctctgtctgtcactattcgcttt

SEQ ID NO: 69066 - DNA, 233 bp, Glycine max
  Clone ID: 700841221H1
tgcagaccgagctagctatctagcaagcaagcacagagatggaggcaaagcgacgccatgccctcatgtgcttggcacgtgtttcactcttcctctgcgctctaaccctatccgctgctcacggaacaccacggttcaagacatcgcgagatagttggaactcggggacaacgagcttctgcgcacggagaagaagttcaatgtcttcatggagaattaacggaggtgctact

SEQ ID NO: 69067 - DNA, 235 bp, Glycine max
  Clone ID: 700841222H1
cggcgagcgaaccgggaaaagcccaccatgaaaatcggtcgccctcggcgtccgaattgtagtctggagaagcgtcctcagtggcggaccgggcccaagtcccctggaagggggcgccagagaggggagagccccgtcgtgcccggaccctgtcgcaccacgaggcgctgtcggcgagtcgggttgtttgggaatgcagccccaatcgggcggtaaattccgtccaaggctaaat

SEQ ID NO: 69068 - DNA, 236 bp, Glycine max
  Clone ID: 700841223H1
caaccccctcttttagcgttcgaacaaaattagggttttctcaaccctagggtttaccttctcttcccctgttcgaaattaggcaaatcaaaacagaaacacgactacaaaaagaagaaaagaagaaaagaatcaatcattcattgatcgctgaaacgatacgatgacagggaaggcgaacgatagaagcacacggcgaaggagatcgcggcgaaggtggacgcggcgaccacgaa

SEQ ID NO: 69069 - DNA, 238 bp, Glycine max
  Clone ID: 700841225H1
ctcaattccaaagctaacaactttatagagagagagagagagagacagagagatggagggtgaaggaagaagaagagaaggaggagagagagagacagccacagcagcagcaacgaggaaggtggtgggggtgctgatcagagaagatacaaaggaataaggatgaggaagtggggcaagtgggtcgctgaaattagagaacccaataagcgttcaaggatttggctcggttcctatt

SEQ ID NO: 69070 - DNA, 234 bp, Glycine max
  Clone ID: 700841226H1
gtttttctgcctgcagatgaaggtgttgaaagttctatttggctgctagcaaaggcttatgtagttgtgaatgactcgtgctatcatcaacttgtcagccattggttaaacactcatgcagttgttgagccattcatcatagcaacaaacaggcatctcagtgttgttcaccctatttataaactccttcaccctcactatcgtgacaccatgaacataaatggccttgctcgg

SEQ ID NO: 69071 - DNA, 236 bp, Glycine max
  Clone ID: 700841227H1
gaggattgatttttttttttttttatggaaattacatgttggattgtcttttaacaaatagcacataaacaacattagtttctatatcgtttatgacactaatcaatgtagaaaatcattttcttctcgattctatgctcgatgtaggaaagtcccactttctatgatactcaatgactaaaatagtaacattctcatgtggggaagatttggcgacttgagcaacattagccgat

SEQ ID NO: 69072 - DNA, 239 bp, Glycine max
  Clone ID: 700841228H1
caagtacttccttacaatcaaaaccaacaacaactatggcaagttatcaaaagcactacgatgatcagggtcgcaaggttgacgagtatggcaacgttgagaagcaaaccgacgaatacggcaaccctttcatgctgctagtgtcacctatgtagccaccagaactgctgctggtggttacagtgatgacattaataagcaacatgataccaccaatgcctacggcgtagacactggta

SEQ ID NO: 69073 - DNA, 237 bp, Glycine max
  Clone ID: 700841229H1
cacacaactactacaagtacttccttacaatcaaaaccaacaacaactatggcaagttatcaaaagcactacgatgatcagggtcgcaaggttgacgagtatggcaacgttgagaagcaaaccgacgatacggcaaccctgttcatgctgctagtgtcacctatgtagccaccagaactgctgctggtggttacagtgatgacattaataagcaacatgataccaccaatgcctacg

SEQ ID NO: 69074 - DNA, 238 bp, Glycine max
  Clone ID: 700841230H1
gttagaaatcagttaactgaacttatatctggtctagctgttcaagacatggccccaatgagcttgggtttatctcacagcttatccagatacaaattgaagtttagtgcagagaaggtggataccatgattgtccaggctattggtttactagatgatcttgataaagagttgaatacctatgccatgagggttcgagaatggtatggttggcattttcccgagcttactaaaataa

SEQ ID NO: 69075 - DNA, 240 bp, Glycine max
  Clone ID: 700841231H1
ccatcgttgggttgtgtttgcgtgtctctccgtaaattgccttcgactgtgacaacacgcaccgatcgccatgaacatcttcaccaagaaacccaccgccaaagaggctcttcgtgagagtaaacgtaaatgacaaacgccagtagaggtatagagaaggaaattggagctctacaatcggaagaaaaaaagcttgttgctgagataaagagaactgctaagacgggaaatgaggcagca

SEQ ID NO: 69076 - DNA, 244 bp, Glycine max
  Clone ID: 700841232H1
aacttatgaaagacagggaaaaactgttttctgaaggtgaagttagaaattggtgttttcaagttttccaaggccttgcttacatgcaccagcgtggatacttccatcgcgacctgaagcctgaaaacttgctggttaccaaggattttatcaaaatcgctgattttggcctagcccgagagatcagttcacaaccaccctacactgagtatgtctccacacgatggtatcgtgctcctgaggt

SEQ ID NO: 69077 - DNA, 76 bp, Glycine max
  Clone ID: 700841233H1
ccttggatgagccaagccctttaggtttgcgtctcaggaagagtccctcccttatggatttgactcaggtgaggct

SEQ ID NO: 69078 - DNA, 237 bp, Glycine max
  Clone ID: 700841234H1
ttgaaagggaacgagaaaacacagagagaaacaaaacattgcttctttgaacttgatgcctggttcaagggatggaaccatccagtgtttcatcaagagagtcaaatctaatctgacataccagctatcctgtgtcttagtcctgcattgctagttgaaaatggaaagtttcttctttctgcgaaacggaccagaagaactacatgcacagagtatactatatcgatggatgcagat

SEQ ID NO: 69079 - DNA, 238 bp, Glycine max
  Clone ID: 700841235H1
gggaggagctggtgcaaagaatgctattcttatgaatatgccaaatgctgttctttcaatgtggagatattttgttggagatctcgtctttgaagtttctaagatgacttctccctacattaaatgacagtctctttcttcatagcatttggaaatttggctgatgacaccatcaattttgaggattttccccacaagctggtgcaatctggagagattcaggacaaagttgtattga

SEQ ID NO: 69080 - DNA, 233 bp, Glycine max
  Clone ID: 700841237H1
ggcgaacggcccttgaattctggaggcagttgtgttttgtgtcgtttctctcttcaagaaagagaaagaattgtgcataagaaaaaaaaaaacaaggaggaagggttagtgatcacgtgcggaagggtatacgataagcgaaagagagcttatttgcacactttggggcgtaaagcggtgaatgaaatttaatctattggaagcgtgtgaagcaggaatgttcaagtgatgtt

SEQ ID NO: 69081 - DNA, 231 bp, Glycine max
  Clone ID: 700841238H1
cgcaccagcaccgccgagcccagccctgccggcatcttctggaacgtccgcaaggacgtctcgaaatactcctccctcctcgccaagcccaaccaggacctcaccatgatgctcgaaaacatcgtcaataatgaattcaccggcgtctaccacgttaccgtcactctcctcttctacaacgagtacgccgttagggttccgtttgtcccctgccccgaagaactcaataat

SEQ ID NO: 69082 - DNA, 234 bp, Glycine max
  Clone ID: 700841239H1
attttcccgcttccattcaccatcaccgctaagtttcccccttctctgatggcaccggttactccaagaaccgcgttccccaaggttctcatcgagagagactctgactccgaacagagttcatcgaagaagaagaagaagaagaagaagaagaaaaacttgacgaagaagaagaagttggggtttctactgcaaatgagaagaccgagatactggaactgggttccgacgcaa

SEQ ID NO: 69083 - DNA, 224 bp, Glycine max
  Clone ID: 700841241H1
cttgtaatgtatgcagtatccttgaaataagagatgcgattcaatgtaaatagtgctaataaataaccctactttttagtttgtgacagacaaagcaacaagtagggttatttattagcactatatacgttgtattggtgtgtattctagacttgtaatgcatgcagtatccttgaaatatgagatgcgattcaatgtaatgcaacgcatgtttaataacaaag

SEQ ID NO: 69084 - DNA, 233 bp, Glycine max
  Clone ID: 700841242H1
gtctctgtgaagaagctcaaagcgttaaactgcttcttcttcttcaatggcggcagaatcatctcgcagtagcgctaaacgcccctttatggaagaagacgacgaagaattctccaaaaagccacagcaaaaagggttaggtttccaaagggaaagaaagtgaagccaggagatgaagtggtggtggacaaagcaaatgttgaggagggtgaagaagttgacttggtgaatgc

SEQ ID NO: 69085 - DNA, 233 bp, Glycine max
  Clone ID: 700841243H1
acacaactactacaagtacttccttacaatcaaaaccaacaacaactatggcaagttatcaaaagcactacgatgatcagggtcgcaaggttgacgagtatggcaacgttgagaagcaaaccgagaatacggcaaccctgttcatgctgctagtgtcacctatgtagccaccagaactgctgctggtggttacagtgatgacattaataagcaacatgataccaccaatgcct

SEQ ID NO: 69086 - DNA, 236 bp, Glycine max
  Clone ID: 700841244H1
atgacatataatcctccgggacaagatgttcatataatggccgagcagttatcaaagatatttgaggacagatgggctataattgagtcggattacaatcgggagatgagatatggctttgattatcgggctgttgcccctgcactatcacctttgtctagaagggtttctgcatttacaccaccacctcttgatatgagaaggattttgaatagatcagaatcaatgacacagac

SEQ ID NO: 69087 - DNA, 237 bp, Glycine max
  Clone ID: 700841245H1
ctcagttctccaactcccaaattcttcccagtttgcttcaattgtttgttctagggttagggttttcgatccatttccccctcaaatttcaattattaacaagtgcagagcctgattttcctcccgcgtgctttgaggaggccatgggaggtgacgccactgccgccgctgagagtgcgaccgcggagtcgaacgccgcaaatggagtcaacatcaacattcgctgctccaatggtt

SEQ ID NO: 69088 - DNA, 244 bp, Glycine max
  Clone ID: 700841248H1
tcgagattctttgtttgctaccttctctcggaacaatggttacgttcaggtttcaccagtaccaggtggttgggagggctcttcccacggaagcagatcagcaccccaagatctaccgaatgaagctctggacaccaacgaggttcgcgaccaagtccaagttctggtatgtttctgaggaaactgaaaaaggtgaagagagagcaatggccaagtgcatgccatcaacgagatttttgagaag

SEQ ID NO: 69089 - DNA, 236 bp, Glycine max
  Clone ID: 700841249H1
cgagaaagttgaaactcggggacaacgagcttctgcgcacggagaagaagttcaaggttttcatggagaattacgggaggagctactccacagaggaggagtatttgcgccgtttggggatttcgcccagaacatggtcagagcggcggagcatcaggcgctggaccccaccgccgtccacggcgtcacgcagttctccgatctcaccgaggacgagtttgagaagctctacactg

SEQ ID NO: 69090 - DNA, 230 bp, Glycine max
  Clone ID: 700841250H1
ggggagtttaaattgctctgtgccgggggagcagatgctgaataggttgataaaatttgaagagaatggcaagtttaaggagtataagtgtgggagggagggtaataagggtatgggtgcgttttgagggagttgaaggaggaatttagtgggttggagtatgtatatgtgtggcatgcgttttgtgggtactggggaggggttaggcctaaggtgccggggatgccgga

SEQ ID NO: 69091 - DNA, 232 bp, Glycine max
  Clone ID: 700841251H1
gtgctatggcggcttccaaggtggtgcttattgggaataatatcactctctcctttgatgatattgaagctaattttgccccagcagtcaaaggttctggaaaatatggggtcttatatttggcgaaccactggatgcgtgtgcagaattgacaaataaagttgaacaacttcccaatgcgagttcaccttttgctttggtggttagagggggatgtagctttgaggaaaaa

SEQ ID NO: 69092 - DNA, 231 bp, Glycine max
  Clone ID: 700841253H1
ctcaaacattgtttgttgtaggaagaggaatcttgagaaatggcaggggacagcaagagcaagattctgttcatcggagggactggttacatcggaaaattcatcgtggaagccagcgccaaactggccacccaactttccttttggtgagggagtccactctctccaaccccgcaaaatcacccctcatcgacaatttcaaaggcctcggtgtcaatcttgttttaggag

SEQ ID NO: 69093 - DNA, 233 bp, Glycine max
  Clone ID: 700841254H1
agaaaacctaagcttagaattagaaacaaagaaaagaagaaaggaaagaattgatcgttgaaaatgcagggaggaaagaaagcgggagagtacattaaggaaacagctacaaacattggtgctctgccaaggctggcatggagaagaccaaggccactgtccaagagaaggcagaaagaatgacagcacgtgatccggtgcaaaaggagttggcaacccaaaagaaagaggca

SEQ ID NO: 69094 - DNA, 236 bp, Glycine max
  Clone ID: 700841255H1
aaacagtaaagctaacttcaacacctttaattttctaaaagtaattcagcggctgaataccaagcggagaagatgagtcaggagcagccacggcgtcccaaaggccaaaaccccatcaaatacggcgacgtttttgtcgtctccggcgaccttgcacagaagcccgtcgcaccggaagatgctgccatgatgcaaagcgcggaaactcgagtgctcggacaaacccaacccggcgg

SEQ ID NO: 69095 - DNA, 233 bp, Glycine max
  Clone ID: 700841256H1
gcgccagtggcagagaaggccaaagactacactcttcaggctgcggagaaggccaagagtgcgggtggcacaacggcgagttacgtcggagagaaagcggtgcaggccaaggatgtcgccgtggaagtgggaagagtgcggctgggtatgctgccaaggtggctgctgatttgagggacaaggccaccgcggtggggtgggccgcggcccatttttcggcggaaaagacggtg

SEQ ID NO: 69096 - DNA, 235 bp, Glycine max
  Clone ID: 700841257H1
tcggagagaaagagagagagagagagaaaaatggctgatacaagtggaggagatgcagtgagaccggtggtaatatgtgataacaagtgtggctgcacagttccatgcactggtggttccacttgcaggtgcacaagtgtcggcatgacaactggaggcggtgatcacgtgacatgctcgtgcggagagtactgtgggtgcaatccatgctcatgtcccaagactgcggcttctg

SEQ ID NO: 69097 - DNA, 227 bp, Glycine max
  Clone ID: 700841258H1
gttagatatatatagctacacattacaaaagtagtgaaatcaaagggcgagcagagtgaggaaatatggaggaagtgcagagagaaagagtatcggcatggaattcatacagtccatgccattcatggaacaagttgtgaaagctttctctaattgcctgggtctttatacaacttctacgaaagatggaggagtcacatccacgacatcacgagcaatgaggaggc

SEQ ID NO: 69098 - DNA, 105 bp, Glycine max
  Clone ID: 700841259H1
agaacgcaacacaattatgatgtaaagggtaacgcccaaatcccaaacatataccggttatgtttgggatttgggttttaccctttacatcataattttgttgcg

SEQ ID NO: 69099 - DNA, 234 bp, Glycine max
  Clone ID: 700841260H1
accctgaagaaagacacagccattgtttacttttcattgattgagccaaagctttgtattttctgcgataattttccattgggtggaagaaagtctcaacctttattcgaaagagcaaggatctggttgagttgagtgatcatgtgtggtggtgcgattatctccgacttcataccggcaggtcccgccagcggggcgcggcgcgtgaccgccgacatcctgtggccgagtttg

SEQ ID NO: 69100 - DNA, 237 bp, Glycine max
  Clone ID: 700841261H1
aaagaaaggaaataattgatctttgaaaatgcagggaggaaagaaagctggagagtccatcaaggaaacagctgcaaacattggtgcttctgccaaggctggcatggagaaaaccaaggccactgtccaggagaaggcagaaagaatgacggcacgtgatccgatgcaaaaggagttggcaacccagaagaaagaggcaaagatgagccaggcagagctggacaagcaggcggcgcg

SEQ ID NO: 69101 - DNA, 120 bp, Glycine max
  Clone ID: 700841262H1
gttagaaatcagttaactgaacttatatctggtctagctgttcaagacatggccccaatgagcttgggtttatctcatagcttatccagctacaaattgacgtttactgcagagaaggtg

SEQ ID NO: 69102 - DNA, 239 bp, Glycine max
  Clone ID: 700841263H1
gtaactcgcaggttataccaatcaaattactttttttttcttctaatgtaaatcaaaatgttagtgaaaataaaaagaacattactagaaagaagaaaaatgaatctcttgaattggagttagagctcgaaatcgggcaaaagcagaataccctgatcaacgaaatcttgaatcatctatctcaaaccaagaaaaagatattgaaaacgattatgtaggatcagacagtgaaaagaata

SEQ ID NO: 69103 - DNA, 237 bp, Glycine max
  Clone ID: 700841264H1
aaagagctttgcactcgataaactgaacggcaaaatatgctacatgctctcagcccgaagtctctcaattgtttggggagacactcccaggtattggagatggacttctgttccagcggccaggtttcggaggtggcggaacttgttagtgtgtgttggttggaaataaaaggtggaatcaaaagtggcacgttgtctgaaaaaacattgtacggggcatacctagtgtttaagcaa

SEQ ID NO: 69104 - DNA, 235 bp, Glycine max
  Clone ID: 700841265H1
tggcagggatctaccgtctagcggaggacagcctccggcagatattctgcaggctgccactgagggaaataatgatatgccgctcagtgtcaaaattcttcctgcagctgctctcaacaccttcttcctccaggtcctctccagctcccatccacccctccagctcctggccctccgcaaccgccaccacaccccttctcacacctctctgcccctcttcgacgccgccaccaaa

SEQ ID NO: 69105 - DNA, 230 bp, Glycine max
  Clone ID: 700841266H1
gacagcacgtgatccggtgcaaaaggagttggcaacccaaaagatagaggcaaagatgaaccaggcggactggacaagcaggcggcgcgtcacataacacggcggccaaacagtccgccacacggctgggcacatgggacatggccaccacaccaccggaaccgggactggaaccgccacgtattccaccaccggggaatatggtcagcccatgggggcccaccagacgt

SEQ ID NO: 69106 - DNA, 233 bp, Glycine max
  Clone ID: 700841267H1
gtgcaccagcaacaactacagtgaagagtgaggaggggatgcaaggcatagggatagggtgctgctcaaacgacgtcgtagggcagctggagctaagtcccactatgagcaactcctcttcctgctatcgatggagctggacgagtcccccgagagccgaatccaacggctgatatcggagcaccccgtcatcatcttcacccgatcctcctgctgcatgtgccacgtcatga

SEQ ID NO: 69107 - DNA, 232 bp, Glycine max
  Clone ID: 700841268H1
gcacgaagacaatagcggtcggcgacaaggcagggaaagacaacaagtacatggagcaatggctggccctcaactgggagaagcagcacatcgtcttgtcaagaactcccttaatattaaataaataacatgccgtatggatcaccggagcagtttccaggccatcatgcaatgaaccggctcagatcagctggaccttctggatctgggaaatattatggtgaggacacaa

SEQ ID NO: 69108 - DNA, 229 bp, Glycine max
  Clone ID: 700841269H1
caacgatattctgtgttgcgattatgctagttttgatggtttgattaccaagcaagttatgagcaagatggcagaaatgataaacagtctttgtggtggtgatgaaaaattgatgcgtgaaagacacacctgctgttggcttgttgttcaaggatggcaatttgtaagaaagatgtttggagagttgaatgtggaatcccttctggatttccgctcacagttatttgta

SEQ ID NO: 69109 - DNA, 229 bp, Glycine max
  Clone ID: 700841270H1
atccttcaaaaattttgtttctttgtgtgtgtatggtgatgataacttaattagtgttcatgaatatgtcaagccttactttagtggttctaaattgaaaagctttctagctggtcataaatcaccattactgatggtattgacaaaactagtgcaactttgcaatttagaaagttagcagattgtgattttctcaagagaaactttaagcagatgtctaatgttttgt

SEQ ID NO: 69110 - DNA, 226 bp, Glycine max
  Clone ID: 700841271H1
tgcctagtgaagataaagatctgtatattgagattggctgggcggagttacttcatagaatgctagcaccaatcccttctcattgggttttgtttacagtggttagctcctaacaggctttctcctagggttttttgggttttagggtttctgcctaagatgcttatatcttttggtttttgttcgggtttatccttctctttgccttttttcttttgtctttctt

SEQ ID NO: 69111 - DNA, 234 bp, Glycine max
  Clone ID: 700841272H1
cgactttttctcggcaggaacagactccacagcggtggcaacagagtgggcattggcagaactcatcaacaatcctaaggtgttggaaaaggctcgtgaggaggtctacagtgttgtgggaaagacagacttgtggacgaagttgacactcaaaaccttccttacattagagcaatcgtgaaggagacattccgcatgcacccgccactcccagtggtcaaaagaaagtgcaca

SEQ ID NO: 69112 - DNA, 235 bp, Glycine max
  Clone ID: 700841273H1
tgagaaatggctttcacgaattccagatctcaatctgctttgacagatagagagaaggagaatcttgacaacttagttgacaaggagtgtgcaaccacagagggtatgatatcgagccagctcagttgaagtcttctagtgtcatccaaagcgtcttctcatcaaagcatggacaaacatgcaatccttcgacgtatcaggcaacgcaggtttaataacaaagccaaaaccgctc

SEQ ID NO: 69113 - DNA, 232 bp, Glycine max
  Clone ID: 700841274H1
aaataataccaaaaaacaccatgatgcttggggagacccaccgcccaaatccaaccgtacacgtgccaccgtgggcgccggagatcttctcaccatacaccggcaatgccgattactctccgactccatgcaagaagcacttagtgcacttcagcactacgaatccaccgatgctgagtcagactcggaggttccgtctcgggaaccggaagtcccggtggacgcttactcc

SEQ ID NO: 69114 - DNA, 235 bp, Glycine max
  Clone ID: 700841276H1
aaccaaaacagtaaagctaacttcaacacctttaattttctaaaagtaattcagcggctgaataccaagcggagaagatgagtcaggagcagccacggcgtcccaaaggccaaaaccccatcaatacggcgacgtttttgtcgtctccggcgaccttgcacagaagcccgtcgcaccggaagatgctgccatgatgcaaagcgcggaaactcgagtgctcggacaaacccaaccc

SEQ ID NO: 69115 - DNA, 232 bp, Glycine max
  Clone ID: 700841277H1
gtcatagggtactgttgtggttagggattcgaattttgattatcgaatcgcaaaattctgaatcaatcaatcagtaattagagccattaacgactgcaatggtctgcgagaagtgtgagaagaattatcgaaggtgatagtaccagacaaatggaaagaaggggccagcaatactaccgagggtggtggccgcaagatctacgagaacaagcttctctccaagataaacaga

SEQ ID NO: 69116 - DNA, 242 bp, Glycine max
  Clone ID: 700840563H1
cgcttcctcaaaatttcgccctctttcattcaattctcttctctggtcttctcttctgttcccaccttctgatccatcatccctcgttttctccgaacaatggctgctggtgtcactgtcaagtccgaggttctagaatcttctccccctgaaggagtatgttccaacacggaggaaaaccacctggttcagaccaatttgtctgatgggtcacgcaacaagtctgtgccagcatctggact

SEQ ID NO: 69117 - DNA, 244 bp, Glycine max
  Clone ID: 700840564H1
agtcagcagccacgcggaatactcgtactgtgtcccactctcacaagacaaccttgtctgatgtcttaacggatgcgaaggagaagctaccagcggataaggcggtgacgcgagaagatgcggagggactgattggagctgagcttaggagcaacctggacatgagaaccacccctggtggggtcgctgcatccatggctgcagcagccacacttaatcaaaacagacaagtgactgatgcgtg

SEQ ID NO: 69118 - DNA, 241 bp, Glycine max
  Clone ID: 700840566H1
cgattttctcaagagaaactttaagcagatgtctaatgttttgtgggtggctcctgaggacaaggcgagtttatggtcacaacttcattatgtttcgtgtaatagtctgggaatgcaagaagcttatcttgtcaatctcgtaaatgtgttacgagaactgtatttgctcagtccagaggaagctcgctaactgagaaggaaagctctctctcgtattgaatggctgcaaaaagctgatgtg

SEQ ID NO: 69119 - DNA, 237 bp, Glycine max
  Clone ID: 700840571H1
aagcactgcactgaattggattgggtttgcagcagaagcagcgaaggatatggcgattcttccttctcttgcagttccttcaactcccatttctcgggtaaagctgtttcaatgccaatcctgtcaattccatagatgcacagtactagatcttcctcatcaggcatatgatagtcgtactacatcaattagagtatcaattggattccagaatgagccgagtgaggttaatatgca

SEQ ID NO: 69120 - DNA, 238 bp, Glycine max
  Clone ID: 700840576H1
agctagtcatcaatcacacctctgcattattctcttctctcactctctctaagctctctggtaggcttactcacaaacacttttttcactgcttccattacgaacatatatgtattacatggctcctgaacttgtccccaccgtagtgaaatccagtgctgcgttcacgaaacccgagaaccttctcacgcgtgcctctcttaaattcctcgcaggaaacggtgactatgtttgaggg

SEQ ID NO: 69121 - DNA, 100 bp, Glycine max
  Clone ID: 700840578H1
cacgcgtacgtctcctcattctgctgctccacaggccacctcagtgaatgactccctgttttgtgtctatgtagcgatatggtcagaaacgctcaactgc

SEQ ID NO: 69122 - DNA, 242 bp, Glycine max
  Clone ID: 700840579H1
atccctggttggtgatcataggccctgatggtaaaacaataaccgtacatggcaggagtttgataaacttgtaccaagaaaatgcgtaccctttcaccaacgccaaagtggaggagctggagaaacagcttgaggaagaggccaagggtcttccggcattggtgtatcatgaagggcaccgccatgatctgaatttggtgtctgatggaaacggtggtttgccctttatttgctgcgtatgt

SEQ ID NO: 69123 - DNA, 211 bp, Glycine max
  Clone ID: 700840581H1
atgcagagcttgtgtcaatgttctattgaccttcttggtggaggaattttagttgacaaaactggatattgtatcacacttattcgaaattctccaattagtaacttgtgtagagttgctgcttggaagaaaggcatgttaatggttaacgattgtgatgtctggtaatgcatgcagtcagaaggactgattcggcttcattggttcaagc

SEQ ID NO: 69124 - DNA, 86 bp, Glycine max
  Clone ID: 700840582H1
gtcaaatcctgcactgtatgtgttgagggaacggatcaggacacgtcttcagttgtactcttctgagcctactgcaccatatttgt

SEQ ID NO: 69125 - DNA, 237 bp, Glycine max
  Clone ID: 700840584H1
aaactttgaacggtatgaccattaaccttgtaggtggagtcctccgacaccatcgataacgcgatagctagagattcacgacaaggaagggatcccacctgaccagcagatacttatcttgtgcagggaagcagcttgaggatgctcgaatccttgccgactacactgtcctggaggcatccactctccttctcgagcttcgactttttcgtggcattttttttcgctgtcaagact

SEQ ID NO: 69126 - DNA, 239 bp, Glycine max
  Clone ID: 700840585H1
atgctcctaatcctaaagagctcatttgcgacgcctatggaaaatgcaaacacaaaatctccgacgccatggagaacggtcaagaggccatccataagaagaaggacaagatttgtaaaactaaagagactgtgtatgataaagcccatgacgtccatgaatacgcccaagacactgtagaagcagcaaaggaggatatggccagtaacgtttcaaacgccaaagatgcattgaagctt

SEQ ID NO: 69127 - DNA, 235 bp, Glycine max
  Clone ID: 700840586H1
ctggttttgagggagacaacatgattgagaggtccacaaaccttgactggtacaagggtcctactctgctagatgcacttgaccagatctctgagcccaagaggccttctgacaagcccctcaggctaccccttcaggatgtgtacaagattggaggaattggaactgtgcctgtgggacgggttgagactggtgtcttgaagcctggaatggtggtgacttttgcaccaactgg

SEQ ID NO: 69128 - DNA, 235 bp, Glycine max
  Clone ID: 700840587H1
cgattccgtccatgtctcacttgagactctcaatgaacgaaagtagcaagccatgatttaaatggcgaagggttttgctcaaagtcagcggagaagcacttgctggagaccactctcagaacattgaccctaagataaccatggccattgcaagggaggtggcagcagtgactcgccttggcattgaggttgcactggtagttggtgggggtaacatcttccgtggatcctcctg

SEQ ID NO: 69129 - DNA, 235 bp, Glycine max
  Clone ID: 700840588H1
gaacgtagccacaaacgttgttgttttcagataaacacgtgactatctatctatcaatctcgatctctgagttcaaccgaaccaaactccggagctatggcagagctccaaaccaaggttgaacctgttccagtcccgggtctggctccggtagagcacgagccaacgctggctgaggcgccggcgctcgagcacaaagcggtggtggtggctgcatctgttccggcagcagcat

SEQ ID NO: 69130 - DNA, 205 bp, Glycine max
  Clone ID: 700840589H1
cctgcattcagttcatcagcttttggttcttcaacatcagcagcagtaccttctctttttggctcaaccccatctccatttggagtcaactcttcttcaacacccagctttgggcaatctccatccctgtttaatactgctcctactcaggctacatcttcaccatttggcaatagcatttttggcaacacactgtcatccccat

SEQ ID NO: 69131 - DNA, 232 bp, Glycine max
  Clone ID: 700840590H1
acacaattcatttacgaacgaacgtggcacagagtactcgccttgttccgaatatggcatcgcgcggcagaattggcaatctcacttcctccgcgccgtatattaattcccctcatgctcgcgcataacgtaagctgtccagctagtcctcatggcacaaggcactcatgcgggactagtctgagctggtaacaggcggaggtggaatatggtcaggcacgaggacgcattg

SEQ ID NO: 69132 - DNA, 267 bp, Glycine max
  Clone ID: 700840591H1
ttacgtaagcattcagctcgacgcatggtgaaagctttaaggccacactatgagcttaacaatgctgtgcacattgtgacgacttggaactacttatagaatattagcagactagattgccactacctttactgcagactgaacccataatatgactgtacgatcgcggcataatgtcatcacgactgctctacgcgacatcagcatctccaattcacgcatcactctagcagatgttgctaataaactgaggctgaactctgataa

SEQ ID NO: 69133 - DNA, 228 bp, Glycine max
  Clone ID: 700840592H1
gaaaacctaagcttagaacaggtactagccagagacagacagaggagcgtgaaatgccggagatagacagcgggagagtccattaacgaaacagctacacacattcgtgcttctgccaaggctagcatggagaagaccaaggccactgtccaagagacggcagctagaatgacagcacgtgatccggtgctttaggagttggcaacccataagaaagaggcaacgatg

SEQ ID NO: 69134 - DNA, 238 bp, Glycine max
  Clone ID: 700840594H1
aggtgtccgaggaagctgtaactgcaaacgacgtatttggaggctctagtgagtgcgagtattcatgcgtttcggagtcagtgtttcctattcctaacgaggcggtgtttcactctgagagcacgttagatatgtttgatgaagggattagtaatgttgtggcagagactagtatattcttggcggaggaattagatttggcttctacgacttggcatagagagtgtgataatttcca

SEQ ID NO: 69135 - DNA, 253 bp, Glycine max
  Clone ID: 700840601H1
tggggagacagggaaatcctaagaagcagcaaccgttaaaacatcctgactcggttgtagtcacaacaaaatgggaaacttttgattgaggcttttagatttgcaacgaaaatgcctcacacaccttaagagtgcaatattcagtgagtcatctagttgtgggttgcttctgccataaaagaaattattatttttctcattatatatctgcaaattagaataatgtttggttcacattatttttgctttacat

SEQ ID NO: 69136 - DNA, 241 bp, Glycine max
  Clone ID: 700840603H1
ctttgaaggccgaagaggggaaaggttccatgtgaacggcacttgcacatgggttagtcgatcctaagggacgggggaagcccgtctgatagcgctctgtgcgcgtactccgaaagggaatcgggttaaaattcctgaaccgggacgtggcggctgacggcaacgttagggagtccggagacgtcggcgggggccccggaaagagttatcttttctgtttaacagcctgcccaccctggaa

SEQ ID NO: 69137 - DNA, 242 bp, Glycine max
  Clone ID: 700840605H1
cttattgttaaaccctttgtttgcacaagaaaagagttacttcgtcatcatcatcaacatgagtcgcttcaacaatcagcaagaatcccctgcagtatcatatcctccagcactgtatgttagtgccccaccacctatgggttatccttccaaaggtgatcctacagctgtagggtacccccaacaaagagttccagaagaaaccacaagcaggggtgatggattttggaagggatgttgtg

SEQ ID NO: 69138 - DNA, 240 bp, Glycine max
  Clone ID: 700840606H1
cgaaactactctacaaacacaacaaaactctccaattctgaagattttcttatctcttgtctttgaaactagaagctccgtgattgatcaatggcgacaaaagaaggcaaagccataggcatagacctcggcacgacctacagctgcgtgggcgtgtggcaaaacgaccgcgttgagttcatccccaacgaccaaggcaaccgaaccaccccctcctatgtcgccttcaccgacaccgag

SEQ ID NO: 69139 - DNA, 205 bp, Glycine max
  Clone ID: 700840608H1
ttagagagaaaaaaaaatggctgatacaggtggaggagatgcagtgagaccagtggtaatatgtgataacaagtgtggctgcacacttccatgcactggtggttccacttgcaggtgcacaagtgctggcactgccacaggagggggtgatcacgtgacatgctcgtccggaaaccactgtggttgcaatccatgtccaggtccc

SEQ ID NO: 69140 - DNA, 236 bp, Glycine max
  Clone ID: 700840609H1
cttccttacaatcaaaaccaacaacaactatggcaagttatcaaaagcactacgatgatcagggtcgcaaggttgacgagtatggcaacgttgagaagcaaaccgacgaatacggcaaccctgttcatgctgctagtgtcacctatgtagccaccagaactgctgctggtggttacagtgatgacattaataagcaacatgataccaccaatgcctacggcgtagacactggtaga

SEQ ID NO: 69141 - DNA, 233 bp, Glycine max
  Clone ID: 700840610H1
cacaactactacaagtacttccttacaatcaaaaccaacaacaactatggcaagttatcaaaagcactacgatgatcagggtcgcaaggttgacgagtatggcaacgttgagaagcaaaccgacgaatacggcaaccctgttcatgctgctagtgtcacctatgtagccaccagaactgctgctggtggttacagtgatgacattaataagcaacatgataccaccaatgcct

SEQ ID NO: 69142 - DNA, 232 bp, Glycine max
  Clone ID: 700840611H1
cttgcggctagggttttagcgcagttcttctagatttaaggaagatgggtaaggaaaaggttcacatcagtattgtggtcattggccatgtcgactctgggaaatccactaccactggtcacctgatttacaagcttggaggcattgacaagcgtgttattgagaggtttgagaaggaagctgctgagatgaacaagaggtctttcaagtatgcctgggtgctggacaaatt

SEQ ID NO: 69143 - DNA, 234 bp, Glycine max
  Clone ID: 700840613H1
gagagggagtgagagggagcagagggagcgaagagaagaaacaaagatggagactcctcctccccaacaaggcgtcgtgaagaagaaggagacaaggggccgaaaacccaaaccaaaggacgaacacgggaagggtttgaaggaaggtaggaaaacacaacaacaacaacaacatcatcatcagcagcagcaacagcaacaagatcaaccttcggtggacgagaaatacacgcg

SEQ ID NO: 69144 - DNA, 247 bp, Glycine max
  Clone ID: 700840618H1
ggaaagaattgatcgttgaaaatgcagggaggaaagaaagcgggagagtccattaaggaaacagctacaaacattggtgcttctgccaaggctggcatggagaagaccaaggccactgtccaagagaaggcagaaagaatgacagcacgtgatccggtgcaaaaggagttggcaacccaaaagaaagaggcaaagatgaaccaggcggagctggacaagcaggcggcgcgtcagcataacacggcgg

SEQ ID NO: 69145 - DNA, 242 bp, Glycine max
  Clone ID: 700840619H1
gttaatcaaagatgtacttaataagatgcatgatttcccaaagcctgacacgagtccgcttgtcaagttacttgctactggtcttttaaaccatgagggagaaaaatggaacaagcacagaagaataattagccctgcattcaatttagaaaaattgaagaatatgttaccaatattctacaaaagttgcaatgatttaattatcaagtgggaggaaatgttgtcttctgatggatcatgtg

SEQ ID NO: 69146 - DNA, 72 bp, Glycine max
  Clone ID: 700840621H1
tgcaaaggattctaccggccgctcgatgggaattgcgcttcaaggagtctcgtagggctaatccgcctaaag

SEQ ID NO: 69147 - DNA, 236 bp, Glycine max
  Clone ID: 700840622H1
atccatgaccgtgaccatggcggctgcgtttacaagtacaagtgcaacactgccgctgtcaaatgtcggagagagcagaggtttgcagctgcgtaagtgtaaccctaatcctaataagcctaaggttatgggggggtttggaggttgttctggagtgactcagaaagtattctttgacgtcagtattggaaatccagttgggaagcttgtgggacgtattgtgattggactgtacg

SEQ ID NO: 69148 - DNA, 234 bp, Glycine max
  Clone ID: 700840625H1
ataaaatcctcatatctgttcccaaaagcttgtttgtgagaatggcttcgggtgaaaagaaattcccacctcaacaacaacaaacacagcctgggaaggagcatgctatgaatccagtaccccaattcactagccctgactacaagccttcaaataaacttcaaggaaagatagcattagtgactgggggtgactctgggattggacgagcggtgtgtaacttgtttgccttag

SEQ ID NO: 69149 - DNA, 233 bp, Glycine max
  Clone ID: 700840627H1
tttgctggtgcatgttgaaaatacctctggacaaagaaatgatattgatattggtgctgaggaggtactagcttcaacaatcttccatctccaactgcgtcttggtgtcaatcatgaagtgctaccatcagttgtatgtgctctctgtctcctgatgtttggtgcctctaaatttgcagtcagcagaactgatttattgaaagactacaacacattaatatcatcatacagtt

SEQ ID NO: 69150 - DNA, 236 bp, Glycine max
  Clone ID: 700840630H1
ctcaaaaaagcaaagattacgcaggtgatgctgcacagaatgtcaaagattatgcaagtgatgcagtgcagaagagaaaagagtattctggtgatgcttctcacaagagcaaagaggcttctgattatgccagtgagacggctaagaagaccaaagattatgtcggtgatgctgctcagagaagcaaaggggctgctgaatatgctagtgatgcggctcagaggaccaaagagtat

SEQ ID NO: 69151 - DNA, 66 bp, Glycine max
  Clone ID: 700840631H1
gttctagatcgagctagctagctagcaagcaagcacagagatggaggcaaagcgaagccatgccct

SEQ ID NO: 69152 - DNA, 208 bp, Glycine max
  Clone ID: 700840632H1
ctctcgctcttcttctcatccagcaccgagtcacagactcaccgatcttccgattccctttcgtcttggtttatgagctcgaaggagagacccactcttggtggcacgcggattaagacccgcaaacggactattgctgcgccgctggaccctgcagcattctcggatgcagtggtccagatttatttggataatgctggtgatctgg

SEQ ID NO: 69153 - DNA, 202 bp, Glycine max
  Clone ID: 700840633H1
cttagaattcagaaacaaagaaaagaagaaaggaaagaattgatcgttgaaaatgcagggaggaaagaaagcgggagagtccattaaggaaacagctacaaacattggtgcttctgccaaggctggcatggagaagaccaaggccactgtcccaagagaaggcagaaagaatgacaccacgtgatccggtgcaaaaggagtt

SEQ ID NO: 69154 - DNA, 241 bp, Glycine max
  Clone ID: 700840635H1
ctcgagccggctaacttcaacacctttaattttctaaaagtaattcagcggctgaataccaagcggagaagatgagtcaggagcagccacggcgtcccaaaggccaaaaccccatcaaatacggcgacgtttttgtcgtctccggcgaccttgcacagaagcccgtcgcaccggaagatgctgccatgatgcaaagcgcggaaactcgagtgctcggacaaacccaacccggcggagcagc

SEQ ID NO: 69155 - DNA, 240 bp, Glycine max
  Clone ID: 700840636H1
cggctcgagcggctcgagcggctcgagcggctcgagcacaactacaagaaagaacttccttatgaaccaaaagcaacaacaactatggcaagttatcagaagcactacgatgatcagggtcgcaaggtcgacgagtatggcaatgttgagaggcaaactgacgaatatggcaacccggttcatgccactagtgtcacttatgtagccaccaaaagtgttggtggctacaatgatgacgct

SEQ ID NO: 69156 - DNA, 238 bp, Glycine max
  Clone ID: 700840637H1
cataaaaaaccactctacaaaactctccagtaattctgaaaattttattttcttttggtgaaattaacagctctgtgattgatcaatggcgacaaaggaaggcaaagccataggcatcgatctcggcacgacctacagctgcgtgggcgtgtggcaaaacgaccgcgtcgagatcatccccaacgaccaaggcaaccgaaccactccctcttatgtagccttcaccgacaccgagagg

SEQ ID NO: 69157 - DNA, 235 bp, Glycine max
  Clone ID: 700840638H1
gttcggcataggttgctccgatcacctccactagagcctagaggagttgctggacacccatgacatgcccaaattttacttaggatttggtttggtttggtttggtttggtagggtaaccttgtgttgttgttccaaaaaataaaaggttttgttaaagttaaactacttcctatgtaccctagaatctacttttaaggttatggttcttattattagtgcaataaaattggttg

SEQ ID NO: 69158 - DNA, 235 bp, Glycine max
  Clone ID: 700840639H1
ctatgacaaggcttcggaaacgagttgctacacggctgaaagattcccaaaacacatttgctatgctgactaccttcaatgaagttgatatgactaatttgatgaagctccgttctgattataaggatgcttttgttgaaaagcatggagtcaaattggggcttatgtctggctttgtcaaagtatgttttctaattactgaaatataaactagctgggctttctcctttgattt

SEQ ID NO: 69159 - DNA, 232 bp, Glycine max
  Clone ID: 700840640H1
gctagctagctagcaagcaagcacagagatggaggcaaagcgaggccatgccctcatgtgcttggcacgtgtttcactcttcctctgcgctctaaccctatccgctgctcacggaagcaccacggttcaagacatcgcgagaaagttgaaactcggggacaacgagcttctgcgcacggagaagaagttcaaggttttcatggagaattacgggaggagctactccacagag

SEQ ID NO: 69160 - DNA, 231 bp, Glycine max
  Clone ID: 700840641H1
gcgacacgacacaacacaacacaagctttattctttttcttcgcttcttctgtacagcacccaagattgaagatgatagaccttgcgcgcgtgcagaaggagcttgtggaatgcagcaaggacgcggagggatcgggcatcaaagtcagccccaaaaacgacaaccttgttctcttgatcggcaccattcctggccccgtcggaactccagatgaagggggcattttccag

SEQ ID NO: 69161 - DNA, 231 bp, Glycine max
  Clone ID: 700840643H1
gtttctgaggctcccctcacctctctctccgaaatccccaaattgcctgtgaatgctagaaaccctaggcacgttcgatttgatgctctcccatttgcaatcaagggcgagcgcattcggttcttgcacgcaaggctggtactaccgctgcatcggcctcgatccctgaattcatcattctttctcgcaccatctttttctattccgattcgatttgttgttgttgttgtt

SEQ ID NO: 69162 - DNA, 232 bp, Glycine max
  Clone ID: 700840644H1
ctactctacactgcgattttctccgaaatgcttttgattctcacgctcgtcttcaaaaccccactgagaaaactcgtcatcgtttccctcgatagtgtgaagcgcggtcgcggtcccgtggtggtttccaccgtgggcgccacattgatggtggttctcgcttcgagcctctacagcatggccaagatccagcaacgcaccctcgaggccggcatagtcaaccccaccgacc

SEQ ID NO: 69163 - DNA, 222 bp, Glycine max
  Clone ID: 700840646H1
acagtgtgaagcaattgacattgacaacaggcactggattagtcttacagagagtgacggagatgagaagaggatggagggaagtgtggcaaggagagaaaagagatcaatggaagaaacaaaactggaagctaaaggaagagaaaaagctgaaaccaaagagggtggtggtgaggaaaaaggaatgagaagagaagaaataggagaagaaaataaacaatc

SEQ ID NO: 69164 - DNA, 236 bp, Glycine max
  Clone ID: 700840647H1
ccatatttgaagcctcaaaactgaaggttttgttcttaggagtggacgaaaataaacacccaggaaatctcccaaggacttatacgctaacccatagtgatataaccgctaagctcaccttggcaatctctcaaaccataaatacttctcagctgcaggggtggtacaacagatttcaaagggacgaatggtggcacagtggaaaaaggtgaagggaaggatgtctctgcacgttc

SEQ ID NO: 69165 - DNA, 197 bp, Glycine max
  Clone ID: 700840649H1
cagcagccttcttcgccgtttcagctcaagagccaccagcaggtaagatatggttaagcataacaacgttatccccaatgggcacttcaggaaacactggcaaaactatgtgaagacttggtttaatcaaccagcacggaagaccagaaggcgtttagctcggcagaagaaggctgtcaagattttcccagggctta

SEQ ID NO: 69166 - DNA, 242 bp, Glycine max
  Clone ID: 700840650H1
gaaatccctgttcctgatttctcgaatcccaatgtcttccaccaccatccaccaacacggctcccgcatacccaaaaaacccaaactctcttccttggaaatcgaatcagaattcggccaccacgactcctccgtcgcccgcatcaacaacggcagcttcgggtgctgcccggcctccatcctctccgctcaacgccgctggcagctccagtacctccgccagcccgaccacttctacttca

SEQ ID NO: 69167 - DNA, 236 bp, Glycine max
  Clone ID: 700840652H1
cacacacaactacaagaaagaacttccttataaccaaaaccaacaacaactatggcaagttatcagaagcactacgatgatcagggtcgcaaggtcgacgagtatggcaatgttgagaggcaaactgacgaatatggcaacccggttcatgccactagtgtcacttatgtagccaccaaaagtgttggtggctacaatgatgacgctaataagcaacatgatattactggtgtcta

SEQ ID NO: 69168 - DNA, 236 bp, Glycine max
  Clone ID: 700840653H1
accctctctccctcccaacgaccgaggaagccatcaaaatcatcgcaacgtgaaagtgagagtgagagtgaaagagatctgattgtgttgtgaatcaatctcagacacgacgctatgagaagggtaccttccattctcttcagaaccctcacgtcccctcgcgtcgccacctctttctccgtccccaaccgccttctccaggccgcgctctaccgcagcgccgccgcccgctctca

SEQ ID NO: 69169 - DNA, 231 bp, Glycine max
  Clone ID: 700840656H1
gaagaaccttaccagggcttgacatgccgcgaatcctcttgaaagagaggggtgccttcgggaacgcggacacaggtggtgcatggctgtcgtcagctcgtgccgtaaggtgttgggttaagtcccgcaacgagcgcaaccctcgtgtttagttgccaacatttagtttggaaccctgagcagactgccggtgataagccggaggaaggtgaggatgacgtcaagtcatca

SEQ ID NO: 69170 - DNA, 230 bp, Glycine max
  Clone ID: 700840657H1
gctatctccaaagtcccagcacacccatttccgttctttgtccttgatgggtttagtctttggaaaaataaccgttgagacagcaaaatatgaagtgatcaaatccacaagtgagtacgaaatccgtaagtatgcaccatcagtagtggctgaagtcacatatgacccttcacagttcaagggaaacaaagatggtggctttatgattttggccaattacattggcgctg

SEQ ID NO: 69171 - DNA, 224 bp, Glycine max
  Clone ID: 700840660H1
ctgacactaaactaataataggtgtgtctcacagtgagagtttaggataagagaaaagatatgcggcatagttgatagttggttgaagcgtgaaggaagggtccgcgcgccatggctggcatcacaaccttccccttcaaactctctcactgtcctctcttctctacttccgattccaaactcttcggccttgccctctccaatccctattccatcaaattcga

SEQ ID NO: 69172 - DNA, 227 bp, Glycine max
  Clone ID: 700840661H1
gctactcgctcatcccgtggagataatgggagaaacaaaggacgaagcatacgaggacacgcttctcgatcacgaggaggaagacgaaaaggcccccgactccgccggagctaaagtcaacggcgaagtaccaagaagggctatgttggaattcacagttcgggattcagggacttccttctgaagccagagcttcttcgggctattgtggactcgggatttgagca

SEQ ID NO: 69173 - DNA, 127 bp, Glycine max
  Clone ID: 700840664H1
ctctctctctcagatagattctataagatcgcagtttccaaagaagctaactgaagttcaaacccccataacctctctttcacgttcctcaacgacacataaaacacacaccatggactcttcttct

SEQ ID NO: 69174 - DNA, 241 bp, Glycine max
  Clone ID: 700840666H1
tggaaacgaaacctcttctcactagacactgactaacaatggcggctgaggctcagcttcctgaccacttcaagtgtccgatttccctgcaaatcatgtccgaccccgtcatcctctcttccggccacaccttcgacggctcctccatccagcgctggctggacgccggccaccgcacttgcccaattaccaaactgcccctccctgcacactcctccctcatccccaaccacgccctccg

SEQ ID NO: 69175 - DNA, 239 bp, Glycine max
  Clone ID: 700840667H1
gaaaacctaagcttagaattagaaacaaagaaaagaagaaaggaaagaattgatcgttgaaaatgcagggaggaaagaaagcgggagagtccattaaggaaacagctacaaacattggtgcttctgccaaggctggcatggagaagaccaaggccactgtccaagagaaggcagaaagaatgacagcacgtgatccggtgcaaaaggagttggcaacccaaaagaaagaggcaaagatg

SEQ ID NO: 69176 - DNA, 111 bp, Glycine max
  Clone ID: 700840668H1
cagaagaagaagaaaatggaggaggaacaaaacggcggtcgtttcgacctcataatcctgggcgcctcaggcttcacaggcaaatacgtcctccgcgaaccctcaaattcc

SEQ ID NO: 69177 - DNA, 233 bp, Glycine max
  Clone ID: 700840669H1
aaggtgatattttatttactatatcatcatttagtggatattatcttaccgcagataataaaataaaatgcaaaaaatgaatggtagttcgtttttgaaaacgaccattaagataaacttacttaaataactaatctaaaaggtttagtgttactatgcagcagcatcacctccctagccacgtgtcaatttgcatagccaaagccttaatttaggtcaggtagattttcaag

SEQ ID NO: 69178 - DNA, 231 bp, Glycine max
  Clone ID: 700840671H1
ggcgaacccagtttgagcgctatttttgtttgtgttcccagcgaaagggcaaaacaaagtataagaccttgctttgatttgcttcccttttcttgttgtcgtgtcaaccatggcgtcgtttgggtctctgaaatccaccattttcgaaaaagaagagagaaaacagcagtatcagtcgcatattcgaggcctcaatgcatacgaccgtcacaaaaaattcatggacgatta

SEQ ID NO: 69179 - DNA, 230 bp, Glycine max
  Clone ID: 700840672H1
ctcattcgattccttagcttcacatctccatggcgctgcaccggttactgaagaggaaaggaggcgtcgatgaacttaacgacgatttccctctcgcttctccggcaaccaagattcgccgtctcgttagtacttcctctctctattcttccccatcaacaaccacctagacttgtttgtcattatttactaatcgattccgattgttaccgtttcaggacgctgagttg

SEQ ID NO: 69180 - DNA, 229 bp, Glycine max
  Clone ID: 700840673H1
atcacacacaactactacaagtacttccttacaatcaaaaccaacaacaactatggcaagttatcaaaagcactacgatgatcagggtcgcaaggttgacgagtatggcaacgttgagaagcaaaccgacgaatacggcaaccctgttcatgctgctagtgtcacctatgtagccaccagaactgctgctggtggttacagtgatgacattaataagcaacatgatacc

SEQ ID NO: 69181 - DNA, 227 bp, Glycine max
  Clone ID: 700840676H1
gaaaacaagaagtagtgagaagaagggagagaatggaggaaaaggcaaaagctgagcagaagaagataggtatgaccgagacttggttgaagaagcaccgtcttctttacaatggagccactagacaccctcttattattagcattcgcgatggcaccatcaacactgcttccttcaaaacatggctcgcacaggattacttgttcgttcgggcgtttgtcccattt

SEQ ID NO: 69182 - DNA, 229 bp, Glycine max
  Clone ID: 700840677H1
ggctcgagcggcgataagaccgcaacgttatagccctactcacgagcctttttacctcgctcagtatgcagggagagtgcaacaacaaacgcaccagatggataggtatcagagggtagagaagcccaaggcagagactcctataaacgactctgagatacgcgtcactactcaaggaaggatgaggaattacatcacctacgccaccactctcctccaggagaaagga

SEQ ID NO: 69183 - DNA, 230 bp, Glycine max
  Clone ID: 700840678H1
cttctgatgatttttaccctcgtgatcctgcttcccataccatccatatttcttctgttgcatacaactcactatctcttggagaattcatgcaacctgactgggacatgtttcatagtttacacccagcagcagattatcatgctgcagctcgtgcaattggtggatgtcctatttatgttagtgacaagccaggcaatcacaattttgatcttcttaagaagctggtt

SEQ ID NO: 69184 - DNA, 211 bp, Glycine max
  Clone ID: 700840679H1
gggaggaaagaaagctggagagtccatcaaggaaacagctgcaaacattggtgcttctgccaaggctggcatggagaaaaccaaggccactgtccaggagaaggcagaaagaatgacggcacgtgatccgatgcaaaaggagttggcaacccagaagaaagaggcaaagatgagccaggcagagctggacaagcaggcggcgcgtcacata

SEQ ID NO: 69185 - DNA, 240 bp, Glycine max
  Clone ID: 700840681H1
gaacagtacagagcattttgatgcatgtaagtggacaaaatcagaaccacattcctgggaattgatcttcccaatagaggtatgtggtcctaataatggttttgaaatgtggagttctgagtgggcaaatcaaacttcatggcatttgagtttccttattgacaatcccaaacagtctacagtttttgatattctcttgggaatctctcaagattttgaaattgctggtaatactcttat

SEQ ID NO: 69186 - DNA, 236 bp, Glycine max
  Clone ID: 700840682H1
ctctctcctcctcgatcccaattccactagggattcaattccgatgcgattccgagcttgttagatccacgacaacgtttcgtttcccagattcttttgtaaaaaaaaataatcttcctttgcccaacaggtaagttggaaaaaaatggaccatgacaagactgggtgccaagctcctcctgaaggtcctatattgtgcatcaacaactgtggattttttggaagtgcagctacca

SEQ ID NO: 69187 - DNA, 235 bp, Glycine max
  Clone ID: 700840683H1
caataagcggaggaaaagaaactaacaaggattcccttagtaacggcgagcgaaccgggaaaagcccaccatgaaaatcggtcgccctcggcgtccgaattgtagtctggagatgcgtcctcagtggcggaccgggcccaagtcccctggaagggggcgccagagagggtgagagccccgtcgtgcccggaccctgtcgcaccacgaggcgctgtcggcgagtcgggttgtttgg

SEQ ID NO: 69188 - DNA, 234 bp, Glycine max
  Clone ID: 700840684H1
cagtgttactgcgcatccttccgtttctaccaccgactccggggaaggaaagaaggaaggaaggtgtgaacaacaatcccagcccaacacccatgagaaacgagttgttcgtcgttggattcatgttttagctgctcctcactctctcactcgctttttggtctttgtctgctgatgcaaggatgagttcgttctccatcacgcggaaaaagacgccgttccagaagcatagag

SEQ ID NO: 69189 - DNA, 233 bp, Glycine max
  Clone ID: 700840686H1
agaggcagagaaagcaagaccaatggaagaaacaaaactggaagctaaaggaagagaaaatgctgaaaccaaagagggtggtggtgaggaaaaaggaatgagaagagaagaaataggagaagaaaataaacaatccagcctggaagagatttttaagtacagagctgaagctcaacagaaagttaaggagagaaacgagagagcaaaacaagcagcagaagctgccaaagaga

SEQ ID NO: 69190 - DNA, 230 bp, Glycine max
  Clone ID: 700840687H1
ttttcccagtccaagcagcctccaattcgtgccactctcttcaaaatggccgttaccttctcaaatctccacacagaatcaggtctcaagtccctcgacgacttcctctctgggaaggtctacgtttctggggatcagttcacaaaggacgacatcaaagtgtatggtgctgttttggagaagccaggtgactcttttcccaatgctgccaagtggtacgaggttgtctc

SEQ ID NO: 69191 - DNA, 227 bp, Glycine max
  Clone ID: 700840689H1
gctaaagttcctaaaccatcttctacttcttcaattcagataccactggcaccttcatatcctgattggtcaagctcgatgcaggcttactatgctcctggagccactccacctgcattttttgcctcaaatattgcttctccaactccccattcttatatgtggggaagccagcaccctctaattccaccatatagtactcctgttccatatccagctatatatcc

SEQ ID NO: 69192 - DNA, 225 bp, Glycine max
  Clone ID: 700840690H1
cccatgtgtatatatatataataagcctataagttgcatttaatttacagcctcgtacgtgtgaagtgaagaataatcttgtgaatcgcgtaactctttcaactcaactggatccgggtcacaaccgtcttgaaattaagacctactgggtcattgatcacaatctcaattggtagcacaacatcaagggaaagtgaaaaagaaaggtatatttgatcagggata

SEQ ID NO: 69193 - DNA, 215 bp, Glycine max
  Clone ID: 700840691H1
cggctcgagcgctgttccaatgccaaatctgagaggcaaagcggttgttggtgttggttccagaatgataaggtgcatggctaaccccagaagagttcaaatggtggccaagcaaattaggagagggctttctcatatgcttctcaccgataaagtcttgcagtatgctgttcttcccgaagcctccttaggagccgaccgttacctctcttctc

SEQ ID NO: 69194 - DNA, 225 bp, Glycine max
  Clone ID: 700840692H1
gttgaccatgaaaacagtgtgaagaggttgaccctggacggaaaaaacaacgcgtttccgtcaccctcgccagacggtaaatggatcgtgtttcggtcgggtcgatcggggcataagaacctttacataatggacgcattgatggtgagaagaaggagcttcgaagattaacggagggtccgtggactgataccatgtgcaactggtcaccggatggagaatgga

SEQ ID NO: 69195 - DNA, 229 bp, Glycine max
  Clone ID: 700840693H1
atcaaagaaaggggtggtggctgcttcgaaagcttaataatttgtttatttccagaacatcatagttttcgcagcagcaaactaacaaattactcatatcatataataagatggcccgttctctctcgcaagccaaacgtattggtgtccttgttgctcaatctatctccctaattcccgttcatcggcgaggttacgcagtggcatccgatgtatcggtaagagttgg

SEQ ID NO: 69196 - DNA, 226 bp, Glycine max
  Clone ID: 700840694H1
ggatcttgttgtgtctgtcatgtctgctatgggtgaggaacagatttgtgccctcaaggatattgggccaaagaactagcttttggtgcttgttgcttgttatttctattttctatttaagcaaagatatttttgtaagccttttatattggtttgttcaagacctggcgtatagattctagtcagactagtcttaacaatggtttttatggatgtggtgacagaa

SEQ ID NO: 69197 - DNA, 144 bp, Glycine max
  Clone ID: 700840695H1
gtatcttgttgtgtctgtcatgtctgctatgggtgaggaacagatttgtgccctcaaggatattgggccaaagaactagcttttggtgcttgttgcttgttattcctatttcctatttagccaaggtatttttggaagcctttt

SEQ ID NO: 69198 - DNA, 112 bp, Glycine max
  Clone ID: 700840696H1
gatatagaaagagagagaagaagaaaagaagaacaaagatgcaatcctcaaaggagaagatgaaaaacatggcaagtgctgccaaggaacaagtcgacatctataaagccaa

SEQ ID NO: 69199 - DNA, 248 bp, Glycine max
  Clone ID: 700840704H1
gtgagagaaagagaaatggcaacaagcgaagaagtggttgctgcggcgcggaggagccgcgccggaggagggttgaagcacaaactggagagaaaatggacgttttggtgcgacaaccaatccaaacccaagcaaggcgctgcttggggaacctctcttcgcaaggtctacaccttcgacaccgttgaagagttctggtgtttgtatgatcaggtattcaagcccagcaagttgcaaatcaatgccga

SEQ ID NO: 69200 - DNA, 250 bp, Glycine max
  Clone ID: 700840706H1
caatgatgttatttcatcaggaggcatctccaagtggttgcaaaatcatggccttgagcagcttatggagctttcatccaatctatttaatttcttattccaggatgcaacattgttaaatgaaactgtagtactagttaatccttttctacgaatgatagcatcagtgttgaaattatctcaaaaaaggaaaatatatcagccacattttaccctatcaattgagggcttgttttttatgtaccaggct

SEQ ID NO: 69201 - DNA, 251 bp, Glycine max
  Clone ID: 700840707H1
ggagtcttcatatccctacactggggagagaggtgaatgcaagtttgatccagagaaaatagcagttaagatcacaaatttcaccaatatccctgctgatgagaaccaaattgccgcatatttagtaaaaaatggtccacttgctatgggcgtgaatgcaattttcatgcaaacatacattggtggtgtctcatgccctctcatatgtagcaagaaaaggctgaaccatggtgtgttacttgtgggatatg

SEQ ID NO: 69202 - DNA, 248 bp, Glycine max
  Clone ID: 700840709H1
attgtttgttgttgtaactcgttcttcttcttttgttgttctgtgtttgtgtttgttttttctctcacctgaaaatgtcttgctgcggtggtaactgtggttgcggaagctcctgcaagtgcggcaacggctgcggaggctgcaagatgtacccagacttgagctacactgagtcaaccaccaccgagaccttggtcatgggagtggcacctgttaaggctcaatttgagggtgctgaaatgggtgtg

SEQ ID NO: 69203 - DNA, 104 bp, Glycine max
  Clone ID: 700840711H1
atttagatataaataatatagcaagataagattggtgcattatagaaatccctttagactttagtttagtgttgcataatataattagccatcatcaccatgaa

SEQ ID NO: 69204 - DNA, 251 bp, Glycine max
  Clone ID: 700840713H1
atcccaggcgaggagaaagatggaggggaaggagcaggatgtgtcgttgggagcgaacaagttccccgagagacagccgattgggacggcggcgcagagccaagacgacggcaaggactaccaggagccggcgccggcgccgctggttgacccgacggagtttacgtcatggtcgttttacagagcagggatagcagagtttgtggccacttttctgtttctctacatcaccgtcttaaccgttatgggag

SEQ ID NO: 69205 - DNA, 253 bp, Glycine max
  Clone ID: 700840714H1
agaacctaagtgagaaacaaagaaaggaaataattgatctttgaaaatgcagggaggaaagaaagctggagagtccatcaaggaaacagctgcaaacattggtgcttctgccaaggctggcatggagaaaaccaaggccactgtccaggagaaggcagaaagaatgacggcacgtgatccgatgcaaaaggagttggcaacccagaagaaagaggcaaagatgagccaggcagagctggacaagcaggcggcg

SEQ ID NO: 69206 - DNA, 256 bp, Glycine max
  Clone ID: 700840715H1
tcacacacaactactacaagtacttccttacaatcaaaaccaacaacaactatggcaagttatcaaaagcactacgatgatcagggtcgcaaggttgacgagtatggcaacgttgagaagcaaaccgacgaatacggcaaccctgttcatgctgctagtgtcacctatgtagccaccagaactgctgctggtggttacagtgatgacattaataagcaacatgataccaccaatgcctacggcgtagacactggta

SEQ ID NO: 69207 - DNA, 106 bp, Glycine max
  Clone ID: 700840718H1
aagctagtgatcaatcatcgacacagagctgagtgtgttgctctgtgaatccaccttcttcttccattggaggaccatttcctcctggaatagaaatacttccaca

SEQ ID NO: 69208 - DNA, 250 bp, Glycine max
  Clone ID: 700840719H1
aacaaatatactactacttcaaactttgatatgcaactggcggcagaactccaacgcacccatcaccgccaccaaaggcaaaggcaacaacaggacaccacccccatgtgccgccaaatccagctcactatctccgatcacaccgtcgccggagacgccgtcgctgacgacggcgaggatctcttcattccgcccctcaacttcgccatggttgataatggcattttccgctccggcttccccgaacccg

SEQ ID NO: 69209 - DNA, 133 bp, Glycine max
  Clone ID: 700840720H1
cgtgaaaggaaagagtcggtgacagtgttactatgtggcactagtggctgcggcaaatctactttgtctgcattgctgggaagtaggttgggaatcacgactctggtatcgaccgattctattcggcacatga

SEQ ID NO: 69210 - DNA, 247 bp, Glycine max
  Clone ID: 700840723H1
atttctcagtctctgtgtttgcggctgaggattccgaacgagtgaccttcttcgtttctcgcaaagtttaagtaatcatgggtaaggaaaaggttcacatcaacattgtcgtcattggacatgtcgactctgggaagtcaactaccactggtcacttgatctacaagcttggaggtattgacaagcgtgtgattgagaggttcgagaaggaggctgccgagatgaacaagaggtcattcaagtatgc

SEQ ID NO: 69211 - DNA, 249 bp, Glycine max
  Clone ID: 700840724H1
aatgcatcttatctgtgtttgctgcaagggcttgactcctttacctcctcctcctcctccgcttcaccaatgacgaaacactctagtcattacttttgcttcaaagtctggaggaggattttcacttaactcgttactgaaaagttgtaaaagttgcggaggaaagggggcaattgaatgtcctggatgtaaggggacgggaaagaataaaaagaacggaaatatatttgaacggtggaaatgttttga

SEQ ID NO: 69212 - DNA, 248 bp, Glycine max
  Clone ID: 700840725H1
aatctttctgcaccatcgttctccatttttggctttacaaaaccactgtgtctgattaagggttctttaatatttccaatatttcttgtagtgaaaaagttgttacctaaaagaagacctagtttttggtgttgtagaaggaagagaagaattaacatgaaaattcagtgtgacgtgtgtgagatagctccagcaacagtgatttgttgcgcggatgaggctgctttgtgtgccaaatgtgacgttga

SEQ ID NO: 69213 - DNA, 89 bp, Glycine max
  Clone ID: 700840727H1
gcatttcgttactttcatttgttgtgcaatcttacaagttccaaacttctctattttgttattatttgttctcacttccacacaacata

SEQ ID NO: 69214 - DNA, 250 bp, Glycine max
  Clone ID: 700840728H1
tgagaaacaaagaaaggaaataattgatctttgaaaatgcagggaggaaagaaagctggagagtccatcaaggaaacagctgcaaacattggtgcttctgccaaggctggcatggagaaaaccaaggccactgtccaggagaaggcagaaagaatgacggcacgtgatccgatgcaaaaggagttggcaacccagaagaaagaggcaaagatgagccaggcagagctggacaagcaggcggcgcgtcaca

SEQ ID NO: 69215 - DNA, 249 bp, Glycine max
  Clone ID: 700840729H1
ataagtataggttgtgtagtaggtatgttaggaggttgcaaaataaaacaagtaaaatgtaaattgaagtgattcaactaagtctatccccaatgtggtcctttcttgcctttttaggtatttttattgtgtgggcttttctttgtattatttggtgcctctgagggaaagagaagagattatccgaatgcgtgatggtttggttggatcatgtttatttagcttgtgagaattaattgttgtagcact

SEQ ID NO: 69216 - DNA, 251 bp, Glycine max
  Clone ID: 700840731H1
gaaattcacaaacccggccctagtccaaaatctcataatatgaaagacggtggaacaaatgttgaggtttcagaagatggatctaaaagagaagatacaacctcagagagtggtggtggaggaggccttattaacaacttggtttccactttgatagcacccttgagtccaagcattgggaaagccactgagcatgaaagtggtgctgatgatgatggagaaaaagaaggggttgatggttgtgaagaggg

SEQ ID NO: 69217 - DNA, 246 bp, Glycine max
  Clone ID: 700840733H1
gtccactttatcaaattgggccaaagaattcaggaagtggcttcctgatatgaatattatcatatatgttggtactcgtgcaagtcgagaggtttgtcaacaatatgaattttataatgagaaaaaacctgggaagccaataaaattcaatgcactgttgactacatatgaagtagttttgtaggataaggctgttctctctaagataaaatggaattatctgatggtggatgaggctcataggct

SEQ ID NO: 69218 - DNA, 246 bp, Glycine max
  Clone ID: 700840734H1
cttctttatcaaggatcatctctctgtgtcaggggtgaagttggttgcgtatgttcgtatttggttattgattggatcacactaatgttccactgcaagttttttgacatatattgttgacgggatatttcctagatggggggagcgtgttctaggaagcaagagcgggacaacaaagatagtcctaccagaggactatcacgaagatattgcaaaagcgggactttgaaatggtggacatcctct

SEQ ID NO: 69219 - DNA, 245 bp, Glycine max
  Clone ID: 700840736H1
cttagaaagaaaaaaacttaaatcaaaatacttaatagcatggagatacatttatacaaaacttctaccccaagcacacgcaatggagccgtagacagtcaagtaaaatccaatccacgaaatcatttgatctatggacagcatcgttgtggtaaaggccgtaatgccagaggaatcattaccgcagggcatagagggggaggtcataagcgtctataccgtaaaattgattttcgacggaatga

SEQ ID NO: 69220 - DNA, 246 bp, Glycine max
  Clone ID: 700840737H1
catggtcgttttacagagcagggatagcagagtttgtggccacttttctgtttctctacatcaccgtcttaaccgttatgggagtcgccggggctaagtctaagtgtagtaccgttgggattcaaggaatcgcttgggccttcggtggcatgatcttcgccctcgtttactgcaccgctggcatctcagggggatacataaacccggcggtgacatttgggctgtttttggcgaggaagttgtcgt

SEQ ID NO: 69221 - DNA, 245 bp, Glycine max
  Clone ID: 700840739H1
ccgatgacgcggctgcagcgagggaagtgagagacaaatcagcctcaaagtcaccaggtatctacaattctgccactgctgacaacaaaaccggttccaaggtcggagagtacgcagattatggttctcagaaggcgaaagaaacaaaagatgcaacgaaggaaaaagctggagagtacacagattatgcttcgcagaaggcaaaggaaacgaaggacaagacaatggaaaaggctggagagtac

SEQ ID NO: 69222 - DNA, 246 bp, Glycine max
  Clone ID: 700840740H1
catttttgtactaagaagcatttgttacatttatgtaaccaaaggaaaatcaaaagtacgcaggaggtgaagctcggtggcgaaatcgacatgcaacgcagtgaaagcatgcgactaaaggagaagaaggtgaaggatttgatggttgacaagaagaggctagtggaggtgccgtacatggcgtccctggcccacacaatgactacactggtggcgaacaaggttgtggcggtgccggtggctgcg

SEQ ID NO: 69223 - DNA, 247 bp, Glycine max
  Clone ID: 700840742H1
aagaaggattacgacgaggttgacatggctaacattcagaagaaaaaggaagaggagaaggcgctaaaggagttgaaagccaaggcgcaacagaagggaagctttggaggttctgggctcaagaaaagtggaaagaaataagggctctttatcatgattgtatacatccaatattgagccctgtagtttattaccatgataacttctgtcttattgtggccttctttattgctctaatgttagtact

SEQ ID NO: 69224 - DNA, 246 bp, Glycine max
  Clone ID: 700840743H1
agtgaacgagcttgtttatgatgacccgccagtgatttacacccgctcacattctttggttgtcccttctatttgtgttagtcaatcacttaagcttggcaagctcactattcatgagaccgaggattctttggaactagtggatcatgtcaatggagagaccattaaagacatcaaagattcttcatttgtcgacaaatcattgaaagatgaagatgggaatctcaagaagatccagagagttag

SEQ ID NO: 69225 - DNA, 248 bp, Glycine max
  Clone ID: 700840744H1
agcgggaattggaggccaaaaaaccatctcaacctcaggaagctgaagagaggccatcagaaggaattggcgaaactgtgaggcagtatgcacaaaaaccaaagccaagtgaaagaaaccctcagaaggagggaaccggaagcatcgtgtttacagcaataggcgaaacagtaagcagtgccggtgagaaggtatcgaaaccgtttaaaaacactatgggaggagaaagtgaaggaggaggagggaaa

SEQ ID NO: 69226 - DNA, 242 bp, Glycine max
  Clone ID: 700840749H1
ggacaaaatcggaaccacattcctgggaattgatcttcccaatagaggtatgtggtcctaataatggttttgaaatgtggagttctgagtgggcaaatcaaacttcatggcatttgagtttccttattgacaatcccaaacagtctacagtttttgatattctcttgggaatttctcaagattttgaaattgctggtaatactcttatgccagctttttctgttccacaggctactgccaga

SEQ ID NO: 69227 - DNA, 244 bp, Glycine max
  Clone ID: 700840750H1
caagagcggagaggaatgctctatcagtcactacaggaggaaagaaaccagttaaaggctcaggctgaaaaggctgcatctgttcacgcagaaattatgagtgtgtacaatgagctccaaggggacgcagaataccttgatcaacgtgagatggaacttatggcaaaggaaacacaacaggttccacacgacatacgaatttaaaaatctcagatagaaactgtgatacagaaatttgagaagc

SEQ ID NO: 69228 - DNA, 78 bp, Glycine max
  Clone ID: 700840752H1
atggccgcagcagcagcagcaaccactctctcctcttccctttccaaaccctcctctacttatttccaaacccactct

SEQ ID NO: 69229 - DNA, 244 bp, Glycine max
  Clone ID: 700840753H1
gtcgtgcacttgttcttcttcccttctccttgtgaatcctccgccgagcacttcccgccaccacgcgatccgccgaaacctgagaatgtcccttaacaacaacgattcaaagctgaacccttcttctctgctgaattccgtcaccaaattactatggggccaatcgctcccgccggggctcctcgtcgccaccgtccgcaccgcctggaactccacgtggcacctcatgatgtcgcagctcgcc

SEQ ID NO: 69230 - DNA, 242 bp, Glycine max
  Clone ID: 700840756H1
tcgagtcggacatggtggacaagtcggcgtacgttgcgagcgtgctggtggcggtacggaggcgagggtccgctggtggaggaaggaggcgtgccgttgctggtggagatcgtcgaggttggtccgcagcggcagcaggaaatcgttgtggttattctcttacaggtttgcgaggacagcgtggcgtatcgcaccatggtcgctcgcgaaggtgcgattcctcctttggtcgctttgtctca

SEQ ID NO: 69231 - DNA, 241 bp, Glycine max
  Clone ID: 700840757H1
gggtttagcgcagttcttctagatttaaggaagatgggtaaggaaaaggttcacatcagtattgtggtcattggccatgtcgactctgggaaatccactaccactggtcacctgatttacaagcttggaggcattgacaagcgtgttattgagaggtttgagaaggaagctgctgagatgaacaagaggtctttcaagtatgcctgggtgctggacaaacttaaggctgagcgtgaaagag

SEQ ID NO: 69232 - DNA, 244 bp, Glycine max
  Clone ID: 700840759H1
cagcgatgtagcaaaagcgcatttccgctgttgtatgtgtgtgtttgcgatgccaggtggggcaaccgtctgctccggtcaccggtttcgatgcgttgttctgcattcgactcgtccccgactcagctacccgactcggtcgcgacccgttccggttcaacttggatctgtgtttgtgtcgaatggtaatggcgatagtaagcggttcagctccaagttgagcctcattcccagagccgttgat

SEQ ID NO: 69233 - DNA, 247 bp, Glycine max
  Clone ID: 700840762H1
ggagccaaatccagttgaggctggacgaaccagtgcaattaaggagagtgctataacaataggagaggcattggaggccacggcacagacggtgggtcacaagccggtggatcagagtgatgcctcagcgattcaggcggcggaggttagagcaacgggaagtaacgttataacgccgggaggacttgcggctatggctcaatcagctgctgcttataatgctgactgcaagcatgaccaggacaag

SEQ ID NO: 69234 - DNA, 248 bp, Glycine max
  Clone ID: 700840763H1
agctgaagaaaacctaagcttagaattagaaacaaagaaaagaagaaaggaaagaattgatcgttgaaaatgcagggaggaaagaaagcgggagagtccattaaggaaacagctacaaacattggtgcttctgccaaggctggcatggagaagaccaaggccactgtccaagagaaggcagaaagaatgacagcacgtgatccggtgcaaaaggagttggcaacccaaaagaaagaggcaaagatgaa

SEQ ID NO: 69235 - DNA, 143 bp, Glycine max
  Clone ID: 700840765H1
gaacacttgatttggaataggggttatttggtagtgctagtgcctagtggaattctgtgttgagttttttgttctttatatttagttgagatgtgtgttgtgttcttgagttgtgaataaaaatctactttctttgtgcattg

SEQ ID NO: 69236 - DNA, 241 bp, Glycine max
  Clone ID: 700840768H1
attttagctttctcttccttcataatttctcacctttcaaatctccattcagcttcattttctgcatagaaaaaacccttttctggagaaagaatatagtcttcagctggacaaggatcattcatcttgaaagaagagtttgtgtgtgacaatctttatagttctaaggagggtgcaagagagaactgaatttgctgtgatggcaactcgtagatatgcttttggaagagctgatgaggcc

SEQ ID NO: 69237 - DNA, 242 bp, Glycine max
  Clone ID: 700840771H1
tttactcattagctgttagatggagacaaatttctgagccttgtgaccctgttgtatgggtgaacaagctaagtgatgagtttaatgctggatttggttctcacacacctatgattcttgggcaagccaaagttgttcgttactttcctaattatgaaagaacattagaaattgccaagactgtaatgaaagagagatcatttgtccacagcaaaacagacaagatcattcatctttccaaa

SEQ ID NO: 69238 - DNA, 70 bp, Glycine max
  Clone ID: 700840772H1
gtttgttgttcaatctaacaaacttctctatatcgtttactttttccacacaacatacgagatagcgaaa

SEQ ID NO: 69239 - DNA, 239 bp, Glycine max
  Clone ID: 700840773H1
caatcctggtatttcaggttctcgtcttttgggcaccattcctcagtctatttcacagcaaactgtttggaatcaaatggcaacagtgagaacaccactgaattttgatcctagcaagcagagcttttgtcaattttctattgaccttcttggtggaggaattttagtggacaaaactggagattggatcacacttatacaaaattctccaattagtaacttgttgagagttgctgctt

SEQ ID NO: 69240 - DNA, 233 bp, Glycine max
  Clone ID: 700840775H1
cattcacattcctctcactcagaatcagatcacaccaccgcaaaaccctaaattcaatttttcgatcttgcccctcgcacccgttgtggaaatggggagcaggagggacgaggcgcccgccataaacagcaccaacgtcttcgccgccctcggaagcctcaagaagaagaagaagaagcccgagaaggaccaccagggcccgtccaagcccaaggacaagaaggacgtctttt

SEQ ID NO: 69241 - DNA, 242 bp, Glycine max
  Clone ID: 700840777H1
acacggcggcgaacaggctgccacggcagggcacatgggacaacccatggggacccatcagacgtcagctatgcccggtcatggaaccggacagcccacgggccatgtcaccgagggagtggtgggctcacaccctattggaaccaacagaggcccgggtgggactgctacggcccataatacccgtgcggggggaaacccaaatgattatgggtatggaactgggggtacttacaattaaa

SEQ ID NO: 69242 - DNA, 247 bp, Glycine max
  Clone ID: 700840780H1
caaaaccaacaacaactatggccagttatcaaaagcactacgatgatcagggtcgcaaggttgacgagtatggcaacgttgagaagcaaaccgacgaatacggcaaccctgttcatgctgctagtgtcacctatgtagccaccagaactgctgctggtggttacagtgatgatccaaataaacaacatgataccaccaatgcctacggcgtagacactggtagacagcattctagtggtggctacga

SEQ ID NO: 69243 - DNA, 239 bp, Glycine max
  Clone ID: 700840781H1
ctccgacgaatctatatataccgtcaggcatgcatattggcttccatagtttccaatttcacatcctcttattgttaattaaaccctttgtttgcacaagaaaagagtaataacttgatcatcatcaacatgagtcgcttcaacaatcagcaagaagcccctgtatcatatcctccagctccatatgttagtgccccaccacctatgggttatccttccaaagatgattctacagctgt

SEQ ID NO: 69244 - DNA, 239 bp, Glycine max
  Clone ID: 700840783H1
cgaaggcagaggacgtgatgggatctctgttaagggaataccttaatgtgactaaggaacaagttgatgatcctaatatctctggaagtggcaatgacattcctaaggatagtgcctgcccagaacctgaaaattgtgaaatagcatctcgttgtccagaaaataacattgcagaagttggaagtgaggttcagaagggttgcacttgtgaacaagctgatgggatctctgaacaggct

SEQ ID NO: 69245 - DNA, 241 bp, Glycine max
  Clone ID: 700840787H1
tgagaaagagagagagagagagagaaactgagagaaattcgcaaaccctaatttcggaaagatcggcgatggctgcctctccggatcgcgagaacttcgtctacatcgccaagctcgccgaacaggccgagcgatacgaagagatggtggaatcaatgaagaacgttgcgaatctcgacgttgaactgactgtggaggagcggaatttactttctgttgggtacaagaatgtgattggtgc

SEQ ID NO: 69246 - DNA, 240 bp, Glycine max
  Clone ID: 700840788H1
ctaaagaatccaccagtaacaaagtctctgagtatgccactgacactgcacagaaatccaaggattatgcaactgacactgctctgaaatcagaggactatgcaggtgatgctgctcagaaatcaaaggactacgcaggtgatgctgctcagaaaaccaaagactatgccagtgacactgcacagacatcaaaggactatgctggtgatgctgctcagaaatctaagggctatgttggtg

SEQ ID NO: 69247 - DNA, 241 bp, Glycine max
  Clone ID: 700840790H1
ctcgagccgctcgagccgctctttctccgagaacaaaaaaaaaaacgtgattcgctcttcagcttcgaatacaccacaaaaccaacaaacgagaagaggagtgagagaagatggggttgtcgttcacgaagctgttcagcaggttgtttgcgaagaaggaaatgaggattctgatggtaggtctcgatgctgctggtaagacaaccatcttgtacaagctcaagcttggagaaatcgtcac

SEQ ID NO: 69248 - DNA, 239 bp, Glycine max
  Clone ID: 700840791H1
ggcatctcgtcaaaacaacaagcaagagcttgatgaaagagcaaggcaaggagagactgttgtcccgggtggaactggtggcaagagcctggaggctcagcaacaccttgctgaaggaaggagcaagggagggcaaacaaggaaggaacagctgggtacagaagggtaccaggaaatgggacgcaaaggagggttgagcactgtggacaaatcaggagaagaacgtgctcaagaggaag

SEQ ID NO: 69249 - DNA, 243 bp, Glycine max
  Clone ID: 700840794H1
aagaaaataactttgctttttcccttctttttaacccccttaaatgaaaaaaggggttccccgacttggatagggaactatgcgagtgacctacctaatcttattgtagaaattttcaggatcaatgattagaccatgcagactagaaatgctttttcttgtataaaggaagggattactcgatccatttccatatcgatcatgatatatataataattcgagcacccatttcaaacgcatat

SEQ ID NO: 69250 - DNA, 243 bp, Glycine max
  Clone ID: 700840795H1
cgggcgcgtaggagatgatttttggtgcactgatccctctggagatcctgatggcacgtattggctccaagggtgtcacatggtgcactgtgcctacaacagcttgtggatggggaattttattcagccggattgggacatgttccagtccactcacccttgtgccgaattccatgcagcctctagggccatctctggtggaccagtttacgttagtgattgtgttggaaagcacaacttcaa

SEQ ID NO: 69251 - DNA, 243 bp, Glycine max
  Clone ID: 700840796H1
caacaactatggcaagttatcaaaagcactacgatgatcagggtcgcaaggttgacgagtatggcaacgttgagaagcaaaccgacgaatacggcaaccctgttcatgctgctagtgtcacctatgtagccaccagaactgctgctggtggttacagtgatgacattaataagcaacatgataccaccaatgcctacggcgtagacactggtagacagcattctagtggtggctacgatggtg

SEQ ID NO: 69252 - DNA, 76 bp, Glycine max
  Clone ID: 700840801H1
gttatcctgaaccaattcactcttcccagctagttcctcattgaagaagctctggactttcttaactttatgctta

SEQ ID NO: 69253 - DNA, 215 bp, Glycine max
  Clone ID: 700840803H1
aaagatacctgtttgcgatttcattacaatctccccagtttctaatctcagctaagaaaaaccaaatgatgtctctgattccaggtttcttcggtgcccgaaggagcaacgtcttcgatccattctcactcgacatttgggatcccttcaaggattttcatgttcacactgcttctgtttctgctgaaaattctgcattcgtgagccctcgtgtg

SEQ ID NO: 69254 - DNA, 237 bp, Glycine max
  Clone ID: 700840804H1
gttgaatttctggttaagctattatgggatgaggttctggattgcactagtggaaaagggcatcaagtatgagaatagactagagaatattagtaataagagccagttactcttgttaatgaaccctgttcacaagataataccagtcctcttcgacaatagcagacactgctgtgattcactcattgctgttgagtatattgatgaggtttggaatgatcaatctcccttgttgcc

SEQ ID NO: 69255 - DNA, 79 bp, Glycine max
  Clone ID: 700840805H1
caaatagaaagaatcccaggtcgaggagaaagatggtctgggaaggagcaggttgtgtcgttgggagctaacaagttcc

SEQ ID NO: 69256 - DNA, 234 bp, Glycine max
  Clone ID: 700840806H1
tgcactgtaacaaaacatgtgtccctggagattttagctgctcttgcattcaaagaaatgaaggtgactttccatatactccaaatggtgttttagtgagtcggtaaccattggttcatgagtgtggcccattgtgcaagtgttctcctaactgcaataatcgagtattccagactggtttgaagcaccacttggaagtgttcataacaaaagatttagggtggggtcttagat

SEQ ID NO: 69257 - DNA, 234 bp, Glycine max
  Clone ID: 700840807H1
gtttctttacatgacatacactggagagaacactttcggctcccactaggttccaaatttatgatatactctgtaaatagttgctgcaagatgtaaactttctgctgtcgatagttaatgcctatcttgtttattgtttatggtttacgtatctattcagcagttattttgctgctttgtttatgtgcattatctttacattatcgatttcaatatatgaacttagattttatg

SEQ ID NO: 69258 - DNA, 103 bp, Glycine max
  Clone ID: 700840808H1
ctactgagtacacacactagtagaatggtggcttcgatcctccactactttctagccctctctctttctggctcttttcttctcttcttatccgagtcagtca

SEQ ID NO: 69259 - DNA, 237 bp, Glycine max
  Clone ID: 700840809H1
gccccggccagttcctggactcgaagatagtttaagcgataaaacagtgaatgtaggcagcagtgagtgtgcagtggaagcacctgcacatgggccatttgaagagcactactctaccatgccaatgagcccaaaatctggtgaattgagtcattcacacgggatttcaggaaatagattgaatcataggattcagcagaaaagcattgctgaaattatgggagaggacaaagatgt

SEQ ID NO: 69260 - DNA, 233 bp, Glycine max
  unsure (1)..(233): unsure at all n locations
  Clone ID: 700840810H1
ggggnaatgggtatgtgatgagagtgagattggcgtcgttcttcaccgggcctgcagcggcgtcgtctctggggctctactccctccacaaggattacaaggtctcgcaccaatcttttactcaacagatcccatcttcatgatagacattgctcgtctcccacacttggtgtaaatcttctcaaaagcaaacaaaagacagataacatatattacaaagtgttgttgaagga

SEQ ID NO: 69261 - DNA, 233 bp, Glycine max
  unsure (1)..(233): unsure at all n locations
  Clone ID: 700840811H1
cganactgataagagagataccaacaagaaaagtaaaaaagaagagttgagattccctttgaagaaaagatggcatcccataggcaaagctatgaagctggtcaaactaagggctgaactgaggtaaagacgaaccagacgatggtcaatattggtcgagaaggctcacgctgcaaaggagaagacccaggaaatggcccaagctgcaaaggagtagacccaacaaacagccc

SEQ ID NO: 69262 - DNA, 195 bp, Glycine max
  Clone ID: 700840812H1
cccttttctgtgagctatgggaccgtagctggttacctggtggcattggttgcatcattgggctctgttcttgcttgttgtagatcataatatatcaaaagataatgaagtgctagtagaagcatctgattatactaattggtcagttactttaccaatagctgttttctttttttactcagttgaaatcaaatg

SEQ ID NO: 69263 - DNA, 228 bp, Glycine max
  Clone ID: 700840815H1
actgttgccaaggatcctgttggaaatgatgtaattgcagagaattggctcaaggaacatggacctggtgaccgtctccttgcacaacgattgaagggagatcctacctatcttgttgtgcagaaagacagaacccttgcaccatatgcaactaatgccgtgtgcactcaccttggatgtgtcgtgccatggaatcaaccagagaacaacttcatctgcccttgccat

SEQ ID NO: 69264 - DNA, 71 bp, Glycine max
  unsure (1)..(71): unsure at all n locations
  Clone ID: 700840816H1
naagagtttgatcctggctcagaaggaacgctagctatatgcttaagacatgcaagtcgaacgttgttttc

SEQ ID NO: 69265 - DNA, 100 bp, Glycine max
  Clone ID: 700840820H1
acacgacattggccaaaagtgttatggtggggctcaggataccattggtcgagtggacaacattactacaccacttgcttcaaaggctcaagttgctggt

SEQ ID NO: 69266 - DNA, 237 bp, Glycine max
  unsure (1)..(237): unsure at all n locations
  Clone ID: 700840824H1
gttanatctagtctgataatcggtggcatgttttatttaggacaagatttacatgcagttgcttaggtgcttttggtgctgtgctctaattagtaatgaagtttctcctttgtaatttgcaaaataatggtttgtattaatacttatctcagcatagtctaaaactccaagtataattggtgaacaccaccaaaaacacctgaaatactgcatctagatttttttcctgatatttat

SEQ ID NO: 69267 - DNA, 251 bp, Glycine max
  unsure (1)..(251): unsure at all n locations
  Clone ID: 700840825H1
cggattcggctcgagattccttctgttgcttagactttcccatgaactccttttcattcacttttctagctttctcttccttagttttctcatatctttctcacaccttgatttttcttgtataaaactcagatccaagctatctttcttacaatttaccctagcttcactgcaaattttctcgctcttgccctnctctaaaactcatgcctctgatattgccacaaagtagtctgaggttatggttctca

SEQ ID NO: 69268 - DNA, 233 bp, Glycine max
  Clone ID: 700840826H1
agcttatcatgtcaatctcttaaatgtgatacgataactgtatttgcacactccagaggaagatcgccaattgagaaggatagctctctctcttattgaatggctgcaaaaagctcatgtgcctaccatagcacagattgaagagttccattcgatgcagaggatgatgaatgctcctgattcaaatgataatattgatctaccgttgagcattcatttgttgggtttacaag

SEQ ID NO: 69269 - DNA, 243 bp, Glycine max
  Clone ID: 700840827H1
ttcggctcgagattttttgctaccaagtaatcaccggcttaactacgtctttttcgtccccgagacgccaacctgatagcttatatttaagggatccgagtctagtttcactctaaccaactctaacccattcatacgatgctgtaatgagatgtgacttgagcggctgcggattgaattgtaattttagagtgtctgggctttcaggtagtaaagaagttgctcaaagtcaggtatctgttg

SEQ ID NO: 69270 - DNA, 234 bp, Glycine max
  Clone ID: 700840828H1
gattcattcttcaccaaatcttcgcaaagaaacactacacatccatggtaactgctggcgtgcatgaagttcgtgttcaccctctaactttcacctctgagctaccttctctctttgacggaatcaccaggttgcacatcagttatatttgtccctatgcgcagcgtgtttggatcactcggaactattagggactacaagacaagatcaaactggttcctattgacctacaaa

SEQ ID NO: 69271 - DNA, 230 bp, Glycine max
  Clone ID: 700840829H1
cttcagaagcagacacagctgcttactttggagcatcaaatagatgctgtaaaaactgggactgtagggattgccaatgattactatggcttagatgcttctgctgccaatttcggtggaaaacctgggagaaggttttctgaatttccaatgacgatatgtcactatttcaacaaaggattctgtaagcatggaactagctgcagattctctcatgggcaagttgtccc

SEQ ID NO: 69272 - DNA, 228 bp, Glycine max
  Clone ID: 700840830H1
ggctcgagcggctcgtggcacggccacctcccaaagaggcctgaggagattggtgctggtgaccaaggtcatatgttcggctatgccactgacgagacttccgagctcatgcccttgagcaatgtccttgccacgaagctccgtgccaagctcaccgaggttcggaagaacgggacatgcccttggctgagacctgatcgcaagacccacgtcactgttgagtactac

SEQ ID NO: 69273 - DNA, 138 bp, Glycine max
  Clone ID: 700840831H1
gctcgaggaggctcccctcacctctatctccgaaatctccaaattgcctgtgattgctagaaaccctaggcacgttcgatttgttgctctccgatttgcaatcaaggtcgagcgcatttggttcatgcacgcaaggct

SEQ ID NO: 69274 - DNA, 134 bp, Glycine max
  Clone ID: 700840832H1
ttcacctctctctccgtaatccccaaattgcttgtgaatgctagaaaccctaggcacgttcgatttgatgctctcccgtttgcaatcaagggcgagcgcattcggttcttgctcgcaaggctgttactaccgct

SEQ ID NO: 69275 - DNA, 238 bp, Glycine max
  unsure (1)..(238): unsure at all n locations
  Clone ID: 700840833H1
gtaccatttttgtactaanaagcatttgttacatttatgtaaccaaaggcaaatcaaaagtacgccggaggtgaagctcggtggcgaaatcancatgcaacgcagtgaaagcatgcgactaaaggacaagaaggtgaaggatttgatggttgacaagacgaggctagtggaggtgccgtacatggcgtccctgccccacacaatgactacactggtggcgaacaaggttgtggcggtg

SEQ ID NO: 69276 - DNA, 240 bp, Glycine max
  Clone ID: 700840835H1
agaaaacctaagcttagatttagaaacaaagaaatgaagaaaggaaagatttgatcgttgaaaatgcagggaggaaagaatgcgggagagtcaattaaggaaacagctacaaacattggtgcttctcccaaggctggcatggagaagaccaaggccatctgtccaagagacggcagaaagattgacagcacgtgatccggtgcaaacggagttggcaacccaaaagacataggcaaagat

SEQ ID NO: 69277 - DNA, 235 bp, Glycine max
  Clone ID: 700840836H1
caacaatagcttgctagctactcctgttgctgtgagaaccgttgatgtacatgctttgcaagcaacatttagagactccaacaataaaagccatgattaacacctaccatgcctccaaactctcatcaaaccagtgtggttctagccttgtgcaaaccatagatgcactgttacctctcgtatggtccctcataaggcgctttgtgtatccacaagtgtacaagctccttgtgaa

SEQ ID NO: 69278 - DNA, 236 bp, Glycine max
  unsure (1)..(236): unsure at all n locations
  Clone ID: 700840838H1
aaanaatcaaagaaaggggcggtggctgcttcgatagcttaataatttgtttatttccagaacattatagttttcgcagccgcaaactaacatattactcatattatataataagttggcccgttctctctcgcaagccaaacgtattggtgtccttcttgctcaatctatctccctaattaccgttcatcgtcgaggttacgcagtggcatccgatgtatcggtatgagttggat

SEQ ID NO: 69279 - DNA, 79 bp, Glycine max
  Clone ID: 700840839H1
acataacagtgtctttgattacgagagagagagatcaaaacaatcaacactatggcttctgagcatctgcctcgcagag

SEQ ID NO: 69280 - DNA, 239 bp, Glycine max
  Clone ID: 700840841H1
gcacaactgttgcatcatcatcttcattgcaaaaccctaaacttcaccttcaaccatgaccacacatgtaccaccacacagtgtccaagtccatacaacaacacatacctacgaagctggcgtcgtcacccccggagcccgtttcgaaccgccgcgttatgaagccggcggcaaagcgccctccatttaccataagcagagaggtccaacgacttcccaggtcctcgccgtcctcgccg

SEQ ID NO: 69281 - DNA, 101 bp, Glycine max
  Clone ID: 700840842H1
cgtcgatcagggtcgcaagtatgacgagtatggcttcgttgagaagcaatccgtcgaatacggcttccctgttcatgcttttagtgtcacctatgtagcca

SEQ ID NO: 69282 - DNA, 71 bp, Glycine max
  Clone ID: 700840843H1
cttcaaaacaaaacagtgcctttgattacgagacagagagaacacaacactcaacacaatggcttctgagc

SEQ ID NO: 69283 - DNA, 229 bp, Glycine max
  unsure (1)..(229): unsure at all n locations
  Clone ID: 700840844H1
gtgagcaccaaccaacantggtgtctctgactccgttatgtttctttattaccttgttgatcgctggtgcagacgcagcggcggaaccccaaacggtgcgttttgacaccggggggttgagcagagacacctttcccaaaggattcttattcgcaacggccacgtctgcgtaccaagtggagggtatggcccacaaagacggtcgcggcctaagcatttggcacgtctt

SEQ ID NO: 69284 - DNA, 231 bp, Glycine max
  Clone ID: 700840845H1
cccaagattacaggcatctggatggttttggacttaacacatacacattgatcaacaaggctgcgaaagcagtgtatctgaaatttcactggaagaccactcgtggtataaactgtctattgcaggaagaggtcattaaggtcggaggagccatccacagccatgccactcaagaccttcatgattcaattgctgctggcaactatcctgggtggaaactgttcgttcaga

SEQ ID NO: 69285 - DNA, 233 bp, Glycine max
  unsure (1)..(233): unsure at all n locations
  Clone ID: 700840848H1
aaaccagcccttatcacaattctatctaacaaattacataggacaggcccaaaaccaaaaaaagcttctttgtctctcgtgccgattctccaccactattcccttcaccccaatcacactttccgttagttgttgttattagtgtngaagatgagtccgctggatgcaacaagggctgtacttggtcttcttgttttatatttcggcaaggctgcagcaagggacaaaatatg

SEQ ID NO: 69286 - DNA, 237 bp, Glycine max
  Clone ID: 700840849H1
ttctaatgagatgctcattagatatagctatgaaaaattattgagccaggctaaagctccaagtatgtttttacaatccttcaaaaattttgtttctttgtgtgtgtatggtgatgataacttaattagtgttcatgaatatgtcaagccttactttcagtggttctaagttgaaaagctttctagctggtcataatatcaccattactgatggtattgacaaaactagtgcaattt

SEQ ID NO: 69287 - DNA, 237 bp, Glycine max
  unsure (1)..(237): unsure at all n locations
  Clone ID: 700840850H1
ggaatttatgacatcttntaagattgtaagatnttgtggttgtggtggtggaggatgggttgtgaagggtatgtttagcttgtaatttcaggtaggaatggacaaaataagctatattaaaaaaacaagacaaataagggaggatgatggggggtcgatttgtaaaagccggaagtgtatggggttctttatgtgggctaaaaaggattctgcttgtaggtctgtctacccttttgt

SEQ ID NO: 69288 - DNA, 235 bp, Glycine max
  Clone ID: 700840853H1
gtctgcacaaaagcaatgactatgtcatttaatccaaacccgtgttctgatgcatggagtttggtatttctgaagcgtaccggatttcattctgatatcatttctgtcactggatggactgccactccaatgcaggatgttcaggttacaattgactggtttattttctctcaggaatgtgttcccaggacttattgtgtttcaaatccacaaaatccttttgtcttgaataggt

SEQ ID NO: 69289 - DNA, 75 bp, Glycine max
  unsure (1)..(75): unsure at all n locations
  Clone ID: 700840854H1
ctngcagtaaatccattgtaattcttagtagtttgtgtagagataagaacaacatggttttccttgttagtgcta

SEQ ID NO: 69290 - DNA, 234 bp, Glycine max
  unsure (1)..(234): unsure at all n locations
  Clone ID: 700840855H1
ganataccaacaagaaaaaaaaaaaagaagagttgagattccctttgaagaaaagatggcatcccataggcaaagctatgaagctggtcaaactaagggccgaactgaggaaaagacgaaccagacgatgggcaatattggagagcaggatcaagccgcaaaggagatgacccaggaactggcccaagctgcaaaggagaagacccaacaaacatcccaagctgccaaggacaa

SEQ ID NO: 69291 - DNA, 235 bp, Glycine max
  Clone ID: 700840857H1
attaagagagagaagaagtaaagaagaacaaagacgcaatcctcaaaggtgaagatgaaaaacatggcaagtgctgccaatgaacaagtcgatatctataaagctaaaatagacgagaaggcagagcaagcaacggcaagaacagatgaggagagggcgatagcccatgagcacgcaaagtcaaaggaagcttgagcaaagatggagctgcatgatgctaaagcaagtcatgcag

SEQ ID NO: 69292 - DNA, 231 bp, Glycine max
  Clone ID: 700840859H1
tctcatcagagataacttgacaaataaaatcaccatgtctatcatcccaaacttgttcggtggtagacgaagcaacgtcttcgacccattctctctggacgtatgggaccctctcgaggggtctcctttttcaacaggtcacttgccttcctccggtggggaaagcagtgccatatccaacactcgcgtggactggaagcagactccggcggctcacgtgttcaacgttga

SEQ ID NO: 69293 - DNA, 83 bp, Glycine max
  Clone ID: 700840861H1
tcggctcgagactcagaagcagacacagctgcttactttggagcttcaaatagatgccgtaaaaactgggactgcagggatag

SEQ ID NO: 69294 - DNA, 132 bp, Glycine max
  Clone ID: 700840863H1
ctccagccgctcgagccgttcagatcctacggctccaaagcatgccattcaggcttttcatctgctgtaaactagtcgtgaggcccaggcttttgtggcttcacttgcttgtgccccaaatgtatggaatgc

SEQ ID NO: 69295 - DNA, 218 bp, Glycine max
  Clone ID: 700840864H1
accagcgggctggacaacagcggggtcagatatcacggcggccaaacattccgccaccacggctgggcacatgggacatggccaccacaccaccggaaccgggactggaaccgccacgtattccaccaccggggaatatgcgtcagcccatgtgggcccaccacacgtcggcaatgcctggccatggaaccgggcagcccacgggccatgtcaccgaa

SEQ ID NO: 69296 - DNA, 235 bp, Glycine max
  Clone ID: 700840868H1
tctaaagctaacttcaacacctttaattttctcaaagtaattcagcggctgaataccaagcggtgaagatgagtcaggcgcagccacggcgtcccaaaggccacaaccccatcacatacggcgacgtttttgtcgtctccggcgaccttgcacagacgcccgtcgcaccggaagatgctgccatgatgcaacgcgcggaaacttcagtgctcggacaaacccaacccggcggagc

SEQ ID NO: 69297 - DNA, 247 bp, Glycine max
  Clone ID: 700840869H1
ttcggctcgagctacaaaatccttttgtcttgaataggtggatcgggaaactgacttttccccagggcacttcctgaagtgttaagagattgcctctttctatagggggaggagctggtgcaaagaatgctattctcatgaatatgccaaatgctgttctttcaatgtggagatatttgtttggagatctcgtctttgaagtttctaagatgacttctccctacattaaatgtacattctctttctt

SEQ ID NO: 69298 - DNA, 69 bp, Glycine max
  Clone ID: 700840871H1
gggaagcatctcagttggctctttctctctttgtcgctctttgggagtaaacccactcttcttttctct

SEQ ID NO: 69299 - DNA, 231 bp, Glycine max
  Clone ID: 700840874H1
gcggttgagggagtgcggaaatggtgcacagctcgtacgattgtctgtaactggtgcgcgagtccccagccaagatcgaatccatcgaatcctacgattcgatgcttctcgtgtgctgctccgttggatcgcttcgaatattcgccccggaaaccgaatcttccttctccaacgggtccaagtcctacgcgttggagaagatactcgccgggttcgcgaagagatccgtgc

SEQ ID NO: 69300 - DNA, 230 bp, Glycine max
  Clone ID: 700840875H1
agtgggggtggctgctttgttgtggaaaccaaagtgaaaaaacttgcatgcttgatccctctaaataaaggctattcttaatgctaccttcactttttggtcctagagaatgctactatcctgtatgagatgtcattctaaatttgattagcacgaggattggctcttctttttgttgaaggaatccatgttaggattgtaataatagtattttctattccatcctctta

SEQ ID NO: 69301 - DNA, 231 bp, Glycine max
  Clone ID: 700840877H1
aaagtttccttgacattttaattctgcaaatatggcaagcaataagtagtctaagttcccagcacagagccagaaatctcagccaggacaagaacatgtattgaatccactcccacaagccacaaatcctgatcacaaggccgccaataaactccagggaaagggggcgttggtgacaggaggtgaatcaggaattggcagagcggtttgcctgtgtttcacaaaagaggg

SEQ ID NO: 69302 - DNA, 54 bp, Glycine max
  Clone ID: 700840881H1
gcaactgatcctgcaaagaagaactcagattatgctgcgctcaagactaaggac

SEQ ID NO: 69303 - DNA, 102 bp, Glycine max
  Clone ID: 700840882H1
atgaatttcattcacacggatgaggaggttaattacttcccttcaaggtatgatcctgttcgtcatgcagaaacgttccccatacctcctgctatctgcagt

SEQ ID NO: 69304 - DNA, 84 bp, Glycine max
  Clone ID: 700840883H1
catttcgttactttcacttgttgtgcaatcttacaagttccaaacttctctattttgttattatttgttctcacttccacacaa

SEQ ID NO: 69305 - DNA, 237 bp, Glycine max
  unsure (1)..(237): unsure at all n locations
  Clone ID: 700840884H1
naacagggttttgttttgtggagaggggaggcggcaccagcaagagggagtgattttggaactatcaaaggaacagattcgggaactgagcaagcgtgccaaatctagttcaaggagtactaattccttcgattatgaaccattctacttgagagcgctcccaaatcgcttccaacaactttggaaagttctatgagatcacccctgagaagaatccccagcttcgggactttgata

SEQ ID NO: 69306 - DNA, 234 bp, Glycine max
  Clone ID: 700840887H1
tgagaaaacaagaagtcgtgagaagaagggatagaatggaggaaaaggcaaaagctgagcagaagaagataggtatgtccgagacttggttgaagaagcaccctcttctttacaatggagccactagacaccctcttattattagcattcgcgatggcaccatcaacagtgcttccttcaaaacatggctcgcacaggatttcttgttcgtttgggcgtttgtcccatttgtgg

SEQ ID NO: 69307 - DNA, 231 bp, Glycine max
  unsure (1)..(231): unsure at all n locations
  Clone ID: 700840889H1
tagaggtcaagatattnaaagcacttactggtcatgagaatgtggttcagttctataatgcttctgaagatggttcttatgtgtacatagttatggagttgtgcgagggtggtgaactgctagatcggatattcgccaagaaggacagtcgttactactgaaagagccgcagcggtggttgtaaggcagatgctcaaggttgcagctgagtgtcatttacatgttttggta

SEQ ID NO: 69308 - DNA, 192 bp, Glycine max
  Clone ID: 700840891H1
gcaaaaagaaagaatcccaggcgaggagaatgatggaggggaaggtgcaggatgtgtcgtttggagcgaacaagttccccgagagacagccgattgggatggcggcgcagtgccaagacgacggcaaggactaccaggagtcggcgccggcgccgctggttgacccgacggagtctacgtcatggtcgtttt

SEQ ID NO: 69309 - DNA, 194 bp, Glycine max
  Clone ID: 700840892H1
ttctacacaaaagtgttccacttgagtgaaaagtagtgtgttaagacctaaacaatttttcaatggcgtccaagaaccaagaggagcgagctgaggcagctgcgaaagttgctgccaaagaactcgaacaagccaacagagacagaagagaccctgatttcggtcttgttgctgaacaacaacaacaacatcat

SEQ ID NO: 69310 - DNA, 232 bp, Glycine max
  Clone ID: 700840894H1
gagactgggcccaaggttgaggctgtgtggattgattttagccaaagatggttcactctgatccactccacaaggcacttcaattttagagattaccaagacattgcagatcacgctgctgctgcgttagagggggtgagagacataacccagccttctcaccttataggagatatgactggctcaatcattgatgacctcttatcagagacatacaagaacatgggttgct

SEQ ID NO: 69311 - DNA, 107 bp, Glycine max
  Clone ID: 700840895H1
ctcgagacgttgaatcaaacagtgaaagtaaaacattgcgcaattaatcatcatttgcaagtagccagtgcataagatcaatgtcgtcaagacagccattcaaggaa

SEQ ID NO: 69312 - DNA, 236 bp, Glycine max
  unsure (1)..(236): unsure at all n locations
  Clone ID: 700840896H1
acaagtacttccttacaatcaaaaccaacaacatctatggcaagttatccaaagcactacgatgatcagggtcgcaaggctgacgagtatggcaacgttgagaagcaaaccgacgaatacggcaaccctgttcatgctgctagtgtcacctatgtanccaccagaactgctgctggtggttacagtgatgacattaataagcaacatgataccaccaatgcctacggcgtagacac

SEQ ID NO: 69313 - DNA, 245 bp, Glycine max
  Clone ID: 700840902H1
cacaactactacaagtacttccttacaatcaaaaccctcaacaactatggcaagttatcaaaagcactacgatgatcagggtcgcaaggttgacgagtatggcaacgttgagaagcaaaccgacgaatacggcaaccctgttcatgctgctagtgtcacctatgtagccaccagaactgctgctggtggctacagtgatgacattaataagcaacatgataccaccaatgcctacggcgtagaca

SEQ ID NO: 69314 - DNA, 239 bp, Glycine max
  Clone ID: 700840904H1
ttcctctgtcacgaggaacagcgcagaacctaaccctcacgaaaacccctttcgattccgataactctcgttgtgcctcaaccctaaccttaaccgggttttctcgttggttgggattgaattggcatcggagggtggcgatcgattggaaaattggtagtagtagtttagcgttgaagaacgatgtctgctgctgtgtgcggaagcaagagatctttcttcgaagagcttcctccttc

SEQ ID NO: 69315 - DNA, 239 bp, Glycine max
  Clone ID: 700840907H1
accaaaacattaaagctaacttcaacacctttaattttctaaaagtaattcagcggctgaataccaagcggagaagatgagtcaggagcagccacggcgtcccaaaggccaaaaccccatcaaatacggcgacgtttttgtcgtctccggcgaccttgcacagaagcccgtcgcactggaagatgctgtcatgatgcaaagcgcggaaactcgagtgctcggacaaacccaacccggcg

SEQ ID NO: 69316 - DNA, 240 bp, Glycine max
  Clone ID: 700840909H1
tagctagctagcaagcaagcacagagatggaggcaaagcgaggccatgccctcatgtgcttggcacgtgtttcactcttcctctgcgctctaaccctatccgctgctcacggaagcaccacggttcaagacatcgcgagaaagttgaaactcggggacaacgagcttctgcgcacggagaagaagttcaaggttttcatggagaattacgggaggagctactccacagaggaggagtatt

SEQ ID NO: 69317 - DNA, 235 bp, Glycine max
  Clone ID: 700840912H1
aaagaatcctcctttctgaagcgttgcagggagagcggtaactcggagattttgtaccgtgaaggaatgcttcaatatttcacttcttcaagggtagaattgggtctcaagaatttgaaagaggcggcgctggagggtcacgatgatgccaaatatgtttattgcatgcttttgatgtgtggtgaagatgaaggacaaagaaagcaaggttttgatctctactgttccttgaaag

SEQ ID NO: 69318 - DNA, 235 bp, Glycine max
  Clone ID: 700840913H1
ggcacatgggacaacccatggggacccatcagacgtcagctatgcccggtcatggaaccggacagcccacgggccatgtcaccgagggagtggtgggctcacaccctattggaaccaacagatgcccgggtgggactgctacggcccataatacccgtgcggggggaaacccaaatgattatgggtatggaactgggggtacttacaattaaataatgatgatttagaaaaggaa

SEQ ID NO: 69319 - DNA, 236 bp, Glycine max
  Clone ID: 700840914H1
ctttcattttcacactcaaccctttcttcatccttttatctcgtctctgccaaaacgatgccgtttgctctggagaataacggaggagttacgatcggacggtcctccttcgcttactgcgtcgcgatctgcgatcgtgattttccggaggatgattccgactccagctccgactcctccatcggaaggaacagcatctcgtcggaagattcctccgaccgggaagacgccgtcga

SEQ ID NO: 69320 - DNA, 165 bp, Glycine max
  Clone ID: 700840915H1
gaaattctgagttctaacgccactaatcctatgctgacgcgacttcttgaaaactgtaagagtctcaaatatctggttgatgagtgtccttttgcatttgtgaactagtatgtaatattttattcacttaaataaagcgcattactatgtgcaatgagtgtgttt

SEQ ID NO: 69321 - DNA, 237 bp, Glycine max
  Clone ID: 700840916H1
atactgtcacaagtgtatatagatggccaaaaattggaggccatcgattaataggcatgagctctcaagctcaacggctgcctagaaagtgtgaagttacagctattcttgttctgtatggtcttccaaggttactcacaggtgctatacttgcacatgagttgatgcatgcttggttacgcctcaaaggttaccaaaaccttagtcctgaagtagaggaaggtatttgtcaggttc

SEQ ID NO: 69322 - DNA, 215 bp, Glycine max
  Clone ID: 700840918H1
tacacaactactacaagtacttccttacaatcaaaaccatcaacaactatggcaagttatcaaaagcactacgatgatcagggtcgcaaggttgacgagtatggcaacgttgagaagcaaaccgacgaatacggcaaccctgttcatgctgctagtgtcacctatgtagccaccagaactgctgctggtggttacagtgatgacattaataagca

SEQ ID NO: 69323 - DNA, 238 bp, Glycine max
  Clone ID: 700840919H1
gtccaagaactcgccgaagaaaaatacaataatgatcgacggaggaagcacgtcggtcgccgtcgtgtactccgacatcagccgcgagatcaacgtcggcaccgttgcggtggaccccacgctcaatttcaagagcctcctcacgctagtcagccagcggatcgggatctcgccgcaccagttctccgtctacctcgccgccgtcggtaccgaccgcaagattccggtcacggcgaac

SEQ ID NO: 69324 - DNA, 144 bp, Glycine max
  Clone ID: 700840922H1
cggcctctttctatcagggggaggagctggtgcaaagaatgctattctcatgaatatgccaaatgctgttctttcaatgcggagctatcctgttggagatctcgtctttgcaagtttctacgatgacttctccctacattaaat

SEQ ID NO: 69325 - DNA, 237 bp, Glycine max
  Clone ID: 700840923H1
tgatcttttagaatttcttcagcaggttgctgtcactgatggatcatcaacaatgccaccatctgtcttacgagtgctaaatttgaaagcatgcagaggtgcaattatgtttggggactcattgctaccatcagaatgctcctttatagttgaagagctaaaacatacatcgctttgtttccaatgtgctcatgggcgaccagcaactgttcctctagtcaacttggaggcactgca

SEQ ID NO: 69326 - DNA, 239 bp, Glycine max
  Clone ID: 700840924H1
cggaaattcacaaacccggccctagtctaaaatctcataatatgacagacggtggaacaaatgttgaggtttcagaagatggatctaaaagagaagatacaacctcagagcgtggtggtggaggaggccttattaacaacttggtttccactttgatagcacccttgagtccaagcattgggaaagccactgagcatgaaagtggtgctgatgatgatggagacaaagaaggggttgat

SEQ ID NO: 69327 - DNA, 79 bp, Glycine max
  Clone ID: 700840927H1
ctcagttcacctgcaagcaaaacgccatgtcgcttattatagcagtccacgtccactcctcacatgtcgtttccacaca

SEQ ID NO: 69328 - DNA, 241 bp, Glycine max
  Clone ID: 700840933H1
taagtacttccttacaatcaaaaccaacaacaactatggcaagttatcaaaagcactacgatgatcagggtcgcaaggttgacgagtatggcaacgttgagaagcaaaccgacgaatacggcaaccctgttcatgctgctagtgtcacctatgtagccaccagaactgctgctggtggttacagtgatgacattaataagcaacatgataccaccaatgcctacggcgtagacactggtag

SEQ ID NO: 69329 - DNA, 237 bp, Glycine max
  Clone ID: 700840935H1
caaaaagctcaaggtgagtgaaaagaagatgtcaggtgtgtctctagcagtgtctcatccaccggcatcagtgggagaacaaaacgtgcctcaagcaggcacaaagcctaaaccgcgaacagaacaggcaccaattggtggcatgatgggttcacttcgcgtgatagagcttcagcttggcgctttcatcttggtgttctcagcaagtggccttgtcccactccttgacctagtgtt

SEQ ID NO: 69330 - DNA, 238 bp, Glycine max
  Clone ID: 700840936H1
ctcgtttgttccacacgagatttctgttctcgttgagctcatcttaggacacctgcgttatcttttaacagatgtgccgccccagccaaactccccacctgacaatgtcttccgcccggatcgaccggccgaagccgaccttgggtccaaaaagaggggcagtgccccgcttccgattcacggaataagtaaaataacgttaaaagtagtggtatttcactttcgctgtttccagctc

SEQ ID NO: 69331 - DNA, 236 bp, Glycine max
  Clone ID: 700840940H1
gtctttgaacactcatcaccatggccaagcttgttctttccctttgtttccttcttttcagcggctgcttcgctctgagagagcaggcagagcaaaatgagtgccagatccaaaagctgaatgccctcaaaccggataaccgtatagagtcggaaggtgggttcattgagacctggaaccctaacaacaagccattccagtgtgccggtgttgccctctctcgctgcacccttaac

SEQ ID NO: 69332 - DNA, 236 bp, Glycine max
  Clone ID: 700840941H1
attttgtacagatttgccattgggtatttaatgaattgttaatattatttttccctttaattatcaaatgtataattttttcttttaaattccaatgtttcaatatttataaacagacaagcttttctggtgttgaggtcatgcctcttcttccagatgaatctatgaatgttgaaattccttaggaggacctggaaattagtttttcaagagcaggtggaaagggaggtcagaat

SEQ ID NO: 69333 - DNA, 233 bp, Glycine max
  Clone ID: 700840943H1
atcacgaagctcaaacctcttgaggcacttgcaaaagggattcttgccagcaatatgctcattacctattccgggttatatgtttggcaaagctattgtctgttctgatgctgcagcagaggctgcaagatatggttttactgctgtggacaggccagaaggattcttggttttggccattgcttctctaggaaatgagattaccgagttgaaaaccccacctgaggtatcca

SEQ ID NO: 69334 - DNA, 236 bp, Glycine max
  Clone ID: 700840944H1
ctctcgagccgattcggctcgaggaaggccgaagagggagggcggcttggtttggtgcaaatagtttccttagaagacagcggttgttgggattttctcgattactctttcatcgatcaagcgccccctgatttcctttggtccaataacaataatagtgtgagcaccgaaattgacattccaggtgatgctgttgcttgtcaagagaacaccaagaagaggggacgcaccgattc

SEQ ID NO: 69335 - DNA, 237 bp, Glycine max; identical to SEQ ID NO: 67739
  Clone ID: 700840945H1

SEQ ID NO: 69336 - DNA, 234 bp, Glycine max
  Clone ID: 700840947H1
tgataatcagttattgccgttgttgttttgtttccggttcggtttatttcaatggatcgggcggcgttgacggttggaccgggcatggacatgccgatcatgcacgacagcgaccgttacgatctggtacgcgacatcgggtccggaaatttcggcgtggcgaggctgatgcaggataaacaaaccaaggaactggtcgccgtcaagtacatcgaaaggggtgataagattgat

SEQ ID NO: 69337 - DNA, 256 bp, Glycine max
  Clone ID: 700840222H1
ctcgagcgaaccaaacgaaggcagaaacaggcaaagagctcatagaaattctcgtcctcgtcctacataagtcttctcttatcataaacgcgtgttgctcggataaggttgtgctgcggtgattcactcgtactttgcttaatatggcggttgagaagttgagcattgcaaaagatgtgactgaattaattggcaaaactccattggtatatctcaaccgcatcgtggatggctgtgttgccaaagttgctgcgaa

SEQ ID NO: 69338 - DNA, 260 bp, Glycine max
  unsure (1)..(260): unsure at all n locations
  Clone ID: 700840223H1
gtgttcttcatagttcagtgtgtcgtttaaaaatgtcgcagttgctggataaagccaagaacttcgtgtcggagaaggtaaatgatatggccaagccggagggangtgtcactgacgtggacttcaagcgcgtgagaaagataatgtcgagtacttggccaaggtctctgttcgtaacccttattcaacttccatacccatttgtgagatcaactactctttcaaaagcgcatccagggagatagcatcagggaaaattc

SEQ ID NO: 69339 - DNA, 259 bp, Glycine max
  Clone ID: 700840224H1
aagagtgcgggtggcacaacggcgagttacgtcggagagaaagcggtgcaggccaaggatgtcgccgtggagagtgggaagagtgcggctgggtatgctgccaaggtggctgctgatttgagggacaaggccaccgcggtggggtgggccgcggcccatttttcggcggaaaagacggtggaagggaccaaggccgccgcccatgttgtcgagggagcggccgggtatgccggacataaggccgcggacttgcttcgat

SEQ ID NO: 69340 - DNA, 260 bp, Glycine max
  Clone ID: 700840225H1
ggctcgagggaggccttctaaagccttgtagaggaattttgctgtttggacctcctggaactgggaagacaatgctggcaaaggccattgcaaaggaggccggagcaagtttcatcaatgtgtccatgtctaccatcacttctaagtggtttggtgacgatgagaagaatgttcgcgctttattcacacttgcagccaaggtctccccaactataatattcgtggatgaggttgatagcatgcttgggcaacggaccaga

SEQ ID NO: 69341 - DNA, 258 bp, Glycine max
  Clone ID: 700840226H1
ggctttaaaaccggacccccctgaaattgctcaggaaaatcagtattcatttacatcgcagtctcatggatttaattatgaaaatgcccaacaaccggaggtcacatttcctctttcacagaccagctcacagatgcagcatcttgctcccttctctggtgtaatggtaattcatgttttatggcttggtcatattttagatctttagtgaataagtttagaatgacttactgcctgtttttattagatatttcatgg

SEQ ID NO: 69342 - DNA, 258 bp, Glycine max
  Clone ID: 700840227H1
gtactctctgcaatgcagaaattgaaactggttctttgatccctaatcatgctcttagagctgcagcagccgctgtcaagcatgaggacgatcggaggttatttcgtaatgccgctctccgaaagcggcggaaagaaatgggtgaccaaatggattcaatgagaagagtgaatagggaaaatggagattttaatgctaccgatggacttcagcggggcgtacaatatccattttcggtaaatgagaaagttgttatta

SEQ ID NO: 69343 - DNA, 259 bp, Glycine max
  Clone ID: 700840228H1
caatcgcctctaccgggacgatgtcgggctgttgctctattcaaatcatattttggtggtgcctttgacgaggatgcaattcgcaataattttgtactcatttatgaactcctagatgaaatcatggactttggttatcctcaaaatctttcaccggaaatcttaaagctttatatcactcaggaaggagtgcgttccccattttcatccaagccctcagatagacctgttccaaatgcgactttacaagttaccggtg

SEQ ID NO: 69344 - DNA, 259 bp, Glycine max
  Clone ID: 700840229H1
cacaactacaagaaagaacttccttataaccaaaaccaacaacaactatggcaagttatcagaagcactacgatgatcagggtcgcaaggtcgacgagtatggcaatgttgagaggcaaactgacgaatatggcaacccggttcatgccactagtgtcacttatgtagccaccaaaagtgttggtggctacaatgatgacgctaataagcaacatgatattactggtgtctatcccgagaagacaccggtagacatcat

SEQ ID NO: 69345 - DNA, 262 bp, Glycine max
  Clone ID: 700840230H1
gccaagccaacacaaagggcacagaagagggtttcttttcgtttcgtttcaatggggagcgaagaggagaacggcgaattctacctgcgatactacgtcgggcacaagggcaagttcggtcacgagttcttggagttcgagttccgccccgacgggaagctccgctacgccaacaactccaactacaaaaacgacaccatcatccgcaaggaggtttacctcacccccgccgttctccgcgagtgccgtcgcatcatctccg

SEQ ID NO: 69346 - DNA, 261 bp, Glycine max
  Clone ID: 700840234H1
ggctcgagtaaagtggtagttgggaacagtcttgaggacattgttttcaaatctgggaagaatggtatgtactttacttctttttttatttggttttattccatggatatcagatagattttggcattcactgtgctctaacaaaaaatatcacattattggttgcaaactatatgaaggaacaaacgtgtttttaatgaaaagttatgtgatatccttctgatactctgttatgtatctgtgattatatccttcagacat

SEQ ID NO: 69347 - DNA, 260 bp, Glycine max
  Clone ID: 700840235H1
caaagaatcaaagaaaggggtggtggctgcttcgaaagcttaataatttgtttatttccagaacatcatagttttcgcagcagcaaactaacaaattactcatatcatataataagatggcccgttctctctcgcaagccaaacgtattggtgtccttgttgctcaatctatctccctaattcccgttcatcggcgaggttacgcagtggcatccgatgtatcggtaagagttggattgggtaatattgggcgaaggaat

SEQ ID NO: 69348 - DNA, 258 bp, Glycine max
  Clone ID: 700840236H1
cttaaatctgcttgtgaagggaagtatgatgccataattgttgattcctcagatcccgtgggtcctgcccaggaacttgttgagaaacctttttttgatacaatagctagggcactaaggcctggcggagttctttgtaatatggcagaaagtatgtggcttcatacacaccttattcaagatatgatctctatttgccgagaaacattcaaaggttctgtatgttatgcttgggccagtgtaccaacatatcctagt

SEQ ID NO: 69349 - DNA, 258 bp, Glycine max
  Clone ID: 700840237H1
gctttggtgttttacgcagggaaagctcctaaaggggacaaaagcaattggatcatgcacgagtatcgtctcgcagacgtagatcgctccgttcgcaaaaagaacaccctaaggttggatgattgggtgctttgccgtatttacaacaagaagggcacgatcgagaaactgcaaccaagcagcgatgttgctcatagccgaaatatcgaatcctcggagatcgaagacaggaagccggagattctgaaaagcggagga

SEQ ID NO: 69350 - DNA, 259 bp, Glycine max
  Clone ID: 700840238H1
ctcagacgattcggctcagtggaggacgagacccagaatcggtcctctcagcattcaactggaatgtgctgcaagctgcgctccaagtatatagacccttaatttcttgctatcatgcatcattaacattaaatgctactaattaatttggctttgtcaatttgatttcttgttattttgggaaattaattacagaccccaaaaggaaagttagaaaggctttttaatcaacagaacgagggaagtattttcaaaataa

SEQ ID NO: 69351 - DNA, 260 bp, Glycine max
  Clone ID: 700840239H1
ctcctggaatagatcaggcagaatcttattcagatgtggccaagaaggatggaagcatttctaaaaatctgataccctctttgaaagaaaaagttcctgtcataaagcggaatcattctatcagtactgttaagactgcaaccacagctggagcaaaaggtgatggcttggattcagtatctaatgcacagaacaagttgcagacttctgtgcggagtactgctaagattgaactcccagttgttgaacctccatctgat

SEQ ID NO: 69352 - DNA, 258 bp, Glycine max
  Clone ID: 700840240H1
ctggcttacctgagaggccatctgagcccccttgcgcgttctacatgaaaactggaaaatgtagatatggcactgcttgtaaattgccatcaccccaaggatatccagattcagttgtctgacgacttgagtcaaaatgttgcacagacacaaacaaattctatgatgggtggagctacaggagatacacagccaattaaatctcttatatctccgtcgttgcaaaatagcaaagggcttccagtaagactgggggaa

SEQ ID NO: 69353 - DNA, 258 bp, Glycine max
  Clone ID: 700840242H1
ttcaaaaccagacacacacacaaacaaacgctgaatctctcgtcgttctttttatttgcggtttcttcttcttctcacgttctacctaacattttctaaaacatgtctggggaagaggaagaaaacgccgcagagctcaaaattggagacgagtttttgaaggcaaagtgcttaatactctgtgaagtttcattgattcttgagcacaagtatgagcagcttcaacagacatccgatgatcccatgaatcaagtttct

SEQ ID NO: 69354 - DNA, 253 bp, Glycine max
  Clone ID: 700840243H1
tggcaacccggttcatgccactagtgtcacttatgtagccaccaaaagtgttggtggctacaatgatgacgctaataagcaacatgatattactggtgtctatcccgagaaagacaccggtagacatcattttggtcgtggttacgacagtgacactaacaagcaacatgatgctactggtgtttatcccggaatagacattggtagagatcatgggactaccggtgtttatggcctaaacaccgacagacat

SEQ ID NO: 69355 - DNA, 256 bp, Glycine max
  Clone ID: 700840244H1
ggaaaagctcaaaagaaatctgaaagggagaatgaattgaaacaacgatttgagcagagcatgaaagaagctgctgataaatatcaaggggcaaacttgtatgtcaaaaatttagatgatagcctcggtgatgataaacttaaggagctgttctccccttttggtaccataacttcttgcaaggttatgagagacccaaatggcataagtcgtggatcaggatttgttgcattctcaactcctgatgaggcatcta

SEQ ID NO: 69356 - DNA, 257 bp, Glycine max
  Clone ID: 700840246H1
cggctcgaggctgggagttctcgaacgagtatttccgaagagacgagaagcggctcctctgcgaaatacagcgacggaagatcctcccggcaacgccgccgacccgagcgactgcgaccgcggcggttctatctccgctgccgctatctacgattccgccggcgaactgatcgtgtcgccgtcgaactcagcggaggagcaggtgatttcgtctaactcgtcgccggcggactgttggatgagaacgaccggctgag

SEQ ID NO: 69357 - DNA, 262 bp, Glycine max
  Clone ID: 700840247H1
gggacagggaggaactgtctcccggggctgagatgagagatgatgagtttctgtttgatatagattattatgatgaagttggatcagattttacgccaaagatggcaatagatgaccccttaaccagagcaacttttcagcctgctcttgggaatgggcatgctcgtaacgcgctttccaaattggatgaatgcattgaggaggaagaggaggaagctgagggagaatctccaaagggatttgttacttcttccactgaaga

SEQ ID NO: 69358 - DNA, 69 bp, Glycine max
  Clone ID: 700840248H1
ggctcgagaccaaacacaatgatgatctaagcttctctaacacattccagttgcacctactctatctct

SEQ ID NO: 69359 - DNA, 261 bp, Glycine max
  Clone ID: 700840250H1
attttcaaattctacatcatgggcacggaggttctacggccacaagattgtttcacccaacgcatcggtgttccaccgcctggcttttcccggcgaagaacctatggtacccaccacaacaacaaaaacaataacgttaacaattatttcaggggtaaccggaagccgacaacccgacccgaacaaagaaaacgggttgtggacaaaaggcccagtttagatgattcgaggttttcgagtttggagatggagaaggtcacg

SEQ ID NO: 69360 - DNA, 257 bp, Glycine max
  Clone ID: 700840251H1
aggtgaatcatttccctggataaactgaaaagaaggtcaagcattaagactttcttgtgcttgtacttggatgtgacaagcaagtttttcttcatcatctgcttctaccaaattctcttcaattatactctgaattgttgttggtgaaagaaagctgagagatcttcagagttgttgatctaattttccttcaggagaaaatgggactgcagctgattttcttgctaattgagctgcatttagttttctgcactcag

SEQ ID NO: 69361 - DNA, 264 bp, Glycine max
  Clone ID: 700840254H1
ggctcgagaccgaattcgcgctcgagcgagctcgagcaccaaacatgcagtacaaagcttggcgtcacgatcctgagacaggtcctactgtttactgtagtagaactgtcttcgatgatgcaactccagagttggtgagggatttcttctgggatgatgactttcgtcctaaatgggatgctatgcttgcatactgcaaagtattggaggaatgccctcgtaatgggacaatgatttctcactggattaaaaagttcccctttt

SEQ ID NO: 69362 - DNA, 258 bp, Glycine max
  Clone ID: 700840255H1
aacgatttgagcagagcatgaaagaagctgctgataaatatcaaggggcaaacttgtatgtcaaaaatttagatgatagcctcggtgatgataaacttaaggagctgttctccccttttggtaccataacttcttgcaaggttatgagagacccaaatggcataagtcgtggatcaggatttgttgcattctcaactcctgatgaggcatctagagcactcttggagatgaatggcaaaatggtggtaagcaaacctc

SEQ ID NO: 69363 - DNA, 256 bp, Glycine max
  Clone ID: 700840257H1
tgtaacttcaaaacatacacctcttctctctgtttctcttcactctctctctccctccctcttcaactaacatggcaattgaaaaccaagacaccgctgtcagagaaatcaagcccaagaacaggagaatcatgggtgctggagggcctgatgatgaggacaataggtggccaccgtggttgaagccactgctgaaagagagcttctttgttcaatgcaagttgcatgctgattctcacaagagcgaatgcaacat

SEQ ID NO: 69364 - DNA, 253 bp, Glycine max
  Clone ID: 700840258H1
acaaaattgaactgtaattgtagtagtagacagtagcaccatgagccaggaacagctcaagaaacctcaaggggagcaggaccccatcaaatacggcgacgttttcaaagtctccgacgaactcgctttcaaacccatcgcgccaagagacgcagctctcatgcaagccacggagaaccaagcattgggccaaactcaaaaaggaggtcccgcctcggtgatgcaatccgccgcaaccgaaaacctccgcgcc

SEQ ID NO: 69365 - DNA, 252 bp, Glycine max
  Clone ID: 700840259H1
ggcaaccctgttcatgctgctagtgtcacctatgtagccaccagaactgctgctggtggttacagtgatgacattaataagcaacatgataccaccaatgcctacggcgtagacactggtagacagcattctagtggtggctacgatggtgacactaataaacatcatggaactactggtggctataatgatgacaccaatagacatcatggaactaccggtgtctatggtatagacaccgataggcaacaa

SEQ ID NO: 69366 - DNA, 238 bp, Glycine max
  Clone ID: 700840260H1
gagaaactttaagcagatgtctaatgttttgtgggtggctcctgaggacaaggcgagtttatggtcacaacttcattatgtttcgtgtaataatctggaaatgcaagaagcttatcttgtcaatctcgtaaatgtgttacgagaactgtatttgcacagtccagaggaagctcgccaactgagaaggaaagctctctctcgtattgaatggctgcaaaaagctgatgtgcctaccata

SEQ ID NO: 69367 - DNA, 260 bp, Glycine max
  Clone ID: 700840262H1
gagaaaacaagaagtagtgagaagaagggagagaatggaggaaaaggcaaaagctgagcagaagaagataggtatgaccgagacttggttgaagaagcaccgtcttctttacaatggagccactagacaccctcttattattagcattcgcgatggcaccatcaacactgcttccttcaaaacatggttcgcacaggattacttgttcgttcgggcgtttcccccatttgtggctagtgtgctgataaaagcgtggaagg

SEQ ID NO: 69368 - DNA, 261 bp, Glycine max
  Clone ID: 700840263H1
ggcggggcgaccgctgagtttaagcatatcaataagcggagaaaaaggaaacaaggatagaccagaactgaaaacacgaaccagagaggtaataggaagaacggagaaagaaagaggaagagaaagtggaggacaagtagtggcagagaaaggaagagaaacagaaacggcaaggggacgggttggtgtgtaccatatgccaacaactgagaatgatatgcccactggtagcatccctttggccttacaaagtttattcta

SEQ ID NO: 69369 - DNA, 287 bp, Glycine max
  Clone ID: 700840264H1
cagcattcaattcgactcgaggcttggtcaactcaggtgcgtcctgaaacaactctgttggctgatgggtgtccatatttgtatgctatggtgcatgatagttcagtgtctacaataccaggtgattttgtcattggtgttaagttgacaaccataaacaatatgtgtgcatatgggctcaatcctggtatttcaggttctcgtcttttgggcaccattcctcagtctatttcacagcaaactgtttgagcagaaatggcaacagtgagaacaccattgaattttga

SEQ ID NO: 69370 - DNA, 279 bp, Glycine max
  Clone ID: 700840265H1
tcgctcttccgctcgagattaaatattaataaagattctgtattatcatctcctgcaactgaatccaaagacaaacatcgtccaataatttcttttgcattgagcagcccacaagggaatgtctcgaatattgcagatcctaacatggatcaatcagatccttttaacttgagcactcttgaggctgaaataaaaagagaatccattaagtcagatgtcgccttggaggaaaaacccatgcaagagtcaactgatttggcttcctcatcttctgtatct

SEQ ID NO: 69371 - DNA, 257 bp, Glycine max
  Clone ID: 700840266H1
ctctaatgaaatttgcaaaatcttctcgtcctcctcaagataggactatggtagttgcctgccttgctgaagttgctcagaacatgggttttcctattgcaagctatgttgatagggtgatgcccttggtacttaaagaactagcatcatccgaggcaactaatagaaggaatgctgcattttgtgttggagaattgtgcaaaaatggtcatgaaccagctttgaaatactatgacaatattttacgtggactttat

SEQ ID NO: 69372 - DNA, 254 bp, Glycine max
  Clone ID: 700840268H1
ctactacaagtacttccttacaatcaaaaccaacaacaactatggcaagttatcaaaagcactacgatgatcagggtcgcaaggttgacgagtatggcaacgttgagaagcaaaccgacgaatacggcaaccctgttcatgctgctagtgtcacctatgtagccaccagaactgctgctggtggttacagtgatgacattaataagcaacatgataccaccaatgcctacggcgtagacactggtagacagcat

SEQ ID NO: 69373 - DNA, 254 bp, Glycine max
  Clone ID: 700840269H1
gcgagcgagcagtttcaaagagaggatttgggattgggaaggcgagggattgcgctgcgtctcttcctcttctctttcgattcatccctcattcataatcttccaatccaacaacctcagcctcacactcacacatacacacatctgaacgcgtatcgtccctcccatggcttcaaagcgcatcctcaaggagctcaaggacttgcagaaagacccaccaacttcttgcagcgctggtccagtagctgaggaca

SEQ ID NO: 69374 - DNA, 253 bp, Glycine max
  Clone ID: 700840272H1
gccccagccagttcctggacttgaagatagtttaagggataaaacagtgaatgtaggcagcagtgagtgtgcagtggaagcacctgcacatgggccatttgaagaggactactctaccatgccaatgagcccaaaatctggtgaattgagtcattcacatgggatttcaggaaatagattgaatcataggattaagcagaaaagcattgctgaaattatgggagaggacaaagatgtcaataccaaaaatcag

SEQ ID NO: 69375 - DNA, 251 bp, Glycine max
  Clone ID: 700840274H1
cgttctcgtctttgtctgatacccaaacctcttcttctttttcccaagctgaaatggttttattgatgatgccgtgtgcgtgcgtgcgaatttgaattcgcaaactggattccgattggcagcagaaccgtgtttttgtttgattccccggtgtgatttcagatccagaatgtgattcccttttgtgtgttgacgtgttgatgaaaatgggagttcaacggcatgaagcgttttctgaagacaacgatcct

SEQ ID NO: 69376 - DNA, 251 bp, Glycine max
  Clone ID: 700840275H1
ccgattgctagaatggaatttcgatgctcagtcatctcttttaccattctcttctctcttgctcttgcaggagagagccatgtccatgcatcgctacctgaggaagattattgggaagctgtttggccaaacactcccattcccactgcactgcgagagcgtctaaagcctctccctgcaggtgctgaaatcgatgaactccctaagcaaattgatgatacacagtacccaaaaacattcttctataaaga

SEQ ID NO: 69377 - DNA, 250 bp, Glycine max
  Clone ID: 700840276H1
gttccctcttcgtagccgcaattgctcttccttcgcgaagaagaggtaacagcgtctgacaccagcgccagttaccgttttccacgcgctttcttccttctcgaaacgccgtcgtttggctaccacacatatatttagcttcactgcttcgaaccttcttttcctcacgtcgcaattccggttttaaaggcaccttggcacaggttcaggtgagtgacaaggaagaattcctgcacatggagaacaacga

SEQ ID NO: 69378 - DNA, 245 bp, Glycine max
  Clone ID: 700840277H1
gttaaggagaggactaaggacctgtttgggtaagttttctctagaaacacttctaggagaaaaaataagaagaaaaaaaatgaaataaatttctccataggctaaagagagctcccctttagctaatcattaattaattcttagatgttccctcatcttttacagaagttatatgagagagcttctacaaattagctaatggctagctaatggaaaactattttaacctatggagaagttcatct

SEQ ID NO: 69379 - DNA, 159 bp, Glycine max
  Clone ID: 700840279H1
gaatatatgatgaaaatacaatgttaaggttcaatattaaataaaataaatgtgtttttacttgtttacccttatatttaggttaggaaagtggtccatactccacaggggtgataatatggtaactataaacgtaatatatttctgttcctcactact

SEQ ID NO: 69380 - DNA, 246 bp, Glycine max
  Clone ID: 700840280H1
ggctcgagaccaaacacaatgatgatgaacagtatgtttgggagtcacaagctggaggttctttcactgtcaccagggataacactgctgaggttcttggcaggggtactaagatcactctctacctcaaggaagatcagcttgagtaccttgaggagcgtcgcttgaaggatctgatcaagaagcattctgagttcattagctacccattaataatttggattgagaaaactactgagaaggaga

SEQ ID NO: 69381 - DNA, 270 bp, Glycine max
  Clone ID: 700840281H1
cgggatttggctcgagtagcgctctgtgcgcgtactccgaaagggaatcgggttaaaattcctgaaccgggacgtggcggctgacggcaacgttagggagtccggagacgtcggcgggggccccggaaagagttctcgtttctgtttaacagcctgcccaccctggaaacggctcagccggaggtagggtccagcggctgtaagagcaccgcacgtcgcgtggtgtccggtgcgcccccggcggcccttgaaaatccggaggaccgagtg

SEQ ID NO: 69382 - DNA, 253 bp, Glycine max
  Clone ID: 700840282H1
aaacagtaaagctaacttcaacacctttaattttctaaaagtaattcagcggctgaataccaagcggagaagatgagtcaggagcagccacggcgtcccaaaggccaaaaccccatcaaatacggcgacgtttttgtcgtctccggcgaccttgcacagaagcccgtcgcaccggaagatgctgccatgatgcaaagcgcggaaactcgagtgctcggacaaacccaacccggcggagagcttccgtcatgca

SEQ ID NO: 69383 - DNA, 254 bp, Glycine max
  Clone ID: 700840284H1
gaaaagaagaggaggaggagagcgaaaaagaaaagggatgatggttcgtcacgtgattctggcgaaaggtcaaaaggaagatcacgatccaggagtggtaaaaaagaatatacatctgaggatgaggaagactcttattcttctgatggtagtgatagtttttcgggtcttaaaggtaagcaccaaaagtcagatagaaaagatgggagtcagaggaacaagatcgaaggtggcacggtaaattctacaagtga

SEQ ID NO: 69384 - DNA, 266 bp, Glycine max
  Clone ID: 700840285H1
gctccgggtccgtgcgccgcggcgctgtcagactcctgctcactccccaacaacaaaatccaagaccaattccctctgccacccagggctgtccacagtttagcgaaggaaaaccaacatattccttcgccaccacaagtggacagtcctgtctctgtctcagtctcggtctcttcctcctcggacgacgcggacgacgcgatcgtgcaagccgtagtatcgggctctatcccgtcctactcactcgagtcgcggctcggtgacac

SEQ ID NO: 69385 - DNA, 254 bp, Glycine max
  Clone ID: 700840286H1
tgggtgtccatatttgtatgctatggtgcatgatagttcagtgtctacaataccaggtgattttgtcattggtgttaagttgacaaccataaacaatatgtgtgcatatgggctcaatcctggtatttcaggttctcgtcttttgggcaccattcctcagtctatttcacagcaaactgtttggaatcaaatggcaacagtgagaacaccattgaattttgattctagcaagcagagcttttgtcaattttcta

SEQ ID NO: 69386 - DNA, 252 bp, Glycine max
  Clone ID: 700840287H1
aattgcattttccattattgtcattggaaattctgctgttttcattggactttggagtgcacattttgtttggacatactactgtgtggcaagaacaaataggttcggactggttttcaagcttgtggtgctcatgtgtttgccaattcctctgttactttggccaatagtgggtattgttggaagccttttaggtggaattggatatgggttttttgctcctcttcttgcaacttttcaggctgtagggaa

SEQ ID NO: 69387 - DNA, 251 bp, Glycine max
  Clone ID: 700840289H1
tgtttgccaaatttctagatcagatttcaaaacttttggtggattctccattatatgaacaatacaacgaggtaagggaaaagctttcgactttgtttgaaacaaagcaaaatgctggtattactagtcaaataactgatctgagtcaaaaactagtaaatattattgagtgaggtcagctatctgtttctcctcaattatttgatctacaagcccgctttacttctacaatcgaagattttcagaagcaa

SEQ ID NO: 69388 - DNA, 123 bp, Glycine max
  Clone ID: 700840290H1
cacgggcatcacacttatgcagctatgaccttgtgaataccacgttcaattgttatataaaaaatgtgtgtattatattactatgatatcatctaatatggaaagtactaagctttgctttgc

SEQ ID NO: 69389 - DNA, 253 bp, Glycine max
  Clone ID: 700840291H1
gagaaagagttaagtgaattaaaaacccaagggaggttcatggccaaaggtaaagatatccgagtaattgttattttggaatgtaccggttgtgataaaaagagtgttaataaggaatcaacgggtatttctagatatataactaaaaagaatcgacagaatacgcctagtcgattggaattgagaaaattttgtccccgttgttgcaaacatacaattcacgcagaaataaagaaatagatcaaattgatcg

SEQ ID NO: 69390 - DNA, 251 bp, Glycine max
  Clone ID: 700840292H1
ctcatcctcatttttgctgaagcacttgccctttatggtctcattgttggtattatcctgtcttctcgtgctggccagtctagagccgactaagaaaggagttgtgctgcaaaatattctttgaccacccatctgttttaacctccttttaaagggggtgagggaggtaattattagttgttccgagcttagcgatgttcaggcagcattttcaggatttagcaatggtgtgaaagttcaattcgccattt

SEQ ID NO: 69391 - DNA, 256 bp, Glycine max
  Clone ID: 700840293H1
agaaaacctaagcttagaattagaaacaaagaaaagaagaaaggaaagaattgatcgttgaaaatgcagggaggaaagaaagcgggagagtccattaaggaaacagctacaaacattggtgcttctgccaaggctggcatggagaagaccaaggccactgtccaagagaaggcagaaagaatgacagcacgtgatcggttgcaaaaggagttggccacccaaaagacagaggcaaagatgaaccaggcggagctgg

SEQ ID NO: 69392 - DNA, 250 bp, Glycine max
  Clone ID: 700840294H1
cagaaagcaagtatcctgtggttcgattatctgaaatacctgctaagcagttggaaaatgataaatctgagctgaaaaaatttgttattagacctaggcccaatagaaacagtttgaatgatgccaacggagttgggacgaaaggaaatcctgtaagaagtgtggaagaaaggaaggaggaatatgaccgggcgcgggcacgtatctttagtagccctagaagctctgaatcaggcgatacctcatccat

SEQ ID NO: 69393 - DNA, 167 bp, Glycine max
  Clone ID: 700840295H1
gggtatcttgtgaatgatactcttatagtcgaagctgaggttcttgttcgtaggattgttgattactggacttatgattccaagaaggagactggctatgttgggcttaagaaccaaggagctacctgttatatgaattctctacttcaaaccttgtaccatattcc

SEQ ID NO: 69394 - DNA, 262 bp, Glycine max
  Clone ID: 700840296H1
atttgagggtttgaacaaacaggctcttgaagttgtttacagggtcactgttgggggtgttaaagttaccccttttaatgattccttgtggagaacttgggttcctgatgatgggtttttcagaccaagtgttgggtcggaaaagctttactttggtgggagaatcaattaccatgttggaggggctagtcgtgaggttgggcctgataatgtgtataatagtgctaggttgattaggagtaagaatgattctgttcctaac

SEQ ID NO: 69395 - DNA, 258 bp, Glycine max
  Clone ID: 700840303H1
cgccaattgagaaggaaagctctctctcgtattgaatggctgcaaaaagctgatgtgcctaccatagcacagattgaagagttccattcgatgcagaggatgatgaatgctcctgattcaaatgataatattgatctactgttgagcattgatttgttgggtttacaaggagcaggtaaagcttttccaaataagattgtttttgatgataagcttgtgttggctaacacacaagaattctttgatggaaattttcca

SEQ ID NO: 69396 - DNA, 80 bp, Glycine max
  Clone ID: 700840305H1
ctcacgacggaactcaccgattcaaaatcgttgagcacggtggctggcccacctgggtcgatgatcgcactctttacttc

SEQ ID NO: 69397 - DNA, 205 bp, Glycine max
  Clone ID: 700840307H1
gtcgtcgcgtgtactttcttgcgaaacagaagggcgaaggggcaaacacaacttttttgtttttttgtagagcgagagagaaaaaaatgttggggatcttcagcagttccgtggtgtcgccgccggaggagctggtggctgccggcagcagaacgccgtcgccgaagacgacggcggggaagctgctgaaccggttcgtggagaa

SEQ ID NO: 69398 - DNA, 262 bp, Glycine max
  Clone ID: 700840309H1
cttgacccctaaattcgtgcccattcccacaactgcacattctactttctatatattccaaatcccttttccgatttccaccaaaatctaaacctaaattcccaattacccttcccaattttcaccaaaacctaatactcccacaccaatcttcgatcatggacgccgattcacaacctcaacaactcgaagagagaacagaggagcaagaactgaagtacctggaattcgtgcaattcgcgaccatacaggctctgatgcg

SEQ ID NO: 69399 - DNA, 261 bp, Glycine max
  Clone ID: 700840311H1
cttactcttcttcctccaagagaagtaaacaaccctcacattcaccacagcagcacacacagacaaagacaaccttgtttgtctccaatcaaaacctttcaagctggcgttcgaaaaccaagacaaccctgtccgagaaatcaagcccaagaataggagaatcatgggtgctggaggccctgatgatgaggacaacaacaggtggccaccgtggctgaagcctctgctaaaagaaagtttctttgttcaatgcaagcttca

SEQ ID NO: 69400 - DNA, 258 bp, Glycine max
  Clone ID: 700840312H1
cttggaggagaaaatactgccttattgtgatgggataatgacccaacttcttacggatttgtctagcaatcagttgcacaggtccgttaagcctcctattttttcatgttttggagacattgccttggctattggagaatactttgagaaatacctgttatatgcaatgcctatgcttcagagtgccgcagagctctctgctcatacatctggtgctgatgacgatatgacagaatacactaattctttgagaaatgg

SEQ ID NO: 69401 - DNA, 261 bp, Glycine max
  Clone ID: 700840313H1
aaagccaagaacttcgtgtcggagaaggtaaatgatatggccaagccggaggcgagtgtcactgacgtggacttcaagcgcgtgagcaaagataatgtcgagtacttggccaaggtctctgttcgtaacccttattcaacttccatacccatttgtgagatcaactactctttcaaaagcgcatccagggagatagcatcagggaaaattccagacccaggatcgttgaaggcaaaggacacaacaatggtggatgtgcca

SEQ ID NO: 69402 - DNA, 261 bp, Glycine max
  Clone ID: 700840314H1
cttcgaggtggttagaggaggaaatatctcttgctaacagttagaaaggacttagattcttggagaatgggcacgtgatgaaacctgacttaccatttaaagctgctgtggcaatctctgaccatgctgcacttgcagttcctacccagcaatctgtaagtgctagtactaatatgttttatgctcatgatctctcaaaagctgaagactttgcaatatcatccaaaattgatgccattgcatcttctggaacattcactg

SEQ ID NO: 69403 - DNA, 251 bp, Glycine max
  Clone ID: 700840319H1
attttctcaagagaaactttaagcagatgtctaatgttttgtgggtggctcctgaggacaaggcgagtttatggtcacaacttcattatgtttcgtgtaataatctggaaatgcaagaagcttatcttgtcaatctcgtaaatgtgttacgagaactgtatttgcacagtccagaggaagcttcgccaactgagaaggaaagctctctctcgtattgaatgctgcaaaagctgatgtgcctacatagcaca

SEQ ID NO: 69404 - DNA, 258 bp, Glycine max
  Clone ID: 700840323H1
aagtacttggattttggtcaagccctttcgttcatagagtgatatgggctctaaagttgaagaacattagttatgagtacatagaggttgataggttcaacatgagtgagctacttcttcaatccaatccagtttacaagagagtccctgtgcttattcatggaggcaaagccattgcagagtctcttgtcattcttgaatacatcgaagaaacgtggctagagaaccacccattgctgccaaaagataaccatcaaa

SEQ ID NO: 69405 - DNA, 258 bp, Glycine max
  Clone ID: 700840324H1
tgttgatctggaaacaacgtaagatgatttgcaaagagcagctatcgaagaccagatagccaactttggtcagactccaatccagatatttcgtaagaaacacccaagaagagggccacctattccaattgcacatcctttgtactttgctcctgattctatcagtttgagttccattgtttgtaatacaagtcaatattcgtctgctatgctgtatgttggtctgatggactcaaatattgtccttgtggatgaggg

SEQ ID NO: 69406 - DNA, 260 bp, Glycine max
  Clone ID: 700840325H1
aaaaccaacaacaactatggcaagttatcaaaagcactacgatgatcagggtcgcaaggttgacgagtatggcaacgttgagaagcaaaccgacgaatacggcaaccctgttcatgctgctagtgtcacctatgtagccaccagaactgctgctggtggttacagtgatgacattaataagcaacatgataccaccaatgcctacggcgtagacactggtagacagcattctagtggtggctacgatggtgacactaata

SEQ ID NO: 69407 - DNA, 256 bp, Glycine max
  Clone ID: 700840327H1
ccgctaattaacccttttctccccagcattcaatttctattagtatccaaaccttgattgcgttcttggattttcttgtgggtagggggtttctcctctctttctctgcagtttgatggatcgggaaggaggatccaacgccggatcttgctactactccgttctcgggattcgtagggatgcctccttctctgatattcgcactgcctaccgcaaactcgctatgaggtggcacccggacaagtgggctctgaat

SEQ ID NO: 69408 - DNA, 259 bp, Glycine max
  Clone ID: 700840328H1
aacaactatggcaagttatcaaaagcactacgatgatcagggtcgcaaggatgacgagtatggcaacgttgagaagcaaaccgacgaatacggcaaccctgttcatgctgctagtgtcacctatgtagccaccagaactgctgctggtggttacagtgatgacattaataagcaacatgataccaccaatgcctacggcgtagacactggtagacagcattctagtggtggctacgatggtgacactaataaacatcat

SEQ ID NO: 69409 - DNA, 265 bp, Glycine max
  Clone ID: 700840332H1
aaactactggtttttgcttgcggattctgtttcaaacaacgtgtggttttctcagaaggttagtttcatggatgaagctgctgctgtaactgctgcatctaaggcaattgaggagtctatggaggggtcaggagcaaatgtgaaggagaccagtaaggtagttgcagaagcagttgagaaggtgaaagggcgctctagattagtattgggcaagttccaggccccatcagagggtaactacaatttgacttgctattgtttgtgt

SEQ ID NO: 69410 - DNA, 258 bp, Glycine max
  Clone ID: 700840333H1
caaaggagagatcaaaacaagcagcaagtaatgaagctgccaaagagagaaacaagcaggcaaataaggaggcaacaaaggcaaaagatgtcacaagagagaagggtcaacaaggcaatcttaaaacaggaagcagagaaagcaagaccaatggaagaaacaaaggtggaagctaaaggaagagaaaaagatgtaaccaaagagggtggtgttgaggaacaaggaagaggcagaaaagaaaatgaacaatctagcttg

SEQ ID NO: 69411 - DNA, 254 bp, Glycine max
  Clone ID: 700840334H1
aaaatgaccaagcttacaattctcctcatcgctcttctcttcatcgcccacacctgctgcgcctccaaatggcaacagcaccagcaagagagctgccgcgagcagctcaaggggatcaacctcaacccctgtgagcacatcatggagaagatccaagctggccgccgcggcgaggacggcagcgacgaagatcacattctcatcaggaccatgccgggaagaatcaactacatcaggaagaaggtaggaaaaga

SEQ ID NO: 69412 - DNA, 255 bp, Glycine max
  Clone ID: 700840336H1
cttattgagagaattttgcaagtgacagaaacatggcatctcgtcaaaacaacaagcaagagcttgatgaaagagcaaggcaaggagagactgttgtcccgggtggaactggtggcaagagcctggaggctcagcaacaccttgctgaaggaaggagcaagggagggcaaacaaggaaggaacagctgggtacagaagggtaccaggaaatgggacgcaaaggagggttgagcactgtggacaaatcaggagaag

SEQ ID NO: 69413 - DNA, 253 bp, Glycine max
  Clone ID: 700840337H1
ctctcctctccggcatatcctttctcctaccttcttcctctatcccctgacttaactttgctaccaaacaggcaacaaggctcaaggaacttatattgtttctatcatgggagtttgtttgagcacccaaattaaagctgggttaaattcaaagcatgttagtgccgatgcaaaagatcacagcagtccaattagcaataatattacaaaagatgtcagcacaccaatcagtaaagtctcagaggtatcagtg

SEQ ID NO: 69414 - DNA, 256 bp, Glycine max
  Clone ID: 700840338H1
aagaagagaagaatggtggtatgaatatgattaatgattatgaagctcagctcatagaaagcattttggaaacgaaacctcttctcactagacactgactaacaatggcggctgaggctcagcttcctgaccacttcaagtgtccgatttccctgcaaatcatgtccgaccccgtcatcctctcttccggccacaccttcgaccgctcctccatccagcgctggctggacgccggccaccgcacttgcccaattac

SEQ ID NO: 69415 - DNA, 255 bp, Glycine max
  Clone ID: 700840340H1
agtgtctcttctctcgaagaagatcgtgaagaagaggctgaagaagttcaagaggcctcaaagtgacaggaagatttctgtgaagacaaactggcgcagagcaaagggtatcgattcccgtgttaggagaaagttcaagggatgcactttgatgccgaacattggttatgcttcagacaagaagacccgccactatctcccgaatggtttcaagaaatttgttgttcacaatgtgaaggatttggaactgctcat

SEQ ID NO: 69416 - DNA, 255 bp, Glycine max
  Clone ID: 700840341H1
ctcgagccggatttgggagcaagatcattttggatacacaacacaggacccattggctgcctcccttacattttggccaattttctatcagctgaaagggatgcctatggttgtgcaaagacatataatgatatagctcagtatttcaaccacaaattgaaggaagttgtggttcaacttcgcaaagaccttcctctggctgcaattacatatgtagatatttattctgttaagtactctctattcagccaccca

SEQ ID NO: 69417 - DNA, 258 bp, Glycine max
  Clone ID: 700840342H1
ctcgcaagcaaaaagaaagaatcccaggcgaggagaaagatggacgggaaggagcaggatgtgtcgttgggagcgaacaagttccccgagagacagccgattgggacggcggcgcagagccaagacgacggcaaggactaccaggagccggcgccggcgccgctggttgacccgacggagtttacgtcatggtcgttttacagagcagggatagcagagtttgtggccacttttctgtttctctacatcaccgtctta

SEQ ID NO: 69418 - DNA, 252 bp, Glycine max
  Clone ID: 700840343H1
ataacctcggttactgcatttatcttatgctgctttctgtttggaaatgggcagtcattctgttgaagacatagaatatgatgatggagagttggttttcttgtatttccaaaactttctactctccatagtgtccaattcttccaaaacagcaaatctgagagcatacatacgttcagcttttgcatatcattttcagcactttgttgaatttgatcaatatacaaatgattctctcaatgtgatggatac

SEQ ID NO: 69419 - DNA, 112 bp, Glycine max
  Clone ID: 700840344H1
agcagatgtctaatgttttgtgggtggctcctgaagacaaggcgagtttatggtcacaacttcattatgtgtcgtgtaataatctggaaatgcgagaagcttatctagtcag

SEQ ID NO: 69420 - DNA, 258 bp, Glycine max
  Clone ID: 700840345H1
cgtggctctgtacaccgttaactcaacccattgtaatttaatattcgtcagttattcccattggctgattgttgttagatgctggtgaccaagtttcttcgtaattttttctcggtcagaattgaacaccacagcgacaaggcttcaacgttggggttataataaccttaaccttggtcgctgtctttctctctctgtggatggaacaaactagaagtggcaagagaagcttcaaatcacattcatctaccctacctt

SEQ ID NO: 69421 - DNA, 259 bp, Glycine max
  Clone ID: 700840346H1
aaaaggaaataattgatctttgaaaatgcagggaggaaagaaagctggagagtccatcaaggaaacagctgcaaacattggtgcttctgccaaggctggcatggagaaaaccaaggccactgtccaggagaaggcagaaagaatgacggcacgtgatccgatgcaaaaggagttggcaacccagaagaaagaggcaaagatgagccaggcagagctggacaagcaggcggcgcgtcagcataacacggcggcgaacagg

SEQ ID NO: 69422 - DNA, 179 bp, Glycine max
  Clone ID: 700840347H1
ctcttcttcctccaagagcagtaaacaaccctcacattcaccaaagcagcacacacagacaaagacaaccttgtttgtctccaatcaaaacctttcaagctggcgttcgaaaaccaagacaaccctgtccgagaaatcaagcccaagaataggagaatcatgggtgctggaggccctga

SEQ ID NO: 69423 - DNA, 250 bp, Glycine max
  Clone ID: 700840349H1
cgttccttcagagtggaaccctagttgtctctatccttaaggttccgccaccgcaccaagtctcagcacccaaccaggtcttctttcattcatggcggaggaacttatttctcaattaaacaatatgctagaagaaaatggaacaccaagtcatgtagaaagggctgctgatgctgatgctgatgctgagctttctccaccatcacaaaaaggagatgacactaaagaagtttcaaagaagaaaaagaag

SEQ ID NO: 69424 - DNA, 182 bp, Glycine max
  Clone ID: 700840350H1
tccgttcatttcctctgttttttcttcaaatccattgtttcgtggaaatcccgaaatttaaccatgcttctccgaaccgccgcctccgccgcttctgcttcgtccctctccctcttcagccctacctccgaacctctccgttcggttcccgctcgtggattggtggttcgcgccgcgaaagg

SEQ ID NO: 69425 - DNA, 256 bp, Glycine max
  Clone ID: 700840354H1
atcgagccgattcggctcgagatgatatagaaagagagagaagagcaaaagaagaacaaaactgcaatcctcaaaggagaagatgaaaaacatggcaagtgctgccaaggaacaagtcgacatctataaagccaaaatagacgagaaggcagagaaagcaacggcaagaacagaagaggagagggtgatagcccatgagcacgcaaaggcaaaggaagctggagcaaagatggagctgcatgaagctaaagcaagg

SEQ ID NO: 69426 - DNA, 250 bp, Glycine max
  Clone ID: 700840357H1
ccggtaccttcaccaatcagcttcagacttcgttcagtgagcctcgtctccttatcctcactgatccaagaacagatcaccagcctattaaggaagctgctcttgggaatattcccaccattgctttctgtgacactgattcgcctatgaggtatgtggacattggaattcctgccaacaacaagggaaaacacagcattggttgtctcttttggctccttgcaaggatggtattgcagatgaggggtac

SEQ ID NO: 69427 - DNA, 253 bp, Glycine max
  Clone ID: 700840358H1
cctgaaaatatcctactagacgctgatggccatgtaatgttgactgattttggcttagctaaacaatttgtagagagtactagatcaaattcgatgtgtggtacattagagtacatggcacctgaaattattcttggcgaaggccatgataaggctgctgattggtggagcgtaggtattctactagttgagatgcttactggaaagccgcctttctgtggcggaaaccgtgacaaaattcagcagttgatag

SEQ ID NO: 69428 - DNA, 257 bp, Glycine max
  Clone ID: 700840361H1
caaaaacaaaacaaaacagtgtctttgattacgagagagagagaacaaaacaatcaacacaatgccttctgagcaaatgcctcgcagagagaacaacagcaatagggtgatagagagagaggttcacgttgagacacacagaaaagagtccctccctgataagggaagggttgtgatagagagtgagaagaaggagaaagagagagagtcggcttctgatagatgccatgtctggaaatatagttaaggaggacaaa

SEQ ID NO: 69429 - DNA, 78 bp, Glycine max
  Clone ID: 700840362H1
gttttctacaatttgacatttaagccatctaagcgaagcctgttttctggttgaatgtgagaattgttgtggctaaaa

SEQ ID NO: 69430 - DNA, 156 bp, Glycine max
  Clone ID: 700840364H1
caagtacttccttacaatcaaaaccaacaacaactatggcaagttatcaaaagcactacgatgatcagggtcgcaaggttgacgagtatggcaacgttgagaagcaaaccgacgaatacggcaaccctgttcatgctgctagtgtcacctatgtag

SEQ ID NO: 69431 - DNA, 249 bp, Glycine max
  Clone ID: 700840365H1
cttccccccagcccacactctcccattatccctccgccgccatgtccccgtcctccgaacaccacggcggaaaccatcgctttcccggggaagaaatcaacggcttcgtgaatggccaagcggaaatgtccgctccttccacggcctcctcgtcgccggtgcgctgcatcgtcgactcaattccgtcgaaggagcgggagaagctccggagaatcctcgtcgcctcggcgaagggtttctcaatcggag

SEQ ID NO: 69432 - DNA, 178 bp, Glycine max
  Clone ID: 700840366H1
gtcggttttgaaaagagttaacaatctcttctcttcgctcctgcacttgttgtttctttgcccttcatggcatctcaggctagccttctccttcaaaagcagctcaaagatctttgcaaaaaccccgtcgacggcttctctgccggtttggtcgatgaaaccaacatttttgaatgga

SEQ ID NO: 69433 - DNA, 249 bp, Glycine max
  Clone ID: 700840367H1
ctcaagtctctcgaagcttctttctctctcttctagaagctatctgtgtttggtgttactaagtctccaacaagcaaagtacatggttgatttggaaatccaggtccccaccccattcgacccgtttgccgaggcgagagaatcggatgcccccggagcaaaggagtatgtgcatattcgaattcagcagaggaatgggaagaagagtctgaccacagtgcaagggctgaagaaggagttcagctacga

SEQ ID NO: 69434 - DNA, 249 bp, Glycine max
  Clone ID: 700840369H1
gttcaacggtgacacgaagttactggaagagaatgagaatttaagggagatgatgaagaagttgcttgaagccgggaatgaacagttaagcgtgataacaaatttgactggcagagtgaaggacttggagaagaaactagccaggagcaggagtaagagagtgaagacaaaacggtatagaccagcaacttccaaaatgtcttgcatgaaatgaaatactcctaatgtttcactgcatgtgagagcctt

SEQ ID NO: 69435 - DNA, 193 bp, Glycine max
  Clone ID: 700840371H1
gacgaatacggcaaccctgttcatgctgctagtgtcacctatgtagccaccagaactgctgctggtggttacagtgatgacattaataagcaacatgataccaccaatgcctacggcgtagacactggtagacagcattctagtggtggctacgatggtgacactaataaacatcatggaactactggtggct

SEQ ID NO: 69436 - DNA, 236 bp, Glycine max
  Clone ID: 700840372H1
cgagaaagagagagagagagatagagactgagataaattcgcaaaccctaatttcggaaagatcggcgatggctgcctccaaggatcgcgagaacttcgtctacatcgccaagctcgccgaacaggccgtgcgatacgtagagatggtggaatcaatgaagatcgttgcgaatctcgacgttgaactgactgtcgaggagcggaatttactttctgttgggtacaagaatgtgatt

SEQ ID NO: 69437 - DNA, 252 bp, Glycine max
  Clone ID: 700840373H1
cagaaaagaagagagaagagcaaggttacaggcacaattttcacagatgaggcctgttgcaataacgccttctgttgcgccccgtatgcctctctaccctcctggtgctcctggtcttggacaacaatttttgtatgggcaaggacccccagccatgatgcctccacaagctggatttggttaccagcagcaactagttccgggaatgagacctggtggtggtcccatgccaagcttctttgttcccatggt

SEQ ID NO: 69438 - DNA, 249 bp, Glycine max
  Clone ID: 700840374H1
agaacaacctacgcatgctaatcttaaagatcccatttgcgacgcctatggaaaatgcaagcacaaaatcgtggatgcaatggagaagtctcaagaggtcatccatgagaagaaggacgagattgccgccaacaaggaggcagcacgccaagttgctggtaaaaccaaagagagagtgtatgataaagcccgtcatgtccacgaatacgcccaaaacactgtagaaacagccaagaaccatattgcctg

SEQ ID NO: 69439 - DNA, 239 bp, Glycine max
  Clone ID: 700840375H1
gagaagtaaaagatcttagtgcaagtaattaacatggaatctcagcaagcaaaccgtgaagaacttgatgagaaggcaaggcaaggtgaaactgttgttcctggaggaactggtgggaagagtcttgaggctcaagaacatcttgctgaaggaaggagccgtggagggcagacgaggaagcagcagctagggtcagaggggtatcatgaaatggggaccaaaggagggcagacaaggaa

SEQ ID NO: 69440 - DNA, 249 bp, Glycine max
  Clone ID: 700840376H1
atcaagagtacataaagtcatattcattatctgaatcaggtccatggagatcatttacagggctaggtgcttctgaaatttgcaaggttgaagaacttgagtatgcagagctaccaggctctggggatagctgttgtaaacttaaacttagatttctagatccttcttcgtgtgtgcatggcaaatcgtttaaattaactctacctgaattgattaacttcactgattttgttattgagaaaacatggt

SEQ ID NO: 69441 - DNA, 207 bp, Glycine max
  Clone ID: 700840377H1
gtctcaaaaatggaacctattgacaaccatctcacctctttcttccaccaccaccagcaaagacaacaacaccaccagcaccagcaccagcatccgccgccgccgccgccgaccacggcgtcgccgaccaacggtctcttgccgaacgcggatgggtcccacatgctgtaccctcactcggtcgcgtccgcggtgtcgtcgcagctt

SEQ ID NO: 69442 - DNA, 253 bp, Glycine max
  Clone ID: 700840378H1
agagaatataggaatataagaactaagatggattggatcggagcgtaccgcggaggccacagaagcagggactggtgcgacccttcatcaccattcactgatttgtgggaccctcgtcgtgtcggtgacgctgatgatatcacctcctctctcgcccatgctcacgttgactggcgtgagactgataaagctcatatcttccgtgctgatcttccaggggtgaagaaagaggatctgaaggtgcaggtggagg

SEQ ID NO: 69443 - DNA, 253 bp, Glycine max
  Clone ID: 700840379H1
caaaaacaaaacaaaacagtgtctttgattacgagagacagagaacaaaacaatcaacacaatggcttctgagcaaatgcctcgcagagagaacaacagcaatagggtgatagagagacaggttcacgttgagacacacagaaaagagtccctccctgataagggaagggttgtgattgagagtgagaagaaggagaaagagagagagttggcttctgatagagccaggtctggagatatagttaaggaggac

SEQ ID NO: 69444 - DNA, 153 bp, Glycine max
  Clone ID: 700840380H1
cggcaaaggacatggatcggataaaagggccatggagtcctgaagaggacgaagcgttacggaggttggttcagacttacggccctaggaactggtccgttataagcaaatccattccgggtcggtctgggaaatcgtgccgcttgcggtggt

SEQ ID NO: 69445 - DNA, 246 bp, Glycine max
  Clone ID: 700840381H1
gggcaatcagctctgcgttttgcccgtcttcggatggagaagcgtcataactatgtgaggaagacagcggagcatgctacccaattctatatcaatgctgccaccagccaacccaatgtttctggattaatattggctggttcagctgatttcaaaactgagcttagtcagtcagatatgtttgatcctcgtcttcaggcaaaaatactgaatgttgttgacgtctcctatggaggtgagaatggg

SEQ ID NO: 69446 - DNA, 248 bp, Glycine max
  Clone ID: 700840382H1
caagcaatggagaagcaagatgcctgtcctatatttctttttttttcggtaaatgctagtgctcagttctgtggggtagctgaaatggttggacctgtcaattttgacaagagtgtggacttttggcagcaagacaagtggagtgggcagtttcccgtgaagtggcacataattaaagatgttccaaacagtcagtttcgtcacattgttcttgaaaataatgataacaagcctgtgaccaacagtcg

SEQ ID NO: 69447 - DNA, 249 bp, Glycine max
  Clone ID: 700840383H1
acttgatctccatcaccacttccattctcttggagctggagtgattgaggaggttcgtgtccagcgtgataaagggtttggttttgtgaggtacagtactcatgctgaagcagctctagccattcagatgggaaatgcccagtctcttctctgtggaaaacaaattaagtgctcttgggggagcaagcccactccagccggaactgcttcaaatccccttcccccacctgctgctgcatctttgcctgg

SEQ ID NO: 69448 - DNA, 250 bp, Glycine max
  Clone ID: 700840385H1
gtgaagagctatgatatgccctgcactatcgaatcagtttctctggaacctaagtatgggaacaagtttgttgccgggggagaagatatgtgggttcacgtgtttgatttccatacagggaatgagattgcatgcaacaaggggcaccatggtcctgtccactgtgttcgtttttctcctggtggagaatcctatgcctcaggatctgaggatggaaccatcagaatatggcagactggccccttgaccc

SEQ ID NO: 69449 - DNA, 248 bp, Glycine max
  Clone ID: 700840386H1
aaaaagaagagttgagattccctttgaagaaaagatggcatcccataggcaaagctatgaagctggtcaaactaagggccgaactgaggaaaagacgaaccagacgatgggcaatattggagagaaggctcaagctgcaaaggagaagacccaggaaatggcccaagctgcaaaggagaagacccaacaaacagcccaagctgccaaggacaagacttgcgacacttcccaagcggcaaaggagaaga

SEQ ID NO: 69450 - DNA, 250 bp, Glycine max
  Clone ID: 700840387H1
caagaacctcgctgaagagttaaggagagaaaacatcaacatcaaaccaaaccataaagatgaagcccattgacgacaaacaagagacagtgacgataagaacggtgagccacgacgaggaagggaaaaagagggtggagaagacagagcttagcactcacaacatcgacactataaggtacgtcgagaagaagctcatcaacaagggtgtccagcgacaggaccgccaccccgccgacggcatcggaat

SEQ ID NO: 69451 - DNA, 251 bp, Glycine max
  Clone ID: 700840388H1
aaaagaaagcatcccaggcgaggagaaagatggaggggaaggagcaggatgtgtcgttgggagcgaacaagttccccgagagacagccgattgggacggcggcgcagagccaagacgacggcaaggactaccaggagccggcgccggcgccgctggttgacccgacggagtttacgtcatggtcgttttacagagcagggatagcagagtttgtggccacttttctgtttctctacatcaccgtcttaacc

SEQ ID NO: 69452 - DNA, 249 bp, Glycine max
  Clone ID: 700840389H1
atcgttggctaggaaaccagggtaaacatgacaggagtagaactggtccagccttctgagggtaaattccctgttaaacatgtgatcacggtatcactaaactatggacaaataggtccgtaaatatgtcaaaagtttgttctctgaaaataagtttttttctttctttctttggttgaatgcattcaaatagtgagatttgaatgggtctgaagaactgaaggattgttgattgattaaagagtatat

SEQ ID NO: 69453 - DNA, 251 bp, Glycine max
  Clone ID: 700840391H1
cccatgtgtatatatatataataagcctataagttgcatttaatttacagcctcgtacgtgtgaagtgaagaataatcttgtgaatcgcgtaagctctttcaactcaactggatccgggtcacaaccgtcttgaaattaagaccaactgggtcattgatcacaatctcaattggtagcacaacatcaagggaaagtgaacaagagaggtatatttgatcagggatatggcaactcgaagatatgagtttgg

SEQ ID NO: 69454 - DNA, 252 bp, Glycine max
  Clone ID: 700840392H1
cacacacaactactacaagtacttccttacaatcaaaaccaacaacaactatggcaagttatcaaaagcactacgatgatcagggtcgcaaggttgacgagtatggcaacgttgagaagcaaaccgacgaatacggcaaccctgttcatgctgctagtgtcacctatgtagccaccagaactgctgctggtggttacagtgatgacattaataagcaacatgataccaccaatgcctacggcgtagacactg

SEQ ID NO: 69455 - DNA, 252 bp, Glycine max
  Clone ID: 700840393H1
ctcggtggaggaattttagtggacaaaactggagattggatcacacttatacaaaattctccaattagtaacttgttgagagttgctgcttggaagaaaggctgtttaatggtcaagattgtgatgtctgggaatgcagcagtcaaaaggagtgattgggcctcattggtacaagtgtttttaacaaacagcaacagtacagagcattttgatgcatgccagtggacaaaatcagaaccacattcctgggaa

SEQ ID NO: 69456 - DNA, 240 bp, Glycine max
  Clone ID: 700840401H1
tgaagagaagggtctagaacaacacaacactacggattgaatattgaattaaacgacgctcatggctacggtgccggagaagaaagcgaaggaagcattcttcgacgacgaattcgctctggccgttgatctctactctgaagccatacgattggatcccaacgacgcaaatctcttcgcggacagagcccaagcccatatcaaactcaacgctttcactgaagccgattccgatgccaa

SEQ ID NO: 69457 - DNA, 238 bp, Glycine max
  Clone ID: 700840402H1
cacagacatcaaaggactatgctggtgatgctgctcagaaatcaaagggctatgttggtgatgctgcccaaaagaccaaagaaacgattggtgatgcagcacagaagacaaaggattatgccactgacgccgcacagaagaccaaagattatgctactcagaagaccaaggactatgcaagtgatgcaactgatgctgcaaagaagactaaagcttatgctgctcagaagactaagga

SEQ ID NO: 69458 - DNA, 234 bp, Glycine max
  Clone ID: 700840403H1
aagagattgtggaatttgtgatcacacaacataagcatatatatagaaagatgccaggggcacaaggagcacaaccaaaggagtcaaaaacagctacaacatatgagtcagtagaaggaggagagaaccgaacaaggactgacttgctttcaagggaggatcaaggctgcattcaagtggaaaaacttcaggagaaggtccatgatcctgctggcaaaggtggtcctgtctttg

SEQ ID NO: 69459 - DNA, 75 bp, Glycine max
  Clone ID: 700840404H1
caatgatgatgaatgtcatagggctgagtctgcgtcttgtgttaacttcactggcaggagcgagtcccatcggca

SEQ ID NO: 69460 - DNA, 76 bp, Glycine max
  Clone ID: 700840406H1
atccacgacgacctgccatgtatggacaacgacgacctccgccgcggaaagccgaccaaccacaaggtctaccgcg

SEQ ID NO: 69461 - DNA, 237 bp, Glycine max
  Clone ID: 700840409H1
ctcgagcgggcttgatgagttacaaagagaggaggagccattgttgcagtaagtccagacgttttagtctggcttcgttcgttgtttccttatatgaagcagttccttactatgggagtggttttatgaggaaacattattccattggaagagttgaccgtcaaatgtattgtaactagtgggaattggttgaccaaggaaaaggatattggaggaacaagctaacatgaccgaaac

SEQ ID NO: 69462 - DNA, 240 bp, Glycine max
  Clone ID: 700840410H1
cgagaaaacaagaagtagtgagaagaagggagagaatggaggaaaaggcaaaagctgagcagaagaagataggtatgaccgagacttggttgaagaagcaccgtcttctttacaatggagccactagacaccctcttattattagcattcgcgatggcaccatcaacactgcttccttcaaaacatggctcgcacaggattacttgttcgttcgggcgtttgtcccatttgtggctagtg

SEQ ID NO: 69463 - DNA, 233 bp, Glycine max
  Clone ID: 700840411H1
atcgcaagacggaacatgggaaagagcatggttctgatcttagtagcggtatgcagatgttactatcaatgggattcagttacatgcaagcgattgacgcttacagcatatttggggacgatgttgattccatggtttgttacctgttagaaactggcagtagcagcagacgtaaaggcaaggccactgaatgacatgccatcaagtcaaataaatatctagtttttgaattg

SEQ ID NO: 69464 - DNA, 235 bp, Glycine max
  Clone ID: 700840412H1
ctacactcttccgccgattattcttcctctgtgccctagcttctctcccgccgctgtcaacgaccgtctcccttgccgcttccggcaccgaacgaacactctccggccaacttcagctcttgcgtgcgaaaattctcggaatattttgaatccaggaaatcatgcacgctccagttctagttctcaaggactctttgaaacgagagtctggatctaaggtccgctatgctattat

SEQ ID NO: 69465 - DNA, 237 bp, Glycine max
  Clone ID: 700840413H1
cggcgactcagatcctctctcgcatctcccccaaaaccctaacccctgcccccttcctcttccgctccctcaccaccgccccctctcgtccttccctccccgcgctctccttcctccgccgtatctccgttgcagccactccctccctccgccgcgtcctcctcccaaacgccccctccctccgcgccctctccacacgcgccaccacctcctccctcaacgaccccaaccctaact

SEQ ID NO: 69466 - DNA, 236 bp, Glycine max
  Clone ID: 700840414H1
cccatggatgtattcgccagtcacctggcggttctcttcgttggcgtagttccccgcttaccccgagcactagagtaggtgaagcacaatatttacagtgtgctgaatcagatagcaagctctttgacattctagaaaatgaaacccctgatatactgaaggaagcttcaactcctatgacgtctgtcaaagtaaattccccaacccaaaaacgagtttctcctccccagagttgt

SEQ ID NO: 69467 - DNA, 242 bp, Glycine max
  Clone ID: 700840415H1
cctaagtgagaaacaaagaaaggaaataattgatctttgaaaatgcagggaggaaagaaagctggagagtccatcaaggaaacagctgcaaacattggtgcttctgccaaggctggcatggagaaaaccaaggccactgtccaggagaaggcagaaagaatgacggcacgtgatccgatgcaaaaggagttggcaacccagaagaaagaggcttagatgagccaggcagagctggacaagca

SEQ ID NO: 69468 - DNA, 117 bp, Glycine max
  Clone ID: 700840416H1
ccgtcaacttactcaaagaggcatgtttggattccggttttttctacgttgtcaatcatggaataagccaggaattcatggacgaggtttttgcgcagagcaagaagttcttctctc

SEQ ID NO: 69469 - DNA, 232 bp, Glycine max
  Clone ID: 700840420H1
cctcgagcgaatcggctcgagttttacaatcctgcaaaaattacgtttctttgtgtgtacatggtgatgataacttaattagtgttcatgaatatgtcaagccttactttagtggttctaaattgaaaagctttctagctggtcataatatcaccattactgatggtattgacaaaactagtgcaactttgcaatttagaaagttagcagattgtgattttctcaagagaaa

SEQ ID NO: 69470 - DNA, 69 bp, Glycine max
  Clone ID: 700840424H1
caatgacgaaattgctgctgacctcaaagagcatgtgatcaagcctgtgatcccagagaagtaccttga

SEQ ID NO: 69471 - DNA, 237 bp, Glycine max
  Clone ID: 700840426H1
ccgagggattgcgctgcgtctcttcctcttctctttcgattcatccctcattcataatcttccaatccaacaacctcagcctcacactcacacatacacacatctgaacgcgtatcgtccctcccatggcttcaaagcgcatcctcaaggagctcaaggacttgcagaaagacccaccaacttcttgcagcgctggtccagtagctgaggacatgttccattggcaagcaacgatta

SEQ ID NO: 69472 - DNA, 233 bp, Glycine max
  Clone ID: 700840427H1
catggtctctatcacctgataccaaaccagttaaccatcaaagctgtgaactctactatcactcatcctcgatgcaatgtaaacttggataggctttgcaggaattcattctccttcaaggttaggtcagctagtcaatctgccccactttttgttgataataagcgtgattctagcgaaaagctgagacagatgcggccaactttatctcggaagttcaattcatatgtgct

SEQ ID NO: 69473 - DNA, 236 bp, Glycine max
  Clone ID: 700840428H1
acaactactacaagtacttccttacaatcaaaaccaacaacaactatggcaagttatcaaaagcactacgatgatcagggtcgcaaggttgacgagtatggcaacgttgagaagcaaaccgacgaatacggcaaccctgttcatgctgctagtgtcacctatgtagccaccagaactgctgctggtggttacagtgatgacattaataagcaacatgataccaccaatgcctacgg

SEQ ID NO: 69474 - DNA, 237 bp, Glycine max
  Clone ID: 700840430H1
ctctagctgttgcaaatttctactatttttcaatggcttctgcagatgttgagttccgttgctttgttggtgggcttgcttgggtcaccggcaacgatgccctcgagaaagccttttcaatctacggcgacatcgttgaatcgaaggttatcaacgaccgtgagactggaaggtccagaggattcggatttgtgaccttcgcctcagagcagtcaatgaaagatgcgatcgcaggaa

SEQ ID NO: 69475 - DNA, 239 bp, Glycine max
  Clone ID: 700840431H1
cactaactgctactcgctcatcccgtggagatttcgctctctcagtttcttttccccaaattggtttttcatctaacaatttactttgcagaaccgtaaccctaaccccttcccctaccttgtaaccttcctttcgatcctacacctcgcagataatgggagaaacaaaggacgaagcatacgaggaagagcttctcgattacgaggaggaagacgaaaaggcccccgactccgccgga

SEQ ID NO: 69476 - DNA, 233 bp, Glycine max
  Clone ID: 700840433H1
tgtaggcaaggtaagtcggcaaaatggatccggaacctcgggaaaatgatttgctctgatggctgggcacgggggtcccagtcccgaacccgtcggctgtcggtggactgctcgagctgctgccgcggcgagagtgggtcgtcgcgtgtcggtcgggggacggattgggaacgggcccttcggggcctcttccccgggcgtcgaacagtcaactcagaactggtacggacaag

SEQ ID NO: 69477 - DNA, 233 bp, Glycine max
  Clone ID: 700840435H1
ataacttgacaaataaaatcaccatgtctatcatcccaaacttgttcggtggtagacgaagcaacgtcttcgacccattctctctggacgtatgggaccctttcgaggggtttccttgttccacaggtcacgtgccttcctctggtggggaaagcagtgccatagccaacactcgcgtagactggaaggagactccggcggctcacgtgttcaacggtgatcttgccgggttg

SEQ ID NO: 69478 - DNA, 232 bp, Glycine max
  Clone ID: 700840436H1
gtccattgtagattgtcatatatagagaagcagaattagaaagaagggtagctaggagactttctgaattgaagccttttttttcattgagtgattgagagcatggagaacatgaagatgaacaaagatgaaaggtttgcacaaaagggtgtcccaatacatagccaggttatgaagatcaggcaagagtcagagaaaattgttgattggtccccgggcaagccagagataa

SEQ ID NO: 69479 - DNA, 202 bp, Glycine max
  Clone ID: 700840437H1
cgaagaagcattatgcaaggtggaaactagtgatccaaatgcggtgtctgcaatcatcaataagtattcagagcaacctttcctaaaagaggatagtgtttatcacaggatggatgtgatcaataagtgcttctctaaaaaggctgttaaggaaatattatcttctctcgaggtggaagctacgagaaaggctgatccgtgg

SEQ ID NO: 69480 - DNA, 235 bp, Glycine max
  Clone ID: 700840438H1
caatcgaccctccatttctgtgaactgagatggctggaggtgttattcggcagttatttaggaggaaactccaatctcattctcctaattcttcttttaagtcattcattatcacaaagacagatggtgctgactctattggcaacaactccttaagagtgcttgcattagttggagctggtgtctcagggtttctaggtgttgcaacaacagcatttgctgatgaagctgagca

SEQ ID NO: 69481 - DNA, 234 bp, Glycine max
  Clone ID: 700840439H1
cccagtaggtgtgggactagacgcatacgaacccacacctgttaccgctcttccttccgacatcgagaacgtccacgccggacactaccattccctcgccctcacttcccacggccacctctgggcctggggcagaaacaacgaggcccaacttggccgcggcccatcctctagagaatcatggcatgagccagaaagagtgaagggattgttagagaatgtgaacgtgtgtgg

SEQ ID NO: 69482 - DNA, 233 bp, Glycine max
  Clone ID: 700840440H1
tggcttatggtgactacctaggcacccagagacgatgacgggtctagtaagcgacgaaatgcttcggggaggtgatgataagcggagatccggggattccctctatagggcaacctttcgaactgctgttgaagccacgggtatgcaatagacaacctggtgaactgaaacttctgagtagccagatgaaaagaatgcgaaagcgattcccgtagtagcgtcgagcgtaatgg

SEQ ID NO: 69483 - DNA, 238 bp, Glycine max
  Clone ID: 700840441H1
gctttgaatgctgcatattaccatgtagttaaccccttgaccaacactgctgttggtgctgaagtgacccatagattctcaactaatgagaacactctcacccttggtacccagcatcagttggatccattgaccacattgaaggcacgtgtgaacaactttggaaggacaagtgctctgatccagcacgagtggcgtcccaaatcgttctttaccatttctggtgaggtagacacca

SEQ ID NO: 69484 - DNA, 240 bp, Glycine max; identical to SEQ ID NO: 69462
  Clone ID: 700840442H1

SEQ ID NO: 69485 - DNA, 221 bp, Glycine max
  Clone ID: 700840443H1
cagaaacatcaaagacagagttgagatcaatatacagtcagttatatcaggatggtatgtgtatggataggcggtcgggtgcatcacatcgctcggcctttgctgcacctggcggctatgctcatttgaatgctcagctcatgtcaatgtcagacgatcttctcctatgtgatctagacacttcatgatgtctaacggtagatggctatgtggccttggca

SEQ ID NO: 69486 - DNA, 239 bp, Glycine max
  Clone ID: 700840446H1
gaaagccaacatgggagagacgcgatgctgcttttcggaagagagatttatattagttgtgcatttctgtgcccatgaaattccattgatgttttagcttcctttgctgacacattttagttgttgtctgttctatgagtgaaacttggatgattttccttatactgtaattgctagtagtctgccataggaatttgtttgtgcctgagaggattgcatgtatgctggtaagtttttgg

SEQ ID NO: 69487 - DNA, 240 bp, Glycine max
  Clone ID: 700840447H1
cgacagtctagcttgattagtggtggacatccttctgcattcaagaagaggatatcaagaaggggaagctatgaggattctcttgaagttgaaagaaagctagaggataattttactacagaagacaattataatgagaatgaggataagaatgatgttggtgacaacacggatgcagaaaaagcaagagatgatgatgatgtagtggatgaccatcaagaggcagcagagtacttacca

SEQ ID NO: 69488 - DNA, 113 bp, Glycine max
  Clone ID: 700840448H1
gtctctatatatacgatccatacctcatcatcatccaactcactcgttgctctctccaaagtcccagcacacccatttccggtctttgtgcttgatgggttgagcctctggca

SEQ ID NO: 69489 - DNA, 236 bp, Glycine max
  Clone ID: 700840449H1
ttttgagggagacaacatgattgagaggtccacaaacctcgactggtacaagggtccaactctgcttgatgcacttgaccagattagtgagcccaagaggccctctgacaaacccctcaggcttccccttcaggatgtgtacaagattggaggtattggaactgtgccagtgggacgtgttgagaccggtgtcttgaagcctggaatggtggtgacttttgcaccaactggactga

SEQ ID NO: 69490 - DNA, 227 bp, Glycine max
  Clone ID: 700840451H1
cccaagcactgggaggaggctcgggactctgaccgcgtgcctgttgaagaatgagccggcgactcataggcagtggcttggttaagggaaaccaccggagccgtagcgaaagcgagtcttcacagggcaattgtcactgcttatggacccgaacctgggtgatctatccatgaccaggatgaagcttgggtgaaactaagtggaggtccgaaccgactgatgttgaa

SEQ ID NO: 69491 - DNA, 238 bp, Glycine max
  Clone ID: 700840456H1
acaagaaacaacttccttataaccaaaaccatgaacaactacggcgaattatcagaagcactacgatgatcagggtcgcaaggtcgacgagtatggcaagcttgagaggcaaactgacgaatatggcaacccggttcatgccactagtgtcacttatgtagccaccaaaagtgttggtggctacaatgatgacgctaagaagcaacatgataggactggtcgctatcccgagaaagac

SEQ ID NO: 69492 - DNA, 237 bp, Glycine max
  Clone ID: 700840457H1
accatctcacattccccgatttccctctttcactgctagcaccggttcgtgttgagcagagagagagagagagatgaacccgctaacactagtgaagcgcactcagaacatcaatgccagagaagctgcactcggcatcggcgagcaagcctcgtggcacaccaagtacaaggattccgcttacgtcttcgtcggtggcatcccctgcgatctcaccgaggatacagcgaggttatt

SEQ ID NO: 69493 - DNA, 238 bp, Glycine max
  Clone ID: 700840458H1
ggttaggtcgctatgcgcctgtgtttgaagtgcatgaggtggatgatgaggttttacccatgttgactctagaggatctcaaggatatggggattagtgctgttgggtcacggagaacaatgtacactgcgcattcagaagcttggaaagggcttctcctgagctgaacttatccgtggtgatgctgccagaggccggatgtagatccgcagctttagcgaattattcagatgcgtgt

SEQ ID NO: 69494 - DNA, 239 bp, Glycine max
  Clone ID: 700840459H1
aaacaaaacaaaaatagaagtgaagccggtgcgcgctgcctgataccatgtgcatgcccatacgtgatcacacatgcagcttttcacacagtaataacggccacagttgccagatgcattccagcaacgccaaagaagcgaaagcgtccttgcgacgacgactgctacaccaagcccgccgcatcacacggtttcatatccgtgatagggaggcgacgcgcgatggacgacgcggtcaa

SEQ ID NO: 69495 - DNA, 249 bp, Glycine max
  Clone ID: 700840460H1
cggcattcggctcatcacgagcaatcggctgagagaattttttcgggactaaacatcgaacaattattaagctactaaaaatggacttaagctgatcttcaggactacaacgaataagcaaagtttacgaggtactacaaacgaacacccacaaaagcagagggaccaaaaagtttataaaccctacttagtagctcattaccttatgtagaataccgtacacgttttacccaagaaactattttgact

SEQ ID NO: 69496 - DNA, 238 bp, Glycine max
  Clone ID: 700840462H1
cggaatcgtgccttctatccctcccttccctcttctacgccaaaaacaataccctttctctctcaattcccaccaagcccctcaacctccatcttccatgctccaactcttcgctctttcccctcaccaccaaaacaacgcgccactcttctctcctcacattcgtggctcagacatcggattgggccaaagaagaagaggaagaagaaagtagagggagaaccaaggcgacaccgcg

SEQ ID NO: 69497 - DNA, 240 bp, Glycine max
  Clone ID: 700840464H1
tagaattcaggggtttagtaaatatgaaccttgaattgaatccgtagtgaagagcattatttgtgtgtgcaagagagcgagggttcttagatatcataaaattatgcctttgtacaatcctaactcatttggtgttaggatttattgattacaactatgaaaggatcttccgggatattcaaaatctattaccatttggatgtttaagtattggaattttagttaattgctgttcatttg

SEQ ID NO: 69498 - DNA, 75 bp, Glycine max
  Clone ID: 700840465H1
gttgtattccttcgtttcaatgaataaataaaatcgtgcttctgcaaaaacaaaacaaaaaaaaaaaaggggggg

SEQ ID NO: 69499 - DNA, 230 bp, Glycine max
  Clone ID: 700840467H1
ccgagggcggtggtatgttgtaagacacctagtattagtgtcactggaattgaaaccccttttggtagccgaatcacctcacctgatctgtaagcataaacaattgtatctccaagccattcagcaccgctacttgtgtgatgaggtcaacatcagaggcgcagacagaggcggtgagtgtaccaggagatgtatcatggatgcgggttttgttgtaattaagcattgag

SEQ ID NO: 69500 - DNA, 232 bp, Glycine max
  Clone ID: 700840468H1
gtccattgtagattgtcatatatagagaagcagcattagaaagaagggtagctaggagactttctgagttgaagccttttgtttcattgagtgattgagagcatggagaacatgaagatgaacaaagatgaaaggtgtgcacaaaagggtgtcccaatacatagccaagttatgaagctcaggcaagagtcagagaaaattggtgattagtccccgggcaagccaaaaataa

SEQ ID NO: 69501 - DNA, 232 bp, Glycine max
  Clone ID: 700840470H1
aggtgctgtagcactgaatgccatagattatgctcaaaaaagcaaagattacgcaggagatgctgcatagaatgtcaaagactatgcaagtgatgcagtgcagaagagtatcgagtagtctggtgatgcttctcataagagcaaagaggcttctgatgatgccagtgtgacggctaagaagatctcagagtatgtcggtgatgctgctcagagatgcactggtgctgctgaa

SEQ ID NO: 69502 - DNA, 231 bp, Glycine max
  Clone ID: 700840474H1
gcgacacgacacaacacaacacaagctttattcttgttcgtcgcttcttctgtacagcacccaagattgaagatgatagaccttgcgcgcgtgcagcaggagcttctggactgcagcaaggacgcggagggatcgggcatcaaagtcagccccaaaaacgacaaccttgttctcttgatcggtaccattcctggcgccgtcggaactccacatgaagggggcattttccag

SEQ ID NO: 69503 - DNA, 235 bp, Glycine max
  Clone ID: 700840475H1
ctttccggaggaaggtcaggagaggtttttggcattcgatgtgatcaacaaggcaaatgtatttataagcactgtcggaactgtcaatgctctgcctttgcttttcattgctgcaatgcttaaaaaaatgtacagcttaagttagtgtcatacattgccctcttgtgaattcttctacatattatgatttctaaggctacatgacaatgtggcctttgtacaattaaggtgcaca

SEQ ID NO: 69504 - DNA, 237 bp, Glycine max
  Clone ID: 700840476H1
attttcttctttccttcacattttctctctcaccattctcttcttcttctccctttcttagattctcccttttttctctttaccctccgccatggctgaggataaggagatgtcttcctctgtcaccaatggcgatgattctctcactggccacatcatatctacaactattggaggcaaaaatggggaacccaaacagactattagttacatggctgaacgggttgtaggaactgg

SEQ ID NO: 69505 - DNA, 238 bp, Glycine max
  Clone ID: 700840477H1
gaaagatggaaatggttgtggtgatgtgattttgcatccttctcttcaaaaaagaattcagcagctgtcatctgcaactgcaaatacaaaagcacatcaagcgccattcagaaacatgcttttttatggccctcctggaataggaaagacaatggctgctagggagttagctcgtaaatctggattagattatgcattaatgactggaggtgatgttgctccactgggatcacaggct

SEQ ID NO: 69506 - DNA, 232 bp, Glycine max
  Clone ID: 700840478H1
aggcaatacttgatctttgaaaatgcagggaggaaagagagctggagagtccatcaaggaaacagctgcaaacattggtgcttctgccaaggctggcatggagaaaaccaaggccactgtccaggagaaggcagaaagaatgacggcacgtgatccgatgcaaaaggagttggcaacccagtagaaagaggcttagatgagccaggcagagctggacaagcaggcggcgcgt

SEQ ID NO: 69507 - DNA, 238 bp, Glycine max
  Clone ID: 700840479H1
cttttccaaacaagattgtttttgatgataagcttgtgttggctaacacacaagaattctttgatggaaattttccagtggattcttggttaccaatttttgtgaattgtctttatcctgtaagtcaattacctccagaagctgtcgttgtaaatgttacatgtggtagtggacgtggtggtttacccaccactgcttggattagttctgcagttaacaatcgctcctcagatatcaa

SEQ ID NO: 69508 - DNA, 234 bp, Glycine max
  Clone ID: 700840481H1
gcttgcacaaaagcaatgactatgtcagttaatccattcccgggttctgatgcatggagtttggaattgctgaagcgtaccggagttcattgtgatatcatttgtgtcactggatggactgccactccaatgcaggatgttcatgttacaattgattggtttattgcctctcaggaatgtgttcccaggacttattgtgtggtaaatccacaaaatcctcatgtgttgaatagg

SEQ ID NO: 69509 - DNA, 218 bp, Glycine max
  Clone ID: 700840485H1
tacaagtacttccttacaatcaaaaccatcaacaactatggcaagttatcaaaagcactacgatgatcagggtcgcaaggttgacgagtatggcaacgttgagaagcaaaccgacgaatacggcaaccctgttcatgctgctagtgtcacctatgtagccaccagaactgctgctggtggttacagtgatgacattaataagcaacatgatactacca

SEQ ID NO: 69510 - DNA, 102 bp, Glycine max
  Clone ID: 700840488H1
gatttatgtgggtgactactgaaattaagtagtacttatatctcatatcccaatcatatagttattttggatttgtcattatattattcagattttattttt

SEQ ID NO: 69511 - DNA, 236 bp, Glycine max
  Clone ID: 700840489H1
gccatgaccgagagagaggtcgagtaagtctttccactaagaagttagagcccacacctggagacatgattcgcaatccaaagcttgtctttgagaaggcggaggagatggctcagacattcagacagagaatagcccaagcagaagctatggctcgtgcagacatgctaaggttccagcctgagagtggattgactatcagcggtgatgggatcctgggaccatttacttcagac

SEQ ID NO: 69512 - DNA, 237 bp, Glycine max
  Clone ID: 700840490H1
ccagaacttagttctctgttgcatcatcatcatcttcattagtgttagccctaaacttcaccttcaaccatgaccacagtgccaccacacagtgtccaagtgcacacaacaacacaccgctacgaagccggcgtcgtcccgccggctcgttttgaggcgccgcgttacgaagccggcatcaaggcgccctcttccatttaccattccgagagaggtccgacgacctctcaggttctc

SEQ ID NO: 69513 - DNA, 238 bp, Glycine max
  Clone ID: 700840491H1
cgagaaaacaagaagtagtgagaagaagggagagaatggaggaaaaggcaaaagctgagcagaagatcgataggtatgaccgagacttggttgaagaagcatcgtcttctttacaatggagccactagacaccctcttattattagcattcgcgatggcaccatcaacactgcttccttcaaaacatggctcgcacaggattacttgttcgttcgggcgtttgtcccatttgtggcta

SEQ ID NO: 69514 - DNA, 237 bp, Glycine max
  Clone ID: 700840492H1
cttgtctgagaaggatttagttggcaaccctgtagcagaacttgacactaaagtatctgaagctggtgtttctgaccaggaaaatcaagtagtgcaagaaaatgcattggaagatatggaacatgaggagaacttgtccgagacgggtttagttggcaacgccgtagcaaaacttagcaccaataaatctgaagctggtgttagtaaccaggaaaaacaagaaaatgcattgaaaga

SEQ ID NO: 69515 - DNA, 233 bp, Glycine max
  Clone ID: 700840493H1
aagaaagatgtttggagagttgaatgtggaatcccttctggatttccgctcacagttatttgtaatagcatttttaatgagatgctcattagatatagctatgacaaattactgcgccaggctaaagctccaagtatgtttgtacaatccttcaaaaattttgtttctttgtgtgtgtatggtgatgataacttaattagtgttcatgaatatgtcatgccttattttagtgg

SEQ ID NO: 69516 - DNA, 246 bp, Glycine max
  Clone ID: 700840501H1
acgaaaccgtgagcgacggggggagtttaaattgctctgtgccgggaaagcagatgctgaataggttgataaaatttgaagagaatggcaagtttaaggagtataagtgtgggagggagggtaataagggtatgggtgcgtttgtgagggagttgaaggaagaatttagtgggttggagtatgtatatgtgtggcatgcgttttgtgggtactggggaggggttaggcctaaggtgccggggatgc

SEQ ID NO: 69517 - DNA, 245 bp, Glycine max
  Clone ID: 700840502H1
agcgaagtaggaggaaggggagaaggagcgagaagggatgaggaggtaggcgaaggcgatagcgaggcttggtgaagtgtctgacagattcgaggcgcagcagctagggcagatggtggatttggagaaacggaggaatgagtttgctaggagacgagaagtgcacaggatggagatgcatatggacacacaggttcagctcgagaggatcaagcgcgcgaaaagatctggctctaacgatatgt

SEQ ID NO: 69518 - DNA, 228 bp, Glycine max
  Clone ID: 700840503H1
aaacaatcaacctcttcagtgatctttgattagtactaagctaaaccatgtcttattccctctaaatcaaaacctttttcttactagctatctcccttttcaaatcatgccacctaacatcaccactgttgttgccaatgtcaccaccgagcaattacccaaggctcgtggaggaagtgggcgtgccttcgtgacctatcttgctggtaacggtgactacgtaaaggg

SEQ ID NO: 69519 - DNA, 240 bp, Glycine max
  Clone ID: 700840504H1
aaagaaaggaaataattgatctttgaaaatgcagggaggaaagaaagctggagagtccatcaacgaaacagctgcaaacattggtgcttctgccaaggctggcatggagaaaaccaaggccactgtccaggagaaggcagatagaatgacggcacgtgatccgatgcaaaaggagttggcaacccagaagaaagatgcaaagatgatccaggcagagctggacaatcacgcggcgcgtca

SEQ ID NO: 69520 - DNA, 149 bp, Glycine max
  Clone ID: 700840505H1
gttctctattttctaatacatgattcagaacataagaaattacaaaaagtaaaataatcttcaggatgcattagaaaatagggaacatattggcagagaaagaaaaggaccacacaacacttgtccaaagaatcgcaaaccaaggtccc

SEQ ID NO: 69521 - DNA, 239 bp, Glycine max
  Clone ID: 700840506H1
atgctcctaatcctaaagagctcatttgcgacgcctatggaaaatgcaaacacaaaatctccgacgccatggagaaggctcaagaggccatccataagaagaaggacaagatttgtaaaactagagagactgtgtatgataaagcccatgacgtccatgaatacgcccaagacactgtagaagcagcaaaggaggatatggccagtaacgtttcaaacgccacagatgcattgaagctt

SEQ ID NO: 69522 - DNA, 239 bp, Glycine max
  Clone ID: 700840508H1
gtaatgtaaccatccatgaccgtaacgttatggctatgtataagagaatttgcaagggtgagtttcggtgtaacaagtggtttacttctgaacttacaagacttttctctaggctactcgatactaaccctcagacaaggatttctattcccgaaatcatagagaatcgctggttcaagaaaggtttcaagcagattaagttttatgtggaggatgatatcgtttgtagaactgatgag

SEQ ID NO: 69523 - DNA, 238 bp, Glycine max
  Clone ID: 700840509H1
ataaaatcaccatgtctatcatcccaaacttgttcggtggtagacgaagcaacgtcttcgacccattctctctggacgtatgggaccctttcgaggggtttcctttttccacaggtcacgtgccttcctctggtggggaaagcagtgccatagccaacactcgcgtggactggaaggagactccggcggctcacgtgttcaacgttgatcttcccgggttgaagaaggaggaagtgaa

SEQ ID NO: 69524 - DNA, 242 bp, Glycine max
  Clone ID: 700840511H1
agaaccagaattatggtaagaaagatggcggaaagcaggtatcccatggttcgcttatctgaaatacctgctaaacaggtggaaaatgataaacctgagaagataaaaattgccataaggcctaggcctaacaaaatcagtttaaatgaagccaatgaagctggcaggaaaagcaatcctcctagaagtgtggaagagagaaaggtggaatatgatcgggcacgagcacgcatttttagtag

SEQ ID NO: 69525 - DNA, 242 bp, Glycine max
  Clone ID: 700840512H1
gaatggagaaagctttaaggccttactttgagcttacaaatgctgtgcggattggagacttggaactgtttaggaatattgcagacaagtttgccactacctttaatgcagacagaacccataatttgattgttcgtttgcggcataatgtcatcaggactggtttacgcaacatcagcatctcatattctcgaatctctctagctgatgttgctaaaaaactgacgctgaactctgcaaat

SEQ ID NO: 69526 - DNA, 245 bp, Glycine max
  Clone ID: 700840515H1
ggaaataattgatctttgaaaatgcagggaggaaagaaagctggagagtccatcaaggaaacagctgcaaacattggtgcttctgccaaggctggcatggagaaaaccaaggccactgtccaggagaaggcagaaagaatgacggcacgtgatccgatgcaaaaggagttggcaacccagaagaaagaggcaaagatgagccaggcagagctgggacaagcaggtggcgcgtcagcataacacgg

SEQ ID NO: 69527 - DNA, 248 bp, Glycine max
  Clone ID: 700840516H1
gcaaaacactccaagacctcaaatccccctccacctcaccccaacaacaacctcaacctccacaaaagaccaagtccttccacacggtggaagagccagacgccaagctcaaccccaagcccgagcccaagcccaatccaggattgaaaaagcccgctgatcagataattaacagtaggcatagttaccgagccagtccgagggaacaagttgaaggagaacatgttcatagttcgggacaggctgga

SEQ ID NO: 69528 - DNA, 243 bp, Glycine max
  Clone ID: 700840517H1
gtcaaagcagatgttgatactgtgaattgtggcatggcatttggtcaagcagcaatgcttctgtcgcttggaacaaagggttatcgtgctgtacagccaaattcatctacaaaattatatctcccaaaagtcaatagatcaagtggtgctgttatagacatgtggattaaggcaaaagagctagaggcagatactgagtattacattgagctgttggcaaaagggacagggatatcaaaggta

SEQ ID NO: 69529 - DNA, 238 bp, Glycine max
  Clone ID: 700840521H1
gagagatccatcgatcaattaatttccaatggccgatcagctcaccgacgaacagatctctgagttcaaggaagcctttagcctcttcgacaaggacggcgatggttgtattaccaccaaggaacttgggactgtgatgcggtcgcttgggcagaacccaactgaggctgagctgcaggacatgataaatgaggttgatgctgatgtcaatggtaccattttatttcccagaattcct

SEQ ID NO: 69530 - DNA, 63 bp, Glycine max
  Clone ID: 700840522H1
aaaaccccttattcagggtcaccgctgatagggatagggataaggttaaggatataccgcaca

SEQ ID NO: 69531 - DNA, 238 bp, Glycine max
  Clone ID: 700840524H1
aggaataggggcaaacagcaagtcctacccctaactctaacttggaatcttcatccatcagattcatccgcaccgctagttatattactggattcggggcagattgcatgtaccgtgtttctccgctttcatttataagatgcacttctggtcatcattttaccaacatgcatgttttgagttgttggtttttgaatataaatggacgccatacggttcattcatctggttgaagaga

SEQ ID NO: 69532 - DNA, 238 bp, Glycine max
  Clone ID: 700840525H1
cttctctgcgccatgactaccctcttgcaagcaaaattgttgtcaaaaatttaccatattctaccggtgagactactttgcagaaggacttatcaaattttggcaacatagctgaagttaaaatcgttaaagatatgaacacaaaaagatctaagggtattgctttcattcaatatacatgtcaagatgatgccatgcttgcactagaaaccatggatcagaaggatttttatggtcg

SEQ ID NO: 69533 - DNA, 240 bp, Glycine max
  Clone ID: 700840526H1
aacgaaagttgggggctcgaagacgatcagataccgtcctagtctcaaccataaacgatgccgaccagggatcagcggatgttgcttttaggactccgctggcaccttatgagaaatcaaagtctttgggttccggggggagtatggtcgcaaggctgaaacttaaaggacttgacggaagggcaccaccaggagtggagcctgcggcttaatttgactcaacacggggaaacttaccag

SEQ ID NO: 69534 - DNA, 241 bp, Glycine max
  Clone ID: 700840527H1
cagtgttactgcgcatccttccgtttctaccaccgactccggggaaggaaagaaggaaggaaggtgtgaacaacaatcccagcccaacacccatgagaaacgagttgttcgtcgttggattcatgttttagctgctcctcactctctcactcgctttttggtctttgtctgctgatgcaaggatgagttcgttctccatcacgcggaaaaagacgccgttccagaagcatagagaagagga

SEQ ID NO: 69535 - DNA, 73 bp, Glycine max
  Clone ID: 700840529H1
ttcactgtctatccgggtactccaccaggcatggcagtttctggagcaacagcttcctccaaactcatacgat

SEQ ID NO: 69536 - DNA, 241 bp, Glycine max
  Clone ID: 700840530H1
cacacacaactacaatgaagaacttcctgataaccagaaccatcaacaactatggcaagatatcagaagcaccacgatgatcagggtcgcaaagtcgacgagtatggcaatgttgagaggcaaactgacgaatatggcaacccggttcatgccagtagtgtcacttatgtagccaccataagtgttggtggctagaatgatgacgctactaagcaacatgatattactggtgtctatgccg

SEQ ID NO: 69537 - DNA, 82 bp, Glycine max
  Clone ID: 700840531H1
ctaagtcttcgcctccgaatgcacaggacgtgatgagatctctgttaagggaatccctgaatgtgactaccgaacaagttag

SEQ ID NO: 69538 - DNA, 246 bp, Glycine max
  Clone ID: 700840532H1
atactcctctgttctctctgtatctcttcaatcttcctgaaaaaaacaaaaacacgataaatcatccaccctctcacattctctctctctctcctgtcaactaatatggcaattgaagaccaagacaacactgtcagagatatcaatccaaagaatatgagaatcatgggtgctggaggccctgatgatgacgacaataggtggccaccgtggttgaagccactgctgaaagagagcttctttgtt

SEQ ID NO: 69539 - DNA, 213 bp, Glycine max
  Clone ID: 700840536H1
ggaaggcatggatgtttgtgttaaaattataagaaacaacaaggactgttttgaccatcgtcttgacgatatcaaagcatctcaagtatgtccataagcgtgatcgtgcagaccagtgtcacagtctacgattatgtagttataactattatcgtgaatactaggtaatagtatgtggcataccaaaagcaagcttgtatgatgatcatgcat

SEQ ID NO: 69540 - DNA, 222 bp, Glycine max
  Clone ID: 700840538H1
gtaaagcttacttcagcacctataattgtctacaagtaattcagcggctgcatactcaccggagacgatgagtcaggtccagccaccgtgtctcagaagccagaaccccatcgtatacggcgacgtactgggtcgtctccggggaccttagctagaagcctgtcgcaccggcactttctgccatgatgcagagcgcgtagactctagtgctcggacaaaccc

SEQ ID NO: 69541 - DNA, 238 bp, Glycine max
  Clone ID: 700840540H1
atcgcaaggaggaaaaacacggacgaaagggcagtgaagacgagaaagagagagagttggcttctgatacagccaggtctggaaatatagttaacgaggacaaagacgttgaagaaggaagacgaggacacgaaagtggtggtggtggtggtgttcagcatgagaggaagtgtgcaacgaaagttgaagacaagtagggttttggggaaaaggctgaactcgagggaataacaatagt

SEQ ID NO: 69542 - DNA, 104 bp, Glycine max
  Clone ID: 700840543H1
aacagatagtatatgtagggagttgcagggattcactaatctgatcgagcgcctatgttacgtaccagctcttgatggcgtcgctcatgcaccctgaatgaggt

SEQ ID NO: 69543 - DNA, 89 bp, Glycine max
  Clone ID: 700840545H1
acaatgttagaggcaatgtgggccataaaatggggcttgttgatcagcttgatcgccccgggccgccgcccgggagtcacctccattcg

SEQ ID NO: 69544 - DNA, 113 bp, Glycine max
  Clone ID: 700840547H1
gtcgcgcgcgcgcgtgcaggctctcggttcgcctctcgcgccataattggtctttgatcatgcacggtggtgggaaagctggagacgccctcggcgtgactgctgcaaacttt

SEQ ID NO: 69545 - DNA, 244 bp, Glycine max
  Clone ID: 700840548H1
acaacccaagacctcaaatcaacctccgcctcaccccaacaacaagctcaacctccacccaagaccaagtccttccacacggtggaatagccagacgccaagctcaggcgcaagcccgagcccaagcccaatccaggattgataaagcccgctgatcagataattaacagtagcatacgttaccgagccagtcacgaggacacatgttgaagggcaacatgttcatagatcgggacacgctggc

SEQ ID NO: 69546 - DNA, 94 bp, Glycine max
  Clone ID: 700840549H1
aagtcgcaattcggttcgacgccaaagcagatgtttagactgtgaattgtggcattgcatgtggtcaggcagcaaggctgctgtcccttggaac

SEQ ID NO: 69547 - DNA, 239 bp, Glycine max
  Clone ID: 700840550H1
gggacgctgggccaaggtgccaggccctgtggcccgtggttttctcgtagtggcggaggtactcttcaccgtcaagctcggcgaagttgttgatgatgaaaccgttgctcttgagcgccaccgtgagaaggggttccaagaaatcacgcgcgtccttgggtagcggctgagttgattgtgatgtggtgacggaaatctggaatgacgaagggaccatcgatgcggtgcgttttgacgga

SEQ ID NO: 69548 - DNA, 237 bp, Glycine max
  Clone ID: 700840551H1
gaataagaggaggaggaagagtagggaggcgagtgaagaggttaagcccgtgggggagaacaggttagccgcggttgaggttgttgaggatgaagaagaaggaagtgatggtttgaggaatttgcttggcgaagagtttgcgaggagcaagtggaggggttccacgaagttgctgcttctggatgaacgctacgcgggtcgcggcatggaggagttgcctgaggcaattaaggtgct

SEQ ID NO: 69549 - DNA, 237 bp, Glycine max
  Clone ID: 700840552H1
aatgagactaaagggaagcactaatttagaatctatccagattataaagaaacctggaggctcattaatggattcattcttagatgaaggattcattcttgacaagaaaattggtattggacaacccaagcggatagagaatgcaaagatactggtggcaaacactgccatggacacagacaaagtgtagatatatggtgcacgtgttcgtgttgattctatggctagagttgctca

SEQ ID NO: 69550 - DNA, 237 bp, Glycine max
  Clone ID: 700840553H1
gagagatccatctatcaattaatttccaatggccgatcagctctgcgacgaccagatctctgagttcaaggaagcctttagcctcttcgacaaggacggcgatggctgtattaccaccaatgaacttgggactgtgatgcggtcgcttgggcagaacccaactgaggctgagctgcaggacatgataaatgaggttgatgctgatgggtatggtaccattgatttcccagaattcct

SEQ ID NO: 69551 - DNA, 238 bp, Glycine max
  Clone ID: 700840555H1
agattccgtccatgtctcacttgagactctcaatgatcgaaagtagcaagccatcatttaaatggcgaagggttttgctcaaagtcagcggagaagcacttgctggagaccactctcagaacattgaccctaagataaccatggccattgcaagggaggtggcagcagtgactcgccttggcattgagggtgcactggtcagttggcgcgggtaacatcttccgtggatcctcctggg

SEQ ID NO: 69552 - DNA, 231 bp, Glycine max
  Clone ID: 700840556H1
cggaacgttgccacaaacgttgttagtcttcagataaacacgtgactatctatctatcaatctccatcgctgagttcaaccgaaccaaactccgaagctatagcacagctccagaccaacgttgaacctgttccagtcccggctctggctccggtagagcacgagccaccgctggctgaggcgccggcgctcgagcagaaagcggtggtggtcggtccacctgttccggca

SEQ ID NO: 69553 - DNA, 241 bp, Glycine max
  Clone ID: 700840557H1
cgctagctagcaagcaagaacagctatggaggcaaagcgatgccatgcactcatgtgcttggcacgtgtatcactcttcctctgcgctctaaccctatccgctgctcacggctgcaccacggttcaagacatcgctagaaagttgaaactcggggacaacgagcttctgcgcacggagatgacgttcaaggtcttcatggagacttacgggcgtagctactccacagaggtagagtatttg

SEQ ID NO: 69554 - DNA, 237 bp, Glycine max
  Clone ID: 700840558H1
catgcatcagataagatcttcactggtggtattgacaatgatgccaagatttgggattcgcgtaaaggggcagttaccatgacacttcaaggtcatcaagacatgattactgatatgcagccgagtcctgatgggtcctaccttcttacaaatggcatggattgcaaactttgcatttgggatatgcgtccgtatgctccgcaaaatcgctgtgtgacggtagctggaagggcatca

SEQ ID NO: 69555 - DNA, 223 bp, Glycine max
  Clone ID: 700840559H1
cgcagtgttactgagcatccttcagtttctaccaccgactccggggaaggcaagatggaacgaaggtgtggactataatgccggctcaacacccatgagagacgtgttgttcgtcgttgcattcatgttgtagctgctcctcactctctcactcgcttcgtggtcatagtctgctagatgcaaggatgagtgcgtcctccatcacgcggcaaaagacgccgtt

SEQ ID NO: 69556 - DNA, 194 bp, Glycine max
  Clone ID: 700840560H1
acgttgaatgctgcatagtaccatgtacttagccccgttgaccaacactgactgtaggctgctgaagtgacccatagattctcagctagtgagaacactctcgcccttggtacccagcatcagtcggatgcattggccacaatggaggcacgtgtgaccaactttagaaggacgagtgctctgatccagcacga

SEQ ID NO: 69557 - DNA, 67 bp, Glycine max
  Clone ID: 700840561H1
aaacgacaccggcgggaccaaatacctcatcaccgtatttgacccttccgaacccgctcccacctcc

SEQ ID NO: 69558 - DNA, 252 bp, Glycine max
  Clone ID: 700839878H1
ggaagtggtgtgaagtccaaagtttcaggaactgaaaaaattagtaatgtgggtgtggaacaggacaagggtgtttctgtgaaggattattttttgacaaactgaggcctggtgatgaagacagggctctctctaaagtgatatcagagactctacataagaaggaagtgcacccagtggaggttactgaggaaggtgtgaggaagatggtttctgatgcagtgcataagagagaggatgagccagagagaa

SEQ ID NO: 69559 - DNA, 254 bp, Glycine max
  Clone ID: 700839881H1
caaaatggctgcagagatggagagggagtcattgataactgaagctcctaatgcaccagttactgcacagagaagggtcagaaatgacttagaaaattctctaccaaaaccatacttgccaagagcattgaaagctcctgatacgggtcacccaaatggaacagcaggccacaggcaccacaacttatctgttcttcagcagcattgtgctttttttgatcaagatgacaatggaatcatttacccttgggaaa

SEQ ID NO: 69560 - DNA, 248 bp, Glycine max
  Clone ID: 700839882H1
ggtgattttgtcattggtgttaagttgacaaccataaacaatatgtgtgcatatgggctcaatcctggtatttcaggttctcgtcttttgggcaccattcctcagtctatttcacagcaaactgtttggcatcaaatggcaacagtgagaacaccattgaattttgattctagcaagcagagcttttgtcaattttctattgaccttcttggtggaggaattttagtggacaaaactggagattggat

SEQ ID NO: 69561 - DNA, 248 bp, Glycine max
  Clone ID: 700839884H1
caacgaaacctccgcggccaacgaggcttcgcagacgcggcagagaaagaagagaaagtgggatcaaccggcggagtcattgatgccagttgggatgacagtccctggagcactccctttgagcaatgccgtgactcttggaggggttgcatttcccgccatggctccggtgatctccggcactcttttgacgaatcctctggcagcttctgctcagcttccgcaacatgcagctgcagctgctgttt

SEQ ID NO: 69562 - DNA, 244 bp, Glycine max
  Clone ID: 700839886H1
gagaatgagtacggtgggagaagggaaggtgagtagtaatggtcatggatgttgcaaatcagggccaggctatgcttccccactggaagccatttctggtcccagagagtctctcatttatgtaacctctgtctacacagggaccggaatagagaagccagactatttggcgacagtggatgtggatccaaactctccaacttattccaaagtcatccataggcttcctgttccttatttaggt

SEQ ID NO: 69563 - DNA, 200 bp, Glycine max
  Clone ID: 700839887H1
ggactatgcaagtgatgctagcgagaggaaccaaggaccatgcaagtgatggtgctcaaaagagcaaagaatatgcgggtgatgtagcacagaatgccaaagattatgctcaaaagagcaaagattatgcgggtgatgctgtacagaatatcaaagattatgcaaatgatgcagcgcacaagagcaaagattatgctggt

SEQ ID NO: 69564 - DNA, 243 bp, Glycine max
  Clone ID: 700839888H1
gtaagcttgcaacctagctaccgtactataacattgattgagtcgtgacgagctagctgcttctggttttcttcgtgtcctcccgtggccccgaatgttagcaatcaattacaaattcaaatatatctctggaaacatggtatttttgggtgttctcttggtggggtttctcttaggtgcttatggggacagtgatggttggatggatgctcatgctaccttctatggagggggcgatgcctc

SEQ ID NO: 69565 - DNA, 243 bp, Glycine max
  Clone ID: 700839889H1
ctcgagccgttctcagagcaggagcaatgtcttccccttatctacctgccacaactgactcacttgctctcgcaactgaggccaaagacccatctgaggccatctccattctttatcgggtgcttgatgatccttcttcttcaccagatgctctgcgtatgaaagagcaagcaatcacaaacctcactaagcttctcactgatgagaataggggagaggatctgcgcagcttcttactcagtt

SEQ ID NO: 69566 - DNA, 242 bp, Glycine max
  Clone ID: 700839890H1
gagaagtacaaggctgaggatgaggagcatcttctcaatctcctccttagaaagccttcctttgtcgttggtaattgtaatcttgatcttctgttgttggatgttactcctctctcccttgggttggagaccgcgggaggagtcatgactgtgttgattcccagaaacacaaccattcccaccaagaaggagcaggtattttcgacctattccgacaaccagcctggtgtgttgattcaggt

SEQ ID NO: 69567 - DNA, 245 bp, Glycine max
  Clone ID: 700839891H1
ctacaagtacttccttacaatcaaaaccaacaacaactatggcaagttatcaaaagcactacgatgatcagggtcgcaaggttgacgagtatggcaacgttgagaagcaaaccgacgaatacggcaaccctgttcatgctgctagtgtcacctatgtagccaccagaactgctgctggtggttacagtgatgacattaataagcaacatgataccaccaatgcctacggcgtagacactggtaga

SEQ ID NO: 69568 - DNA, 245 bp, Glycine max
  Clone ID: 700839892H1
ccgatgcggatgtgattgcggagagcacatttgggccgcggttgatccctatgcgcggaacgaggcgtttaactgctccaatggcgacgtgttcaggtggaagcatctttggaaggtgctagcggaacagtttgggattgaggcgtatgggtttgaggaagtaggtctgagtttgtcggaattgatgaaggatcagggtcctgtttgggatgagattgtgagtgagaatcagcttctgcctacca

SEQ ID NO: 69569 - DNA, 248 bp, Glycine max
  Clone ID: 700839893H1
gggaaaggtaagaaaattgtttttcttactagagttgatccttttccagtagctttactggctgttctttttggtgttaagaatgaaattctgagttctaacgccactaatcctatgctgacgcgacttcttgaaaactgtaagagtctcaaatatctggttgatgagtgtccttttgcatttgtgaactagtatgtaatattttattcacttaaataaagcgcattactatgtgcaatgagtgtgtt

SEQ ID NO: 69570 - DNA, 254 bp, Glycine max
  Clone ID: 700839895H1
gtgcgagtcaacgggcgagtaaacccgtaaggcgcaaggaagctgattggtgggatccccctgtgggttgcaccgccgaccgaccctgatcttctgtgaagggttcgagtgagagcatacctgtcgggacccgaaagatggtgaactatgcctgagcggggcgaagcagcaggaaactctggcggaggcccgcagcgatactgacgtgcaaatcgttcgtctgacttgggtataggggcgaaagactaatcgaa

SEQ ID NO: 69571 - DNA, 253 bp, Glycine max
  Clone ID: 700839896H1
ggaccttcactttctcaagttctcaaccgttcgttttctctctcgttcccctaaccgccgttgacgggacaatctgtttcctccgccgccgtcgctagccgtcgcgtgagcggaccaaggccaccgctccgtcaactcttccaagaccaaattcaccaactcggtttcgccgatggccggttattcctccggcgccgcgaatacggcgaaaaccatcgcgtggaggccgttaccgatgaatcaccgactacat

SEQ ID NO: 69572 - DNA, 272 bp, Glycine max
  Clone ID: 700839901H1
tattggcattgggtaacattgttgctcttcctctctcaaacttgaaaccttctctaaagttatcttcttcttcatcctcttgttgtatcaccaaactcttccccatttcccgcatcaatgtctctcccacctcggtattagttcgagcctcttcctcatcctctttcgggtctcgcctcgaagacaccatcaagaagaccgtagctgagaacccagtcgtcgtttattccaaaacctggtgcacctattcttccgaggtcaaaatcctcttc

SEQ ID NO: 69573 - DNA, 257 bp, Glycine max
  Clone ID: 700839902H1
ataacagccaataatctgtatgtaataagagggggcctatgacaatttgttaagtagacagatttttcagattaaggaagccgccttttatattttttttggcatcattctttcttgcccatgttgttccttttctaaagtatcacttatcattacttgttgcttttaacaaaattattggtgcattttatttgtttacaatgtgcttctacaataacttacaacttcaatatttgtgattgctatgatacttaatg

SEQ ID NO: 69574 - DNA, 242 bp, Glycine max
  Clone ID: 700839904H1
gctcaatccagcgtcggcgtcgtcgaacagtggggtcgcttccaccgcctcgcccaacccggcttccactttttcaaccctctcgccggcgaatgcctctccggtatcctctccaccaggatctcctccctcgatgtccgcatcgaaaccaaaaccaaggacaatgtgtttgtgcagttgctgtgttcgattcaataccgagtgattaaggaaaacgctgatgatgctttctatgagttgca

SEQ ID NO: 69575 - DNA, 268 bp, Glycine max
  Clone ID: 700839905H1
ggatggtcatggaggaacacgactcggagaaggtggagatcgtcctcaaaaccattggtcctgcacgcccctctcgccttctcgtttcttcttccatcaaggtgcgtgatttgaggagattaattgctgggaatgataatttgcaaattgacaacttgagtcttattttacgcggaagtgcactgtatgacatgaaaaatggagatgatgtatacatacaacttaatgatggagattgcttgattgttgctgtcaaaccaaagccaca

SEQ ID NO: 69576 - DNA, 172 bp, Glycine max
  unsure (1)..(172): unsure at all n locations
  Clone ID: 700839906H1
agctaggaggctattcatccagcctttctacttcgaatgtgattgggtcacgctccttcaggcttgatcagtctggcgaacagccacggttgccttgaatccaagagctgctgcctttgcaaagcggagccagagcttcattgagcgtactnnggtgaaccatcattctgag

SEQ ID NO: 69577 - DNA, 107 bp, Glycine max
  Clone ID: 700839908H1
agacttgtaaatatgatttaggtgctggttcaaccacaagaggtcagtctttcactccatgaccccaagacttgtaaatatgattttagtgctcctatatgccatgg

SEQ ID NO: 69578 - DNA, 261 bp, Glycine max
  Clone ID: 700839910H1
agattgacgatcaaccagaggtgggcagtgatgaggattttagtgatgatggcggcaaacatgcccttgaagaggtaggatcagttgatgaggaatcaacaaaatccgacgaagagtatgatgatcttgcgatgcaagacgtgctggaaactggatattggtcagatgatgaagagtataggatcagggtagatggtgtttccggtgaacttggaactaaaatgcatggggggtacaagtatcgtcggaactggatatttc

SEQ ID NO: 69579 - DNA, 247 bp, Glycine max
  Clone ID: 700839911H1
gcattagtgactgggggtgactctgggattggacgagcggtgtgtaacttgtatgccttagaaggtgctaccgtgggcttcacatatgtgaaggggcatgaggacaaggacgcgagggacacgttggaaatgatcaagagggctaagactgcggatgctaaagatccaatggcggtaccagctgatttgggttacgacgagacttgcaagagagtggttgatgaggttcgtgaatgcctatggttgt

SEQ ID NO: 69580 - DNA, 268 bp, Glycine max
  Clone ID: 700839912H1
aaaagatcttccttacaaaagtttgttttcaaagtgtgttttgtttcccaaatcctactcttgtgaccacaacccttcctcctctttcttttgaaacctctttttttctattccccaaccaaacaagcaaacgctactcactcatcatcactgagatcatggctcctaatatcaccactgtcaaaaccaccatcaccgacgctcaagccaaggtcgccaccgatcatggtcgtgcctacgtcaccttcctcgccggaaacggtgacta

SEQ ID NO: 69581 - DNA, 265 bp, Glycine max
  Clone ID: 700839913H1
cggcgacgttttgagcacttccgtcatgcgggagaagaacactgggaagccaaggggctttggtttcgtcgtttttgcggatcctaacattctagatagggttttggaagacaaacatgtcatagacggcagaacggttgatgccaaaaaggccttctcaagagaggatcaacaaatttctgtcacttccagaggtggaaattccaattctggcatgaattctgaaaatggaggaaacatcaggactaaaaagatatttgttgga

SEQ ID NO: 69582 - DNA, 266 bp, Glycine max
  Clone ID: 700839914H1
attcccaattacccttcccaattttcaccaaaacctaatactcccacaccaatcttcgatcatggacgccgattcacaacctcaacaactcgaagagagaacagaggagcaagaactgaagtacctggaattcgtgcaattcgcgaccatacaggctctgatgcgctgcgccatcctctactcatacgccaaggagcgcgcgggtcctctgaagcccggtgtcgacaccgtggaggaggccgtgaagaccgtcgtggctccggtct

SEQ ID NO: 69583 - DNA, 278 bp, Glycine max
  Clone ID: 700839918H1
tcggtcgaggcaacagtgagaacaccattgaattttgattctagcaagcagagcttttgtcaattttctattgaccttctcggtggaggaattttagtggacaaaactcgagattggatcacacttatacaaaattctccaattagtaacttgttgagagttctgcttggaagaaaggctgtttaatggtcaagattgtgatgtctgggaatgcagcagtcaaaaggagtgattgggcctcattggtacaagtgtttttaacaaacagcaacagtaca

SEQ ID NO: 69584 - DNA, 276 bp, Glycine max
  Clone ID: 700839919H1
tcggctcgagcaacaactatggcaagttatcaaaagcactacgatgatcagggtcgcaaggttgacgagtatggcaacgttgagaagcaaaccgacgaatacggcaaccctgttcatgctgctagtgtcacctatgtagccaccagaactgctgctggtggttacagtgatgacattaataagcaacatgataccaccaatgcctacggcgtagacactggtagacagcattctagtggtggctacgatggtgacactaataaacatcatggaact

SEQ ID NO: 69585 - DNA, 279 bp, Glycine max
  Clone ID: 700839920H1
aattcggtctcgagaaacaatcaacaatagcttgctagctactcctgttgctgtgagaaccgttgatgtagatgctttgcaagcaagatttagagactccaacaataaaagccatgcttaacacctaccatgcctccaaactctcatcaaaccagtgtggttctagccttgtgcaaacaatagatgcacctttacctctcgtatggtccctcataaggcgctttgagtatccacaagggtacaagctctttgtgaagaagtgcaacttcttgatgggga

SEQ ID NO: 69586 - DNA, 263 bp, Glycine max
  Clone ID: 700839921H1
gcggatgttgacgcaatgtgatttctgcccagtgctctgaatgtcaaagtgaagaaattcaaccaagcgcgggtaaacggcgggagtaactatgactctcttaaggtagccaaatgcctcgtcatctaattagtgacgcgcatgaatggattaacgagattcccactgtccctgtctactatccagcgaaaccacagccaagggaacgggcttggcggaatcagcggggaaagaagaccctgttgagcttgactctagtccga

SEQ ID NO: 69587 - DNA, 146 bp, Glycine max
  Clone ID: 700839923H1
attctcagcaatatgaaccttgctatggtgtttgaatttttaaactaattggtctggttcacttcatgttaacaatatgtggtcctcttctgcgtatttgtgagcagaacagaaaagagaagaagaaatggtgtcaggcgtgagag

SEQ ID NO: 69588 - DNA, 259 bp, Glycine max
  Clone ID: 700839926H1
tttccgttcatttcctctgttttttcttcaaatccattgtttcgtggaaatcccgaaatttaaccatgcttctccgaaccgccgcctccgccgcttctgcttcgtccctctccctcttcagccctacctccgaacctctccgttcggttcccgctcgtggattggtggttcgcgccgcgaaaggatccacgaaccaccgcgccctaaccggcgtgatctttgaaccgttcgaagaggtgaagaaggagctcgatctcgt

SEQ ID NO: 69589 - DNA, 255 bp, Glycine max
  Clone ID: 700839927H1
cgagccgctcgagccgctcgagccgcgacgctcagctacgattccgttgcgggaggtagtcgctctgacggttacgtttaagacgagaacacgccggtgaaagcggcggttaacaacaacgacgacgacgacgacgaagcagttggcgttggcgttctctctccgagcctgcagaggaaagactcctcggacttcgcgttcgcagatgagaacgagaaaccgctggtttccgccagattcagccaccgcaaatcc

SEQ ID NO: 69590 - DNA, 256 bp, Glycine max
  Clone ID: 700839929H1
gatgcatcagataagatcttcactggtggtattgacaatgatgtcaagatttgggatttgcgtaaaggggaagttaccatgacacttcaaggtcatcaagacatgattactgatatgcagctgagtcctgatgggtcctaccttcttacaaatggcatggattgcaaactttgcatttgggatatgcgtccgtatgctccgcaaaatcgctgtgtgaaggtgttggaagggcatcaacacaactttgaaaagaact

SEQ ID NO: 69591 - DNA, 240 bp, Glycine max
  Clone ID: 700839930H1
tcggctcgaggtgactcgttcttcttcgtcgttatcttcttcttttgttgtttgtgtgtttgttttttctctcacctgaaaatgtcttgctgcggtggtaactgtggttgcggaagcgcctgcaagtgcggcaacggctgcggaggctgcaagatgtacccagacttgagctacaccgagtcaaccaccaccgagaccttggtcatgggagtggcaccagttaaggctcaattcgagagt

SEQ ID NO: 69592 - DNA, 264 bp, Glycine max
  Clone ID: 700839931H1
gctcgagcacaactactacaagtacttccttacaatcaaaaccaacaacaactatggcaagttatcaaaagcactacgatgatcagggtcgcaaggttgacgagtatggcaacgttgagaagcaaaccgacgaatacggcaaccctgttcatgctgctagtgtcacctatgtagccaccagaactgctgctggtggttacagtgatgacattaataagcaacatgataccaccaatgcctacggcgtagacactggtagacagc

SEQ ID NO: 69593 - DNA, 261 bp, Glycine max
  Clone ID: 700839933H1
atcagaattctcaacctcaaggttcacagaatgagaatgatccaaataatacaactaattttgttggtaatttggatcctaatgtcactgatgatcatctgaggcaagttttcagccagtatggagaattagtgcatgtgaagattccagcaggcaagcgatgtgggtttgtccaattcgcagacaggagctgtgccgaagaggcacttcgggtgttgaatgggaccctgttgggtggtcaaaatgttcgtctttcatggg

SEQ ID NO: 69594 - DNA, 236 bp, Glycine max
  Clone ID: 700839934H1
aaattgaaaagctttctagctggtcataatatcaccattactgatggtattgacaaaactagtgcaactttgcaatttagaaagttagcagattgtgattttctcaagagaaactttaatcagatgtctaatgttttgtgggtggctcctgaggacaaggcgagtttatggtcacaacttcattatgtttcgtgtaataatctggaaatgcaagaagcttatcttgtcaatctcgt

SEQ ID NO: 69595 - DNA, 259 bp, Glycine max
  Clone ID: 700839935H1
cgaggacaaggaaaggttagagttgtgaactgccaagggaatgcagtgttcgacggtgagcttaggaggggacaattgctggtggtaccacagaacttcgtggtggcggagcaagccggagaacaaggattcgaatacatagtattcaagacacaccacaacgcagtcactagctacttgaaggatgtgtttagggcaattccctcagaggttcttgcccattcttacaaccttcgacagagtcaagtgtctgagctta

SEQ ID NO: 69596 - DNA, 255 bp, Glycine max
  Clone ID: 700839936H1
taaagttggggtggacagaagctgctctagttgcaggagcaagggatgttggtctttcaccatctatcgttggatctttgcccagaaaggaagcaacactggtcgagtatttcatggacggctgcttacaaagacttgttgataaaattgactcagatgagagtttaaaaaatttgacaccaagtgactgcatctctaagcttatcagatttcgtttagaaatgcaagctccatatatatcaacaggccccagct

SEQ ID NO: 69597 - DNA, 257 bp, Glycine max
  Clone ID: 700839938H1
cctctcttaattcataattcctcaccttcaaatctccattctgcttcattttctgcaaagaacaaacccctttctgaagaaagaatatagtcttcagctggacaaggatcatttattttgaaagacaagtttgtgtgacaatcttatagttctaagaagggtgcaagtgagagctttgctgtgatggcaacccgtagatattcttttggaagggctgatgaggccactcatccagactccatgagggccactttggc

SEQ ID NO: 69598 - DNA, 254 bp, Glycine max
  Clone ID: 700839939H1
tggagataaggtggtggtgaaagtggaagagagtcgaccaggggcaattgcggaaacactgaaagcagcggatcagattgcgggacagaccttcaacgatgtgggacgcttcgatgaagaagagggtgtcgtcaatgtggagcgccgcaagaaataaaataaaacgtcgtctatgatacaaatatagacgcatttatattatagtatattatcatgatgtatgttgtttactttttggtttgcttcctttacaa

SEQ ID NO: 69599 - DNA, 252 bp, Glycine max
  Clone ID: 700839942H1
gacagattttcacatgtgaaaaaatatgaggttgaatttaataaggctgcacagtctttaacagatgctgtgattccaaccactcagaagaaaactgccttgaatagattggttaaggataatgttgcactaatagttgttttagaagcaaaagttaacaatcagcctgttgataatccagggaaaagacagcttctttgtgtggcaaatacacatgtaaatgttcaccatgatttaaaggatgtcaaactg

SEQ ID NO: 69600 - DNA, 120 bp, Glycine max
  Clone ID: 700839943H1
attttgttctctatatacaccctttaacctatctcttcttgtcacatagcatagctttgaatacaaaaccaagtgatgttgcaatcgcataataataaccatccacagtgtattgagaga

SEQ ID NO: 69601 - DNA, 259 bp, Glycine max
  Clone ID: 700839944H1
cggctcgagataacttccatcttcgccgaatcacaactttcaccaccgtcaccggcaccgatcaccgccctacgacaaccgtgaaggcaagacacttggacatctgaatcattggtataaaatggtttcgtttgaaatgaatgatcggaagaagattggattaggcttaacgggatttggtatatttttctcattccttggccttatcttcttctttgacaagggattgctagcaatgggaaatatactctttgtttct

SEQ ID NO: 69602 - DNA, 241 bp, Glycine max
  Clone ID: 700839945H1
ctctctctctttctctttctcactctcctctgatatttctatattttggtgctctgtgtctctacgatctggatccaacggtccaaaatgttcggggcttgtgctgcttgttttcccaggttttagagctccaaaccttcagatccacctcattcgtctccagatcttccttccttgataacgttttcgggttcgagaaggcacttgtttgtttgtcgtacgaaatggagactaaaccgag

SEQ ID NO: 69603 - DNA, 249 bp, Glycine max
  Clone ID: 700839946H1
cgagccgctcgagccgcaaggatggcaatttgtaagaaagatatttggagagttgaatgtggaatcacttctggatttccgctcacagttatttgcaatagcatttttaatgagatgctcattagatatagctatgaaaaattattgcgccaggctaaagctccaagtatgtttttacaatccttcaaaaattttgtttctttgtgtgtgtatggtgatgataacttaattagtgttcatgaatatgtc

SEQ ID NO: 69604 - DNA, 255 bp, Glycine max
  Clone ID: 700839947H1
atcgtgttgggtggccatggattctctactggcgaactatgcctcttcagatgaagaagaagatcaacagccatccccaccaaaaacgacgacgttttcctcccttcctcaacccaaactttctctgtttcaatcccttcctcaacccaaatcttctctgtttcaatcccttcctccacccaaacaaccttccaccgaaagctcttccctccctaaccctaaccctaaccctgaccctaaaccccaaatcgaaaa

SEQ ID NO: 69605 - DNA, 273 bp, Glycine max
  Clone ID: 700839948H1
cgagtgaggggggacagcgtaagtgagcgaatgtgtgtaagcccagtcaaacatgactgttctaggcggggcgggccacccaccttcgaatggtgttggtcctacggaccgtgaatggattcgcctctggcctctgggcacgtcggaaccgcatgagttcaccggggtggagcacagtccgccaaaatcggcataggttacgtgctattgatggaacatggtaagcctatctttctccatatggaagtgctgcgggcacatagagatgtgggt

SEQ ID NO: 69606 - DNA, 252 bp, Glycine max
  Clone ID: 700839949H1
tgcaaattgacacataaggttattccagagagaatgccagattgttcttatttcttgcaaggcttatgctcaaatagaaattgtccatatagacatgtcaatgtgaaccccaaggcatctatttgtgaaggatttctcaaggggtattgtgctgatgggaatgagtgtcggaagaagcacagctatgtctgtcctacttttgaagcaacaggaacctgtactcaaggaaccggatgcaaacttcatcacccc

SEQ ID NO: 69607 - DNA, 251 bp, Glycine max
  Clone ID: 700839950H1
tactacaagtacttccttacaatcaaaaccaacaacaactatggcaagttatcaaaagcactacgatgatcagggtcgcaaggttgacgagtatggcaacgttgagaagcaaaccgacgaatacggcaaccctgttcatgctgctagtgtcacctatgtagccaccagaactgctgctggtggttacagtgatgacattaataagcaacatgataccaccaatgcctacggcgtagacactggtagacagc

SEQ ID NO: 69608 - DNA, 248 bp, Glycine max
  Clone ID: 700839953H1
aattttagtggacaaaactggagattggatcacacttatacaaaattctccaattagtaacttgttgagagttgctgcttggaagaaaggctgtttaatggttaagattgtgatgtctgggaatgcagcagtcaaaaggagtgattgggcctcattggtacaagtgtttttaacaaacagcaacagtacagagcattttgatgcatgtaagtggacaaaatcggaaccacattcctgggaattgatct

SEQ ID NO: 69609 - DNA, 248 bp, Glycine max
  Clone ID: 700839954H1
aagtacttggattttggtcaagccctttcgttcatagagtgatatgggctctaaagttgaagaacattagttatgagtacatagaggttgataggttcaacaaaagtgagctacttcttcaatccaatccagtttacaagaaagtccctgtgcttattcatggaggcaaagccattgcagagtctcttgtcattcttgaatacatcgaagaaacgtggccagagaaccacccattgctgccaaaagac

SEQ ID NO: 69610 - DNA, 247 bp, Glycine max
  Clone ID: 700839956H1
agaaaggaaataattgatctttgaaaatgcagggaggaaagaaagctggagagtccatcaaggaaacagctgcaaacattggtgcttctgccaaggctggcatggagaaaaccaaggccactgtccaggagaaggcagaaagaatgacggcacgtgatccgatgcaaaaggagttggcaacccagaagaaagaggcaaagatgagccaggcagagctggacaagcaggcggcgcgtcagcataacac

SEQ ID NO: 69611 - DNA, 240 bp, Glycine max
  Clone ID: 700839957H1
attttcttctttccttcacattttctctctcaccattctcttcttcttctccctttcttagattctcccttttttctctttaccctccgccatggctgaggataaggagatgtcttcctctgtcaccaatggcgatgattctctcactggccacatcatatctacaactattggaggcaaaaatggggaacccaaacagactattagttacatggctgaacgggttgtaggaactggatc

SEQ ID NO: 69612 - DNA, 244 bp, Glycine max
  Clone ID: 700839958H1
catctctctgctctaaacgacaccgttttagtcctctcctcaagtcatggccacactcaagagcctctgcttcagaggaactgcctttcccgtttgcccctccaatgtcaccaacaatagaaactccaggagctcatattggaggcctgcacaagcagccgtgaagcccaatttccatctcccaatgcgcagttttgagttaaaaaataggacttctccagaggacataaaggctctgagattg

SEQ ID NO: 69613 - DNA, 130 bp, Glycine max
  Clone ID: 700839960H1
gttcagtgtgtcgtttaaaaatgtcgcagttgctggataaagccaagaacttcgtgtcggagaaggtaaatgatatggccaagccggagggacgtgtcactgacgtggacttcaagcgcgtgagctaaga

SEQ ID NO: 69614 - DNA, 212 bp, Glycine max
  Clone ID: 700839961H1
cggctcgaggtacggaattgaaagctgggcgagagggagtcgctataggggacaatataggcaagggttgaggcacggttatggggtttataggttctacactggggattcttattcaggagagtggtgtaacggtcagagccatggcgtgggtcttcaaacttgctccgatgctagctgttatattggtcaatttaagtatggcgtcaaac

SEQ ID NO: 69615 - DNA, 246 bp, Glycine max
  Clone ID: 700839962H1
tcgagccgaatcggctcgagccataaccatgtcagacgaggagcaccacttcgagtcaagcggctgatgctggagcatcgaagacatttccccagcaagctggaaccatccgcaaaaacggttacattgtcatcaagaacaggccatgcaaggttgtggaggtttcaacttccaaaactggcaagcatggacacgcaaagtgtcactttgttgcaattgacatcttcactgggaaaaagcttgagg

SEQ ID NO: 69616 - DNA, 245 bp, Glycine max
  Clone ID: 700839963H1
aagaggagaaacaaggaagaacaagagagaaagtagaggcagagaaagcaagatcaatggagaaaactagagatgaagctaaaggaagagaacaagctgaaaccaaaggtcaaaccaagaagggtggtggtgaggaacagggaagaagaagagaagaaataggagaagaagataaacaatgccagcctcgaaggatttctaaatgcagagctgtagctgaagagaaagttaaggagagataggag

SEQ ID NO: 69617 - DNA, 251 bp, Glycine max
  Clone ID: 700839964H1
cctccagcaactcgaggacggtgagattcggtgcgcccttcaatccgcatctggtcaagtccgtctattccttcaattctctaaacggcaaggactctttcagcacgctctacaaagaggaaaccgacgccgatcagtacaacctcgtcttcgccaactgccactggcagcaactcaaggtgacaatggacgttaaatctgccatgtacaacctagaagggaatagcaacgtccgcgattacctctctgcg

SEQ ID NO: 69618 - DNA, 253 bp, Glycine max
  Clone ID: 700839965H1
accaaaacagtaaagctaacttcaacacctttaattttctaaaagtaattcagcggttgaataccaagcggagaagatgagtcaggagcagccacggcgtcccaaaggccaaaaccccatcaaatacggcgacgtttttgtcgtctccggcgaccttgcacagaagcccgtcgcaccggaagatgctgccatgatgcaaagcgcggaaactcgagtgctcggacaaacccaacccggcggagcagcttccgtc

SEQ ID NO: 69619 - DNA, 248 bp, Glycine max
  Clone ID: 700839966H1
ttatgactcctctgttattgaggcttatcccagaaaattaagggatgttgagaatatgggtgtgtgtgaaaggttcaaagctgtagccacagcccccttgctgcaaaaggtagatgctgttgcttacccacaaaatattatgggtgaaaaatgcatgcatacttcatatactaatggtgccaaccaatattatgaaacaggaaaggagaatccttgtaatgtttcaacacactttcttgagagaattg

SEQ ID NO: 69620 - DNA, 51 bp, Glycine max
  Clone ID: 700839967H1
gctcaccctctcacgcgcccgcgatctccccaaccctttctcccaacccaa

SEQ ID NO: 69621 - DNA, 245 bp, Glycine max
  Clone ID: 700839968H1
gtttatggtcacaacttcattatgtttcgtgtaataatctggaaatgcaagaagcttatcttgtcaatctcgtaaatgtgttacgagaattgtatttgcacagtccagaggaagctcgccaattgagaaggaaagctctctctcgtattgaatggctgcaaaaagctgatgtgcctaccatagcacagattgaagagttccattcgatgcagaggatgatgaatgctcctgattcaaatgataat

SEQ ID NO: 69622 - DNA, 241 bp, Glycine max
  Clone ID: 700839969H1
cttttctctctctagaattctcagatttgcggggcgagatgatgcagcagccaggacccggcatggcacctcccaccatgggccagcagccgcagcaacagtaccagcagcagcctccgccgcagcagcaacaaccttacgtcatgatgccgccgcagcatcaggcgccgcagcctatgtgggccccatccgcccagcctccgctgccgcagcagcctgctagcgccgacgaggtccgaac

SEQ ID NO: 69623 - DNA, 243 bp, Glycine max
  Clone ID: 700839970H1
aaaacaatcaacaatagcttgctagctactcctgttgctgtgagaaccgttgatgtagatgctttgcaagcaagatttagagactccaacaataaaagccatgcttaacacctaccatgcctccaaactctcatcaaaccagtgtggttctagccttgtgcaaacaatagatgcacctttacctctcgtatggtccctcataaggcgctttgagtatccacaagggtacaagctctttgtgaa

SEQ ID NO: 69624 - DNA, 105 bp, Glycine max
  Clone ID: 700839972H1
caagtacttccttacaatcaaaaccaacaacaactatggcaagttatcaaaagcactacgatgatcagggtcgcaaggttgacgagtatggcaacgttgagaagc

SEQ ID NO: 69625 - DNA, 123 bp, Glycine max
  Clone ID: 700839973H1
gttccgcacccattatccctggcaagtgtaggttttgctaaccgaacctcctccatctccagatccactctcaaatgctgtgctcaatctccttctccttcactagttgacaacggccagaag

SEQ ID NO: 69626 - DNA, 235 bp, Glycine max
  Clone ID: 700839974H1
gttggattgagttaccccactctacctaattggttcccttctctcctttttcctatctacatacacaatctacacaaagccgtttggggattttcgcccagaacatggtcagagcggcggacatcaggcgctggaccccaccgccgtccacggcgtcacgcagttctccgatctcaccgaggacgagtttgagaagctctacactggcgtcaatggcggcttcccgtcatcgaat

SEQ ID NO: 69627 - DNA, 65 bp, Glycine max
  Clone ID: 700839976H1
caacgctctctcttcagcctccattctacgctctcccaaccgccaggtacgtaccaacgcaacgc

SEQ ID NO: 69628 - DNA, 69 bp, Glycine max
  Clone ID: 700839977H1
ctgcaattcactctgtacaattcttcgttcgttctctgcagttatatcctttttgagcttcaatggcgg

SEQ ID NO: 69629 - DNA, 78 bp, Glycine max
  Clone ID: 700839978H1
caattgaccacaaggcattgcatgataccttttctacatttggaaatatcctttcgtgcaaggtagctacggattcat

SEQ ID NO: 69630 - DNA, 238 bp, Glycine max
  Clone ID: 700839979H1
atcccggggaagttgtgaagcctgattcatacaaggctataaatgatgagggaatgcccatgtatcagaggccattcatgaaggggaaactttacattcacttcactgtggagtttccagattctctaaaccctgatcaagttaaggccttggaggctgttctgccaccaaagccttcttcacaattgacagacatggagctggatgaatgtgaggaaactacactccatgatgtcaa

SEQ ID NO: 69631 - DNA, 241 bp, Glycine max
  Clone ID: 700839980H1
gtggaagggaccaaggccgccgcccatgttgtcgagggagcggccgggtatgccggacataaggccgcggacttgcttcgatgtcggccggtgctgttaaagggctggctgcttctgctggtgagactgctaaggaatacaccgcaaagaagaaagaggaggcacagcgggaattggaggccaaaaaaaccatctcaacctcaggaagctgaagagaggccatcagaaggaattggcgaaa

SEQ ID NO: 69632 - DNA, 243 bp, Glycine max
  Clone ID: 700839982H1
acacaactactacaagtacttccttacaatcaaaaccaacaacaactatggcaagttatcaaaagcactacgatgatcagggtcgcaaggttgacgagtatggcaacgttgagaagcaaaccgacgaatacggcaaccctgttcatgctgctagtgtcacctatgtagccaccagaactgctgctggtggttacagtgatgacattaataagcaacatgataccaccaatgcctacggcgtag

SEQ ID NO: 69633 - DNA, 240 bp, Glycine max
  Clone ID: 700839983H1
attcctcccaagtttatcaaactgttcccaagcttttcgtgttcgaatcttcttcttccttttttgtccctttgaaaagctaaggaattgctgaattggggtattacatgaaaccttctgcaagtggttcataagtttcctcttctctgttcttcttagaacaaataatcaaatagaaccaccttgaagttgagacaagagtaatggcagccctatagtaattagacaatatcaggacaa

SEQ ID NO: 69634 - DNA, 99 bp, Glycine max
  Clone ID: 700839987H1
gtctttgattacgagagagagagaacaaaacaatcaacacaatggcttctgagcaaatgcctcgcagagagaacaacagcaatagggtgatagagagag

SEQ ID NO: 69635 - DNA, 133 bp, Glycine max
  Clone ID: 700839988H1
gtatgatatagaaagagagagaagaagaaaagaagaacaaagatgcaatcctcaaaggagaagatgaaaaacatggcaagtgctgccaaggaacaagtcgacatctataaagccaaaatagacgagaaggcag

SEQ ID NO: 69636 - DNA, 119 bp, Glycine max
  Clone ID: 700839989H1
ccctccaaagaaataacaatgatggaaacatcatcatggtaacggcgcctatcaccctgtggagggaaggatatggagattctgtgtataaataagtatactgaaaatcatatatatta

SEQ ID NO: 69637 - DNA, 230 bp, Glycine max
  Clone ID: 700839993H1
aaagctaacttcaacacctttaattttctaaaagtaattcagcggctgaataccaagcggagaagatgagtcaggagcagccacggcgtcccaaaggccaaaaccccatcaaatacggcgacgtttttgtcgtctccggcgaccttgcacagaagcccgtcgcaccggaagatgctgccatgatgcaaagcgcggaaactcgagtgctcggacaaacccaacccggcgga

SEQ ID NO: 69638 - DNA, 236 bp, Glycine max
  Clone ID: 700839995H1
atctgccttctgcctcgcttgccagatctcttctctctgatggggggttcggtggtggaggacaaccacgacctcgaccacgacctcgacctcgacgatactcccttagcatctgcctcttctaaatcccaccagcaattccatagcttcgatttcgaggatacaagtgttctagatttgcggcgctcatccatctttaacataacacgtatgagcaggagtatttattttgtctt

SEQ ID NO: 69639 - DNA, 241 bp, Glycine max
  Clone ID: 700840003H1
cagtttggagagattcaggaaaaagttgtattgaaattttcacaagaggaatttcttacagcttggtcaactcaggtgcgtcctgcaacaactctattggctgatgggtgtccatatttgtatgctatggtgcatgatagttcagtgtctacaataccaggtgattttgtcattggtgttaagttgacaaccataaacaatatgtgtgtatatgggctcaatcctggtatttcaggttctc

SEQ ID NO: 69640 - DNA, 239 bp, Glycine max
  Clone ID: 700840004H1
ccgttttccatttctgttctcactcgccaacgccgcttcctttccgtttcttctttaaccgctgaccatcacaacctctctgatttcggagatggtgacagcgttgcaatttcaaacgaaggtttgaagatgcttctcaaagggatgacttatccagaacttgaaaaatgggttcaatcacatggatacaggcctgggcaggctatgatgttatggaagcgaatgtatggaaacaacat

SEQ ID NO: 69641 - DNA, 230 bp, Glycine max
  Clone ID: 700840005H1
attctcttctgcgttcttcccaccaacatcgaaaatctgtccaccgacttgcacctccacaacgacctgccccagctccgaatcgcctccgccgccgccgccgatgccgtcgtcaaaaccgacgacctcccctccgacgatgacgaccgcaacgccgtctcttccgtcatcactcaaaccgagaccgaaactgacggagccaccatcgtcgacgtcgccgtcgccgtcaa

SEQ ID NO: 69642 - DNA, 237 bp, Glycine max
  Clone ID: 700840006H1
gaaagagagagaagaagaaaagaagaacaaagatgcaatcctcaaaggagaagatgaaaaacatggcaagtgctgccaaggaacaagtcgacatctataaagccaaaatagacgagaaggcagagaaagcaacggcaagaacagaagaggagagggtgatagcccatgagcacgcaaaggcaaaggaagctggagcaaagatggagctgcatgaagctaaagcaaggcatgcagcag

SEQ ID NO: 69643 - DNA, 235 bp, Glycine max
  Clone ID: 700840007H1
aatgggaacttttcttgtggtccaaacaattaccgtcagaaaggtcctcggattgcaaaggttgtccggcgcatcaactgcaatgttgaaccattagaatttggagttgtgctctctggaaagtcttggtgcagtagtcaggctatctttccaaagggatttagaagccgtgttagatacataaatgtcttagatccatccagtatgtgttattatatttcagaaattcttgatg

SEQ ID NO: 69644 - DNA, 239 bp, Glycine max
  Clone ID: 700840008H1
gatggggtatttgtacgtcaaaggctatggagttgaccagaagaactacaccaaggccaaagagtattttgagaaggctgctgataatgacgaggttggcggccactataaccttggcgtcatgtatctcaaggggattggagtcaatagggatgttaagctcgcctgtaagttctttgttttcgccgctaaccatggccaaccaaaggccttctaccagctcgctaagattttccata

SEQ ID NO: 69645 - DNA, 219 bp, Glycine max
  Clone ID: 700840010H1
tccctttccctctctactcttcactttccatttccatttttttctggttttctttctccatggcctccgccgccgccgtcgccgccgaagacgacgctgtcaacggcttcactcggtcggagatgtactcggaaaacctcgccggcactgtcgacgcctacgaccgacacgtgttcctctgctacaagagctacgtgtcctggccggcacgcatcgagg

SEQ ID NO: 69646 - DNA, 218 bp, Glycine max
  Clone ID: 700840011H1
gagctatagaaattatcattgatagtttcgcaagtcctgactgcaacatagttggtgcaatgcttttggttgatacttatcataccaatcctgaaaatgcagttcgtagtatttttgttgcgcctttcagaggcggaaggcccatacgggtggttacatttccgaataccatcgtgcagattgaaccagacatgaattcaaggtttcagcttttgagt

SEQ ID NO: 69647 - DNA, 216 bp, Glycine max
  Clone ID: 700840012H1
taatgggtgatgtggttacagtttgtgatatctgtggggatcaaggatttgaagagtatcttgctatttgtaacaagtgtcctgatggggcagaacacatttattgtaatgatgaaaagttggaaaaagtgccagatggtgattggtggacctgcgaagactgcaggaagtcaccaggtaatgaattaccaacattgggctcacaaaccgagatag

SEQ ID NO: 69648 - DNA, 220 bp, Glycine max
  Clone ID: 700840013H1
gagaaaacaagaagtagtgagaagaagggagagaatggaggaaaaggcaaaagctgagcagaagaagataggtatgaccgagacttggttgaagaagcaccgtcttctttacaatggagccactagacaccctcttattattagcattcgcgatggcaccatcaacactgcttccttcaaaacatggctcgcacaggattacttgttcgttcgggcgttt

SEQ ID NO: 69649 - DNA, 248 bp, Glycine max
  Clone ID: 700840014H1
cctggaggacacagtgacaagtagatgcatcgtgcatcatgcatgcatgcatatatataatattgttgtctttgaataaatttgctgcatatgtacttacgtacgtacagtgtcttgtcatgtatgtggaggatatagtatatggttatagtttatgtagaagaataaaaaatgtatgcatgtagtaatgtaagggtcttatatatgtggctgaaatataaaccataataaaggcagagatgttgtgc

SEQ ID NO: 69650 - DNA, 251 bp, Glycine max
  Clone ID: 700840015H1
tctctcctttcattaacgttgtgttgggtttgctagtgtacttggttttcattatggcgtcttcttcagcctctcgtgagggacactacagaggagttaggaagcgaccatggggacgctacgctgcagaaataagagatccgtggaagaagacacgtgtctggctgggcacattcgatactcccgaggaagccgccctcgcctacgacggcgccgctcgctccctccgcggcgccaaggccaagaccaac

SEQ ID NO: 69651 - DNA, 232 bp, Glycine max
  Clone ID: 700840017H1
attgtggaatttgtgatcacacaacataagcatatatatagaaagatgtcaggggcacaaggagcacaaccaaaggagtcaaaaacagcaacaacatatgagtcagtagaaggaggagagaaccgaacaaggactgacttgctttcaagggaggatcaaggctgcattcaagtggaaaaacttcaggagaaggtccatgatcctgctggcaaaggtggtcctgtctttggtg

SEQ ID NO: 69652 - DNA, 233 bp, Glycine max
  Clone ID: 700840018H1
gacccctaaattcgtgcccattcccacaactgcacattcttctttctatatattccaaatcccttttccgatttccaccaaaatctaaaccgaaattcccaattacccttcccaattttcaccaaaacctaatactcccacaccaatcttcgatcatggacgccgattcacaacctcaacaactcgaagagagaacagaggagcaagaactgaagtacctggaattcgtgcaa

SEQ ID NO: 69653 - DNA, 193 bp, Glycine max
  Clone ID: 700840019H1
ccggtcgcttcgtgcgccaaggaactcaaatctgttaagtgcgactcccgggggcccggagacggtgtcccgcgggagtcgtcatgacacaacatttacatacaatgactctcgtcaacggatatctcggctcttgcatcgatgaagaacgtagcgaaatgcgatacttggtgtgaattgcagaatcccgtga

SEQ ID NO: 69654 - DNA, 229 bp, Glycine max
  Clone ID: 700840021H1
ctctcttctattctattctaaactcgaaacaatcttagagaaagaagcagaagaaaatgccgatttctagaattgccattggaaattcttcggagttgaaccaatctgatgcacttaaggctgcactagctgagttcatctcaatgctcatctttgtttttgccggggaaggctctggaatggcttataataagctgacaaacaatggttcagcaacaccagcagggtt

SEQ ID NO: 69655 - DNA, 232 bp, Glycine max
  Clone ID: 700840022H1
aaaccttgctctatactacacagtacacacactagaagaataatggcttccatcctccactactttttagccctctctctttcttgctcttttcttttcttcttatccgactcagtcacccctacaaaaccaataaaccttgttgttctacccgttcaaaatgatggttccacagggctccattggtccaacctccaaaaaagaacccctctaatgcaagtaccagtcctgg

SEQ ID NO: 69656 - DNA, 231 bp, Glycine max
  Clone ID: 700840023H1
gaaaaggcatctggttttgaggaatctatgaagtataagaagctcaccaatgctcagaggtctggtctaaaccagatacccaaccgaagatttacactatggtggtcgccaaccattaaccgagccaatgtttatgtgggtttccaagtgcagctagatctgactggtattttcatgcatggaaaaataccaactttgaagatatcccttattcagatattcagagctcac

SEQ ID NO: 69657 - DNA, 236 bp, Glycine max
  Clone ID: 700840024H1
gcgaggtgttaccggcagataaagaacaaaccgtacccgaaatcccgtttctgccgcggcgtgccggagccgaagatccgaatctacgacgtgggaatgaagaagaaaggcgtggacgagttcccgttctgcgtgcacctggtctcgtgggagaaggagaacgtctccagcgaggctttggaggcggcgcgcatcgcatgcaacaagtacatggccaagttcgccggaaaagatgc

SEQ ID NO: 69658 - DNA, 225 bp, Glycine max
  Clone ID: 700840026H1
cagccacttcttcccgtttcatctctcccatttcttcttttcttccgctctggttcagtaaggcgaagagggttaacgttattcataatggttgcaacagccgctacggcgtcgtttcttcccgtgcctttgccagacgctggaaaagggaaacccaagaaactgggtggtggtggcggtggcggtggcggttctgtgaacctcggaggactcaaacagaaacaa

SEQ ID NO: 69659 - DNA, 224 bp, Glycine max
  Clone ID: 700840027H1
ggttgtgtgacggtgaattgggtagaagaagatgagaggggtgaagagagcagtatttgtaggcagagccctaagaagcaattccaacaccgccgtgtacggtgttggtgccacccttcatcgagatcgaatggctccccatggctgcttaaccccatcaaatccaaatccttctgtttctgttactgggtttagatacctttctgcttctgctgctgccacgt

SEQ ID NO: 69660 - DNA, 224 bp, Glycine max
  Clone ID: 700840028H1
attcccaattacccttcccaattttcaccaaaacctaatactcccacaccaatcttcgatcatggacgccgattcacaacctcaacaactcgaagagagaacagaggagcaagaactgaagtacctggaattcgtgcaattcgcgaccatacaggctctgatgcgctgcgccatcctctactcatacgccaaggagcgcgcgggtcctctgaagcccggtgtcg

SEQ ID NO: 69661 - DNA, 226 bp, Glycine max
  Clone ID: 700840029H1
gtgcaacctttgctgtggtagtggaagcacacaaagagcacaacgttacatatagtaactatggcgagagtgggtagaatgaaacttggttcagaagggtttgaagtgtctatgcagggacttgggtgcatgggcatgtctgcattctatggtcctcctaagccagagcccgatatgattgcactcatccaccacgccgtccaaagcggtgtcacttttcttgaca

SEQ ID NO: 69662 - DNA, 248 bp, Glycine max
  Clone ID: 700840030H1
atcaaatcatggccaccgccacatcccaaacccttcgattccaatctccgtcactctctctctcctcgaagctccccctctcctccgcgttctccgtctcgctccgccctcgccaccgcggctcccgccctctcgtgctagtcgtctccgccgggctcgacgcgaacccacggtgctcgtcgccgagaagctcggagacgcggggctgaagctgctcaaggacttcgccaacgtcgactgttcctaca

SEQ ID NO: 69663 - DNA, 246 bp, Glycine max
  Clone ID: 700840031H1
tgatcagggtcgcaaggttgacgagtatggcaacgttgagaagcaaaccgacgaatacggcaaccctgttcatgctgctagtgtcacctatgtagccaccagaactgctgctggtggttacagtgatgacattaataagcaacatgataccaccaatgcctacggcgtagacactggtagacagcattctagtggtggctacgatggtgacactaataaacatcatggaactactggtggctataa

SEQ ID NO: 69664 - DNA, 72 bp, Glycine max
  Clone ID: 700840033H1
agatattattaccatgtattgtctatagtgtggtgttatagtgtggtgaattgttggtcgtgttgtgtaact

SEQ ID NO: 69665 - DNA, 220 bp, Glycine max
  Clone ID: 700840037H1
gagccgattcggctcgagctactacaagtacttccttacaatcactaccaacaacaactatggcaagttatcaaaagcactacgatgatcagggtcgcaaggttgacgagtatggcaacgttgagaagcaaaccgacgaatacggcaaccctgttcatgctgctagtgtcacctatgtagccaccagaactgctgctggtggttacagtgatgacattaa

SEQ ID NO: 69666 - DNA, 223 bp, Glycine max
  Clone ID: 700840038H1
cgagccgattcggctcgagggacctttccatcaacacacgcacctcccacacgccgcatcaccgcttcgccaccacacgcacgcggttgagatgttcccgccgccgacgcagacgaccctcccctctctgccggatctcctcctcacggccctctccgtctgcttcctagtctcctcctcgaagccccacatcggtggttccacccgctgccccttcccgcgt

SEQ ID NO: 69667 - DNA, 223 bp, Glycine max
  Clone ID: 700840039H1
gcatatatatcaaaatggctgcagagatggagagggagtcattgataactgaagctcctaatgcaccagttactgcacagagaagggtcagaaatgacttagaaaattctctaccaaaaccatacttgccaagagcattgaaagctcctgatacgggtcacccaaatggaacagcaggccacaggcaccacaacttatctgttcttcagcagcattgtgcttt

SEQ ID NO: 69668 - DNA, 251 bp, Glycine max
  Clone ID: 700840041H1
gtatgaggcgcatggcggtaggagcagtctcaaactccactctttttctaccttcctctcttctatcttcttctaaacctaatcccttaactatcccattctccttctatctcaccaaaacgtcaccgttttccatttctgttctcactcgccaacgccgcttcctttccgtttcttctttaaccgctgaccaccacaacctctctgatttcggagatggtgacagcgttgctatttcaaacgaaggtttg

SEQ ID NO: 69669 - DNA, 230 bp, Glycine max
  Clone ID: 700840042H1
aaactgaaccaattcaatattcccagctagttcttcattgaagaagctatggactttcttaactttatgcttaacttgttggtccctccaggcagtatgctcaccttggctttctcatggccagcactttgcttcctcaatgtttgtgagtggctttataatagtatatatggtgaggatatcgataataaagtcgtcataatcactggggcatcttcaggcataggaga

SEQ ID NO: 69670 - DNA, 240 bp, Glycine max
  Clone ID: 700840043H1
atttggaggcctttttcaggcggtggttggtgtagttttgtgggttgtctctatttaaagaaccctcacacactcacttttgatccaaagtattgattttgatacaaaagtttttaagttttagagaagaatggaagggaataagcaaaagggtacttcttcttcattcacctctgagctctttgggtccaaagagtctcgtccctcttcttcttctgggatttttggctccattttttc

SEQ ID NO: 69671 - DNA, 178 bp, Glycine max
  Clone ID: 700840045H1
ggtgttgcagaccaacaccaacaagaagaacatcagttagatcaacaaaagcgtggtgtaatcggatccatgttcaaggcggtgcaagacacctacgagaacgccaaggaagcagtcgacggcaagaaagaaccttcgacgacgactaactcgtacagtaccagagaggttattcacg

SEQ ID NO: 69672 - DNA, 237 bp, Glycine max
  Clone ID: 700840046H1
acgggtggcaagccatttgtcacgacgaggaccccataacggaccaagagggtatgaagcgaacctccgcaggggagcaaatgccatgcaggttggtgaagttggaggaaaattacaagttcagacagtattgtagtggaaaggattctgagaagggtatgggtgcctttgttagggacttgaaggaacagtttaggagcgtggagcaggtgtatgtgtggcacgcgctttgtgggt

SEQ ID NO: 69673 - DNA, 252 bp, Glycine max
  Clone ID: 700840048H1
aactcggctcgacgcttgcatatgatgactatggctagttatcggaagcactacgatgatcatggtcgcaaggttgacgagtatggcaacgttgagaagcataccgacgaatacggcaaccctgttcgaggcgttaaatcaacgggcagtggctgtggtggtggagcctattcagagtgttaaaggcaaagtggtaattgatgctttccggctgattaatccacaaactatgatgctgggtcaggaaccacg

SEQ ID NO: 69674 - DNA, 221 bp, Glycine max
  Clone ID: 700840050H1
ctcgagcagttcaaaatcgtcatcaatttcgcgtctttctttctcaattctcttagattctcaattgggtcttcaaaaatgcggatgagttgcaatggatgtcgagttctgagaaaaggttgcagtgaaaattgcagcatcagaccctgtttacaatggatcaaaagcccagaatcccaagccaatgctactgtgtttctcgctaagttttatggtcgtgc

SEQ ID NO: 69675 - DNA, 216 bp, Glycine max
  Clone ID: 700840052H1
caatgccgccgccgccccaccacgccagctctcccagaaggaagctgacatccagatgatgttggccgccgacgtccacctcggcaccaagaactgcgacttccaaatggaacgttacatcttcaagcgccgcaacgacgggatttacattattaaccttgggaagacgtgggagaagcttcagctagcagctagggttatagttgcaattgagaa

SEQ ID NO: 69676 - DNA, 214 bp, Glycine max
  Clone ID: 700840053H1
ttccttctctagcacaatttacaatctcaatggctggaatttgctgtggtgttgttggagaaggtgacactccggctccactcgagcccactcctcgcccctccaggcgccggagtttggacatcttacctttaaaatatatcgccgacatgcccatgccgccgccggaggctttacggaagcgtcccaagctcaacctcagggactgcgataa

SEQ ID NO: 69677 - DNA, 216 bp, Glycine max
  Clone ID: 700840054H1
gtttgatcctggctcagaaggaacgctagctatatgcttaacacatgcaagtcgaacgttgttttcggggagctgggcagaaggaaaagaggctcctagcgtgaaggttgcttgtctcgcccaggaggtgggaacagttgaaaacaaagtggcgaacgggtgcgtaatgcgtgggaatctgccgaacagttcgggccaaatcctgaagaaagctaa

SEQ ID NO: 69678 - DNA, 219 bp, Glycine max
  Clone ID: 700840055H1
ctcgagccgtggaatttcgatgctcagtcatctcttttaccattctcttctctcttgctcttgcaggagagagccatgtccatgcatcgctacctgaggaagattattgggaagctgtttggccaaacactcccattcccactgcactgcgagagcttctaaagcctctccctgcaggtgttgaaatcgatgaactccctaagcaaattgatgatacac

SEQ ID NO: 69679 - DNA, 220 bp, Glycine max
  Clone ID: 700840056H1
caaagctcaggatctagctttagattgcttggaaagtgcagaaactgaatctactaacagcttgtcaaactataaagagggagacaatgatacggatcagcgactagacaaagaatgtaatttcatcccaagggctgaatgttcagattatgtaccaaatgccagttcccagaacctcaattgcgaggtgagttatttcatttgaggacttttttggatt

SEQ ID NO: 69680 - DNA, 247 bp, Glycine max
  Clone ID: 700840057H1
caacgatggttgaagtcgaagagatagagctggatttggcgttgtccatagggggcagtttcgggaaatacacggtggagaagcccgcaccggattccgaagcgcgtgtttcaaattcggatagtcgcgatggaatgcgcgtggtgatggagccgcgcgagaagcgcgagattcaggcgtttcggagaatggaggcgaggaagaagagggagcgcttgagggaaccgtccgagcccgaatcgcaatt

SEQ ID NO: 69681 - DNA, 241 bp, Glycine max
  Clone ID: 700840060H1
agttgtgatcaactacgttacttctctcttggttttcttcatcttccaccttcacctgttggaatggcaaggaactacttcaaacaagaacatgatcttgagaagagaagagctgaggctgctaggattagggagaaatacccagacaggattccggtgttcctattcctacctttcccttgttggagtataatattctgtaaacatagttatttcctcatgagaatggtaattgtggaga

SEQ ID NO: 69682 - DNA, 246 bp, Glycine max
  Clone ID: 700840061H1
aaaagaaagaatcccaggcgaggagaaagatggaggggaaggagcaggatgtgtcgttgggagcgaacaagttccccgagagacagccgattgggacggcggcgcagagccaagacgacggcaaggactaccaggagccggcgccggcgccgctggttgacccgacggagtttacgtcatggtcgttttacagagcagggatagcagagtttgtggccacttttctgtttctctacatcaccgtct

SEQ ID NO: 69683 - DNA, 195 bp, Glycine max
  Clone ID: 700840064H1
caagcttcagcctttgatgatgaagtaccgaaaagagaaagagagggttgatgagattcgaaggctcaagaagaaaagagaagagcttctttttgctttacaagaggctgagagaagatatgatctggctagagctgcagacctgcgatatggagcaattcaagaggtggaaactgcaatacaacaacttgaagg

SEQ ID NO: 69684 - DNA, 243 bp, Glycine max
  Clone ID: 700840066H1
aatggaggatagtcgctatgtgaaatacaaggatttggaggattataagcgtcagggttatggtacacaaggtcatcaagaaccaaagacaggtcgtggagctggagccactgaagcacccactctctctggtgctgcagtttcatctgatgcacaagtcgctgccactgatgccattaacagtaaaggagtcccttaattattcacacttcctagaatagatcgttcctttgctaataagaa

SEQ ID NO: 69685 - DNA, 244 bp, Glycine max
  Clone ID: 700840067H1
attactacatcgtattctgcaaattcaaactgcttgctcatggggtagctggtgcagcacatggtggacatgggtacccacctggggcttacccaccaccacctggggcataccctccgcaccaagggtaccctccacaacatgggtatcctccggctgggtaccctccacatcaaggttaccctcctgctggttacccaccagctggttatcctggttcatctcatgcaccaggttctcatgg

SEQ ID NO: 69686 - DNA, 205 bp, Glycine max
  Clone ID: 700840068H1
aactatggctagcgattgcagcgaagagttcatgctagtgtcaccggcgttcaaaaacggggggaagttaccgtggcactacaccgacgatggtcagggtacgaagaagaacatatcccctccattggagtggtataacctcccggaggggacgaagactcttgccctcgtggtggatgatattgatgcgaccgattctggtggg

SEQ ID NO: 69687 - DNA, 214 bp, Glycine max
  Clone ID: 700840069H1
gacattgtattgtgtctatgtagcgataggacagaaacgctcaactgtggcacaattagttcaaattctttcagaagcgaatgctttagaatattccattcttgtagcagccaccgcttcggatcctgcacctctgcaatttctggccccatattctgggtgtgccatgggggaatatttccgcgataatggaatgcacgcattaataatctat

SEQ ID NO: 69688 - DNA, 126 bp, Glycine max
  Clone ID: 700840070H1
caacagaggaaacgcgatctagaacttgccaaacggtgttggaatttgtgatctggtgaatcatgaatgctaggagagatggtcgtaacaacagatttgctctttttgatggtattgaggagggtg

SEQ ID NO: 69689 - DNA, 245 bp, Glycine max
  Clone ID: 700840072H1
ggctcttatgttggtgaagttgtcaaagtcatgggcaagaacaaagtccttgtcaaggtccacccagaaggaaaatatgtcgttgatattgacaaaagtattgacattacaaagattactccatccactagagttgcacttcgcaacgacagttatgttcttcacttagttctgccaagtaaagttgatccattggtcaatctgatgaaagttgagaaggttcccgattctacttacgacatgat

SEQ ID NO: 69690 - DNA, 238 bp, Glycine max
  Clone ID: 700840074H1
ccgctcgagccgaatcggctcgagcagttgcagaccgagctagctagctagcaagcaagcacagagctggaggcaaagcgaggccatgccctcatgtgcttggcacgtgtttcactcttcctctgcgctctaaccctatccgctgctcacggaagcaccacggttcaagacatcgcgagaaagttgaaactcggggacaacgagcttctgcgcacggagaagaagttcaaggttttca

SEQ ID NO: 69691 - DNA, 236 bp, Glycine max
  Clone ID: 700840076H1
cgagccgcgagaaaacaagaagtagtgagaagaagggagagaatggaggaaaaggcaaagctgagcagaagaagataggtatgaccgagacttggttgaagaagcaccgtcttctttacaatggagccactagacaccctcttattattagcattcgcgatggcaccatcaacactgcttccttcaaaacatggctcgcacaggattacttgttcgttcgggcgtttgtcccattt

SEQ ID NO: 69692 - DNA, 236 bp, Glycine max; identical to SEQ ID NO: 69094
  Clone ID: 700840077H1

SEQ ID NO: 69693 - DNA, 227 bp, Glycine max
  Clone ID: 700840078H1
gaccgagctagctagctagcaagcaagcacagagatggaggcaaagcgaggccatgccctcatgtgcttggcacgtgtttcactcttcctctgcgctctaaccctatccgctgctcacggaagcaccacggttcaagacatcgcgagaaagttgaaactcggggacaacgagcttctgcgcacggagaagaagttcaaggttttcatggagaattacgggaggagct

SEQ ID NO: 69694 - DNA, 225 bp, Glycine max
  Clone ID: 700840079H1
aacaagaagtagtgagaagaagggagagaatggaggaaaaggcaaaagctgagcagaagaagataggtatgaccgagacttggttgaagaagcaccgtcttctttacaatggagccactagacaccctcttattattagcattcgcgatggcaccatcaacactgcttccttcaaaacatggctcgcacaggattacttgttcgttcgggcgtttgtcccatttg

SEQ ID NO: 69695 - DNA, 249 bp, Glycine max
  Clone ID: 700840086H1
agaatcaaagaaaggggtggtggctgcttcgaaagcttaataatttgtttatttccagaacatcatagttttcgcagcagcaaactaacaaattactcatatcatataataagatggcccgttctctctcgcaagccaaacgtattggtgtccttgttgctcaatctatctctctaattcccgttcatcggcgaggttacgcagtggcatccgatgtatcggtaagagttggattgggtaatattgggc

SEQ ID NO: 69696 - DNA, 249 bp, Glycine max
  Clone ID: 700840087H1
gtacttccttacaatcaaaaccaacaacaactatggcaagttatcaaaagcactacgatgatcagggtcgcaaggttgacgagtatggcaacgttgagaagcaaaccgacgaatacggcaaccctgttcatgctgctagtgtcacctatgtagccaccagaactgctgctggtggttacagtgatgacattaataagcaacatgataccaccaatgcctacggcgtagacactggtagacagcattcta

SEQ ID NO: 69697 - DNA, 222 bp, Glycine max
  Clone ID: 700840088H1
agaagctcaggatctagctttagattgattggaaagtgcagaaactgaatctactaacagcttgtcaaactataaagagggagacaatgatacggatcagcgactagacaaagaatgtaatttcatcccaagggctgaatgttcagattatgtaccaaatgccagttcccagaacctcaattgcgaggtgagttatttcatttgaggacttttttggattag

SEQ ID NO: 69698 - DNA, 230 bp, Glycine max
  Clone ID: 700840090H1
ttcttacggacgacgacgtatccattgagatctcgacggtggatttcgatccgccaccgtccgatctcctcctccgtaactgacgacggtgtttcgatatcttacatctctctctagccacagttcttcctggtctaaaggagtagtggagagatatggaagtcaacaattggcataaggagcttacatatgatgagtgggtaccgatcactgtatctggtgcacgtcca

SEQ ID NO: 69699 - DNA, 218 bp, Glycine max
  Clone ID: 700840093H1
acctgtttgcgatctcattacaatctccccagtttctaatctcagctaagaaaaaccaaaagatgtctctgattccaggtttcttcggtgcccgaaggagcaacgtcttcgatccattctcactcgacatttgggatcccttcaaggattttcatgttcccacttcttctgtttctgctgaaaattctgcattcgtgagcactcgtgtggattggaag

SEQ ID NO: 69700 - DNA, 222 bp, Glycine max
  Clone ID: 700840094H1
aggagctgtcaccgaagttaagttacagggtagatgtggatcatgctgggctttcagcaccacaggatctatagaaggagccaattttcttgccaccggaaagctcgtcagtcttagtgaacaacagctccttgactgtgacaacaagtgtgacataacagaaaagacttcatgtgacaatgggtgtaatggaggtcttatgacaaatgcctacaattattt

SEQ ID NO: 69701 - DNA, 116 bp, Glycine max
  Clone ID: 700840095H1
tcggtaagtaattttaacttaaatttgtcacgtatgcatactacaatgaaaatccttgattccattgcattggttaaatgggcttattccttgcagttgtgtgcaaatacggaact

SEQ ID NO: 69702 - DNA, 141 bp, Glycine max
  Clone ID: 700840096H1
tgaagattgtcctcatttggttactgcattcaacacctggttccgccgagcagcccgacccctcaaaccagattctctctttgatcaatgagatgtctgttcgttctgttgcgcctttcttgggtcgcatattgtcaaata

SEQ ID NO: 69703 - DNA, 270 bp, Glycine max
  Clone ID: 700840101H1
gcagtgtctggtccaccagcagcaacagtggctgaagcagcaggtacaaagcctaaacgaagaacagaacaggcaccaatgggtggcatgatgggttcactgcgcgtgatagaacttcagctggtggccttcatcttggtgtctcagcaagtggcctcgtcccactccttgatctagtgttccctgcattcgcctctgcatacatcttggcactttcacaattcgcatttccatcggcgtcttcgtcggggactgagatcttcaaaggga

SEQ ID NO: 69704 - DNA, 262 bp, Glycine max
  Clone ID: 700840102H1
gcggtgatttgtttatcataggaggatctgatgtactcgctcgtggatctcaactatattcacgatcatgatggcccttgaaaattctgaaaatatgcaaataaactgtgaggcatctttaaaatgcctccagggcaaggatttccttgcaattttcagagtaatgggagttctatggaaggctttacagagcttaaaaatgagcctggtactcatccttctggggatgttgctgagcctaactgtcacttaggcagtgagt

SEQ ID NO: 69705 - DNA, 274 bp, Glycine max
  Clone ID: 700840103H1
cggaatcggctcactcgagcgaatcggctcgagcaccagcttcactgtccatctacgacaccctcagtgtactattttgggtcccagtgactgacaggatcattgtgccaattgctacaaagttcactgggaacaaaaatggcctaactagctccagagaatgggaattggcctcttcatatccatattttccatggtagctgcagcaatattggagctcatacggcttagaatggtgaggaggcacaactactatcaacttgaggagatacca

SEQ ID NO: 69706 - DNA, 259 bp, Glycine max
  Clone ID: 700840104H1
atcctttgatcaaccaaggtgcatggacgaatgaagaggacaaatctcttttacttattgtccaagatattggcatcaggaactggtttgatattgccacatcattgggcacaagcaggactccatttcaatgcttgcacgattccaaaggagcttaaatccttccatgctaaatagtgaatggactgaggaagaagattctcaactctgtcctgctgtggcaagttttggtgctagggattggcaatctgtggcttct

SEQ ID NO: 69707 - DNA, 257 bp, Glycine max
  Clone ID: 700840105H1
caagattgctgattttggcctagccagagagatcagttcactaccaccctatactgagtatgtctccacacggtggtatcgtgctcctgaagtcctgcttcagtcccatctatatagctctaaagttgatatgtggcaatgggtgctataatggctgagttgttcactctccgtcctctattccccggttccagtgaagcagatgagatttacaaaatatgcagtgtgctaggtagtccaaccactgaatcttgggc

SEQ ID NO: 69708 - DNA, 257 bp, Glycine max
  Clone ID: 700840106H1
gttgaatcaaacagtgaaagtaaaacattgtgcaattaatcatcaactgcaagtagccagtgcataagatcaatggcgtcaagacagcaattcaaggaagacagagccgaggcagctgcaaaactcgcagcgaaagcatcggcgacatcaacagaacaaacgagcgcgacgaggggtacgacttgcacgacgaagccaacttcaagcaagcacgagctgaagcagctgcaaagctggcggccaaggatctggaggac

SEQ ID NO: 69709 - DNA, 260 bp, Glycine max
  Clone ID: 700840108H1
agacacgtaatcaaaaccatgcagatacgaacctgccactccatcaccacccaaacccttccacaacttccgtgttcctctagacaagcccaccaccgccaccttcttccgccgttaaacgctgcggtttccgcggcgcgttcaaagcccggaaggcccactcaatgcctccagataagacagagattttcaagtccttggagcgatgggcctcggagtgggtcctaccgctgctgaagcccgtggagcaatgctggcag

SEQ ID NO: 69710 - DNA, 255 bp, Glycine max
  Clone ID: 700840111H1
cgaatggtgaattctcaatggcagttattcaggcaaacaatttgttagaggatcaaagccaacttgaatccggccccttgagcttaactgagggaaatcctcaaggaacttttgttggtatatatgatgggcatgaggtccagaagctgcccggtttgtcaatgaccgtttattcaataacatcaagagtaagtttttcttctttcttcatcctgcaacacaaattgctatttctggaaataactttagaaattg

SEQ ID NO: 69711 - DNA, 256 bp, Glycine max
  Clone ID: 700840112H1
cttttctccctcggagcttccaattgaaatccaattcctcaatacctccacactttctcgttcggaaagctcgcgaattcgaaagacatcgacggctccacgtgatacgttttcttcctctctggttatcaatgtggctactagtgcagttgcatctttgcccgtattaccaccagtgagaagaggtggccaccacattgaacagaatgttgtttccacattgagctttccaagacgattactgacaactaataat

SEQ ID NO: 69712 - DNA, 254 bp, Glycine max
  Clone ID: 700840113H1
aagcttagaattagaaacaaagaaaagaagaaaggaaagaattgatcgttgaaaatgcagggaggaaagaaagcgggagagtccattaaggaaacagctacaaacattggtgcttctgccaaggctggcatggagagaccaaggccactgtccaagagaaggcagaaagaatgacagcacgtgatccggtgcaaaaggagttggcaacccaaaagaaagaggcaaagatgaaccaggcggagctggacaagcag

SEQ ID NO: 69713 - DNA, 258 bp, Glycine max
  Clone ID: 700840115H1
caagtttcctctcaattgtccaccacttactaggatttattttttatttttgtttcaggaaatagtttcaatataccctgttctttcaccaccaaatcttactcctgcacaatcgaaccgagtatgcaatgctcttctcttcttcagtgtgtagcatctcaccctgatacaaggatgctattcctcaatgctcatatacctctatatctgtatcccttccttaatacaacaagcaagtcaagaccatttgagtacttg

SEQ ID NO: 69714 - DNA, 262 bp, Glycine max
  Clone ID: 700840116H1
caactacaagaaagaacttccttataagcaaaaccaacaacaactatggcaagttatcagaagcactacgatgatcagggtcgcaaggtcgacgagtatggcaatgttgagaggcaaactgacgaatatggcaacccgttcatgccactagtgtcacttatgtagccaccaaaagtgttggtggctacaatgatgacgctaataagcaacatgatattactggtgtctatcccgagacagacaccggtagacatcattttgg

SEQ ID NO: 69715 - DNA, 257 bp, Glycine max
  Clone ID: 700840117H1
agctgctgttggcttgttgttcaaggatggcaatttgtaagacagatatttggagagttgaatgtggaatcccttctggatttccgctcacagttatttgcaatagcatttttaatgagatgctcattagaatagctatgaaaaattattgcgccaggctaaagctccaagtatgtttttacaatccttcaaaaattttgtttctttgtgtgtgtatggtgatgataacttaattagtgttcatgaatatgtcaagc

SEQ ID NO: 69716 - DNA, 258 bp, Glycine max
  Clone ID: 700840118H1
gttcctgctcctcgaacccttgagagcgagaaaccacgtttctctcttgaggttaattattattattattgagtattgagcatggaggcgccatctctcaccaaacccaacgacccaacaaaaccttccaacacttcagcacccttagtctggagggggggccgggcgaacgagcccactccgaaaaatgtttgcggtggcgtccatcgccgccggcactacagttcgggtgggctctgcagctgtctctcttaaccc

SEQ ID NO: 69717 - DNA, 259 bp, Glycine max
  Clone ID: 700840119H1
cacacaactactacaagtacttccttacaatcaaaaccaacaacaactatggcaagttatcaaaagcactacgatgatcagggtcgcaaggttgacgagtatggcaacgttgagaagcaaaccgacgaatacggcaccctgttcatgctgctagtgtcacctatgtagccaccagaactgctgctggtggttacagtgatgacattaataagcaacatgataccaccaatgcctacggcgtagacactggtagacagca

SEQ ID NO: 69718 - DNA, 260 bp, Glycine max
  Clone ID: 700840124H1
cagagcatgaactgccggattgggtatactctccactaaataaggatgataaggtcaaaatatttgacagtggtagtgttactggaaagcgtaaaagaaatgaagtggtatatgcagatacattaagtgacctacatggatgaaggctgtggagaacggacaggacatatctaagctttcagtcaaagggaaaagaagagaccacctccctgttgacaaccatgcacaagctagtgatgacatggggacagaagaacggt

SEQ ID NO: 69719 - DNA, 251 bp, Glycine max
  Clone ID: 700840129H1
ggtttcagggtataacaggggtgatccagatttgagagaaatggtttccgctttgtcacatgtggtggtgtcttcagggtcaggccagaggagcaccgaatggatccagcaaagtggttttcctatgatgctgcatcttctctttcatgtttgtcttctttctcttctccttcttcttctggagcctcttgggttggccacaaaagaggcagagaagaagaagagagtagctcttcccataacatgatcca

SEQ ID NO: 69720 - DNA, 259 bp, Glycine max
  Clone ID: 700840132H1
gcagaaagaagagaaaaaaggggaatggcatggttgcagttgcagagaatcgtgaccaagggaggtgctaatttgatctcaccactcccactttcacgattcttctcgaaatcttcttccccctatgttgtgaaagtggaattccagagtttctaaacgggattgggaagggggttgagtcccacgttcctaagcttgaatccgaaatcggtgatttccagaagcttctcctcactcgcaccctcaaactcaagaagct

SEQ ID NO: 69721 - DNA, 264 bp, Glycine max
  Clone ID: 700840133H1
caaagccataggcatcgatctcggcacgacctacagctgcgtgggcgtgtggcaaaacgaccgcgtcgagatcatccccaacgaccaaggcaaccgaaccactccctcttatgtagccttcaccgacaccgagaggccatcggagacgcggcgaagaaccaagtcgccatgaacccgcagaacaccgtcttcgacgccaagcgtttaatcggtcgcagattctcagactcttcagttcaaaacgacatgaagctgtggccgttt

SEQ ID NO: 69722 - DNA, 256 bp, Glycine max
  Clone ID: 700840134H1
ggcttttgttcatcgtagtaatatagaggtctttcattattcagtttgatttagcaccaagatgaaggttcaagaaacgaggtcgcatgttcatgcacctggggaagaagagaaggtgatgacaaggaagcagaagctgagtccaaggcacatgaagtggagcattctccaaagaaggccaaggtggaaaaagaagatggccaaatcaacggaaaatctgaaactggagttgcagaagaatatgatgagtcctgca

SEQ ID NO: 69723 - DNA, 171 bp, Glycine max
  Clone ID: 700840135H1
gctctatactacacagtacacacactagaagaattatggcttccatcctccactactttttagccctctctctttcttgctcttttcttttcttcttatccgactcagtcacccctacaaaaccaataaaccttttgttctacccgttcaaaatgatggttccacacaaca

SEQ ID NO: 69724 - DNA, 255 bp, Glycine max
  Clone ID: 700840137H1
tagaaagagagagaagaagaaaagaagaacaaagatgcaatcctcaaaggagaagatgaaaaacatggcaagtgctgccaaggaacaagtcgacatctataaagccaaaatagacgagaaggcagagaaagcacggcaagaacagaagaggagagggtgatagcccatgagcacgcaaaggcaaaggaagctggagcaaagatggagctgcatgaagctaaagcaaggcatgcagcagagaagctaagcgccaac

SEQ ID NO: 69725 - DNA, 256 bp, Glycine max
  Clone ID: 700840139H1
caaaagtgttccacttgagtgaaaagtagtgtgttaagaactaaacaatttttcaatggcgtccaagaaacaagaggagcgagctgaggcagctgcgaaagttgctgccaaagaactcgaacaagtcaacaggaaagaagagaccgtgatttcggtgttgttgctgaacaacaacaacaacatcatcaggaagatcaacaaaaacgtggtgtaatcgggtccatgtttaaggcggtgcaagacacctacgagaacg

SEQ ID NO: 69726 - DNA, 257 bp, Glycine max
  Clone ID: 700840140H1
aaaatgatacgtcttatttgtatagtagtggggaattatgggacaaaaaataaatccgcttggtttcagacttggtacaactcaaagtcatgattctatttggtttgctcaaccaacaaattattccgagaaatacaagaagataaaaaaatacgagattgtatcaaaaattataacttgaataagatcaattcttttttgaatctttatctgtccaattccctcaacaccagaggatattcttatatttggttgta

SEQ ID NO: 69727 - DNA, 257 bp, Glycine max
  Clone ID: 700840141H1
ctttggtgagcctcagcaccattctcacaccgccttcttcttctatcttcttcgttttcttctccaaaaccttcttcttcctccatcgttcggtttcgccctctcactccccttcctcgctttcggaggcacctcgttcgtatggctcccgatgaggagaagatgactcgtcgctcccctctcgatttccccatcgagtgggaaaggcctaaacctggacgaaggccggatatattccctcaatttagtcctatgaa

SEQ ID NO: 69728 - DNA, 252 bp, Glycine max
  Clone ID: 700840142H1
gtgctctggttgaagctttgttcgagggaactgagaaaggttttgctaaagaagctgataaaaagaagaactacttttctgttgctgttgcggatgagggatcccagccgttgttgctttttgctattgagagttttcttgcaagtctacttcaaatgctttgaaggaggttgccctggttctaaaggcactctacgatgctgatgtgttagaggaagaacacatagtgcagtggtatcaaaagggactgaa

SEQ ID NO: 69729 - DNA, 248 bp, Glycine max
  Clone ID: 700840144H1
gctgcacatacattagtgaagaagccattggataaggccactgagggagggagagaggtgttgggagctgtaggtgaaactgtggttgagattggtgaaaacatggtgaaaaaaccagcacagaaagtgagcagcatcaaggtgaaggtggaggaggggtgctgaatgccattggtgaaaccatagcagagatagcagagacaactaaggtgattgttgctggagagggagaaaaggagataatagta

SEQ ID NO: 69730 - DNA, 250 bp, Glycine max
  Clone ID: 700840146H1
gtcctagtctcaaccataaacgatgccgaccagggatcagcggatgttgcttttaggactccgctggcaccttatgagaaatcaaagtctttgggttccggggggagtatggtcgcaaggctgaaacttaaggaattgacggaagggcaccaccaggagtggagcctgcggcttaatttgactcaacacggggaaacttaccaggtccagacatagtaaggattgacagactgagagctctttcttgatt

SEQ ID NO: 69731 - DNA, 254 bp, Glycine max
  Clone ID: 700840147H1
gggaaacaaaactacccttttgcttttgctctttgttctttgccatggagtggccacaacaacaatggccttccatgatgatgagggtggtgataaaaagtcaccaaaaagtttgtttttgatgagcaactcacgagggttttcaagactgatgcaggggaaatgcgtgtgctgaaaagccatggtggtaggatattttataggcacatgcacattggcttcatctctatggaaccaaagtccttgtttgttcc

SEQ ID NO: 69732 - DNA, 257 bp, Glycine max
  Clone ID: 700840148H1
ctggcgtcaatggcggcttcccgtcatcgaataatgccgacggcggtattgcgccgccgttggaggtggacgggctgccggagaattttgattggagagagaaaggagctgtcaccgaagttaagttacagggtagatgtggatcatgctgggctttcagcaccacaggatctatagaaggagccaattttcttgccaccggaaagctcgtcagtcttagtgaacaacagctccttgactgtgacaacaagtgtgac

SEQ ID NO: 69733 - DNA, 258 bp, Glycine max
  Clone ID: 700840150H1
cccaacaaaccggtttaggtgaactaggagaagacgttcttgcaatccacgccacacaagggtcgacccaacaacttggcccattggtcacagtcccacaattcctcttttcttgtgcaccttccttccttgtcaaaagggtcttcctagaaacactcaaggtgtggctgggttaggccatgcaccaatttctcttccaaaccaactcgcttcccactttggcctacaacgccaattcaccacttgcctttctcgcta

SEQ ID NO: 69734 - DNA, 254 bp, Glycine max
  Clone ID: 700840151H1
aaaaattgagtttcaagtgtcactattaaacccattgatcactaaaatatccagttgtgtgcaagattttttttcttcttattttacatcaatgctgcattcggtattgggtctcaaaccctattatcaggaaatttgagctgcagatttacatttatctttacattatctattgggagcttgacaatatattcctatgcacatatcttaatgtattatctatccgtttactccatctggctagtttttttact

SEQ ID NO: 69735 - DNA, 253 bp, Glycine max
  Clone ID: 700840152H1
gactgaggttgggtttggaaggcaagggcttgtgttgtcacaatccaagagagaagtaatggcgaacatagacatcgaagggatcttgaagcagcagcagccttatgatgggcgcgttccgaagacgaagtagtgtgtactttgggccctgcttctcgatccgtagaaatgaccgagaagcttctgagggcagggatgaacgttgctcgtttcaatttctctcatggcacccacgactatcaccaggaaaccc

SEQ ID NO: 69736 - DNA, 251 bp, Glycine max
  Clone ID: 700840153H1
caaagatcttccttacaaaagtttgttttcaaagtgtgttttgtttcccaaatcctactcttgtgaccacaacccttcctcctctttcttttgaaacctctttttttctattccccaaccaaacaagcaacgctactcactcatcatcactgagatcatggctcctaatatcaccactgtcaaaaccaccatcaccgacgctcaagccaaggtcgccaccgatcatggtcgtgcctacgtcaccttcctcg

SEQ ID NO: 69737 - DNA, 252 bp, Glycine max
  Clone ID: 700840154H1
attgcagcagcagcagcagcagcagcagctagcttctaaaagaatgaagttagaagtggaggtaatctccaaggaaatgatcaaaccctcttctccaacccaggaccatcttcgtcactatccactctctttctcgatcaagtctctcccatggtgtataaccctatggttctcttttactcttgctacggtatcactcaaactcaattcaccatttccgaaaagctgaagaaatctttgtctgatgtttta

SEQ ID NO: 69738 - DNA, 253 bp, Glycine max
  Clone ID: 700840156H1
taggaatataagaactaagatggattggatcggagcgtaccgcggaggccagagaagcagggactggtgcgacccttcatcaccattcactgatttgtgggaccctcgtcgtgtcggtgacgctgatgatatcacctcctctctcgcccatgctcacgttgactggcgtgagactgataaagctcatatcttccgtgctgatcttccaggggtgaagaaagaggatctgaaggtgcaggtggaggagaataag

SEQ ID NO: 69739 - DNA, 251 bp, Glycine max
  Clone ID: 700840157H1
gcagaagcaggcgagtgaggaagagcgaagagtgaagagaatggctcccaagggtttaacctttctggctgtgttaatatgcgtttcagcactgtcactgagtccttctgttgcgggggaagggcaaaaaatggccttgttatgaacttctacaaggaatcatgccctcaggctgaagacatcatcacagaacaagtcaagcttctctacaagcgccacaagaacactgctttctcctggctcaggaacat

SEQ ID NO: 69740 - DNA, 249 bp, Glycine max
  Clone ID: 700840158H1
cgagaggagaggagagaagagaggaagttttggggtttgaatctatagaatagaatcaaaccaaattgaaagaagatcgatcgatcgatcgatggctctggtcggagttgaagtgaagcatgcggcgagggcgcaccggaggagaattgctccgccaagcccaccaagcagggcgagggcctccgccactactattctcacaacatccacgagcatcagctccttctccgtcaaaagacgcataacctc

SEQ ID NO: 69741 - DNA, 247 bp, Glycine max
  Clone ID: 700840159H1
tatgatgtgacaacaattagagcaagcattcccatgtttcttatgtctcgtaagatcaagtcattgggagtcaaatgggttatatctggagaaggatctgatgagatctttggagggtatctatattccacaaggcaccaaacaaagaagaatttcatcaagaaacatgccgcaagattaaagcactccacaaatatgattgcttgcgagccaataaatcgacctttgcctggggtctagaagccag

SEQ ID NO: 69742 - DNA, 250 bp, Glycine max
  Clone ID: 700840162H1
tgtagtttcttcttccagcgcaagaactcgcggtctctgatccgaaaagtggaagtttttcagttgcttttggagtatttgcgtgattcccaatcgggttcttcgtgtcttccacccacgacggtactcatctcaaggagctctacctcttgctctaccgctccaagattctcctcgattactgcgcccaatcgagtaagttgtggctcttgcttcagactcattccatctctggtcacttccatgattt

SEQ ID NO: 69743 - DNA, 260 bp, Glycine max
  Clone ID: 700840164H1
ctcgaggttggaagttaaatgcctatgccaaggatgcagttatatgctgctgcaaaggcagcattagtgaacttttatgagacactgagatttgagttgaaagatgaggttggaataacaatagccacacatggttgattggaagcgaaatgacgaggggcaagttcatgctggaggagggtgctgagatgcaatggaaggaagaaagagaagtgacgggtggaccagtagaggagttcgcaaggttgatagtatcaggg

SEQ ID NO: 69744 - DNA, 252 bp, Glycine max
  Clone ID: 700840167H1
gaagagaagttttgtgcaaaatccttgggaacagtaattggttttgccatttcaaagctgggaaagaacattcaagtactttcaagttcctttgtcaataagcaagagcaatacactgtggaaggagtgagaatcttggagacaaagcagtgatgtgtcatgggctaaatttcagaactgcagtattttactgccataaagtccgtgaaacaacagctttcatggttccattggtggctggtgatggaacca

SEQ ID NO: 69745 - DNA, 251 bp, Glycine max
  Clone ID: 700840169H1
gttgcgtagaacagagaaaaagaaagtaccaatttcttgagagagaaaacccgaagaagagtcatggcttccaccttcgacgccttcaccgtcgacgacgaccacttcgccgccccctccgccgctgcaccttctccggctacggcgacttctctactttcccctccgacgatgtccccgtcgaccacgccgccaccgcggcgtcgccggagatcttcggattcagcgatcccgatccaggctactccccg

SEQ ID NO: 69746 - DNA, 250 bp, Glycine max
  Clone ID: 700840170H1
atcgtattgtaattgttttgtatctcatcatttcacttcaagaatatggcttccgaagcagcaccacacttcgtcttgtttccactgatggctcaaggccacatgatccccatgatggacatagcaaaatattggtgcaccgcaacgttattgtgactgtagtcacaactccacataacgcagcacgtttcacatcaatcattgatcgttatattgagtcagggtttcctataagattggttcaacttca

SEQ ID NO: 69747 - DNA, 249 bp, Glycine max
  Clone ID: 700840171H1
caagccaccactagatgtttttgtgcaattccgtgggagagaaccaacaccagatgcattgcttaggcacaatggcctattacaagttgcagcttcgtgatagatcgatagagttggccacttttatatcaataaatgggactcgtacttacctaagaatatggggcctcatacttttttttcatatgtagttttttgtcatgttttttaacttaatttttccatatttaaaggaatctaaattttgaa

SEQ ID NO: 69748 - DNA, 251 bp, Glycine max
  Clone ID: 700840173H1
agaagaaaggctcttcatcttctaaggatggcactgctaaatcaacctcttctaagaaaaaagcaagtggctctgatgaagaccacacttcacctactcacagtcaaattgacgagaaagaggaggctcagatgaagatgatgacgacgacgtgcaatggctgacagatacatcacttgatgctgcccgtcaacgtatccaagaacagttaagtgctgtgacagctgatatggttatgctttctacagatg

SEQ ID NO: 69749 - DNA, 245 bp, Glycine max
  Clone ID: 700840175H1
cctcgagccgattcggctcgacacacaactactacaagtacttcactacaatcaaaaccaacaacaactatggcaagttatcaaaagcactacgatgatcagggtcgcaaggttgacgagtatggcacgttgagaagcaaaccgacgaatacggcaaccctgttcatgctgctagtgtcacctatgtagccaccagaactgctgctggtggttacagtgatgacattaataagcaacatgatacc

SEQ ID NO: 69750 - DNA, 244 bp, Glycine max
  Clone ID: 700840176H1
gaaaaagttgtattgaaattttcacaagaggaatttcttacagcttggtcaactcaggtgcgtcctgcaacaactctgttggctgatgggtgtccatatttgtatgctatggtgcatgatagttcgtgtctacaataccaggtgattttgtcattggtgttaagttgacaaccataaacaatatgtgtgcatatgggctcaatcctggtatttcaggttctcgtcttttgggcaccattcctca

SEQ ID NO: 69751 - DNA, 249 bp, Glycine max
  Clone ID: 700840178H1
gatctccatatctgttcccaaaagcttgtttgtaagaatggcttccggtgaacagaaattccctcctcaacaacaacaaacacagcctgggaaggagcatgctatgactccagtaccccaattcacagccctgactacaagccttcaaataaacttcaagggaagattgcattagtcactgggggtgattctgggattggacgagcggtgtgtaacttgtttgccttagaaggtgctaccgtggccttc

SEQ ID NO: 69752 - DNA, 253 bp, Glycine max
  Clone ID: 700840182H1
agtttatcgatcccagggagttcacattcataatagacatatagaaattattgtgcgtcaaataacatcaaaagtcttggtttccgaagatggaatgtctaatgtttttttgcccggtgaactaattgattgttgcgagccgaacgagcagggcgttccttagaagaggcgatttgctatcgagttctattattggggataacaaaaacatctctgaatactcaaagtttcatatctgaagcaagttttcaag

SEQ ID NO: 69753 - DNA, 245 bp, Glycine max
  Clone ID: 700840184H1
agagaaagagaaagtggtgggggtgttcatcatgaggctaagtttgaaactaaaggtgaaaaaaagaaggatttagtgggaagagagcggaacaaagaggagaaacaaagaagcagtccaagaggaaagtagaggcagagaaagcaagaccaatggaagaaacaaaggtggaagctaaaggaagagaaaaagatgtaaccaaagagggtggtgttgaggaacaaggaataggaagaaaagaaaat

SEQ ID NO: 69754 - DNA, 249 bp, Glycine max
  Clone ID: 700840185H1
gctataatgatgacaccaatagacatcatggaactaccggtgtctatggtatagacaccgataggcaacaacatgggactactggtggctatgccggtgacactggtaggcaacatgggaacatcgtggcccttactatggaaccaacaccgcagacaccggtactggtcccagaagtggaaccacgggcggcaccggttatggaggcactggtggcactgattatggaacaactggtggcactggtta

SEQ ID NO: 69755 - DNA, 247 bp, Glycine max
  Clone ID: 700840186H1
gtccaagtccacacaacaacacacctctacgaagctggcgtcgtcccccccggagcccgtttcgaaccgccgcgttatgaagccggcgtcaaagcgccctccatttaccattccgagagaggtccaagacttcccaggtcctcgccgtcctcgccggcctcccggtcggtggcatcctgctcctcctggcgggattgaccctggcaggaaccctcaccggactggcagttgccacgccgctcttcgt

SEQ ID NO: 69756 - DNA, 251 bp, Glycine max
  Clone ID: 700840188H1
aacgtatcgagccagcctctcaagctagggttcttcaccgcgctccaaccttcttctctctcccttcgtcccctccaattggaatgtgattgtgacttcacatgctggtagctgacattttgaaattgaactgtggtgggagcaatattatatattttgcgacatcatggagatacagacttgtggcaggccgattgactccttgctagagaaagtgctttgtatgaatattctctcgtctgattacttca

SEQ ID NO: 69757 - DNA, 241 bp, Glycine max
  Clone ID: 700840190H1
caacacacaccccataacaccatggcggggaaggtggcagcggcattctgaacctcatcccggagatgtccctcacgggttcccaactcctagctctcctcgccggcgttccccttggtgcaatctgctcctcctctccggcatctcgctcatcgccagcctcttggggctggcggtggcgacgccgctcttcatcttcttcagcccgctgctggtccccgccgccttcgccataggaatg

SEQ ID NO: 69758 - DNA, 245 bp, Glycine max
  Clone ID: 700840191H1
cttggtgaaaaaaagaaggatttagtgggaagagagcggaacaaagaggagaaacaaagaagcagtccaagaggaaaagtagaggcagagaaagcaagaccaatggaagaaacaaaggtggaactaaaggaagagaaaaagatgtaaccaaagagggtggtgttgaggaacaaggaagaggaagaaaagaaaatgaacaatctagcttgaaagacatttccaagtacagagctgaagctcaacaa

SEQ ID NO: 69759 - DNA, 244 bp, Glycine max
  Clone ID: 700840192H1
aggccatataattttttttatttgaaataatgtccgggatcatccacaagattgaggagaccctccatgtgggagggcacaagaaagaggagcacaaaggagaacaccatggtgagcacaaagtgaacacaaaggagaacaccatggtgagcacaaaggtgaacacaaaggagaacaacaccatggggagcacaaggagggacttgtggataagatcaaggacaagatccatggtgatggccat

SEQ ID NO: 69760 - DNA, 245 bp, Glycine max
  Clone ID: 700840193H1
cttttctctccttatcactctctgcgccctccctccacgattctaccttcctccatggaacaaagctctttcccttttctcgaagagtggcaccacgccgcttcaactcttcctctgccaagtctccctcgaccacatccccaaacagttcagaaaggaaaatctcaaagatggattgatggaaaactacaagaatgcacctcaatctctatatggcctttctccttcacaaatggacatgttca

SEQ ID NO: 69761 - DNA, 248 bp, Glycine max
  Clone ID: 700840194H1
ggctcccctcacctctctctccgaaatccccaaattgcctgtgaatgctagaaaccctaggcacgttcgatttgatgctctcccatttgcaatcaagggcgagcgcattcggttcttgcacgcaagctggtactaccgctgcatcggcctcgatccctgaattcatcattctttctcgcaccatctttttctattccgattcgatttgttgttgttgttgttgttgttgtgtttttgtttccttcctt

SEQ ID NO: 69762 - DNA, 248 bp, Glycine max
  Clone ID: 700840195H1
gagaaacgagagagcaaaacaagcagcagaagctgccaaagagagaaacaagcaggcaaataaagggaatgaagaaggcagaagagaaagagaaagtggtgggggtgttcatcatgaggctaagtttaaactaaaggtgaaaaaaagaaggatttagtgggaagagagcggaacaaagaggagaaacaaagaagcagtccaagaggaaaagtagaggcagagaaagcaagaccaatggaagaaacaaa

SEQ ID NO: 69763 - DNA, 250 bp, Glycine max
  Clone ID: 700840196H1
cgcaacaaaaagaaagaatcccaggcgaggagaaagatggaggggaaggagcaggatgtgtcgttgggagcgaacaagttccccgagagacagccgattgggacggcggcgcagagccaagacgacgcaaggactaccaggagccggcgccggcgccgctggttgacccgacggagtttacgtcatggtcgttttacagagcagggatagcagagtttgtggccacttttctgtttctctacatcaccgt

SEQ ID NO: 69764 - DNA, 263 bp, Glycine max
  Clone ID: 700840202H1
gcaatggctatagcaagttaacaaatgggatacactcaccattgttgaaagcagcagcagcacataatggaaataatgggttcaaatcttccaatagttccttaaatggtgtatatacaagtccaactaccaatggggtgtgttgatgggaggagctgttaatcaatcatctgggttctttccttttttgcttacaaatgtgggtttgatttttctccaatgacagttttgtccacggggttagcttgtacagtttctagtgg

SEQ ID NO: 69765 - DNA, 265 bp, Glycine max
  Clone ID: 700840203H1
gcaggctagacagatattgaatgaagaaagagagttcgacttcctcacccgttgaagaagccgtgattgcttgagttgaatcagttgagtttggtcctaacgtatataagagagaggtttaggtatgaaagaagatcttaacttttaatttcataagagaagaaagagaggtaaatgagactggtatgccggtttccatcttgtttttgtcgggggttttggcagaattgggttcgactcccatagtcccgcggcattccccctg

SEQ ID NO: 69766 - DNA, 262 bp, Glycine max
  Clone ID: 700840204H1
caatttttggttggtgcgtccattcctgaatatattctccagctgcccaatgaagtcatgagcagcccaatgggagctcttatatgtgagttattgcatttccatgtcacttacctgcatctacattattgcatatttttcattttcaccctttgttcattttcattcatctttaacaaactatagagagttttaagcagaatcttatttagagtgatctttcttcatttatgttcatgtgcgtattaatcttaccactttt

SEQ ID NO: 69767 - DNA, 263 bp, Glycine max
  Clone ID: 700840205H1
ttttaagatatgagaaaggctccattgtcgaattcagacctaaccattaatcgagaagtgatgggaacgacgaaacctgcaaatacttaagattttattaaaaacaaatcttaatgattcattaggtgggatggcggaagaaaccaaaaagcaatcctttttttaggagttgtgccctacattacatctgaatttgattgataataaaagagtaaatattcgcccgcgataattttgattttattgacttttttttttatttt

SEQ ID NO: 69768 - DNA, 265 bp, Glycine max
  Clone ID: 700840206H1
gctccgggcccgtgcgccgcggcgtgtcggactcctgctcactccccaacaacaaaatccaagaccaattccctctgccacccagggctgtccacagtttagcgaaggaaaaacaacatattccttacgccaccacaagtggacagtcctgtctctgtctcagtctcggtctcttcctcctcggacgacgcggacgacgagatcgtgcaagccgtagtgtcgggctccatcccgtcctactcactcgagtcgcggctcggtgaca

SEQ ID NO: 69769 - DNA, 264 bp, Glycine max
  Clone ID: 700840207H1
gaaaaaaagaagagttgagattccctttgaagaaaagatggcatcccataggcaaagctatgaagctggtcaaactaagggccgaactgaggaaaagacgaaccagacgatgggcaatattggagagaaggctcaagctgcaaaggagaagacccaggaaatggcccaagctgcaaaggagaagacccaacaaacagcccaagctgccaaggacaagacttgcgacacttcccaagcggcaaaggagaagacccaacagaatac

SEQ ID NO: 69770 - DNA, 259 bp, Glycine max
  Clone ID: 700840211H1
agcacaaggacagtgatctctctttctatctttttgtctgtctctctgaacacgttgatggattccccctctcgcccctccgtcatcatcgtaggtgccggcatctccggtatcgcggcggcgaaggtgttggccgagaacggcatagaggacctggtgatcctggaggcttcggaccgcgtcggcggcaggatccgcaaggagagtttcggcggcgtgtcggtggagctcggtgccggatggatcgcaggcgttgggg

SEQ ID NO: 69771 - DNA, 263 bp, Glycine max
  Clone ID: 700840214H1
ctcgagcgcgttgccattctcatcctcctctgtctctctctctccaccattgccatggctccttacaagctccggccatccagcgccttcaattctcccttctggactacaaattctggtgctcctgtttggaacaacaactcctctttaaccgttggagctagaggtccaattctgcttgaggattatcatcttgtggagaagcttgcaaactttgacagggaacgtatcccagaacgtgttgtccatgccaggggagctag

SEQ ID NO: 69772 - DNA, 267 bp, Glycine max
  Clone ID: 700840215H1
aacaagaatatatggaaaaagatacaacccagaagtctgagacaaaagatgactctaaatcagaagagttttaaggtgcttctcataaacatccatgcttgccaatgtgtttcctgtttcatgcctcttttgatcgagaaggaagggttgaagtggagagaacgaccaaatgctagaaaaatgtaatgaagttactacttactaccctttcaaagattttgtaatatttgcagttggatgttaacatatttcacctgattttcattg

SEQ ID NO: 69773 - DNA, 106 bp, Glycine max
  Clone ID: 700840216H1
ggagaaaatcacgagaattgagaaccggagcagaaaaccgatccgattcactaaaccttaattgtctactttcctttcgcaactgaccctcttgtctataaacctg

SEQ ID NO: 69774 - DNA, 268 bp, Glycine max
  Clone ID: 700840217H1
cgagtttttattatcatcatctctctcgtgtccctgtctccatttccatctcttagtttcttcttcaaatggcagaagttgaagacatagacaaccctcatcacgaccaccatcattacctttcttcttctacaacacaacctccaatgatcaatttcccgcgagatctgttaagaaccttcgtgggagtgaacaacaacagcaataaaaacaataacaacagtcagcaccacaatttgcctatgccagtggtgaagttagaggatga

SEQ ID NO: 69775 - DNA, 263 bp, Glycine max
  Clone ID: 700840218H1
aacaagaatatatggaaaaagatacaacccagaagtctgagacaaaagatgactctaaatcagaagagttttaaggtgcttctcataaacatccatgcttgccaatgtgtttcctgtttcatgcctcttttgatcgagaaggaagggttgaagtggagagaacgaccaaatgctagaaaaatgtaatgaagttactacttactaccctttcaaagattttgtaatatttgcagttggatgttaacatatttcacctgattttc

SEQ ID NO: 69776 - DNA, 262 bp, Glycine max
  Clone ID: 700840219H1
cagggatgaacggcgccgtggaggttccccgtcccccgaacaccaccgtctcgatttttgagttcggctctgtcaccgcctccaacgaccaggtcacgctcgccggctattgccccgtctccgaagacctcgagccctgccgctgggagattctccccgccgttcagtctaacgccccccagtttcgcgtagtcttttgatacccaactttttatctcatcgccgcttatggaatgtactttttgctataaaacattcgaat

SEQ ID NO: 69777 - DNA, 262 bp, Glycine max
  Clone ID: 700840220H1
ggctccatgccaaccgttgttgcctccacaccagaattgttcaagctcttcctccaaacgcacgaggtaacttccttcaacacaaggttccaaatctcagccataagacgcctcacctatgatagctcagtggccatggttcccttcggaccttactggaagttcgtgaggaagctcatcatgaacgaccttctcaacgccaccactgtaaacaagttgaggcctttgaggacccaacagatccgcaagttccttagggtta

SEQ ID NO: 69778 - DNA, 252 bp, Glycine max
  Clone ID: 700840221H1
gtgaaatagattaattaatctattttatctaacatatatcccttttgtagtaattattagaatttgtagtaattattataagtattagaagcagcaattcttatttatttcagattaatacttgataacctaatcaatatatctatatatagaatatagatagatatatatataatagaacgtaaaaggaaatcagagtattacatagagaaaggagcatgttgattatatagaatgtaatgggcaacaatc

SEQ ID NO: 69779 - DNA, 259 bp, Glycine max
  Clone ID: 700839545H1
cgcatattacgtcatcaactattccatggcaaactgggtttgattctctggggggtacacgggctcaatctcagtatgccatggcatattacgtcatcaactattccacgctacgtatttgggagtttgtggagtacagcaagatgatatacctagacggtgatatccacgtttttgacaacattgaccacttgtttgacttgcctgataactacttctatgcggtgatggactgtctctgtgagccaacttggggcca

SEQ ID NO: 69780 - DNA, 258 bp, Glycine max
  Clone ID: 700839546H1
gcgatagctgataagagagataccaacaagacaagaaaaatagaagagttgagattccctttgaagaaaagatggcatcccataggcaaagctatgaagctggtcaaactaagggccgaactgaggaaaagacgaaccagacgatgggcaatattggagagaaggctcaagctgcaaaggagaagacccaggaaatggcccaagctgcaaaggagaagacccaacaaacagcccaagctgccaaggacaagacttgcg

SEQ ID NO: 69781 - DNA, 260 bp, Glycine max
  Clone ID: 700839547H1
agacaatttgaggaacaagagtgaactgcttctcaaatccaacccagttcacaagaaggttccagtgtttattcacaatgagaagcccatagcagagtctcttgtgattgttgaatacattgatgagacatggaagaacaaccccatcttgccttctgatccttaccaaagagccttggctcgtttctggtatcaattcattgatgataaggtaattcaacttttcttctttccttgtgttgttcttatttgtcccctaa

SEQ ID NO: 69782 - DNA, 260 bp, Glycine max
  Clone ID: 700839548H1
ctctttcttcctccatctccatcttaaacataacttgcactctccattccttaaattttagctacgagctagttccgacacagacactgcactggcaaataccgagtcacaggtgactgttgagagcatgaacaaagacctcaagcacctggggtttgtgaggattgctgctattcaaacatttgtgattgtgtcaaatctgtatcagtacgcaaagcagaattctgggcctatgagatccgtcgtaggaacggatgaga

SEQ ID NO: 69783 - DNA, 265 bp, Glycine max
  Clone ID: 700839549H1
cacaactactacaagtacttccttacaatcaaaaccaacaacaactatggcaagttatcataagcactacgatgatcagggtcgcaaagttgacgagtatggcaacgttgagaagcaaaccgacgaatacggcaaccctgttcatgctgctagtgtcacctatgtagccaccagaactgctgctggtggatacagtgatgacattaataagccaccatgttacgaaccaatgcctaagggcgtaaacactggtagacagcattct

SEQ ID NO: 69784 - DNA, 245 bp, Glycine max
  Clone ID: 700839551H1
gctctgaatactgctcgcgcgctcgtgacgctaatcatcgtcatggaactaatggttgctaaagtgcatacaccaataatcatcgttgatctattcgaagtctatggtaacgactacgataggcaacaccatgggactactggtggctatgccggtgacactggtaggccacatgggaacatcggtggcccttactatggaaccaacaccgcagacaccggtactggtcccagaagtggaaccac

SEQ ID NO: 69785 - DNA, 261 bp, Glycine max
  Clone ID: 700839552H1
attggatcacacttatacaaaattctccaattagtaacttgttgagagttgctgcttggaagaaaggctgtttaatggttaagattgtgatgtctgggaatgcagcagtcaaaaggagtgattgggcctcattggtacaagtgtttttaacaaacagcaacagtacagagcattttgatgcatgtaagtggacaaaatcggaaccacattcctgggaattgatcttcccaatagaggtatgtggtcctaatactggttttg

SEQ ID NO: 69786 - DNA, 281 bp, Glycine max
  Clone ID: 700839553H1
ctcagaattcggctcgcgcgcagccatgttcttaaccagaagcgcgcttggacgcttttcaaagtcactcccttatgccccttcactctcccttaaaccctccatggtcacctactcctctactcccaatacaggctggagaaatgcagcagacggaggaagaagagacggacgagccaattggacgtatgattctgccgaggcaagacgcgaggctgatgaaatgtctgatagtgctaaagatacgatgaatgatggctctgacagggccaaggatcacg

SEQ ID NO: 69787 - DNA, 266 bp, Glycine max
  Clone ID: 700839554H1
cgcacacaactactacaagtacttccttactatcaaaaccaacaacgtctatggcaagttatcaaaagcactacgatgatcagggtcgcaaggttgacgagtatggccacgttgagaaccaaagcgacgaatacggcaaccctgtacatgctgatagtgacagctatgtagacaccagaactgctgctggtagatactgtgatgacatttataagcaacatgataccaccagtgcctacggtgtacacactggtagacaacattct

SEQ ID NO: 69788 - DNA, 262 bp, Glycine max
  Clone ID: 700839556H1
gagaaggtgaagaccgagaaaaggaaaccagtggcagttcctgccaataacagaactagagcaagcaacggcaatggacgtccaatgccaccagccaaagctgggcgtttgactaatgcgtatgtatcatctttccctgctgctcctacatttgtcaggtctccatcacacgggcaatacccagctgctcttccaacatacccttccccaccccacatgtacggcagcagaagtcccccagcaaatccttatgctgcttatt

SEQ ID NO: 69789 - DNA, 259 bp, Glycine max
  Clone ID: 700839557H1
attcacccaatttgcagagttccaagttatatacatacactgcataattaagagaaaatgtctctgattccaagtttcttcggtggccgaaggagcagtgttttcgaccctttctccctcgatgtgtgggagccctttaaggattttccatttcccagttctctttctgctgaaaattcagcctttgtgagcacacgagtggattggaaggagacaccagaagcacacgtgttcaaggctgatattccagggctgaaga

SEQ ID NO: 69790 - DNA, 260 bp, Glycine max
  Clone ID: 700839558H1
gccagctagcgcttcttctctcgcattccgtggagatctagtgctgccaaacctcgctgaaaattaaggtttcgtttcggaggtagacgacgatgttcggaagggcaccgaagacaagcgacagcaccaggtactacgagatcctcggcgtatcgaagaacgcttcgccggatgagttaaagaaggcttacaagaaagccgccattaagaaccaccctgacaaaggcggtgatcctgagacgttcagagagcttgctcaa

SEQ ID NO: 69791 - DNA, 259 bp, Glycine max
  Clone ID: 700839560H1
cacaactactacaagtacttccttacaatcaaaaccaacaacaactatggcaagttatcaaaagcactacgatgatcagggtcgcaaggttgacgagtatggcaacgttgagaagcaaaccgacgaatacggcaaccctgttcatgctgctagtgtcacctatgtagccaccagaactgctgctggtggttacagtgatgacattaataagcaacatgataccaccaatgcctacggcgtagacactggtagacagcat

SEQ ID NO: 69792 - DNA, 240 bp, Glycine max
  Clone ID: 700839561H1
tagggctcgtgcaagacttcgttgagcgctcgcagtatcgcagagcttgggtactacgcgaactacgtcgcgcgactctgctacatcgcgtgtgggtttacactgtaccgtcacatccgtgaaatgtacgtgtacgagatccagcatatgtactatagctccttcgatacccgctcggatcgtctcgtcatggttaccgctatggcctccgtttacgccgtcgcttactacttcgactca

SEQ ID NO: 69793 - DNA, 249 bp, Glycine max
  Clone ID: 700839563H1
cggaatttcccttcaatccagaaccaatcacgtaaccctttccgatctcaaaaactctcttatccctcaatcacaccaatccttctacttcaccttcaatggcaaacccctccccgacaaaacccctctttcccaattcccacctctctgtaccctctctctacgctcccgcgtcctaggcggcggcggagacggtggcgctacctgagccgagtcccgcgactgctacctcaacatgtacgccgacaa

SEQ ID NO: 69794 - DNA, 263 bp, Glycine max
  Clone ID: 700839564H1
tgctcgagccgaatcggctcgagcacaatgccaatgcttgggaggccgaagatgaagttgttctgatcacatgccgccttcagaatccaaatttggatttggtcggtgggactgccaaggaaaagcttgaaaatttctcaaatgagctgtatgagatgagatttaacatgaaaacgggtgaagcttctcaaaagatactatcagcatctgctgtagattttcctagggtgaatgagagctacactggaaggcagcagcgatat

SEQ ID NO: 69795 - DNA, 175 bp, Glycine max
  Clone ID: 700839565H1
cataatcatgaaatatgcatatttctaaaaattgcttctacttcttgccactagctctgtaaaattttgtaggattatatagtctcaaatagtattacattactatctgtaaaatccatataagaatttcatggaatatcagattagttctccaataacagttccatttagcaaa

SEQ ID NO: 69796 - DNA, 75 bp, Glycine max
  Clone ID: 700839567H1
gctcaacctgggtctaagctcgtctggtgcaataactgcgaccgaacctatcttaaggcgggccgctctcaagtc

SEQ ID NO: 69797 - DNA, 263 bp, Glycine max
  Clone ID: 700839568H1
acatcatctacatttcatcacaatctacctcaatcatgacttcagaaacaaaagcagaaacacaaactttgaccaccccctcttactcctcagatgttgacaatggtatagtgacggatgtagtcctatggagaagaccgacaatacatataagcgttcttgttgcggcaacagcggcatgggtgttgatggaagtgtttgaattcaacttcctcactctcatatcatgggtggccatactcggtcttgcttcaatattcctc

SEQ ID NO: 69798 - DNA, 260 bp, Glycine max
  Clone ID: 700839569H1
cttaagttcgagatccttcttgataagctctcttatagtcttttagggtcttcctctgcctcgaattgtatgccttctctccatctggtctactctcctcactacagagtctaccggtcttctctctacatgcccaaaccacctaagtctattttccaccatcttctctacaataggcgctactccaaccctctctctaatagcttcgtcactaattttatcctgtcgagtcttaccacacatccaccgcaacatcctca

SEQ ID NO: 69799 - DNA, 282 bp, Glycine max
  Clone ID: 700839570H1
gctcagacttcggctcgagctactaccagtacttccttacaatcaataccaacaacaactatggctagctatcaatagcactacgatgatcaaggtcgcaaggttgacgagcatggcaacgttgagaagcaaaccgacgaatacggcaaccctgtccatgctgctagtgtcacctaagtagccaccagaactgctgctggtggttacagtgatgacattaataagctacatgataccaccaatgcctacggcgtagacactggtagacagcattctagtggt

SEQ ID NO: 69800 - DNA, 262 bp, Glycine max
  Clone ID: 700839572H1
gctaggtcgtgtgctggggcacggaagcttcgccaatgtctaccacgcgcggaacctgaagacgggacagcacgtggctattgaaggtcggtggaaaagaacaggtgatcaacgtcggaataatggagcatgtcgagacggagatctcagtcatgaagatggtcaagcacgcaaacagcgtcgagctccacgaagtcatggccagtaagtccaagatctacatctccatcgaactcgtccgcggcggagagctcttcagcaa

SEQ ID NO: 69801 - DNA, 262 bp, Glycine max
  Clone ID: 700839574H1
cagcagcgtacacttggctctctccgaacacctgctacaccctgctggacctcatccttgaactctactacttcgtttctggtctctacgcctcctctaccgagtaccgccacaacgccgcctcgcgtgacttcgagcgtcagactgagcgtctgcgataccctgttcatatccgtgaggtcaccgttgaagaactcaacgtctacgacggctccgatcccgagtgtcctctcctcatggcgatctagggccagatctatga

SEQ ID NO: 69802 - DNA, 259 bp, Glycine max
  Clone ID: 700839576H1
atgccaagtacgcgcccgtctacttcgagacgtactaggtcgacggcaacatgaatgctgagccgccggacgtcgtcgattcgattcggactatcaaggtctgtctcaatggatgactcgttagccccataggcggtggcgtcagctgccacaatgttcagactctggaaagagcttgatctctatgcttctctggttagttgtctcaatctccctggcttacccacgcgacatgataatgaggatatcgttgtcatca

SEQ ID NO: 69803 - DNA, 258 bp, Glycine max
  Clone ID: 700839579H1
acaaattctcattctcataggaacatagattaaactacacaccatgacaacaaaatacttatgcaaatattaagtctgggaaggagtcaaaaaccaatccttattctaagcaaaattcgattcacaagaagacattgcctaccctaccgacttcgtagtgcacattaacgtgggataggacgtgactggcccgaggtcgcagatggtattgcctcctgatatgcttgatatagaaaaggggctttaaggggatcgtct

SEQ ID NO: 69804 - DNA, 272 bp, Glycine max
  Clone ID: 700839580H1
ttcggctcgacgaagcgtgtggttgtcaacgaactcgaatgtaagtttctataagacatcttggcacgtccatgattcagcagatgcagcatgcttgcaatgaatgcaacggtactggagactccatcagctacacatgtcgatacgcacagtgcactggataaaacgatgtgctacatggaaaagtccttggcgttattgtaggcaatggcatgccgaagcgtctgtggattacattccctggcgaactaagtcaagcgccagacacaatt

SEQ ID NO: 69805 - DNA, 263 bp, Glycine max
  Clone ID: 700839581H1
ctgacatacaagtttctcaacaccataattgatgacctttttgcctttgtcattaaaatgccaacactccatcggctttctgtcttccgtgatgatcttatctttgtcatatacttataccagaggtggatttataaagtggacaagaaacgtgttaatgaatttggttttggaggcgaggatgatcaggttgtggcagagacagacgccacaaaggaagatgagaacactacaacggaagaagagaagaacactaattgatt

SEQ ID NO: 69806 - DNA, 263 bp, Glycine max
  Clone ID: 700839582H1
tcgcaaaagcaaataactattaccaacaaactctactttcggcaaccttcaatttttttgaaagtcatggatttcagagtgatgggtttggagcctccgttgttccacacgctgcaacacatgatggacatgtcagaggacgctgcaggggaaaacaagacgtacagtgctccgacacggtcagacgttcgagacgccaaagcaatggctgcaacacctgcggatgtgaaggaatatcccaactcctacgtgttcgagatcga

SEQ ID NO: 69807 - DNA, 60 bp, Glycine max
  Clone ID: 700839583H1
cgctcgagccgacttatcatagttgtgaagcgcatgctggaggatgtccatccatataac

SEQ ID NO: 69808 - DNA, 262 bp, Glycine max
  Clone ID: 700839585H1
caaacaggagaagagatacaatcgagcctggaggagatttctaagcacagagctgacagctcaacagacagcagtgagttcaattgggggtgctactgagagatacgcgagagccgaagatgaagcaagtaaagcttccatagagagaaacattcaagcaaataagagggctgaagaagacagaagaaaagcagacagtggtaggggtgttcatgtggctaagtctgtagagaaggaggcttcagtgctgaaagcagaactc

SEQ ID NO: 69809 - DNA, 260 bp, Glycine max
  Clone ID: 700839586H1
cgaaaacctaagcttagaattagaaacaaagaaaagaagaaaggctagagttgatcgttgaaaatgcagggatgaaagaaatcgggagagtccattaaggagacagctacaaacattggtgcttctgccagggctggcatggcgaagaccaaggccactgtccaagagaaggcagaaagaatgacagcacgtgatccggtgcaaaaggagttggcaacccaaaagaaagaggctaagatgaaccaggcggagctggacaa

SEQ ID NO: 69810 - DNA, 261 bp, Glycine max
  Clone ID: 700839587H1
acctttaattttctaaaagtaattcagcggctgaataccaagcggagaagatgagtcaggagcagccacggcgtcccaaaggccaaacccccatcaaatacggcgacgtttttgtcgtctccggcgaccttgcacagaagcccgtcgcaccggaagatgctgccatgatgcaaagcgcggaaactcgagtgctcggacaaacccaacccggcggagcagcttccgtcatgcaatctgccgccaccaggtatgaacaggctg

SEQ ID NO: 69811 - DNA, 259 bp, Glycine max
  Clone ID: 700839588H1
gtccgctatgctattattcaggcggcaaaggctgttgctgatgtagtccgaactacattgggacctaggtctatgctatcaatgcttcttgatgctcatggaggaattgtggttaccaatgattggtatgccatcgtacgtgatacatacctcgcgcatcctgctgcaaagtctatgactgaggctagtcgcacataagattaagaagtcggcgtttgaacgacatctgtcatcatacttgctggtgagatgctcatgt

SEQ ID NO: 69812 - DNA, 257 bp, Glycine max
  Clone ID: 700839589H1
cggccatatatgccataggcatcattctcggaaagggtggcatatttgctagagcatgaggtgctgtcagcgtactaattgcggcagagggcgcatcggccacgttccaattaccttctatggtggtccgtttgatatcgaaaaactgctcggcaacagtctgacagctgggatatgtccgagtaaccagctcgatttgggtagagccggatctagatgttggctagttcaacgtcctgtagtaagaggtgtagtta

SEQ ID NO: 69813 - DNA, 76 bp, Glycine max
  Clone ID: 700839590H1
tgttcatcacatttacacagaacatgggtctattcggggctctattgatcttcattggcatgaaagactccatccc

SEQ ID NO: 69814 - DNA, 256 bp, Glycine max
  Clone ID: 700839591H1
cgttctgcccctatcaatctttctgatcgtctcaatcaggtgcttcggtgggccttaggttcaattgagatctttcttagcaggcattgtcccttgtggtatggctacaatgggaagttgaagcctctgatgatgttttcttatatcaacaccattgtctacccatttacctcaatcccattgattgcttactgtacgcttcctgcattctgtcttctcacaaataaatttattattcctcagataagcaactttg

SEQ ID NO: 69815 - DNA, 128 bp, Glycine max
  Clone ID: 700839595H1
acgagaagatgcgtagaccaacagagatgccgtcctcataggcgaagatgaaaaccctggcaagtcgtgccaaggcacaagtcgacatctatagagccatagtagacgcgaaggcagcgaaagcaacg

SEQ ID NO: 69816 - DNA, 241 bp, Glycine max
  Clone ID: 700839601H1
gtccagattggtgttttcactgcagtaccaatgataatgcgttttatacttgaattaggattgctgaaggctgttttcagtttcatcacaatgcaactacaattgtgttctgtcttcttcactttctcattgggaactagaactcattattttgggcgtaccattctccatgggggtgcaaaatatcgtgctactggtagaggctttgttgttcgtcacataaagtttgctgaaattacag

SEQ ID NO: 69817 - DNA, 260 bp, Glycine max
  Clone ID: 700839602H1
gcgtacatgagctctcagtactcctcgcgaggcttgatgaatggtaagatggagaattcattgaggacttgaatgatatgaattctaagaatttccagagaagagcttccctgcctgctaattttacagatcatgaaaatctgttgcatagtaacactccaagacggcctagttatatggctccaactgaatctacaaaagctaagctaagaggacatggacaaggctctccaaggtctgttagcgatttggcagatgta

SEQ ID NO: 69818 - DNA, 247 bp, Glycine max
  Clone ID: 700839603H1
cgtctcgtcatcgagtcttcgtgtgtcctcaactgcgacgtttctgcgctcaaagacaaggactaaattgttgatcctctcttagtacctggtcttcaggagcttcggcaccgtgtcaccattttcgcggatcgcgcgggctatccagagggtcccgagtgatgtagattatcagcatgttgaggtcgaacacgtcccgtcatgctagctcaaacctcccgcagatcgtgtttctcaagacatggga

SEQ ID NO: 69819 - DNA, 234 bp, Glycine max
  Clone ID: 700839607H1
tagaagagacttcatgtgacacttgttgtcacagtcaaggagctgttgttcactaagactgtcataacagaaaagacttcatgtgacaatgggtgtaatggatgtcttatgacgaatgcctacaattatttgctcgagtctggtgggctggacgaggagtcttcatatgcctacacttgggtgagatgtgaatgctaatttgatctggagtgtatagcagttgagatccaaatt

SEQ ID NO: 69820 - DNA, 237 bp, Glycine max
  Clone ID: 700839609H1
aggagaagaagaagaagtaggaggaagaaaaggggaaaacgcaaagaaaaaaagaggaagatagatcaagatctcccttgcgtttgtctcagttgaagaaattcaagagcagaacgagactaactcaacggtatcagacgtttcagggtttcagcacttccattttgtttttttccggatttgagttggaagaagatcaaagaggttcctagttgcttggattgttcctctggtggt

SEQ ID NO: 69821 - DNA, 237 bp, Glycine max
  Clone ID: 700839610H1
ctttgtgttgctcgctccctactctgttatgctgctccttcctatctgatttcaagggtttaaaccctaaaaaggacccacggcgagaagcttccaactcctctctcacgcgcggacctccccctccggcgacttctgcaccgacggacgggtaaaggataaagggatgatctacacagcaattgacacattctacctcacagatgagcagctagcaatctcaccttctagaaagat

SEQ ID NO: 69822 - DNA, 237 bp, Glycine max
  Clone ID: 700839613H1
gttgtttggagcgatccgagaaaaactctgtaaacatgttggtttaccaggacctccttacaggtgatgagcttctctctgactccttccgttacaaggaaattgagaatggaatgctgtgggaagttgaggggaagtgggttgttaaaggagcagttgatgtagacattggtgcaaacccttctgctgagggtggaggagaagatgagggagttgatgatgcagctgttaggttgt

SEQ ID NO: 69823 - DNA, 238 bp, Glycine max
  Clone ID: 700839614H1
cacaactactacaagtacttccttacaatcaaaaccaacaacaactatggcaagttatcaaaagcactacgatgatcagggtcgcaaggttgacgagtatggcaacgttgagaagcaaaccgacgaatacggcaaccctgttcatgctgctagtgtcacctatgtagccaccagaactgctgctggtggttaacgtgatgacattaataagcaacatgataccaccaatgcctacggc

SEQ ID NO: 69824 - DNA, 240 bp, Glycine max
  Clone ID: 700839615H1
gcgacgcagcagatcgcggagtgttggacgcgcgcggtgaggaagctgctggagagagtggtggagtcggtggagagaaaaacgttggagaaggcggcgagggagtgtcacgcggtggagcggatctggaagttgttaacggaggttgaggacgtgcacgtgatgatggatccggaggatttcttgaggttgaagaaggagttggggatgatgagaaattgcggggaaatggtgcgtttt

SEQ ID NO: 69825 - DNA, 76 bp, Glycine max
  Clone ID: 700839616H1
tttgcattgcatttcgttactttcatttgttgtgcaatcttacaagttccaaacttctctatgttgttattatttg

SEQ ID NO: 69826 - DNA, 235 bp, Glycine max
  Clone ID: 700839617H1
ttcagaaacagaggtcatttccgacatgggttttgaatcaagttctcgttttgttgaatggaacgtgaaagcaccgttggaagtgatatatgaagagtatggtgaaggtgaagaagcaggggatgatgcaaacgagaacgtgggtattatgaggtacccttcgttgtcgcgtttttacccggaatcggattccgatagcgaatcggagagtgagtttccggcgatcggaattggg

SEQ ID NO: 69827 - DNA, 238 bp, Glycine max
  Clone ID: 700839618H1
cacacacaactactacaagtacttccttacaatcaaaaccaacaacaactatggcaagttatcaaaagcactacgatgatcagggtcgcaaggttgacgagtatggcaacgttgagaagcaaaccgacgaatacggcaaccctgttcatgctgctagtgtcacctatgtagccaccagaactgctgctggtggttacagtgatgacattaataagctacatgataccaccatgcctac

SEQ ID NO: 69828 - DNA, 237 bp, Glycine max
  Clone ID: 700839619H1
aaaaacatagataatttctttgctgagaatgaacaacttgcattttgccctgccattgtggttcctggtgtatactactcagatgataagatgcttcagaccaggatattctcttatgctgattcacaaaggcacagacttggaccatactatctgcaacttcctgctaatgctcccaagtgtgctcaccacaataatcatcatgaaggtttcatgaatttcattcacaggatgagg

SEQ ID NO: 69829 - DNA, 235 bp, Glycine max
  Clone ID: 700839620H1
ctcgagccgaatcggctcgaggaaaaagaaaaaagcgatcatagactcacttcggccttatccagtttagggtttcggttctctaccctatctttcacgtatcgaaaccttaaatttacgatcaggtctgagcaatctggttggtagaacctttggtcttagtgagtcaagttttatgtctgaattagacgatcaaattcctactgccttcgatccttttgctgatgcaatgctg

SEQ ID NO: 69830 - DNA, 234 bp, Glycine max
  Clone ID: 700839621H1
ctaattcagactgtgaaactgcgaatggctcattaaatcagttatatgactgtatgatagtatctactactcggataaccgtagtaattctagagctaatacgtgcaacaaaccccgacttctggaagggatgcatttattagataaaaggtcaacacaggctctgcctgatgctttgatgattcatgataactcgtcggatcgcacggactttgtgccggcgacgcacattca

SEQ ID NO: 69831 - DNA, 232 bp, Glycine max
  Clone ID: 700839622H1
cacagcttttgttctagcacttcgctgtctgaggttctggattctcagtgtttgcggacgcagcatcatcttttagggaagaatggatcatcaagggcatagccagaacccatctatgggggttgttggtagtggagctcaattagcatatggttctaacccatatcagccaggccaaataactgggccaccggggtctgttgtgacatcagttgggaccattcaaccaccg

SEQ ID NO: 69832 - DNA, 236 bp, Glycine max
  Clone ID: 700839623H1
caagtacttccttacaatcaaaaccaacaacaactatggcaagttatcaaaagcactacgatgatcagggtcgcaaggttgacgagtatggcaacgttgagaagcaaaccgacgaatacggcaaccctgttcatgctgctagtgtcacctatgtagccaccagaactgctgctggtggttacagtgatgacattaataagcaacatgataccaccaatgcctacggcgtagacact

SEQ ID NO: 69833 - DNA, 236 bp, Glycine max
  Clone ID: 700839625H1
cacagcgcacgccgcctcaacatctcaactttcccttcgatctcattctcaggtgttgttgaagcttcctgtgttggcttggtatccctgcaagttctgctgtagcatattccaaggtgaaggtgtcacgttaaagtttctttcatgtttgaacaggctactatccatttgggagcaactgagctgcttggagagtatctttcttcctctaggaaaaattacagaccctaccacag

SEQ ID NO: 69834 - DNA, 237 bp, Glycine max
  Clone ID: 700839626H1
caagtacttccttacaatcaaaaccaacaacaactatggcaagttatcaaaagcactacgatgatcagggtcgcaaggttgacgagtatggcaacgttgagaagcaaaccgacgaatacggcaaccctgttcatgctgctagtgtcacctatgtagccaccagaactgctgctggtggttacagtgatgacattaataagcaacatgataccaccaatgcctacggcgtagcactgg

SEQ ID NO: 69835 - DNA, 238 bp, Glycine max
  Clone ID: 700839627H1
ccgacataccgtgaacatgcccatacgtgatcacagagattctggtaaacacgtgcagtgattcaaaagttactaacggacacagatccaagcagttgcgagcttgcgagatgcattcgacgaagagtagcaccagcgataatatcgatatcaatatcaaatcacaagataaagaaatccatcgatgctaccatcactaccgacagaagagaaagcgtccttgccaagacgcttggct

SEQ ID NO: 69836 - DNA, 224 bp, Glycine max
  Clone ID: 700839630H1
ggttcgagagacaatgaccagaagggttatagtgtagcaatagacaacattggttctgtggaccacatcactacaccacttgttgtaaaggccaatcttaaatcaggagatgttacacaagacaatgtccacaacggttatcgtatgtcgaatgacaccattggttatgtagaccagatcactacaccacttgctgtaacagccaatcttaaatcagatgtgtt

SEQ ID NO: 69837 - DNA, 238 bp, Glycine max
  Clone ID: 700839631H1
aactcagtgaaagagatccgaggcgaagagaagagaaaaattaagatggaggggaaggagcaggatgtgtcgctgggagcgaacaagttcccggagagacagccgattgggacggcgtcgcgagccaagacgacggcaaggactaccaggagccggcgccggcgccactggttgacccgacggagtttacgtcatggtccttttacagagcagggatagcagagtttgtggcactttt

SEQ ID NO: 69838 - DNA, 240 bp, Glycine max
  Clone ID: 700839632H1
attcaacgatttgcgctgtgaatcgatcattcattaacgatctttcaaggaaatattcgttgcgatcggtgattctgttgttgttattgaaaccacaatgcggggctatggcgatgaaggagatggttacgatgattattatgaggatgaagatgagtatgaagaggaggctgaggaagagtatgaagaagaggaagaggcgcctaggaagccttcagaagaagaaatggagtaccttga

SEQ ID NO: 69839 - DNA, 242 bp, Glycine max
  unsure (1)..(242): unsure at all n locations
  Clone ID: 700839633H1
cggtccaaattggtctcgcaactgcaccaccactgaaaatcatgatnatatacctgaattaggactgctgaaggctgtattcagtttcattacaatgcaactacaattgtgtactggcatcttcactttctcattgggaactagaactcattattttgggcgtaccattctccatgggggtgcaaaatatcgtgctactggtagaggctttgttgttcgtcacataaagtttgctgaaatta

SEQ ID NO: 69840 - DNA, 51 bp, Glycine max
  Clone ID: 700839634H1
cctttaatttgctgagagtaacccagcggctgattcgcccgcggagtcgac

SEQ ID NO: 69841 - DNA, 66 bp, Glycine max
  Clone ID: 700839637H1
tcgcgagtgtcgtttcgccagttcgtgatagctctatgttcatacaggatggtaagaaatatggag

SEQ ID NO: 69842 - DNA, 236 bp, Glycine max
  unsure (1)..(236): unsure at all n locations
  Clone ID: 700839640H1
ctctctttctcttcgaaggtttggagatctcttcctccctaggagcatnaagtcgagccaccgctgcgacgcagatcgtgcatttttgaggagcagctgacatatttcggcgtcgtggaccaaagacaaatgatcactccacatattatgatattctcgggatttccaaaactgccagagaagatggaatcaaggtggactatcgaaaggcggatctggagccccgtccagtcggg

SEQ ID NO: 69843 - DNA, 236 bp, Glycine max
  Clone ID: 700839641H1
tgcagaccgagctagctagctagcaagcaagcacagagatggaggcaaagcgaggccatgccctcatgtgcttggcacgtgtttcactcttcctctgcgctctaaacctatccgctgctcacggaagcaccacggttcaagacatcgcgagacagttgaaactcggggacaacgagcttctgcgcacggagaagaacttcaaggtcttcatggagaattacgggaggagtactcca

SEQ ID NO: 69844 - DNA, 70 bp, Glycine max
  Clone ID: 700839643H1
ctttgtgcaatgctgctcctcctctccggcatctcgctcatcgccagcctcttgcggctgtcagtggcga

SEQ ID NO: 69845 - DNA, 227 bp, Glycine max
  Clone ID: 700839644H1
aaaaaaatagtaaaaatttattttgtaaactgatttattttatattgtagtgatcatagacaagtttggttggtgtacatgggacgcgttttacttgaaggtgcatccctcaggtgtgtgggaaggggtgaaagggttggtggagggagggtgccctccagggatggtcctaatcgacgacgggtggcaagccatttgtcacgacgaggaccccataacgaccaaga

SEQ ID NO: 69846 - DNA, 236 bp, Glycine max
  Clone ID: 700839645H1
tccaatgtcttctcccgcggagttttatcactctcttccgccaataacgaaggcatatggcaccgtttgcctgttggctaccgcaacttaccatcttggattatatcatccagcttacattgcactattctacgataaagtgttctacggttttcaggtttggaggttgttcacaaacttattcttccttggaccattctctatcaattttgggatccgtctcctaatgaagtaag

SEQ ID NO: 69847 - DNA, 237 bp, Glycine max
  Clone ID: 700839648H1
ggagaagtatcacatctggagcaggagaatagcgttcgcagcgtttgcgttcgctctgatgttccaatcggcctcagcagacgacgtcgttgtgctcatagaagataacttcgagaaggaagttggtcaggacagaggagctctcgttgagttctatgctccttggtgtggacactgcaaaaagcttgctccagaatatgaaaagcttggtagcagcttcaagaaagccaaactgtt

SEQ ID NO: 69848 - DNA, 226 bp, Glycine max
  Clone ID: 700839649H1
ataatttctcagctttcaaatctccattcagcttcattttctgcatagaaaaaacccttttctggagaaagaatatagtcttcagctggacaaggatcattcatcttgaaagaagagtttgtgtgtgacaatctttatagtgctaaggagggtgcaagagagaactgaatttgctgtgatggcaactcgtagatatgcttttggaagagctgatgacgccactcat

SEQ ID NO: 69849 - DNA, 227 bp, Glycine max
  Clone ID: 700839650H1
tcttaatccccaaactgaacccacccctcttcgtccggttcactagcgttcgattcgtttctatctctctctctctctgtcatgcgttcgctcgaggcaccaaccgccgcggaaaacggctccgctccctacgccggcaacgtaaaatctcactccatcaacggtgctgaggcggcgactgagtccgaagcgtcgaagcagcgcatatcgtcggtgctcccgttgga

SEQ ID NO: 69850 - DNA, 67 bp, Glycine max
  Clone ID: 700839654H1
cttgttcttactccactctgctctgcttgccgctatcattgcgatgggctcacactcaaatcatcca

SEQ ID NO: 69851 - DNA, 234 bp, Glycine max
  Clone ID: 700839656H1
ctaattcagactgtgaaactgcgaatggctcattaaatcagttatagtttgtttgatggtatctactactcggataaccgtagtaattctagagctaatacgtgcaacaaaccccgacttctggaagggatgcatttattagataaaaggtcaacacaggctctgcctgttgctttgatgattcatgataactcgtcggatcgcacggcctttgtgccggcgacgcacattcaa

SEQ ID NO: 69852 - DNA, 233 bp, Glycine max
  Clone ID: 700839657H1
caaagaggagaagaagaaggaagaacaacaacaacagcttttgaaggagaatttattcgctgcggagtcagagagttccggcgaagataacacggcggtggtcgaatggaagccaccggagctgaaacctaagggttcgctttccggcgtgaaggttgtgactggtttggcggtggcttttcataatgacaataacccataaaattttgaatttttttcggctttttcatttt

SEQ ID NO: 69853 - DNA, 234 bp, Glycine max
  unsure (1)..(234): unsure at all n locations
  Clone ID: 700839658H1
agaaaacctaagcttagaattagaaacaaagaaaagaagaaaggaaagaattgatcngagaaaatgcagggaggaaagaaagcgggagagtccattaaggaaacagctacaaacattggtgcttctgccaaggctggcatggagaagaccaaggccactgtccaagagaaggcagaaagaatgacagcacgtgatccggtgcaaaaggagttggcaacccaaaagaaagagcaa

SEQ ID NO: 69854 - DNA, 237 bp, Glycine max
  Clone ID: 700839659H1
attagctttctcttccttcataatttctcacctttcaaatctccattcagcttcattttctgcatagaaaaaacccttttctggagaaagaatatagtcttcagctggacaaggatcattcatcttgaaagaagagtttgtgtgtgacaatctttatagttctaaggagggtgcaagagagaactgaatttgctgtgatggcaactcgtagatatgcttttggaagagctatgaggc

SEQ ID NO: 69855 - DNA, 236 bp, Glycine max
  Clone ID: 700839660H1
attaaacaatggcgttgttctcttctgccgcaaccgttcttcctcggaacctggcattcaccaaactctccctctctcactctcacactcttctaccgcgcttcctttctttcccaactcccaagtcatcaaaccctcgcaaccgcgtcgcagtctctctccaaaccccacgctctcaatccgccgcgtccgcttctccctccgcctccttccacggcctctgctacgtcgcggcg

SEQ ID NO: 69856 - DNA, 235 bp, Glycine max
  Clone ID: 700839661H1
aaatattcgtcattctacgcgatgtaccgtgtatgtaccaaaatattttggtacttaagtcttttaaaaagttttcatctcctctttggttgtccttagttccgatagttatctcctaagaatacaatcatatgtactgtacgcagtgtgaagatatagtattgtatgctgcttaatatgatcgtctaattaggctgactagctgtaatataagatatttccaggttgtaaaaac

SEQ ID NO: 69857 - DNA, 73 bp, Glycine max
  Clone ID: 700839663H1
cgtgtgctctctgcacactccgttcagcacagcacaacacagcgcaggagccgttcgcgcaggaatagtaggt

SEQ ID NO: 69858 - DNA, 242 bp, Glycine max
  Clone ID: 700839664H1
aagcaaagaaaggggtggtggctgcttcgaaagcttaataatttgcatatttccagaacatcatagttttcgcagcagcaaactaacaaattactcatatcatataataagatggcccgttctctctcgcaagccaaacgtattggtgtccttgttgctcaatctatctccctaattcccgttcatcggcgaggttacgcagtggcatccgatgtatcggtaagagttggattggcaatatt

SEQ ID NO: 69859 - DNA, 228 bp, Glycine max
  Clone ID: 700839665H1
atccaacgggcaatccagatgcaccgtgacgtgaacgatccgaacgtggtgaagtaccacgagatgtacgatcagaacagcgaaatccaggtgctgctggagttcatggacggagggtcactggaggggaaacacatcccgcaggagcagcagctggcagatctgtctcggcagattctgcgggggctggcgtacctacaccggcggcacatcgtgcacagggacatc

SEQ ID NO: 69860 - DNA, 224 bp, Glycine max
  Clone ID: 700839668H1
ggattttactgcttcttggtgcggtccatgccgtttcattgccccaattcttgcagagtttgctaaaaagttgccgaatgtcaccttcctcaacgtggatgtgtgatgaattggagactgttgtctcaaggagtggggaattgaggctatgccaaccttcctgttcttgaaagaaggcaagctcgtggacaaggttgtgggtgccaagtaagagcagctgctaa

SEQ ID NO: 69861 - DNA, 235 bp, Glycine max
  Clone ID: 700839669H1
gaaagtggagaagagaagatggagaaaatagagcacaaaacggtgaggccgaatggaatagacatgcacgtggcatccattgggtcaggcccagttgtactgttcctccacggcttcccggagctttggtacacgtggcgccaccagcttctgtccctctgcgccgtgggctaccgggccatcgcccccgacctccgcggctacggcgacaccgacgccccgcccgacgttcctc

SEQ ID NO: 69862 - DNA, 236 bp, Glycine max
  Clone ID: 700839670H1
gcaagatcggaaatggagagcaggagggacgaggcgcccgccataaacaacaccagcgtattcgcggcgctcggcagctggaagaagaggtagtagcccgagaaggaccaggaccaaggcccgtccaagtccaaggcccaggacaacaggaaagacgtcttatgggcacccgcgactctcacctccaggtcatgcgccgatgtcggcgacatatatgacgacgactactagccacc

SEQ ID NO: 69863 - DNA, 232 bp, Glycine max
  Clone ID: 700839671H1
cttgagatgatacaatcagagatgaaacacttaaggaaatgtctaccgactatggtacaatctcttcttgcaaagttatgcgagaaccgactggaatcagcagtggatcacgattagttgcagtatcaactcctgaggtagcaactcgagctattggtgcgatggatggtaaaatgcttgctggagaacctctgtatgttgcccttgcacatagaacagttgagagaagaca

SEQ ID NO: 69864 - DNA, 239 bp, Glycine max
  Clone ID: 700839672H1
ccacgaagcaatccgatccgactaacgatatccatccagcggctgtcatcctgagacctttggctatcacagcaacaggcttcgagctcgagcttaagttttgccatacccattaggcgagacccttcagattactggtccatcctggggtaccataattcggcccttgacaacactggcatcaggaacactactagtgttactgcaacttcttttccatcctccaacaatggactact

SEQ ID NO: 69865 - DNA, 233 bp, Glycine max
  Clone ID: 700839675H1
cttccttataaccaaaaccaacaacaactatggcaagttatcagaagcactacgatgatcagggtcgcaaggtcgacgagtatggcaatgttgagaggcaaactgacgaatatggcaacccggttcatgccactagtgtcacttatgtagccaccaaaagtgttggtggctacaatgatgacgctaataagcaacatgatattactggtgtctatcccgagaaagacacggta

SEQ ID NO: 69866 - DNA, 236 bp, Glycine max
  Clone ID: 700839676H1
cgtctttgaagtttctaagatgacttctccctacattaaatgtacagtctctatcttcatagcatttggaaatttggctgatgacaccatcaattttgaggcttttccccataagctggtgcagtttggtaagattcaggaaaaagttgtattgaaattttcacaagaggaatttcttacagcttggtcaactcaggtgcgtcctgcaacaactctgttggctgatgggtgccata

SEQ ID NO: 69867 - DNA, 232 bp, Glycine max
  Clone ID: 700839677H1
aatttttaccctcgtgatcctgcttcccataccatcgatatttcttctgttgcatacaactcactattccttggagacttcatgcaacctgactgggacatgtttcatagtttacacccagcagcagattatcatgctgcagcacgtgcaattggtggatgtcctattgatgttagtgacaagccaggcaatcacaattttgatcttcgtaagaagctggttctcccggatg

SEQ ID NO: 69868 - DNA, 237 bp, Glycine max
  Clone ID: 700839678H1
cagaactaccctttagctcttgctctttgttctttaccattgagtggccacaacaacaatggccttccatgatgatgagggtgctgatagagagtcgccacaaagtaagtttcagatggtcgactccacgagggctttcaacgctaatgcaggcgaaattcgtgtgatgacaagccatggtggtaggatattttataggcacatgcacatgggctacatctctatggaacagagtcc

SEQ ID NO: 69869 - DNA, 235 bp, Glycine max
  Clone ID: 700839679H1
aagccgaatttcccttctatccacaaccaaccacgaaaccctttccgttctcaaaaactctcttttccctcaatcacaccaatccttctacttcaccttcaatggcaaacccctccccgacaaaacccctctatcccaattcccacctctatccaccctctctctccgctctcgtctacttggcggctgcggagacggcggcgccacaggagccgagtctcacgactgctacctc

SEQ ID NO: 69870 - DNA, 241 bp, Glycine max
  Clone ID: 700839682H1
tccaagagaagtaaacaaccctcacattcaccacagcagcacacacagacaaagacaaccttgtttgtctccaatcaaaacctttcaagctggcgttcgaaaaccaagacaaccctgtccgagaaatcaagcccaagaataggagaatcatgggtgctggaggccctgatgatgaggacaacaacaggtggccaccgtggctgaagcctctgctaaaagaaagtttctttgttcatgcaag

SEQ ID NO: 69871 - DNA, 240 bp, Glycine max
  Clone ID: 700839683H1
ggaggaacactctgactcacggtatcataaaggtttcttgtatgagcacatctcgaaagcctctcatcaagagacatgataggacattcaagcttacagatccatcgtcagagcactgccctcctggagagttcgtccgagaaatccctctttcaacccgaattcctgaagacgccaacatagaagcatactacgatgggccaggatctgtgcttgagatcctggtgccaaaaatcgcgt

SEQ ID NO: 69872 - DNA, 237 bp, Glycine max
  Clone ID: 700839684H1
cacgattttcgtttcgccaattcgtgaaatcgaaagattcccacagaattgtacgaattattgttcatttttttgtctgttattgggaacagtatttttgtttcccagattcctctgattggttttgtgattccaatggtttttcttttctgttaatcctcatctactgtcgtgctccaacttggtaaactagaagttcatttattgttttcattcttcaatgggggatgcgagaat

SEQ ID NO: 69873 - DNA, 239 bp, Glycine max
  Clone ID: 700839685H1
ctcgagccgaatcggctcgaggagagaaagtagaggcagagaaaccaagcacaatggagaacactagagatgaagctaaagcgaagagaacaagctgaaaccaaaggtcaaaccaagaagggtggtggtgaggaacagggaagaagaagagaagaaataggagaagaaaataaacaatccagcctcgaagagatttctaaatgcagagctgaagctgaagagaaagttaagggagaaag

SEQ ID NO: 69874 - DNA, 235 bp, Glycine max
  Clone ID: 700839686H1
ctcaaagccaacatgcgtcacggggttctcgttgtcactgttcccaagtttcatcaacccactactactgcccctgccaataggaatgtcagggaagttgaaattgaaggcaccgactgaacccagtgaccaaaacgctgtctttaatcatgtcttgttcgatggaactgtgttttcttatatgttatgcgtgcgataccctaccctgctctgttttaagtcagttaaacaatta

SEQ ID NO: 69875 - DNA, 236 bp, Glycine max
  Clone ID: 700839687H1
ctctctttctcttcgagggtttgggattctcttcctcccttggagaaaaagaagagccaccgatgcgacgcagatcgtgcatttttgaggtgcagctgtcatgtttcggcgtggtggaccaaggaggaatgataactccaaatattatgatattctcgggatttccaaaaatgccagtgaagatgaaatcaagaaggactatagaaaggcggatatgaagaaccgtcaagaaaggg

SEQ ID NO: 69876 - DNA, 234 bp, Glycine max
  Clone ID: 700839690H1
aaaacaggaggccattttaggcgtgttaaggagcaatggaagagcagcagtcatgaaaaacggagagaaagatcagacgatgaagagggagggactggtgacgagcagagaataaaaggtggaaaacggagaaacaaggataagcactctgaattgcgctatgacgcagaggaaccagaagatgatttgatggatgaacagggaatggaggatgcagaagctgatataactaca

SEQ ID NO: 69877 - DNA, 238 bp, Glycine max
  Clone ID: 700839692H1
gttgtttggagcgatccgagaaaaactctgtaaacatgttggtttaccaggacctccttacaggtgatgagcttctctctgactccttccgttacaaggaaattgagaatggaatgctgtgggaagttgatgggaagtgggttgttaaaggagcagttgatgtagacattggtgcaaacccttctgctgagggtggaggagaagatgagggagttgatgatgcagctgttaggttgtt

SEQ ID NO: 69878 - DNA, 248 bp, Glycine max
  Clone ID: 700839693H1
tcggctctcgcacaactactacaagtacttccttacaatcaaaaccaacaacaactatggcaagttatcaaaagcactacgatgatcagggtcgcaaggttgacgagtatggcaacgttgagaagcaaaccgacgaatacggcaaccctgttcatgctgctagtgtcacctatgtagccaccagaactgctgctggtggttaagatgatgacattaataagcaacatgataccaccaatgccacggcg

SEQ ID NO: 69879 - DNA, 238 bp, Glycine max
  Clone ID: 700839694H1
attcggggatgcacctaacaacatgcgacagtttcaaaaccaagatattttccacgatttggccttcaccccattaaccatcaccctgcagggagagtacaacgtgagagtcaactcaataagaatcaaccagcacagtgtgttcccactgaacaagctatcatccaccatcgtagggtcgacctctggaggaaccatgattagcacctcaactcctcacatggttctccagcaatcc

SEQ ID NO: 69880 - DNA, 255 bp, Glycine max
  Clone ID: 700839696H1
tcgggattcggctcgcgcaaagaaaggggtggtggctgcttcgaaagcttaataatttgtttatttccagaacatcatagttttcgcagcagcaaactaacaaattactcatatcgtataataagatggcccgttctctctcgcaagcgcagacgtattggtgtccttgttgctcaatctatctcgcctaatgcccgttcatcggcgaggttacgcagtggcatccgatgtatcggtaagagttggattgggaat

SEQ ID NO: 69881 - DNA, 260 bp, Glycine max
  Clone ID: 700839701H1
ctcatctcatcagtgcaatcaatccgtagcatatattcatattcatagttataaataatcctcccgaatcgaggtgtcggttttgaaaagagttaacaatctcttctcttcgctcctgcacttgttgtttctttgcccttcatggcatctcaggctagccttctccttcaaaagcagctcaaagatctttgcaaaaaccccgtcgacggcttctctgccggtttggtcgatgaaaccaacatttttgaatggagtgtcac

SEQ ID NO: 69882 - DNA, 258 bp, Glycine max
  Clone ID: 700839702H1
cgattctcttccgcctcccttcccttcaactccacggcgcagatccgaggagtttgggaaaccctaattcattcctctttgcttcttctatctctattcctctaacaccagtgatggcaggtttggctccagaaggatcgcagtttgatgctcggcaatatgattctaagatgaatgaattgctttccgccgatggacaagaatttttcacttcatatgacgaatctatgatagttttgatgcaatgggccttcaaga

SEQ ID NO: 69883 - DNA, 270 bp, Glycine max
  Clone ID: 700839703H1
tcggaatcggctcgaaccgagcgattcggctcaggtggaacaaagaggagaaacaaacaagttgtccaagagaccaagtagaggcagagaaagcaagaccaatggaagaaacaaaactggaagctaaaggaagagaaaaagctgaaaccaaagagggtggtggtgaggaaaaaggaatgagaagagaagaaataggagaagaaaataaacaatccagcctggaagagatttttaagtacagagctgaagctcaacagaaagttaaggaga

SEQ ID NO: 69884 - DNA, 256 bp, Glycine max
  Clone ID: 700839704H1
acctaagtgagaaacaaagaaaggaaataattgatctttgaaaatgcagggaggaaagaaagctggagagtccatcaaggaaacagctgcaaacattggtgcttctgccaaggctggcatggagaaaaccaaggccactgtccaggagaaggcagaaagaatgacggcacgtgatccgatgcaaaaggagttggcaacccagaagaaagaggcaaagatgagccaggcagagctggacaagcaggcggcgcgtcag

SEQ ID NO: 69885 - DNA, 254 bp, Glycine max
  Clone ID: 700839705H1
gaccaaggccactgtccaagagaaggcagaaagaatgacagcacgtgatccggtgcaaaaggagttggcaacccaaaagaaagaggcaaagatgaaccaggcggagctggacaagcaggcggcgcgtcacataacacggcggccaaacagtccgccaccacggctgggcacatgggacatggccaccacaccaccggaaccgggactggaaccgccacgtattccaccaccggggaatatggtcagcccatggg

SEQ ID NO: 69886 - DNA, 255 bp, Glycine max
  Clone ID: 700839706H1
gcaattatgagaatatggagcttctgtttgttctatgtcatggctgaattgtgggggagtgtggtcatttcagtgctgttttgggggtttgccaatcagattactaccattgatgaagcaaaaagattctatcctctatttggacttggggccaatgtagcccttgtgttctctggtcggacagtgaaatacttttctaatctgaggagtactttaggtcctggagttgatggttgggccatctctctgaaagca

SEQ ID NO: 69887 - DNA, 254 bp, Glycine max
  Clone ID: 700839707H1
gtctgaatatgaccattcttgtctacgttcctgtcgatcacgagctttgtacaaagggatgaaggttggggcaactccggatttaatggtagcatacattgatttttttcttggtggtgatgagaagcgattagacattgtatcaattatacagaagagatttcccatgtgcataatttttggtggggatgggagctacatggcaccttataatcttcacaatgatacactgttgaccaacctccttggtcagc

SEQ ID NO: 69888 - DNA, 258 bp, Glycine max
  Clone ID: 700839708H1
cttgcaacgattaacaatggcttcaaccgacaagtcaccggacccaacgacggcgaagggtccggatccaactccggggaagccgatgagtgttggtcagcacgtgatcgacaagagtgcaatgatggtgcagtcgctggaccccattaagcagatgagtcagcacgtgtgctccttcgctatctacagccatgacatgtctcgccagatagagacacatcactactgctccagactccaccagaacttcatacaatg

SEQ ID NO: 69889 - DNA, 259 bp, Glycine max
  Clone ID: 700839709H1
gcgggcatcgcgataagtcctctgtcctactacaggtgctgcgacaacctttatcaagtccgaacgattgtcgactaccagatccgctggtctgcaatattcaccctagcccacaagcacaaatcctcggcgcggcatataatccccaagtactccaaagacttaaatatagtcaatcaagaaggtggtaagacccttgcagagttccccaacagcatagagcttgggaagctcggacccggtcaagatccgaacaaca

SEQ ID NO: 69890 - DNA, 258 bp, Glycine max
  Clone ID: 700839713H1
tgcaaacccctgctccacaggttggtaatcgacctggtagtgggtctcaagcttcatctccccccaaaacatccaacacgattagttcattggattctggagaaattgatgcagcttcagataccagtaaattgaagggtgcattggttgggaagggaaggggagctccccagggtagtagtggaaggggctcttttgtttatggtggagctatggggactgctggaaatatcagtggtagtcatggagatctgaact

SEQ ID NO: 69891 - DNA, 263 bp, Glycine max
  Clone ID: 700839714H1
actcgatgccgattcggctcgagcggggttcgagcgagagaggaggagtgttgggttcggctacagcggcggcgcggattccgacaattggaacacaaagaagggcgagtccaacgttggtagcgagagagttggtgggaggccgaagcttgtgttgcaacctcggacagtgtccgtgagcgatgaaggggttgatggcaataatgcggggaagcctaaaggtgttaatccgttcggagaggcgaggccgagggagcaggttt

SEQ ID NO: 69892 - DNA, 164 bp, Glycine max
  Clone ID: 700839716H1
gatattctgagttctaacgccactaatcctatgctgacgcgacttcttgaaaactgtaagagtctcaaatatctggttgatgagtgtccttttgcatttgtgaactagtatgtaatattttattcacttaaataaagcgcattactactgcaatgagtgtgttt

SEQ ID NO: 69893 - DNA, 253 bp, Glycine max
  Clone ID: 700839718H1
ctagttctagatcgcgagcggcctatgcaaaaattagggtaatagaaaatagaaatagaagggagaagaaaaaaatcaggggcatgttgttaaggttttgtccccaaaatccaaactacaaaaggatataagtcaagatttgaaatgacacatagccatatttcaacatcccaaacactagtttatccattgctaccacttccgagccaaagcatacttgttttctaaaaacaataggaggaaaacagcagag

SEQ ID NO: 69894 - DNA, 254 bp, Glycine max
  Clone ID: 700839719H1
gacacaattgacaatgtgaaggcaaagatccaagacaaggagggtatcccaccagaccaacagaggctcatttttgctggcaaacagcttgaagatggccgaaccttggctgattacaacatccaaaaagaatctaccctccacttggtgctccgtctgcgcggtggtatgcaaatctttgtgaagacccttactgggaagaccattactttggaggtagagagctcagacacaattgacaatgtgaaggcaaa

SEQ ID NO: 69895 - DNA, 254 bp, Glycine max
  Clone ID: 700839722H1
gaagagtttgtattcaccgatatatttgaaaggcctgttccttctttgttaagaggatacagtgctcctattcgtctggaatctgatctcactgatagcgacctgtttttcttactagccaatgattccgatgaattcaaccgttgggaggctggacaagttttggcacggaagttgatgcttaacttagtggatgatttgcaacgtaacaaaccattggttttaaattccaattttgttcaagggttcaaacg

SEQ ID NO: 69896 - DNA, 255 bp, Glycine max
  Clone ID: 700839723H1
gcctattcctcaccacaatttgattccttcctcttctcttcttcgctcactatataattcattcatctctctcttttctcttttcagctactttaggcagccggctattcaggaatcatggctagggttttggctcagtctattaatgtccctggtctattggctgagcataggcatggtcagcaaaaggaatcaggaaaattaaaaagatcgaccaaaatgatgagtgctttacgaacaaatggattaagaatg

SEQ ID NO: 69897 - DNA, 255 bp, Glycine max
  Clone ID: 700839726H1
caaagaaaggggtggtggctgcttcgaaagcttaataatttgtttatttccagaacatcatagttttcgcagcagcaaactaacaaattactcatatcatataataagatggcccgttctctctcgcaagccaaacgtattggtgtccttgttgctcaatctatctccctaattcccgttcatcggcgaggttacgcagtggcatccgatgtatcggtaagagttggattgggtaatattgggcgaaggaatgga

SEQ ID NO: 69898 - DNA, 255 bp, Glycine max
  Clone ID: 700839727H1
acagcatcaagcaaccaacacaaactgatttctcatttcgtagcatcaaccgctaactatccagatactaattttcgctttggtttggttcaattctgtccgcagacatggttttcaggccaatgagtggtaattggttagcactgttaagaaacagttatggaggtaaagccgcgtacgcaacctcaacagcaccaaagatgaaagcgtatgcagctgcggctgattacggacacaagcaacaacatgggaagt

SEQ ID NO: 69899 - DNA, 256 bp, Glycine max
  Clone ID: 700839728H1
aaggattttctcgtttggaagaagtcctagatgatcttgctcttgatattccatcagctaaaactcagtttcagtcattggtgcctaaggcaatatcagaagggtggcttgatgcctcatttttgaaaccatctagtgaagatggggatatagtagttgaagatgaaaaggtgaggaagtataaaaaagaggttgtaactataattcatgaatattttctttctgatgacattcctgaactcattcgaagtcttga

SEQ ID NO: 69900 - DNA, 259 bp, Glycine max
  Clone ID: 700839731H1
gattgtcagacctattatctgagggtcctttagccatgattgtagtgctgttgtctatcatatttgttattacctaatgcataatttgtttagtttatctactatcaattattagttactgtccactgctaagtgttattgtcataaaatgtgttaaatgtctcagagaagcttgtgagtctgctctgaaggaaaaacattttctggatttctctcaaatggaaggatttgtagatgatgctactacttcccagtcaga

SEQ ID NO: 69901 - DNA, 268 bp, Glycine max
  Clone ID: 700839732H1
attcggctcgagctgatatataaaatgctggattgtttacgtgaaattcagtggaataagaataattaaacatttggataatattaaataatgtagtagactatgaaaagcatctagttccaccaaaaggcgagaacattgaactgattcggaacggaagtccaccaacccccacgtgaaataacttactcaccaactgctgtattgaaaatataagttatagatccgctggagtttggcccggtggaaacgtgctaggttcacaact

SEQ ID NO: 69902 - DNA, 255 bp, Glycine max
  Clone ID: 700839733H1
ggaagatctattattaattggatcctgcttttgaagtaaaatggagtctggagctggaggcctagtgtcgtcgtctgagaaagaaggagcctcgtatacctattgggttaggaaaataacggaagatgcagcgcctttgcctctgcctcgtaagctcaacccagaagatcttcccccttcccaatctcaatcttccacgcttgcttcagcttggaatcgcgctgggacatgggaggagaaaagtctaagcaattg

SEQ ID NO: 69903 - DNA, 253 bp, Glycine max
  Clone ID: 700839734H1
ggactgcggaggcggccaagaacaaggccgcagaggtaaaggacagagctgcagaaaccgcggaggcggccaagaacaagactgccgagactgctgaggcagcgaacagaaaaccgcacaggcaaaggacaacgccaaggaaaatgtgagtggtgcagatgaaggagcaaggaggaaaatggaggacctaaggcttcgaggtaaagggtatggaagtcatgaatctgcaggggggcgtggagataaggtggtg

SEQ ID NO: 69904 - DNA, 251 bp, Glycine max
  Clone ID: 700839735H1
ctcgagccgctcgagccggtttaaacctaattctcattacttcatcgttcgattcttctcctcctaaaggtacgtctctggtttcctctctctcttgttcattctcttcgtaatagcaaccttattagccttcgtttattgatttttctcctaattacacttcaattttttcgatttgtgtttgttacgtcaatctgtatatctgttttgttgtcgtcgaatccgaaacttttcattcgcctttctgattc

SEQ ID NO: 69905 - DNA, 250 bp, Glycine max
  Clone ID: 700839736H1
gagatgccccaaagggtgctaaaccagttgttcccgagagtaagattgtagccaatggggttgtttctaatggtgtctaagctctactgtgtttgaaggaggcggtccaatacacctcagtggcatatattggtgttcttagaagtatatttatcagcaatttggtaccgcccggatttgatctgtcttgccttctcttgcagtctgaagatagtgtgattggttgcctagtgaagataaagatctgtat

SEQ ID NO: 69906 - DNA, 248 bp, Glycine max
  Clone ID: 700839737H1
ggagaagactgagttagaaaacacgctcggtcttcttctccaatggcgatttccgatgagcctgaaagtgtagccactgctctcaaccactcttccctgcgccgccgtccctccgccacctccaccgccggcctcttcaattcgcctgagacaaccaccgacagttccggtgatgacttggccaaggattctggttccgacgactccatcaacagcgacgccggcgccgtcaattcccaacagcaaaa

SEQ ID NO: 69907 - DNA, 253 bp, Glycine max
  Clone ID: 700839738H1
ctcttctttccctctttcactctctctctccaacaccaacaataagaacagaacaagagttaagaaacagagcatagagtgatttggtgggtggagagaggaacagaacagagcaacatgaagccaccaacgaaacccatttcgagccctggtcgaaccgagaagtttccaccaccgttgatgagattcttgagaaacaatgcctcaagcagaagcagaggaaggtcaagaaccaccaccgccatgtttctga

SEQ ID NO: 69908 - DNA, 254 bp, Glycine max
  Clone ID: 700839740H1
ctcgagccgattcggctcgagcaaaagagcaaagaatatgctggacatgctaccaagagaagcaaagaggcttctaatgatacatgccaatgacatggctcagaagaccaaagactacgccagtgacactgctcagagaaccaaggaaaaactccaagacattgcatctgaagctggtcaatacagtgcagagaaagctagagaaatgaaggatgcagcagcagagaaggcaagtgacatagcaaaggctgcaa

SEQ ID NO: 69909 - DNA, 251 bp, Glycine max
  Clone ID: 700839742H1
aaaaactcaatatcaaattctttgtcccacaaaagatggggttcactcccacaagtactgcaacatgctttctcataatagcacctctggttgtgctatggtgttggaagctactaaagtgggtgtggctgaggccaaagagattggagagagcattaagggcacagggccttcaggggaatccctacagcctcttgattggggacactaaggaaatgtacacagtgctcatgcaagctgccagatctcaa

SEQ ID NO: 69910 - DNA, 252 bp, Glycine max
  Clone ID: 700839743H1
cttaaatttcacaagcaagttgtatttttggagtattgtattatatgaccaaatattttagtgttttaggactagatattttgcttctggtggcaatttttctcttctccttctggttttcatcttttgtgttcttctttgtttctcacctttctgaggatttttccatcttagttcctggaggcaccaggaacctgaccaaataaataaaccttttttttcttctaatttttctgaagtttcattttttag

SEQ ID NO: 69911 - DNA, 252 bp, Glycine max
  Clone ID: 700839744H1
cccaaactgaagaaatacaaaaaaatggcttgagatcaagcctaaccacgaaaaaagaaaaaagaaaaaatgaccaggggcttgggaatgcttgagtctaataagtctagacttttttaagtctagacttttagatgatatggtactttccaaacttaaaaatgttaaacgcctgtattaatccaacaaaaaatgggcctttgaaactaaagaaaaacaaactaagattggccagtggcgaagaaatacaaa

SEQ ID NO: 69912 - DNA, 254 bp, Glycine max
  Clone ID: 700839745H1
cgttcatcggcgaggttacgcagtggcatccgatgtatcggtaagagttggattgggtaatattgggcgaaggaatggaatcgtgggaggtgtagaagagaagcctgatacaagagatggttcaaaagcctactcaactgattgggccccagacccagtaacaggttactataggcccattaaccacacccctgaaattgacccggtggagcttcggcataggttgctccgatcacctccactagagcctagag

SEQ ID NO: 69913 - DNA, 257 bp, Glycine max
  Clone ID: 700839746H1
attctggtcaacaatgcagctgagcagtacgagtgtggaaccgtggaggacatagacgagcctaggcttgagagggtctttcgtacaaatatcttctcctatttcttcatggcgaggcatgccttgaagcacatgaaggaaggaagcagcattatcaacacgacatcagtgaatgcatacaagggacatgcgaaactattggactacacgtccaccaagggggcaattgtggcctatacaaggggtcttgcccttca

SEQ ID NO: 69914 - DNA, 260 bp, Glycine max
  Clone ID: 700839748H1
aagacttcatgtgacaatgggtgtaatggaggtcttatgacaaatgcctacaattatttgctcgagtctggtgggttggaggaggagtcttcatatccctacactggggagagaggtgaatgcaagtttgatccagagaaaatagcagttaagatcacaaatttcaccaatatccctgctgatgagaaccaaattgccgcatatttagtaaaaaatggtccacttgctatgggcgtgaatgcaattttcatgcaaacata

SEQ ID NO: 69915 - DNA, 252 bp, Glycine max
  Clone ID: 700839749H1
ctcttcctgtaatttcgggctatccgtacgaaaccttgcagtaacaaaaaatgcggagtttcactttctttgaacgagtttctagagctttccgcgatcatgggtccaacttcaagcttgtactcctctgcaccaccgtaagtggtggagggattgtagcttacggagaggctgctgccgcatctgaagcagcggcggcggcgacggagaagaaaaaggtggtggtgctgggaactgggtgggctggcacga

SEQ ID NO: 69916 - DNA, 251 bp, Glycine max
  Clone ID: 700839750H1
aggacgcatgatagttcagtgtctacaataccaggtgattttgtcattggtgttaagttgacaaccataaacaatatgtgtgcatatgggcttaatcctggtatttcaggttctcgtcttttgggcaccattcctcagtccatttcacagcaaactgtttggaatcaaatggcaacagtgagaacaccattgaattttgattctagcaagcagagcttttgtcaattttctatcgaccttctcggtggagg

SEQ ID NO: 69917 - DNA, 249 bp, Glycine max
  Clone ID: 700839751H1
ctcgagccgattcggctcgagggctcgaggaaaggcaaatggggcgtgcttcctcgaagcgtgttgatgcggcagagtcacctaccgtcccgcacccacaagcttggcggtgttcgacatcaacaccatcgaggagccatggctgaagcacctcaacaacaccatcgaggagccatggctgaagcacctcaacaacaccacccctctcccccaagacaataataaaccctccctccccgcccctattct

SEQ ID NO: 69918 - DNA, 249 bp, Glycine max
  Clone ID: 700839752H1
gatggcacaagttgaacttcgtgacgagcatgggaacccagttgaactaacagatgcatatgggaatccggtttggttaacggacgagaaaggcaacccggtgcacctcacggctgtggcaaccaatgcacacaaatctatgcttcagaatgacaccccacaagagcttcctcactccaagagttcaagctcgtctgaggatgaagggcatggagagaggatcaggaagggactgaaggataacataga

SEQ ID NO: 69919 - DNA, 251 bp, Glycine max
  Clone ID: 700839754H1
gtttttgtgtgtcgcttcttcgtaggtgcagctgcaatggtgaagggacgccaaggagaacgtgtcagactctacgtgaggggtacaatccttggatacaaaaggtccaagtcaaaccagtatccaaatacatccctgatccaaattgagggtgtgaatgccaaagaagaagtagcatggtatgctggcaagaaaatggcctatatctacaaggctaaggtgaagaagaatggaagccattaccgctgcat

SEQ ID NO: 69920 - DNA, 251 bp, Glycine max
  Clone ID: 700839755H1
gagaaggtgaataccgagataaggaaaccagtggcagttcctgccaataagagaactagagcaagcaacggcaatggaggtccaatgccaccagccaaagctgggcgtttgactaatgcgtatgtatcatctttccctgctgctcctacatttgtccggtctccatgacacgggcaatacccagctgctcttccaccatacccttccccaccccacatgtacggcagcagaagtcccccagcaaatcctta

SEQ ID NO: 69921 - DNA, 251 bp, Glycine max
  Clone ID: 700839757H1
gaaaacagcatcgaacccgtcgtagcagaaaaacttgtcaccatggtttcttccgacaaggatccacgagaggatgtccttcaagcctggtacatggatgatagtgatgaagatcaaagactcccccaccacaaagaacccaaggagtttgtctcgttggaccaacttgctgaacttggagtccttagctggaaactagatgctgataaccatgaaaatgatccagagctgaagaagattcgtgaagagcg

SEQ ID NO: 69922 - DNA, 251 bp, Glycine max
  Clone ID: 700839759H1
ctcgcagccatggctaagaaacgaaagcttcgatcctctgaccccgaacccaccaaacccatcgagccacagcaacaggaccaagagccagttgaactcgaccaacagcaacaacaacccaaccccaaacaaaccctagaagatcctaacacgatggccgtcgacgaatcaaaacaggaagaagaagaagaagaagaagacgaagaaccccaaaacgccgaaagcgaagaagaggaagaggaagctgagga

SEQ ID NO: 69923 - DNA, 254 bp, Glycine max
  Clone ID: 700839762H1
acagttcgcaggagctgcgtacttatatgaaaggttcgtgagagagcatataaggaaatatataacggagagacagtatctctatggcaaccaccagcaacaaagcaaaaagtctcccaataacggtggcaaggccaagaaattcgtcgaattcgtcacgcccaagaaaggggatcaggaggcatattgaattggcaattggacggtgctgagcagtgtattgtgagttttttaactgaggatcttccaattga

SEQ ID NO: 69924 - DNA, 254 bp, Glycine max
  Clone ID: 700839764H1
atcccaacctaccctttaaccttacctcaacgaaactgtatggctggaaccgtactcgtatgattcaacagtagtagagtaaccgtagcgtagaacgttgctttcgcagtacttcaaatggccgagaagcaatctcagagacagaatcacagaaccggagagaaagagatagatagagagagagaattttattgaccgccattgaagctttgcttcttctatctctcactcataacaaaattccccacacacat

SEQ ID NO: 69925 - DNA, 247 bp, Glycine max
  Clone ID: 700839766H1
gaaacaaagaaaagaagaaaggaaagaattgatcgttgaaaatgcagggaggaaagaaagcgggagagtccattaaggaaacagctacaaacattggtgcttctgccaaggctggcatggagaagaccaaggccactgtccaagagaaggcagaaagaatgacagcacgtgatccggtgcaaaaggagttggcaacccaaaagaaagaggcaaagatgaaccaggcggactggacaagcaggcggcg

SEQ ID NO: 69926 - DNA, 246 bp, Glycine max
  Clone ID: 700839767H1
caaaccttatcacctaatccttatcctcccaaaccagaaaaccatgtctacctccgcagcttccctcgcactcccaaccctcactctccgaacccgacaacctctatgttctccccaatgcttctcctcgtccctctccctcacacccaacaacaaacccatttccatttctgctgtttttctcaaaccaacaactctgtcgtcgtctcgcttcgttccccacgtcgtggtgtcgtcggatttggg

SEQ ID NO: 69927 - DNA, 247 bp, Glycine max
  Clone ID: 700839768H1
atttcaagttgttcttgaaattactactaacaaaaacaagaccaattggtcaaaaaccatgaatcttgatctggtccttcctaacaaggccagcctgaacgaggaagtgggagacgttcttacgctggtcgccttggagttggatgatcttgccaagctccttgtcctgcaccacggttccgttgcagcagaactccttcttgaggtccttgaggatcttctcgtagctgaactccttcttcagccc

SEQ ID NO: 69928 - DNA, 245 bp, Glycine max
  Clone ID: 700839769H1
gacaaactaagggaaaccatcaatagttcaacatcaagctcatccatcatatggctttggcacgtttggctttgaaaaacttgcaacaaagggtgtgtgcttcctctttcttgagtggcaatgttcacaagcagaggtggaacaatgagttgctgagaaggtttggtactgcagctggggacaagggaaaatctgaaggcactgaagttgctgtcactgaagggaaaaagtctaataggatgttc

SEQ ID NO: 69929 - DNA, 248 bp, Glycine max
  Clone ID: 700839771H1
cacacaactacaagaaagaacttccttataaccaaaaccaacaacaactatggcaagttatcagaagcactacgatgatcagggtcgcaaggtcgacgagtatggcaatgttgagaggcaaactgacgaatatggcaacccggttcatgccactagtgtcacttatgtagccaccaaaagtgttggtggctacaatgatgacgctaataagcaacatgatattactggcgtctattccgagaaagaca

SEQ ID NO: 69930 - DNA, 246 bp, Glycine max
  Clone ID: 700839773H1
atcaaaactccaacctgtgtcattctcgctgtgacgccggcgaattcggatttggcgaactcggatgctcttcagatggctggaattgccgatcctgatgggaacagaacgattggtgtcatcacgaagttggatatcatggatagaggcactgatgcgcggtatctgttgctaggaaaagttattcccctccgacttggttatgtcggtgttgtgaatcgtagtcaagaggatattctaatgaac

SEQ ID NO: 69931 - DNA, 243 bp, Glycine max
  Clone ID: 700839774H1
ctgttgttgatatctctaaatcccgcattgcagcctggaacagtgaccagcttcctatctatgaacctggccttgatggtgttgtgaagcaatgccgtggcaagaacctcttcttcagcactgatgttgaaaagcatgtctttgaggctgacatagtgtttgtctctgtcaacaccccaaccaaaactcagggtcttggagctggtaaagcagcagatttgacatattgggagagcgcactcg

SEQ ID NO: 69932 - DNA, 246 bp, Glycine max
  Clone ID: 700839775H1
aattcttctccttttgtgcttccaactcttttctttgttatattattctctttcactttctgccaacccttggagtcaacatgactatcctcattgagcaatctgatcactttggggctgaagtagaggcaaagactgaaccaataaatgagagagaactggtgttggatggtggatttctgataacacagaccaactcatttgggcacatgtttagggcttataatgatgctgaaagtgagaggc

SEQ ID NO: 69933 - DNA, 249 bp, Glycine max
  Clone ID: 700839777H1
attgaattctccagagagaagaagaaacttaatcgatcatcacttcacttcactaatacatcatggcagacgagacccagaacaagtatgagagctctgaggttgaggtccaggatcgtggtgtttttgactttctcggtaagaaaaaggatgaagaagacaagcctcatcctcaggaggaggtcatcgccaccgagtttcaaaaagtcactgtctcagaccaaggagagaacaagcacagcctcttag

SEQ ID NO: 69934 - DNA, 252 bp, Glycine max
  Clone ID: 700839778H1
aagatgacgaatctgggaattctattgccacccctcgagggacagaggttactgtgcaactcaaggttatgacacccgctgaacacgtgtctctctctgaagatgaggaaggatgatcatcatggtaagtgtgtgtgtgtgtgtgtgtgtgtgtgtgtgtgttgatatcatttcagaataattgtttttggattcgacttatttgataccaccctacttagctcaattagtgtataattttcagggttgcaa

SEQ ID NO: 69935 - DNA, 257 bp, Glycine max
  Clone ID: 700839780H1
ctgatatataaaatgctggattttttacgtgaaattcagtggaataagaataattaaacatttggataatattaaataatgtagtagactatgaaaagcatctagttccaccaaaaggcgagaacattgaactgattcggaacggaagtccaccaacccccacgtgaaataacttactcaccaactgctgtattgaaaatataagttatagatccgctggagtttggcccggtggaaacgtgctaggttcacaactc

SEQ ID NO: 69936 - DNA, 248 bp, Glycine max
  Clone ID: 700839787H1
cgactatgcaagtgatgctgcgcagaagaccaaggactatgcaagtgatggtgctcaaaagagcaaagaatatgcgggtgatgtagcactgaatgccaaagattatgctcaaaaaagcaaagattacgcaggtgatgctgcacagaatgtcaaagattatgcaagtgatgcagtgcagaagagaaaagagtattctggtgatgcttctcacaagagcaaagaggcttctgattatgccagtgagacgg

SEQ ID NO: 69937 - DNA, 246 bp, Glycine max
  Clone ID: 700839788H1
gtgaagggaaggtgggagaaaccgggtcacagcccactatttgggtatgacttttggtaccaaccacgtcacaataccatgattagcacatcatggggtgctcctagtgcttttacaaaaggttttaacttacagcatctctctgatggattatacgggaggcatctccatgtatatagctggcctgggggcgaactgagacaaacaatggaccttggtgattcagggcttatacccttagagata

SEQ ID NO: 69938 - DNA, 245 bp, Glycine max
  Clone ID: 700839789H1
caccttcaacaagttgaatcaaacagtgaaagtaaaacattgtgcaattaatcatcaactgcaagtagccagtgcataagatcaatggcgtcaagacagcaattcaaggaagacagagccgaggcagctgcaaaactcgcagcgaaagacatcggcgacatcaacagaacaaacgagcgcgacgaggggtacgacttgcacgacgaagccaacttcaagcaagcacgagctgaagcagctgcaaa

SEQ ID NO: 69939 - DNA, 156 bp, Glycine max
  Clone ID: 700839791H1
tgtgtcgggtggggtgtgtgctggttgttgtgtgttgtgtgttgtggtccgtgtgtggtgtttgtttgtgtgtggtgtgtttcgtgtcgttctgttgtgttgttgtgatgtgtgtgttgtgggtgtgtgtgtgtgtatgtgatggtgtggtgtgtg

SEQ ID NO: 69940 - DNA, 246 bp, Glycine max
  Clone ID: 700839792H1
acaactactacaagtacttccttacattcagaaccaacaacaactattgcaagttatcaaatgcactacgatgaacatggacgctaggttgacgagtatggcaacgttgagaagcaaaccgacgaatacggcaaccctggtcatgcttctagtatctcctatgtagccaccagaactgctgctggtggttacagtgatgacattaataagcaacatgataccaccaatgcctacggcgtagacact

SEQ ID NO: 69941 - DNA, 248 bp, Glycine max
  Clone ID: 700839794H1
ggccaccgctccttcgcttctacactcatctgggtcctctttcttctctcaatttcgtgcctttcaattctcttcttctttgctgttccctcatagtaacaagcatgggaatgcactggtctctgtgaaggcctctgtttctggggttgtgttggtggagaagtctgaggcagagaaggccaataggctcaaaacagcttacactgagaaaattattcccttgctcatggaagagttctcctacacca

SEQ ID NO: 69942 - DNA, 252 bp, Glycine max
  Clone ID: 700839795H1
gttccctgaaaggtgtagactacacttagtattcaagttgcatgcagttttagggtataccattgtgtattgggttttgtttatatccatacattgctgattacttttttggtttttatgcagcggtcacagctactggaattatctggtctcgttacagcactgtaatcaccccagtaagtttgattttttctaaagacagatttcttttaactggtccatttagacgtgattgacatatttcttttaact

SEQ ID NO: 69943 - DNA, 256 bp, Glycine max
  Clone ID: 700839796H1
ctttgttctcaaaccttatcccttatcctcccaaaaccaaaccatgtctacctccgcagcttctctcgcactcccaaccctcactctccgaactcgacaacctctctgttctccccaatgcttctcctcgtccctctccctcacccctaactccaaacccatttccatttccgccgttttcctcaaaacaacgctgtcgtcgtcgtcgccgttgtcgctgtcgtctcgcttcgttccccatgtctctgtgttggag

SEQ ID NO: 69944 - DNA, 267 bp, Glycine max
  Clone ID: 700839801H1
taataactctatttgcatcgagaagttctctgattttccccagcttgggaggttcactcttcgcactgaaggaaaaactgttgctgtgggaaaagtcactggtctgtgaatttgtaacaattttgacttgaggacgggaattcctgcacaaatatagtggagtggcagctgaggcataattgacagcatcaagtttaccatatattcatttcggtatttattttgcttttacttggggtagtattcagtgaagagttatttgttgcc

SEQ ID NO: 69945 - DNA, 258 bp, Glycine max
  Clone ID: 700839802H1
gttgttttgttctgccttcttctctccctcaatacaattttcatcctattcctcagatcagataaagaagatgcagaagggtagagaagttcgagacaataacatttttgaaccaagacggtttgaagattttggcgactttggatttcatagaagtaggatgccaagtctttttggtggcagggatccatttgatgatccctttttcacagacccgtttgatagcttgtttggtccaagttctgcatcaagagccat

SEQ ID NO: 69946 - DNA, 258 bp, Glycine max
  Clone ID: 700839804H1
gggagtttgcttcgcgaagaaggacttcaatttggccaagcaccctgagatcgacgtgccgaatctgcaggtgattaagctgatgcagagtttcaagtctcgcgagtacgtgagagaaacttttgcttggatgcactattactggttcctcaccaacgatggcatcgagtttctcagaacttaccttaaccttccttccgaaattgtccctgctactttgaagaagcaagccaagccacctggcaggccctttggagg

SEQ ID NO: 69947 - DNA, 258 bp, Glycine max
  Clone ID: 700839805H1
tggaattcgagaagctaatcaatcgtttgcggttgctttgttcctcctctcgcagatggttaggggaggaaggtttagcggcaaacgcaatttcaggaaaagggttcggtcaaaggagggaggttctcatgattcggatgacgactatgtcgtttcagatgaaggtagagaggcatctgactattactgctcctccttagatggatgcgcatcagaggagggttttgatagttttatggaagaagaggaggagcaatt

SEQ ID NO: 69948 - DNA, 256 bp, Glycine max
  Clone ID: 700839807H1
gtttgttgttcaatctaacaaacttctctatatcgtttactttttcaacacaccttacacatttctttatttgtgccttttatataaatatcatggcttcgagggtggtttcggttttggtgatagcgatgatgttgtttgccatgaactgtaattgcactagtgttggccacatgccttcaaccaaagaggaaggtcacgattttcaggaggctaaagccaagacaacacaaactgcgaacaaggccatggaaac

SEQ ID NO: 69949 - DNA, 254 bp, Glycine max
  Clone ID: 700839808H1
cgtaagtcccaagcagtgggaggaggctcgggactctgaccgcgtgcctgttgaagaatgagccggcgactcataggcagtggcttggttaagggaaaccaccggagccgtagcgaaagcgagtcttcacagggcaattgtcactgcttatggacccgaacctgggtgatctatccatgaccaggatgaagcttgggtgacactaagtggaggtccgaaccgactgatgttgaagaatcagcggatgagttgtg

SEQ ID NO: 69950 - DNA, 165 bp, Glycine max
  Clone ID: 700839809H1
cttcttttattatatgtgtgtttgtcttttctctcacctgaacatgtcttgttgcggtggtaactgtggttgcggaagcgcctgcaagtgcgggaacggctgcggtggctgcaagatgtccccagacttgcgcttcaccgagtcaaccagcatcgcgaccttggt

SEQ ID NO: 69951 - DNA, 253 bp, Glycine max
  Clone ID: 700839810H1
ggagaattacgggaggagctactccacagaggaggagtatttgcgccgtttggggattttcgcccagaacatggtcagagcggcggacatcaggcgctggaccccaccgccgtccacggcgtcacgcagttctccgatctcaccgaggacgagtttgagaagctctacactggcgtcaatggcggcttcccgtcatcgaataatgccgccggcggtattgcgccgccgttggaggtggacgggctgccggaga

SEQ ID NO: 69952 - DNA, 255 bp, Glycine max
  Clone ID: 700839811H1
aaaaaagcttcatcatcatcttcttcttctctgcatcatcacaatggctgaagtacgttcacaacaacaacaaccccagcatgtgcaagtccacgcaaccacaacacacaccccacaacaccaacgcggggaaggtggcagcggcattctgaacctcatcccggagatgtccctcacgggttcccaactcctagctctcctcgccggcgttccccttggtgcaatgctgctcctcctctccggcatctcgctcat

SEQ ID NO: 69953 - DNA, 257 bp, Glycine max
  Clone ID: 700839813H1
cggatatctcggctcttgcatcgatgaagaacgtagcgaaatgcgatacttggtgtgaattgcagaatcccgtgaaccatcgagtctttgaacgcaagttgcgcccgaagccattaggccgagggcacgcctgcctgggtgtcacacatcgtttccccaacgcaaacatgtcacaatgttgctgcgcggggtgtatgctgacctcccgcgagcacccgcctcgtggttggttgaaatctgggttcatggccgacttc

SEQ ID NO: 69954 - DNA, 257 bp, Glycine max
  Clone ID: 700839814H1
ctcatttgaatacattccttgtagtttatactgaaagatgggtttgaagatggcgttactgatcctaggcctttccctcatgctccttttggtctcctctgaggtggcatccacgaatacaaaagaggaggcaaatggagtggatgatgccaaatatcccggtggaagctatggagggggttacccaggtcatggcggtggcggttatcctggccatggcggtggcggttatcctggccatggcggtggtggtggct

SEQ ID NO: 69955 - DNA, 253 bp, Glycine max
  Clone ID: 700839815H1
tgggaaacaaaactacccttttgcttttgctctttgttctttgccatggagtggccacaacaacaatggccttccatgatgatgagggtggtgataaaaagtcaccaaaaagtttgtttttgatgagcaactccacgagggttttcaagactgatgcaggggaaatgcgtgtgctgaaaagccatggtggtaggatattttataggcacatgcacattggcttcatctctatggaaccaaagtccttgtttgt

SEQ ID NO: 69956 - DNA, 265 bp, Glycine max
  Clone ID: 700839816H1
caccatcaattttgaggcttttccccacaagctggtgcagtttggagagattcaggaaaaagttgtattgaaattttcacaagaggaatttcttacagcttggtcaactcaggtgcgtcctgcaacaactctgttggctgatgggtgtccatatttgtatgctatggtgcatgatagttcagtgtctacaataccaggtgattttgtcattggtgttaagttgacaaccataaacaatatgtgtgcatatgggctcaatcctggt

SEQ ID NO: 69957 - DNA, 264 bp, Glycine max
  Clone ID: 700839817H1
cttatctcaatcctcgtaaacatagacatattccaaaacctccggatggtgtactaatgccaaaaaagatattaaaagccattgacattaaaccttttcctgtgttatggcacgaagacaatagcggtcggcgacaaggcagggaaagacaacaagtacatggagcaatggctggccctcaactgggagaagcagcacatcgtcttgtcaagaactcccttaatattaaatcaaataacatgccgtatggatcaccggagcagt

SEQ ID NO: 69958 - DNA, 259 bp, Glycine max
  Clone ID: 700839819H1
cgagctagctagctagcaagcaagcacagagatggaggcaaagcgaggccatgccctcatgtgcttggcacgtgtttcactcttcctctgcgctctaaccctatccgctgctcacggaagcaccacggttcaagacatcgcgagaaagttgaaactcggggacaacgagcttctgcgcacggagaagaagttcaaggttttcatggagaattacgggaggagctactccacagaggaggagtatttgcgccgtttgggg

SEQ ID NO: 69959 - DNA, 257 bp, Glycine max
  Clone ID: 700839821H1
caaagatcttccttacaaaagtttgtgttcaaagtgtgttttgtttcccaaatcctactcttgtgaccacaacccttcctcctctttcttttgaaacctctttttttctattccccaaccaaacaagcaaacgctactcactcatcatcactgagatcatggctcctaatatcaccactgtcaaaaccaccatcaccgacgctcaagccaaggtcgccaccgatcatggtcgtgcctacgtcaccttcctcgccgga

SEQ ID NO: 69960 - DNA, 255 bp, Glycine max
  Clone ID: 700839822H1
ggcatctggttttgaggaatctatgaagtataagaagctcaccaatgctcagaggtctggtctaaaccagatacccaaccgaagatttacactatggtggtcgccaaccattaaccgagccaatgtttatgtgggtttccaagtgcagctagatctgactggtattttcatgcatggaaaaataccaactttgaagatatcccttattcagatattcagagctcacttgtggcagaagatccacgagagtgttgt

SEQ ID NO: 69961 - DNA, 247 bp, Glycine max
  Clone ID: 700839824H1
gtcgctggttccttcacgccaccgggtgatttctcagccgtcgtcttcttcttcggccgcggtagatccgtcatcggcggtggttgatgacgcgccgcggaggcggaggaggttaaggcgccgcagcagaaccggtgtatgacgtgcaggcggcgcgtggggctcacagggttcaagtgtcggtgcgggatgatgctgtgcgggacccaccgttacccggagcagcacgcgtgcgagttcgacttca

SEQ ID NO: 69962 - DNA, 242 bp, Glycine max
  Clone ID: 700839825H1
gtaaatattacttaatacgataagggatggtggtgatgctctatcgccccgatattaataagttgtgttagcttttgtgcagtttattgtgagttttatgtaagcatcttgtgagttatatatgtcaataagaatgtacaactagtagttgtgtagtaataatggtgtacatataaaatgtattattgtagtctatgtttatgtttagaaaatttcgttttaaatttcttatgatttgatcc

SEQ ID NO: 69963 - DNA, 252 bp, Glycine max
  Clone ID: 700839826H1
acagacttgacccctgaaagagttagacctgctatcaacaatactcttcaagaactccaacttgactaccttgatctttacttgattcattggccatttagattgaaagatggtgccagcagaccccccaaagaaggagaagtgttggagcttgacatggaaggggtgtggagagaaatggagaagcttgtcaaggaaaaccttgtcagagacattggaatatgcaatttcactcttacaaagctagataag

SEQ ID NO: 69964 - DNA, 254 bp, Glycine max
  Clone ID: 700839828H1
tgagaaacaaagaaaggaaataattgatctttgaaaatgcagggaggaaagaaagctggagagtccatcaaggaaacagctgcaaacattggtgcttctgccaaggctggcatggagaaaaccaaggccactgtccaggagaaggcagaaagaatgacggcacgtgatccgatgcaaaaggagttggcaacccagaagaaagaggcaaagatgagccaggcagagctggacaagcaggcggcgcgtcacataac

SEQ ID NO: 69965 - DNA, 235 bp, Glycine max
  Clone ID: 700839829H1
gttcttatgctagcttaaatgctagtgtcttagtgttttaggaaaggataggttataaaaatggtataggtagcagctaggtcaaagtgtcatgtcattgtgtcgtgaaattattagctagcatgtttagtgttttagggtttcttttgcatgtgtgtttctcttatggggtgtaactgatgagtgaggcatggctctactatagctatctaaaaaataatgcaagctttttttt

SEQ ID NO: 69966 - DNA, 259 bp, Glycine max
  Clone ID: 700839830H1
caagaaagaacttccttataaccaaaaccaacaacaactatggcaagttatcagaagcactacgatgatcagggtcgcaaggtcgacgagtatggccatgttgagaggcaaactgacgaatatggcaacccggttcatgccactagtgtcacttatgtcgccaccaaaagtgttggtggctacaatgatgacgctaataagcaacatgatattactggtgtctatcccgagaaagacaccggtagacatcattttggtc

SEQ ID NO: 69967 - DNA, 262 bp, Glycine max
  Clone ID: 700839831H1
gacaaatgcctacaattatttgctcgagtctggtgggttggaggaggagtcttcatatccctacactggggagagaggtggatgcaagtttgatccagagaaaatagcagttaagatcacaaatttcaccaatatccctgctgatgagaaccaaattgccgcatatttagtaaaaaatggtccacttgctatgggcgtgaatgcaattttcatgcaaacatacattggtggtgtctcatgccctctcatatgtagcaagaaa

SEQ ID NO: 69968 - DNA, 255 bp, Glycine max
  Clone ID: 700839834H1
tgttggatgagtttggaagtcctaaagtggtcaacgatggtgtcaccattgctcgcgccatagagcttcccgctcctatggagaatgctggtgaagctcttatcagagaggttgctagcacgcataccgactctgcgggtgataggactaccacggcttcggttcttgctcgcgagataatctagctggggcttctcagtgtaacttctggggcaaatcctgtgtctcttaagagagggattgctaagactgtgc

SEQ ID NO: 69969 - DNA, 255 bp, Glycine max
  Clone ID: 700839835H1
caacgatattctgtgttgcgattatgctagttttgatggtttgattaccaagcaagttatgggcaagatggcagaaatgataaacagtctttgtggtggtgatgaaaaattgatgcgtgaaaggacacatttgctgttggcttgttgttcaaggatggcaatttgtaagaaagatgtttggagagttgaatgtggaatcccttctggatttccgctcacagttatttgcaatagcatttttaatgagatgctcat

SEQ ID NO: 69970 - DNA, 254 bp, Glycine max
  Clone ID: 700839836H1
tcaaaagataattgcaagtaatgacctttctgtagttgctgtcctcatctgtggacatgtctatcatgctgaatgtttggagattatgacacctgatatcaataagtatgatccagcttgcccagtttgcacttttggtgagaaacaaactatgaagttgtctgaaaaagctctgaaagctgaaatggatttgaaggctagaaccaataaatcaaagaatcgggttgtggacagtgatattgatgatgattctg

SEQ ID NO: 69971 - DNA, 253 bp, Glycine max
  Clone ID: 700839837H1
ggcaaaagctgagcagaagaagataggtatgaccgagacttggttgaagaagcaccgtcttctttacaatggagccactagacaccctcttattattagcattcgcgatggcaccatcaacactgcttccttcaaaacatggctcgcacaggattacttgttcgttcgggcgtttgtcccatttgtggctagtgtgctgataaaagcgtggcaggaatcagattgcagtggtgacatggaagtcatattgggg

SEQ ID NO: 69972 - DNA, 253 bp, Glycine max
  Clone ID: 700839839H1
gaaaggaaataattgatctttgaaaatgcagggaggaaagaaagctggagagtccatcaaggaaacagctgcaaacattggtgcttctgccaaggctggcatggagaaaaccaaggccactgtccaggagaaggcagaaagaatgacggcacgtgatccgatgcaaaaggagttggcaacccagaagaaagaggcaaagatgagccaggcagagctggacaagcaggcggcgcgtcagcataacacggcggcg

SEQ ID NO: 69973 - DNA, 119 bp, Glycine max
  Clone ID: 700839840H1
gaaatgaatagactttgagtgtttggtagtttttatttaatggttttggtttctaatttattttgtcttgaaattttatccactgaatttcgtctcttaaatgctctatagaacttttt

SEQ ID NO: 69974 - DNA, 251 bp, Glycine max
  Clone ID: 700839841H1
gagaaaagtagtgtattaagactacaaattttcaatttttcaatggcgtcgaggcaacaaaaagaggatcgagctgaggcagctgcgaaagttgctgcgaaagaactcgaacaactcaaccgagaaaaagaccgtgatttcagtgttggtgttgcagaccaacaccaacaagaagaacatcagttagatcaacaaaagcgtggtgtaatcggatccatgttcaaggcggtgcaagacacctacgagaacgc

SEQ ID NO: 69975 - DNA, 250 bp, Glycine max
  Clone ID: 700839842H1
cacaactacaagaaagaacttccttataaccaaaaccaacaacaactatggcaagttatcagaagcactacgatgatcagggtcgcaaggtcgacgagtatggcaatgttgagaggcaaactgacgaatatggcaacccggttcatgccactagtgtcacttatgtcgccaccaaaagtgttggtggctacaatgatgacgctaataagcaacatgatattactggtgtctatcccgagaaagacaccgg

SEQ ID NO: 69976 - DNA, 249 bp, Glycine max
  Clone ID: 700839843H1
agaaaacctaagcttagaattagaaacaaagaaaagaagaaaggaaagaattgatcgttgaaaatgcagggaggaaagaaagcgggagagtccattaaggaaacagctacaaacattggtgcttctgccaaggctggcatggagaagaccaaggccactgtccaagagaaggcagaaagaatgacagcacgtgatccggtgcaaaaggagttggcaacccaaaagaaagaggcaaagatgaaccaggcg

SEQ ID NO: 69977 - DNA, 253 bp, Glycine max
  Clone ID: 700839844H1
cttagaattagaaacaaagaaaagaagaaaggaaagaattgatcgttgaaaatgcagggaggaaagaaagcgggagagtccattaaggaaacagctacaaacattggtgcttctgccaaggctggcatggagaagaccaaggccactgtccaagagaaggcagaaagaatgacagcacgtgatccggtgcaaaaggagttggcaacccaaaagaaagaggcaaagatgaaccaggcggagctggacaagcagg

SEQ ID NO: 69978 - DNA, 258 bp, Glycine max
  Clone ID: 700839846H1
agaaaacctaagcttagaattagaaacaaagaaaagaagaaaggaaagaattgatcgttgaaaatgcagggaggaaagaaagcgggagagtccattaaggaaacagctacaaacattggtgcttctgccaaggctggcatggagaagaccaaggccactgtccaagagaaggcagaaagaatgacagcacgtgatccggtgcaaaaggagttggcaacccaaaagaaagaggcaaagatgaaccaggcggagctggac

SEQ ID NO: 69979 - DNA, 258 bp, Glycine max
  Clone ID: 700839847H1
cccaattttaacaaagattgaaattccggagaattctttaaattctttgagtatccaaatggagcatttcattaaacagtaatttaaatagcccgataattactttacccgcttgaaatgtcatatccaaacacacatatttggagttaggaattgacttctttaattaccacatgagtggttactctaatattcctgtcacactcaaggagaatggattaatgaaaatgggttggataccctaagtttgtcatgcaa

SEQ ID NO: 69980 - DNA, 255 bp, Glycine max
  Clone ID: 700839848H1
aaggcacagcacagcgcaggaccgcctcaacgtctcaactttcccttcgatctcattctcaggtgttgttgaagcttcctgtgttggcttggtatccctgcaagttctgctgtagcagattccaaggtgaaggtgtcacgttaaagtttctttcatgtttgaacaggctactatccatttgggagcaactgagctgcttggagagtatttttcttcctctaggaaaaattacagaccctcaccacagagacttag

SEQ ID NO: 69981 - DNA, 253 bp, Glycine max
  Clone ID: 700839849H1
gccacgacatgtctgagtgctgccgctgattatcgtagaagaagcaactggaaatggagcagacccagaattgtgtgtgttggatgggacccggaaggcgtgcttggtccaccccaaactgggcacctcgccaggttcgagtttaagaggcgcctcgagagagacgcagatgcccgcgaaccttccaacgtcaagtccgtgaagagaaagaaagccgtcaatcccttcgaaaatctcgtcctcttcccgatac

SEQ ID NO: 69982 - DNA, 198 bp, Glycine max
  Clone ID: 700839850H1
gtgaaatttgggaaatcatctagaatttcatgtgcttgtttgtatggaggagcaccaaagggtcctcaactgagagacattgatcgtggagcagatattgtggtagccactcctggtcgcttgaatgatattcttgagatgagaagaattagtcttaatcaggtttcttacctggtgctagatgaggcagacaggatg

SEQ ID NO: 69983 - DNA, 255 bp, Glycine max
  Clone ID: 700839851H1
caaaaagtttacgttacaaatcgcataataaccgtcctaagtttattgagagaattttgcaagtgtgagaaacatggcatctcgtcaaaacaacaagcaagagcttgatgaaagagcaaggcaaggagagactgttgtcccgggtggaactggtggcaagagcctggaggctcagcaacaccttgctgaaggaaggagcaagggagggcaaacaaggaaggaacagctgggtacagaagggtaccaggaaatggg

SEQ ID NO: 69984 - DNA, 251 bp, Glycine max
  Clone ID: 700839852H1
gaagaagagataggggtggtggcaatgtgttaccaatatcatatcatatattctttcatcttcttgggttagggttctacacttgcaatctcctttcacacccacccacccttcaaccatttcaattccttccctcacccaaaccgcactatcgttcttcgacacggtcctgtttattaagcggtttggataaaagaatagaagcgtaaaatggccttcgtagcacatcaacctcagggtttgtttgtgac

SEQ ID NO: 69985 - DNA, 247 bp, Glycine max
  Clone ID: 700839855H1
ctctcctcctcgttcttgtttcttcggtgattttatgtgtgtgtttgtgtataacggtggtcgtgtgttttgagtagcttgaaacacgtttgacgaacgatgttttactacgttgttgtgtcttgtttattttaaatcatagtcttgtaagttcgtagatcgtgaatttgcttatgatttatttcttagatataaaaaattatggggttttgttggggattttatcatgataaaataaaagctttct

SEQ ID NO: 69986 - DNA, 250 bp, Glycine max
  Clone ID: 700839856H1
aggaggcacctcctgacatgcaatgcaaggataagtttctccttcaaagtgtagttgctagccctggggcaaccacaaaagatatcactccagaaatggtcaataaagaatctggtcatgatgttgaagagtgcaagttgagagttgtttatgttgctcctcctcaaccaccatccccagttcgagaaggatctgatgaagattcatcccctcgtgcatctgtatctgagaatgggcattcaagtgctgc

SEQ ID NO: 69987 - DNA, 247 bp, Glycine max
  Clone ID: 700839857H1
gaagaaggttatttattgcacaagtttgaactggagtgcggatggaagcactttgtttagtggctataccgatggtgtggtcagagtttgggctattggacgttattaggttaagctttttagtgttttcagatgcgaatctgtttttgagttttgggacaaagttagttactgctttactgtagaattgatttttatgttgaagaccgtggcactgaggccttttatttatttttaaaacgttcgt

SEQ ID NO: 69988 - DNA, 248 bp, Glycine max
  Clone ID: 700839858H1
ttagaaacaaagaaaagaagaaaggaaagaattgatcgttgaaaatgcagggaggaaagaaagcgggagagtccattaaggaaacagctacaaacattggtgcttctgccaaggctggcatggagaagaccaaggccactgtccaagagaaggcagaaagaatgacagcacgtgatccggtgcaaaaggagttggcaacccaaaagaaagaggcaaagatgaaccaggcggagctggacaagcaggcg

SEQ ID NO: 69989 - DNA, 233 bp, Glycine max
  Clone ID: 700839859H1
gcagaagcgcgtgtaaccctaattagggtttggaagccgatttgagattcacctttcgcgtaatcacagcgctggatccgtaccgtgttcctccgtctacggaagccccttttgctcggtccttcgctgaacacggatagcactgtcacggtccccgagtggtgcaatagttgtggaacgcgaggggcggatttcacgacggagtacgcaggttggactcaacagagacaaag

SEQ ID NO: 69990 - DNA, 251 bp, Glycine max
  Clone ID: 700839860H1
gtgcctgtgccaagttttccacagccatcaaagtcaataaatccatttgatgtcagcagtgaacctaccgcaaatcaagccccaacttttccttccatgtcatccttgcaaggtgccctgcctggggtaccacctcctggtgcagtgcacccttcaagcatgggtaatccaacacatggctggactcctctgtcatcatcatttctgcctgcacagacacaaatgcgtgcaactgcattgggaccaaggcc

SEQ ID NO: 69991 - DNA, 253 bp, Glycine max
  Clone ID: 700839861H1
gaaacaacaaagtattattgcacagttattgatgcgcctggacatagggatttcattaagaatatgattactgggacatcccaagctgactgtgctgttcttatcattgattcgaccactggtggttttgaagctggtatttccaaggatggacagactcgtgaacatgctctgctttcattcacccttggtgtgaaacagatgatttgctgctgtaacaaaatggatgctactacacccaagtattccaagg

SEQ ID NO: 69992 - DNA, 255 bp, Glycine max
  Clone ID: 700839862H1
acgaagcagaaggctggggagtatacagactatgcggctcagaaagcaaaagaaaccaaagactatgctgctgagaaggctaagaatgctaaagataccactgtgcagaaagctggagagtacaaggattataccgctgagaaggctaagaatgctaaagataccactgtgcagaaagctggagaatacaaggattataccgctgagaaggcaattgacgggaaggacagtgcagtggggaagcttggggagcta

SEQ ID NO: 69993 - DNA, 257 bp, Glycine max
  Clone ID: 700839863H1
ctaattcagactgtgaaactgcgaatggctcattaaatcagttatagtttgtttgatggtatctactactcggataaccgtagtaattctagagctaatacgtgcaacaaaccccgacttctggaagggatgcatttattagataaaaggtcaacacaggctctgcctgttgctttgatgattcatgataactcgtcggatcgcacggcctttgtgccggcgacgcatcattcaaatttctgccctatcaactttcg

SEQ ID NO: 69994 - DNA, 262 bp, Glycine max
  Clone ID: 700839864H1
tgcagaccgagctagctagctagcaagcaagcacagagatggaggcaaagcgaggccatgccctacatgtgcttggcacgtgtttcactcttcctctgcgctctaaccctatccgctgctcacggaagcaccacggttcaagacatcgcgagaaagttgaaactcggggacaacgagcttctgcgcacggagaagaagttcaaggttttcatggagaattacgggaggagctactccacagaggaggagtatttcgccgttt

SEQ ID NO: 69995 - DNA, 257 bp, Glycine max
  Clone ID: 700839865H1
aagaaacccaagagttgaggtcataatggcatgatctcctgatatcagctctggacaacggtggactttggtctgcccccagaattgctgtttcaccaggtttctcagccactgtagcgtgttcttaagacgtgccgacgagaattcaactgaaattctcctaatatttaattactgtactagatgagacctaagttgtagtacgctccatgatacaacaccatgttctcgtcgcttaacaatgaggtccaacgctg

SEQ ID NO: 69996 - DNA, 246 bp, Glycine max
  Clone ID: 700839870H1
ttgccatggatccttacaagctccggccatccagcgccttcaattctcccttctggactacaaattctggtgctcctgtttggaacaacaactcctctttaaccgttggagctagaggtccaattctgcttgaggattatcatcttgtggagaagcttgcaaactttgacagggaacttatcccagaacgtgttgtccatgccaggggagctagtgcaaagggtttctttgaggtcacacatgaca

SEQ ID NO: 69997 - DNA, 246 bp, Glycine max
  Clone ID: 700839871H1
tggctgatgggtgtccatatttgtatgctatggtgcatgatagctcagtgtctacaataccaggtgattttgtcattggtgttaagttgacaaccataaacaatatgtgtgcatatgggctcaatcctggtatctcaggttctcgtcttctgggcaccattcctcagtccatttcacagcaaactgtttggaatcaaatggcaacagtgagaacaccattgaattttgattctagcaagcagagct

SEQ ID NO: 69998 - DNA, 248 bp, Glycine max
  Clone ID: 700839872H1
ctgaagagaggccatcagaaggaattggcgaaactgtgaggcagtatgcacaaaaaccaaagccaagtgaaagaaaccctcagaaggagggaaccggaagcatcgtgtttacagcaataggcgaaacagtaagcagtgccggtgagaaggtaaagaaaccgtttaaaaacactatgggaggagaaagtgaaggaggaggagggaaagaagaggggacgagtgtcattggtaaaagtttgaccagcatt

SEQ ID NO: 69999 - DNA, 251 bp, Glycine max
  Clone ID: 700839877H1
cataatacaaacctctctaatttttgaagcttattatacccaatctcgatatgcagatcttcgtgaaaaccctaactggcaagacgatcaccttggaggtggagtcctctgacaccatcgacaacgtgaaggccaaaatccaagacaaggagggcattcctccggatcaacagcgtttaatcttcgccggaaaacagctcgaagacggcagaaccctcgccgactacaacatccaaaaggagtccacgctc

SEQ ID NO: 70000 - DNA, 259 bp, Glycine max
  Clone ID: 700839243H1
tagaaatccaaggaagaagatgaagcagtttgccgtccaaaacgtcgtcgttccatcccacgatgagattagcgttgtttgccccaagccccgccgcctcggcctcttcaacttccccgtcaacgatcccactgttagacccttccgctggcatctcagttaccatgttgagccatgtgattcaaactcatctggttcaaatcctctggacaacttactcaccaaggatggtgattttgatgtagagcaatcgtggcca

SEQ ID NO: 70001 - DNA, 255 bp, Glycine max
  Clone ID: 700839244H1
cactcaccattgtgttgagacacactctctttctttcttgttattctctttctctttcatcatttggcttaaaacacacacacaaaaggtggccaaaatgagcagtgtctgtgccaagcagcacaagttttacccctctcaccaactcctttctccaaagaaaaccctcagagaaattgacatccctccaaggaagctcctcactcgccgtgccgccgcatgcgtcggcggcaccgacgtgtactcctccgagga

SEQ ID NO: 70002 - DNA, 250 bp, Glycine max
  Clone ID: 700839245H1
ctactacaagtacttccttacaatcaaaaccaacaacaactatggcaagttatcaaaagcactacgatgatcagggtcgcaaggttgacgagtatggcaacgttgagaagcaaaccgacgaatacggcgaccctgttcatgctgctagtgtcacctatgtagccaccagaactgctgctggtggttacagtgatgacattaataagcaacatgataccaccaatgcctacggcgtagacactggtagaca

SEQ ID NO: 70003 - DNA, 100 bp, Glycine max
  Clone ID: 700839247H1
ttctcatcccagtctcactttgcctcgcgtctctcagtatgggttctggttggagaagagccttttgcactagcgacccagataattccacacaacatac

SEQ ID NO: 70004 - DNA, 249 bp, Glycine max
  Clone ID: 700839249H1
tccgagtatcctccacttggtaggtttgctgttagggacatgcgtcaaactgttgctgtgggagtcatcaagaacgttgagaagaaggatcctaccggagccaaggtcaccaaggctgcccagaagaagaagtgaatcgtgcgggctggttcatcaggggatgttggttacaatagatgtaggtttcttttctgtactcttgtgtcttctgttctaggtagcttgatattcggacaaagtttgaagtct

SEQ ID NO: 70005 - DNA, 257 bp, Glycine max
  Clone ID: 700839250H1
gatcatactagtcaaataaccaaagaacacctagagcccaacttagaagggctcactgtagatgaggcaattcaaaacaagagattgttcctactagatcatcatgacccaatcatgccatatttgaggcgaataaatgcaacctccacaaaggcttatgctaccagaaccatccttttcctgaaaaatgacggaactttaaggccacttgccatagagttgagtttgccacatcctcagggagatcaatctggtgc

SEQ ID NO: 70006 - DNA, 251 bp, Glycine max
  unsure (1)..(251): unsure at all n locations
  Clone ID: 700839251H1
aaaaagtaaagaacgtggatcacacccgtattgaatgttaatgtggacaggtcagaaatagcgtagagntagcaaaacaaaagacggttgaatcttggtagttgtggtcgtgacatgcactcgggctgacagccatcttagtgaggtagtatatttcgttgaagtagcgggtctcccccatctggtacttctcgttctagtcaacgaaggaacaatctttcgaggaataaccttttatgtagttggactac

SEQ ID NO: 70007 - DNA, 251 bp, Glycine max
  Clone ID: 700839252H1
gccattctcatcctcctctgtctctctctctccaccattgccatggatccttacaagctccggccatccagcgccttcaattctcccttctggactacaaattctggtgctcctgtttggaacaacaactcctctttaaccgttggagctagaggtccaattctgcttgaggattatcatcttgtggagaagcttgcaaactttgacagggaacgtatcccagaacgtgttgtccatgccaggggagctag

SEQ ID NO: 70008 - DNA, 232 bp, Glycine max
  Clone ID: 700839253H1
aagaaatgtctaacagacaaaaaaaaagaagtaaaaagccagcttatcatagggagaagggagctgctgtaccatcaggtacttctttagtgtcatcacgtggacatcttgctgtccaacttcacatgggacttttgggcatacatccaatctctgaagcttaaatttcagaactgtattttagatttgagttttgtcactccaacgaagaggcatctagacttggggcttc

SEQ ID NO: 70009 - DNA, 254 bp, Glycine max
  Clone ID: 700839255H1
cttagagaagatcctgaactccaagcctgctggaaagaactcgaagaggtgggtcatggagacaagaaaaatgagccatggtggcctaagatgcaaactcgtgaagagctagttgaagcttgcgctatcatcatatggactgcttcagcacttcatgcagctgttaattttggacagtatccctatggaggtttaatcttaaaccgtccaactcttagtaggcgattcatgcctgagaaaggttctgctgagta

SEQ ID NO: 70010 - DNA, 249 bp, Glycine max
  Clone ID: 700839256H1
cctaattcggagggtttcagttttcgccctcttttctcatctccaacatcttcgacgtcacggaggctagtcttcctgttatcacaaacaatgtctgacggtcaagaatcagacaagaatattgagatatggaagatcaagaaattgataaaggcattggaagctgctcgaggtaatggtaccagcatgatttctctgataatgcctccacgtgatcaaatatctcgggtcactaagatgttgggagat

SEQ ID NO: 70011 - DNA, 254 bp, Glycine max
  Clone ID: 700839257H1
aggagagatacgagagagcaaaacaagaagcaagtaaagcttccaaagagagaaacattcaagcaaataagagggctgaagaagaaagaagaaaagcagaaagtggtaggggtgttcatgtggataagtttgaagagaagaaggattcagtgctgatagcagaactcgagagaagaacaagagaggtagagggaagagagtggaacaaagaggagaaacaaagaagttgtccaagagggaaagtagaggcagag

SEQ ID NO: 70012 - DNA, 254 bp, Glycine max
  Clone ID: 700839258H1
gtaaagctaacttcaacacctttaattttctaaaagtaattcagcggctgaataccaagcggagaagatgagtcaggagcagccacggcgtcccaaaggccaaaaccccatcaaatacggcgacgtttttgtcgtctccggcgaccttgcacagaagcccgtcgcaccggaagatgctgccatgatgcaaagcgcggaaactcgagtgctcggacaaacccaacccggcggacagcttccgtcatgcaatctgc

SEQ ID NO: 70013 - DNA, 253 bp, Glycine max
  Clone ID: 700839261H1
cggctcgagcggctcgaccaaaacagtcactcaccgcagcatgcacgcgacaaacttgaaacgggttttactttgaccgtccgcaaccttctactaaatcctcgttctcttcaatctctttccttttccttctgcttccactttccaccgaatccaagtcaactctagaatttccaataagcttaagaaaacgtaactaaatcacctcttagatctaatccaaaacaataccctatctataaagtcaaaacct

SEQ ID NO: 70014 - DNA, 255 bp, Glycine max
  Clone ID: 700839262H1
cttgcttccacttccattccaccatgccttctaatgatctcaagcatcgggtcaccaccactatagcaaccaccaacgacgtcaatatgaccagcagaggcaaacgaatgctgatggccatacgcggccttaagtcactcgccatagccgttgtcctccctctctctctgatcgccttatcagcttacataggctcctcctcctccagtgcccattgcgcttcgagtagccccatctggttcactacctcgtggg

SEQ ID NO: 70015 - DNA, 258 bp, Glycine max
  Clone ID: 700839263H1
gttcggcaccagcgaaacgctcttcgttatcttttctcagactccgcggcgtagatccgaggagttcgggaaatcctaactcatcatctcaactcaagtcatggctggacttgcacctgagggatcacagttcgatgctcgtcaatatgattctaaaatgagtgacttactttcatctgatggacaggacttcttcacatcctatgacgaggtttatgatagttttgacgctatgggtttgcaggaaaatcttctcag

SEQ ID NO: 70016 - DNA, 262 bp, Glycine max
  Clone ID: 700839264H1
gtgctagcttccaaattctttatgactgtttaagagttactttagcaacgtgaaattctatttaatgaagagtcgagttttgttacttaatatgcaagaccatcgtgtttatgattttgaagtcctgaatgcaaccaagttttatggtgtgttaggtccaatgtcaagatgcatgagatgtgtgaatttttggaagcaacctactgttgcttctactatttttaaaaaattgtcatggttttacatgtttgagacgtgtgtc

SEQ ID NO: 70017 - DNA, 235 bp, Glycine max
  Clone ID: 700839265H1
gaagaagaataagatgaaaaagggaaaaacgcaagaaaaatagaggtagatcgatcgagatctccctcgcgtttgtctcagttgaagaaattaaaaagcagaactagagtaactcaacggtctcagaattttcagggttttcagtacttccatatttattcttccggatttgagttggaagaagatcgaagaggtttctagttgcttcagatgttcctctgggtggtggagattg

SEQ ID NO: 70018 - DNA, 254 bp, Glycine max
  Clone ID: 700839266H1
gcgcgttgcatctgctacctatcatacatattttcgccaaaccgccgattccgttgagcgtttctaccgtagcgctcaggaaggaggcagtggctggtggtgttggttgtggtggaggtggttttgctgatcatttgtggtagagggtacgaaagaaaaaaaagctgaaagtgagttcagacagccgcagcaggagcagaatcaggatcccaatggaccgtaagatccgctctgaatcgatttactatcgtgat

SEQ ID NO: 70019 - DNA, 257 bp, Glycine max
  Clone ID: 700839268H1
agaacaaaaaaaaaaacgtgattcgctcttctcttcgaataaaccacaaaaccaacaactgagaagaggagtgagagaagatggggttgtcgttcacgaagctgttcagcaggttgtttgcgaagaaggaaatgaggattctgatggtaggtctcgatgctgctggtaagacaaccatcttgtacaagctcaagcttggagaaatcgtcaccaccatccccaccatcggatttaatgttgagactgtggagtacaag

SEQ ID NO: 70020 - DNA, 253 bp, Glycine max
  Clone ID: 700839269H1
gccgcgaagaaggagaacaccgccaaagtgacgaaggccaacgctgactaaaaggaatcgcgtccaaaacgaagcaaaaccgcaaccgccgctgctccgaagaactacgaggcggttaaaagggcagcgaagaaggtagggccgaagaagacgaagaaagtgtcgacgcctgcgaacccaagcagcccaagtccattaggtctccaaccaagagggcccggaaagcagccgttgctgcggctatgatacttgt

SEQ ID NO: 70021 - DNA, 253 bp, Glycine max
  Clone ID: 700839272H1
tgctgctcagaaaagcaaagaggcttctgaatatgctagtgatgcggctcagaggaccaaagagtatgctggtgatgccaccaagagaagcaaagaggcttctgatcatgccaatgacatggctcggaagaccaaagactacgccagtgacactgctcagagaaccaaggaaaaactccaagacattgcatctgaggctggtcaatacagtacagagaaggccagagaaatgaaggatgcagcagcagagaag

SEQ ID NO: 70022 - DNA, 253 bp, Glycine max
  Clone ID: 700839273H1
cttgctctatactacacagtacacacactagaagaataatggcttccatcctccactactttttagccctctctctttcttgctcttttcttttcttcttatccgactcagtcacccctacaaaaccaataaaccttgttgttctacccgttcataatgattgttccacagggctccattgggtcaacctccaaagaagaacccctctaatgcaagtaccagtcctggtggacctcaatggaaatcacttgtg

SEQ ID NO: 70023 - DNA, 247 bp, Glycine max
  Clone ID: 700839274H1
aacaagttgaatcaaacagtgaaagtaaaacattgtgcaattaatcatcaactgcaagtagccagtgcataagatcaatggcgtcaagacagcaattcaaggaagacagagccgaggcagctgcaaaactcgcagcgaaagacatcggcgacatcaacagaacaaacgagcgcgacgaggggtacgacttgcacgacgaagccaacttcaagcaagcacgagctgaagcagctgcaaagctggcggc

SEQ ID NO: 70024 - DNA, 250 bp, Glycine max
  Clone ID: 700839276H1
accgcacgaatatcttgttgtttggagcgatccgagaaaaactctgtaaacatgttggtttaccaggacctccttacaggtgatgagcttctctctgactccttccgttacaaggaaattgagaatggaatgctgtgggaagttgaggggaagtgggttgttaaaggagcagttgatgtagacattggtgcaaacccttctgctgagggtggaggagaagatgagggagttgatgatgcagctgttaagg

SEQ ID NO: 70025 - DNA, 252 bp, Glycine max
  Clone ID: 700839277H1
gaaaacctaagcttagaattagaaacaaagaaaagaagaaaggaaagaattgatcgttgaaaatgcagggaggaaagaaagcgggagagtccattaaggaaacagctacaaacattggtgcttctgccaaggctggcatggagaagaccaaggccactgtccaagagaaggcagaaagaatgacagcacgtgatccggtgcaaaaggagttggcaacccaaaagaaagaggcaaagatgaaccaggcggact

SEQ ID NO: 70026 - DNA, 253 bp, Glycine max
  Clone ID: 700839278H1
tttctttccaacacacactttctctctctatctctctctctctctctctctggttgtctttcattttgttcattgttgttgatgatgtcacgcgccgccgtgttattacacgcgcaggaggaggaggaggaggagtgtagtacttcgacgtcgtcgtcgatcgggaggaacagcgacgtgtcgtcggagagatcaatggaggaaggagaaaacgaggtggaaagtgcctaccatggacctttgcatgccatgg

SEQ ID NO: 70027 - DNA, 255 bp, Glycine max
  Clone ID: 700839279H1
cttctatatatgaagataacaatcagctgaatgttgacaatgcacaacgtgcactagtctcattattgctccggaaaatggggaagattgccctccaaatagatgttattcagatgggaatagtcttcaacagttttgggaatattatggcgcagattagtcaggatgactgccaacactatgcacacgtgatcttgttgcctctatataaagtttgtgaaggatttgcgggaaaagttgttactgataatgtca

SEQ ID NO: 70028 - DNA, 260 bp, Glycine max
  Clone ID: 700839280H1
ctcatgtgctttcacgcaaaaatggtgagaaaggcaaaaggagatttgtctctggggatggtgaagagatgacattgattccgggaaccagtgttgaagaggcttacaacaagctaatagttgaacttgagaaaagtgttcctacattggttggcattgaatgtcccaaggatgagaaacttcctcgccgcaaaatttttgacaaacctaagacgcgctgcttcactattctccctatggagtttaatcttgtggtccgt

SEQ ID NO: 70029 - DNA, 267 bp, Glycine max
  Clone ID: 700839281H1
caactacaagaaagaacttccttataaccaaaaccaacaacaactatggcaagttatcagaagcactacgatgatcagggtcgcaaggtcgacgagtatggcaatgttgagaggcaaactgacgaatatggcaacccggttcatgccactagtgtcacttatgtagccaccaaaagtgttggtggctacaatgatgacgctaataagcaacatgatattactggtgtctatcccgagaaagacaccggtagacatcattttggtcgt

SEQ ID NO: 70030 - DNA, 258 bp, Glycine max
  Clone ID: 700839284H1
caaaccttgctctatactacacagtacacacactagaagaataatggcttccatcctccactactttttagccctctctctttcttgctcttttcttttcttcttatccgactcagtcacccctacaaaaccaataaaccttgttgttgtacgcgttcaaaatgatggttccacagggctccattgggccaacctccaaaaaagaacccctctaatgcaagtaccagtcctggtggacctcaatggaaatcacttgtg

SEQ ID NO: 70031 - DNA, 249 bp, Glycine max
  Clone ID: 700839286H1
agaggtctttcattattcagtttgatttagcaccaagatgaaggttcaagaaacgaggtcgcatgttcatgcacctggggaagaagtgaaggtgatgacaaggaagcagaaggctgagtccaaggcacatgaagtggagcattctccaaagaaggccaaggtggaaaaagaagatggccaaatcaacggaaaatctgaaactggagttgcagaagaatatagtgagttctgcaaagtaacaaacgagca

SEQ ID NO: 70032 - DNA, 249 bp, Glycine max
  Clone ID: 700839287H1
cttggttggttcaggaagaatggcccctctgaagaggaggtggaaagtgcttccttcaagatgtggtttgttggacatggttatagtgatgggagcattgcttcacagggaaacacaaaacctgacatggagattgtaacaagggttatgggacctgaagttggatatctgaccacaccaataattcttattcagtgtgctcttgttcttctctgccaacgtgacaaccttccaaaaggaggagtttac

SEQ ID NO: 70033 - DNA, 250 bp, Glycine max
  Clone ID: 700839289H1
ctttggaaactgttgttgagtgagaagttacatgtgaagccggatgtcttcacgtgtaataatttgattcagggactttgcaaggaaggccgtgttcatgatgctgcaaggatccattcttcgatggttgaaatggggctcagaggtaacatagtaacttacaattttttgattgagggttatctagctgctcggaaacttattgaggcgttaaaactctggaaatatgcggtggagtctggattttctc

SEQ ID NO: 70034 - DNA, 249 bp, Glycine max
  Clone ID: 700839290H1
atcgagcttcagcaatggtgtacgtcaaggctcagaaatcaaaagcctacttcaagagatatcaagtcaagttcaagagaagaagagagggaaaaaccgattaccgtgccaggattcggttgattaatcaggacaagaacaaatataacactccgaaataccgatttgtggttcgctttagcaacaaggacattgttgcacaaataatatctgctagcattgccggcgatttagttcttgctacagcat

SEQ ID NO: 70035 - DNA, 249 bp, Glycine max
  Clone ID: 700839291H1
ctctttcttaagttctcagaaaccttaaaaacaacaacgtaggagtgttcggaaaagatggctaagcaggaagtggtggaagggttcaagttcgagcagaggcacgggaaagaacgcgtgagagtggcgcgcgtgtggaagacgaggcaggggcagcacttcattgtggagtggcgcgtggggatcactctcttttcggattgcgtcaactcgtacctccgcgatgacaactctgacatcgttgctact

SEQ ID NO: 70036 - DNA, 251 bp, Glycine max
  Clone ID: 700839292H1
catttattagataaaaggtcaacacaggctctgcctgttgctttgatgattcatgataactcgtcggatcgcacggcctttgtgccggcgacgcatcattcaaatttctgccctatcaactttcgatggtaggatagtggcctaccatggtggtgacgggtgacggagaattagggttcgattccggagagggagcctgagaaacggctaccacatccaaggaaggcagcaggcgcgcaaattacccaatc

SEQ ID NO: 70037 - DNA, 251 bp, Glycine max; identical to SEQ ID NO: 66513
  Clone ID: 700839293H1

SEQ ID NO: 70038 - DNA, 251 bp, Glycine max
  Clone ID: 700839294H1
caaaattcaacaatgtttttgtgaagaatctatcagaatcaaccaccgatgatgagttgaagaacacttttggtgaatttggaactattactagtgctgtagtaatgagggatggggatgggaaatcaaagtgttttggatttgtgaattttgagaatgctgatgatgctgctagggctgttgaggctctcaatggcaaaaattttgatgacaaagaatggtatgttggaaaagctcagaagaaatctgaa

SEQ ID NO: 70039 - DNA, 254 bp, Glycine max
  Clone ID: 700839295H1
gagaaacaaagaaaggaaataattgatctttgaaaatgcagggaggaaagaaagctggagagtccatcaaggaaacagctgcaaacattggtgcttctgccaaggctggcatggagaaaaccaaggccactgtccaggagaaggcagaaagaatgacggcacgtgatccgatgcaaaaggagttggcaacccagaagaaagaggcaaagatgagccaggcagagctggacaagcaggcggcgcgtcagcataac

SEQ ID NO: 70040 - DNA, 256 bp, Glycine max
  Clone ID: 700839296H1
tgaagctctaattgattgcgatgagaagcactgaacactgagggtgatggaagactatgatagttacatagcgcagagtggtaggggagaaaatggattgacagtggcatcgcgtgcttgttcgcgcgacgaatttcgcccacgtggcggaaaagtactatcgcgtgttgctgctgttgcggctgcaagaaacggttcttcgacttcaagatatgatatggctgtgacgagtaatgttaagaaaaagcaaaaacgt

SEQ ID NO: 70041 - DNA, 260 bp, Glycine max
  Clone ID: 700839301H1
caggcgcgcaaattacccaatcctgacacggggaggtagtgacaataaataacaataccgggctcattgagtctggtaattggaatgagtacaatctaaatcccttaacgaggatccattggagggcaagtctggtgccagcagccgcggtaattccagctccaatagcgtatatttaagttgtagaagttaaaaagctcgtagttggaccttgggttgggtcgatcggtccgcctccggtgtgcaccggtcggtcgtcc

SEQ ID NO: 70042 - DNA, 259 bp, Glycine max
  unsure (1)..(259): unsure at all n locations
  Clone ID: 700839302H1
ctcgagcctctcgagccggattaatgcatttagacattttcctcttattgtttaccctgatgaagttaaatttattccattctttatctgtgcaatcaccatatcagagacctttttgcaatcttaatgatagttccagtaaatgagcancacaatttacaaatgctgggataactgaatgtactgaagttttgctttgaagtttaaaagtcattaagatttatttataaaaagggaaacccttggtgcaacaatgggg

SEQ ID NO: 70043 - DNA, 257 bp, Glycine max
  Clone ID: 700839303H1
cttcatttgagctttgaagaatcaatatttggaggacagagggagatcgaagtttcctgttttcagacatgtaatatgtgtgatggtacaggagctaaatcaaagaattgcattaaacaatgcaacaattgtggtggcagagggggagaaatgaaaactcagagaacaccctttggaatgatgtctcaggtttctacctgctctaagtgtggtggccttggcaaaataatcaccgatcaatgtcgaaggtgtatggc

SEQ ID NO: 70044 - DNA, 259 bp, Glycine max
  Clone ID: 700839304H1
gtcgtcgttagggtcttcttcggatcggtggaacttgaccctgccggcgtgaattccgacgctactcgtggcgccgaattgctatagcggtgacgaatatgaaggttttcgttaagactctcaatggcactcacttcgaaatcgaagtgacgccgcaagacacggtttctgaagtgaaaaaaaatatagaaactgttcaggctgcagatgtctatcctgctgcacagcaaatgctaattcatcaagggaaagtcttagg

SEQ ID NO: 70045 - DNA, 259 bp, Glycine max
  Clone ID: 700839305H1
cacgcagttctccgatctcaccgaggacgagtttgagaagctctacactggcgtcaatggcggcttcccgtcatcgaataatgccgccggcggtattgcgccgccgttggaggtggacgggctgccggagaattttgattggagagagaaaggagctgtcaccgaagttaagttacagggtagatgtggatcatgctgggctttcagcaccacaggatctatagaaggagccaattttcttgccaccggaaagtcgtca

SEQ ID NO: 70046 - DNA, 251 bp, Glycine max
  Clone ID: 700839306H1
aacgcaatttcggtgacatgatgtttttattttggatttaccgcaattacggccgcatcagttgcattgtctgcaatgtcaaggatggccgagtaacaacaaccgtgattgcaactgcaatttagaatcatgttgcaaagtcgcattttcctttgaatgcatttctattgtacattgagtgatctgtagaaataacttgacttataataactgtaggatctatctgtgattccagagctggagctcaacat

SEQ ID NO: 70047 - DNA, 247 bp, Glycine max
  Clone ID: 700839308H1
atcagtgggaatgctagagcgttgagaaggttgaggacagcgtgtgagagagcaaagagaacactctcttctaccgcgcagacaactattgaaatcgattctttatatcaagggattgatttctatgctacaatcacgagggcgaggtttgaggaaatgaacatggatttgttcaggaagtgcatggagccggtggagatatgtttgcgtgatgccaagatagacaagagtcatgttcatgggttgt

SEQ ID NO: 70048 - DNA, 254 bp, Glycine max
  Clone ID: 700839309H1
ctttgcacaagccactcatgcgcgacaagactgtgctggtaacggcggacgttacatcggcacccacaccgttcttcagctcttgctcggaggttgcagaaccgtcgtcgtcgacaatctcgacaattcctccgaggtttctatccaccgagtcagggagcttgccggcgaatttgggaacaacctctcctttcacaaggtggacctacgggacagggatgcactagagcaaatttttgtttccacacatttga

SEQ ID NO: 70049 - DNA, 245 bp, Glycine max
  Clone ID: 700839310H1
agaggactctgtctagttaaaatagttattgtgcttttgttttatcagacagttgtaaggcactgtgttctacatgttcttgcagttgtctgcatgcattgttattttcaaagtccgctttatcaagctgacaagtcaaataaattattccctctctcctagtagtgggggaatagatttgttcctgtatctgatcgaggtttttataatcgtcataatataataacaatttacgttcatttgtt

SEQ ID NO: 70050 - DNA, 261 bp, Glycine max
  Clone ID: 700839311H1
tgcggctcgagcattcaacaccatgatgcttggggagacccaccgcccaaatccaaccgtacacgtgccaccgtgggcgccggagatcttctcaccatacaccggcaatgccgattactctccgtactccatgcaagaagcacttagtgcacttcagcactacgaatccaccgatgctgagtcagactcggaggttccgtctcgggaaccggaagtcccggtggacgcttactcctgcgaccatttccgcatgttcgagtc

SEQ ID NO: 70051 - DNA, 254 bp, Glycine max
  Clone ID: 700839312H1
cgagatgattagaagggagcttctaactttgctggagcatgacaatggtaagtatccacttgatgataaagtgatcaatggagaaaactacaaaggatgctaaaggaagagaaaaagcaggaaccaaaggtcaaacaaagaagggtggtggtgaggaacaaggaaaaagaagagaagaaacaggagaagaaaaacaatccagcctggaggagatttctaagcacagagctgaagctcaacaaaaagcaagagtt

SEQ ID NO: 70052 - DNA, 245 bp, Glycine max
  Clone ID: 700839313H1
cttcttcaaatggtaacaccatctcaggttctacaaaaggttcaaatccaccagtcaagatttcattggatggccctggtaatgaatccaaggcagaagttggagttgccaagtcttctgatatcagagcttctatggtgaaggatgatggaaatgatattactgacaacccaagaggagcctcttctcgcgtagttcattcccctaggtatgaaaacacaggagtcacttcaaagtctatgata

SEQ ID NO: 70053 - DNA, 253 bp, Glycine max
  Clone ID: 700839314H1
ctgctatcgaatactcggataaggagggtaagggcggtgaagtgcagtacttcaatccccttttctctcttctccttttatttcatcactctcttcgttcctttcttcttctccaaagttttcaattttcacacttttcgaaacatcttttcaatggcgtcccaaattacccgtgagtggtctggaatcaatacattcgcacctgctacccagactaagttgcttgaactcttgggaaaacttaaacagagaa

SEQ ID NO: 70054 - DNA, 250 bp, Glycine max
  Clone ID: 700839315H1
gcccgacacattttttctccgatcccctattcctctccattctccgttgtgtcgatttttgttactcaaaagggaaattgatttgatagatagacagatagatcgtttctatgggttaaagtgaaatccgaatccgaatctgaatctgaatctgatccaatcattttcatgttagggcgtgcgatctccaatcaagcgcggttgtgtttaggtttcattttgttgggcgtgtgagtcgtagggggttcga

SEQ ID NO: 70055 - DNA, 253 bp, Glycine max
  Clone ID: 700839316H1
aaattttccagtggattcttggttaccaatttttgtgaattgtctttatcctgtaagtcaattacctccagaagctgtcgttgtaaatgttacatgtggtagtggacgtggtggtttacccaccactgcttggattagttctgcagttaacaatcgctcctcagatatcaacaaaaagattcgcacagcacttgggaaaggtaagaaaattgtttttcttactagagttgatccttttccagtagcttactgg

SEQ ID NO: 70056 - DNA, 256 bp, Glycine max
  Clone ID: 700839317H1
gttttctgcgccgtctccgatctccgacaatggcgacccaaatgagcaagaagagaaagttcgtagctgatggagtgttcttcgctgaactgaacgaggttctgacaagagagttggacgaggacggttactccggcgtggaagttagggttacgccgatgcgcacggggatcataattagagtcaccagatcccaggctgtactcggtgagaagggaaggagaataagggaacttacctctgtggttcagagagt

SEQ ID NO: 70057 - DNA, 258 bp, Glycine max
  Clone ID: 700839318H1
gaaagatgcagaagagagagcagggcaagtccggcggatccgccggagcgaggggcgacgccacctgcgaagagaggccgtcccttcggcagcggtaacaacagttcctctgccgctgcttcagccgcggattcggcggctccgtcaaccctccttggtccttcccttcacgttcacaactccttcgccgatcagaacaacacgccaattgtcttggctcttcaaagtggtctgaagaatgagctaacatgggtttga

SEQ ID NO: 70058 - DNA, 249 bp, Glycine max
  Clone ID: 700839319H1
tactatttaatagtagtcgaaacgccaatgctcctcagagagttgccctcccaacaccatcatatggttcagcatctatgggcacttcaaaaccatatggttcagcatctttcggcgcttcaaaaccttatggttcagcatcttttgatgccccaaaaccttttggcagttctaaaccttctcatggtgctaactttgagcagagtgccccttcttattatgacaacagggacctggttggcacagctc

SEQ ID NO: 70059 - DNA, 245 bp, Glycine max
  Clone ID: 700839320H1
agaacaaaaaaaaaaacgtgattcgctcttctcttcgaataaaccacaaaaccaacaaacgagaagaggagtgagagaagatggggttgtcgttcacgaagctgttcagcaggttgtttgcgaagaaggaaatgaggattctgatggcaggtctcgatgctgctggtaagacaaccatctagtacaagctcaagcttggagaaatcgtcaccaccatccccaccatcggatttaatgttgacact

SEQ ID NO: 70060 - DNA, 254 bp, Glycine max
  Clone ID: 700839321H1
catgttcttaaccagaagcgcgctttttcgcttttcaaagtctctcccttatgccccttcactctcccttaaaccctccatggtcaccttctcctctactcccaattcaggctggagaaatgcagcagaaggaggaagaagagacggaagaaccaattggacgtatgattctgccgaggcaagacgcgaggcagatgaaatgtctgagagtgccaaagaaacgatgaatgaaggctatgacagggccaaggtca

SEQ ID NO: 70061 - DNA, 250 bp, Glycine max
  Clone ID: 700839322H1
ctcgagccgctcgagccgattcggctcgagcacaactacaagaaagaacttccttataaccaacaccaacaccaactatggcaagttatcagaagcacaacgatgatcagggtcgcaaggtcgacgagtatggcaatgttgagaggcaaactgacgaatatggcaacccggttcatgccactagtgtcacttatgtagccaccaaaagtgttggtggctacaatgatgacgctaataagcaacatgatat

SEQ ID NO: 70062 - DNA, 253 bp, Glycine max
  Clone ID: 700839324H1
cggctcgagcttctgttaaagctgcaaaagttgtttttgatgccaatactggccgttcaaagggctatggtttcgtcaggtttggagatgacaatcagagaacccaggccatgactcagatgaatggtgtttactgttctagcaggcctatgcgtattggagctgcaactccaaggaaatcatctggccatcaacaaggtgggcagtcaaatggcacagccaaccaatctgaagcagattctacaaacaaact

SEQ ID NO: 70063 - DNA, 253 bp, Glycine max
  Clone ID: 700839325H1
ctcatttgaatacattccttgtagtttatactgaaagatgggtttgaagatggcgttactgatcctaggcctttcccacatgctccttttggtctcctctgaggtggcatccacgaatacaaaagaggacgcaaatggagtggatgatggcaaatatcccggtggaagctatggagggggttacccaggtcatggcggtggcggttatcctggccatggcggtggcggttatcctggccatggcggtggtgtg

SEQ ID NO: 70064 - DNA, 249 bp, Glycine max
  Clone ID: 700839326H1
aatgcctcgcagagagaacaacagcaatagggtgatagagagagaggttcacgttgagacacacagaaaagagtccctccctgataagggaagggttgtgatagagagtgagaagaaggagaaagagagagagttggcttctgatagagccaggtctggaaatatagttaaggaggacaaagaggttgaagaaggaagaagaggaaaagaaagtggtggtggtggtggtgttcagcatgagaggaagtt

SEQ ID NO: 70065 - DNA, 250 bp, Glycine max
  Clone ID: 700839327H1
gcgggagagtccattaaggaaacagctacaaacattggtgcttctgccaaggctggcatggagaagaccaaggccactgtccaagagaaggcagaaagaatgacagcacgtgatccggtgcaaaaggagttggcaacccaaaagaaagaggcaaagatgaaccaggcggagctggacaagcaggcggcgcgtcagcataacacggcggccaaacagtccgccaccacggctgggcacatgggacatgcca

SEQ ID NO: 70066 - DNA, 251 bp, Glycine max
  Clone ID: 700839330H1
ttagaaacaaagaaaagaagaaaggaaagaattgatcgttgaaaatgcagggaggaaagaaagcgggagagtccattaaggaaacagctacaaacattggtgcttctgccaaggctggcatggagaagaccaaggccactgtccaagagaaggcagaaagaatgacagcacgtgatccggtgcaaaaggagttggcaacccaaaagaaagaggcaaagatgaaccaggcggagctggacaagcaggggcgc

SEQ ID NO: 70067 - DNA, 248 bp, Glycine max
  Clone ID: 700839331H1
gtacatgtcctggaagccagggatggatatggttgtctctcatgttcgtcgaaagcagctccctgcatttgttcttcctgatggttacgaacgcactcgaatgccaaggcatatatgccatcaagctgtcataacaggtgatgatgccacatcctgctactctcggcctggattgtctgacagatgcatcaagaggactaattactctgaaatggtggataagaagccagacaaaccagataagcggc

SEQ ID NO: 70068 - DNA, 252 bp, Glycine max
  Clone ID: 700839332H1
agggtcctagttggcatgactcaacacttcatgaaaagctattctgatcttctcatcaggacgtgccacaggcgcggcgtgcatgctatgggaggaatggcagcgcagattccaatcaaagaagatccagtggctaacgaggtagcactggaacttgtaaggaaggacaagcttagagaagtgaaggcagggcacgatggaacttgggctgcgcaccctggtctcattccagcctgcatggagatttcaaca

SEQ ID NO: 70069 - DNA, 88 bp, Glycine max
  Clone ID: 700839335H1
gtctgatataatatattagcaactacgtagtcgaggttggaatattttgcactgaatatcctcatgttttcttcaagtttagttcaaa

SEQ ID NO: 70070 - DNA, 255 bp, Glycine max
  Clone ID: 700839336H1
gaactacatccgggagacccagccagcctcggagaacctcgccgccgccgcgaacatcacctcgccgaggcggcggagtacgtggggcagaagacgaaggaagtggggcagaagaccaaggaggttgggcaggatattcagagcaaggcacaggatacaagggaggcagctgcaagggatgcaagggaggcagctgcaagggatgcaagggaagctgctgcaagggatgcaaaggtggaggcaagggattaaaga

SEQ ID NO: 70071 - DNA, 256 bp, Glycine max
  Clone ID: 700839338H1
tacgcaattgcggtgacatgaagtttttattttttatttaccgcaattacggccgcatcagttgcattttctgcaatgtcaaggatggccgagtaacaacaaccgtgattgcaactgcaatttagaatcatgttgcaaagtcgcattttcctttgaatgcatttctattgtacattgagtgatctgaagaaataacttgacttataataactgtaggatctttctgtgattcaagatcttgatttgtttttatgaa

SEQ ID NO: 70072 - DNA, 255 bp, Glycine max
  Clone ID: 700839339H1
cttttatcttcccaagatggagcattcaagggaagctaagatttggaacaatgtgtttcagaaagctgagaaggtagcaggcatccaaagaggaagcataagggcaactgttctgatagaaacacttcctgcagtgtttcaaatgaatgaaattttgtatgaactgaaggaccattcagtgggtttgaactgtgggcgttgggattacattttcagttatgttaagaccttccaagctcatccagatcgctctta

SEQ ID NO: 70073 - DNA, 249 bp, Glycine max
  Clone ID: 700839340H1
ggaattagcagacaagatagtgcaaatgagtcaacagaagtttgactccaatgttgtggatcaatgtttgacctttggaggtccttctgaacgccaattactagtgagtcagatgcttggcaccacagatgaaaacgaacctcttcaggcgatgatgaaagatcaatttgcaaattacgttgtacaaaaggtgctggaaacttgtgatgatcaacagcgcgagtgattctatcccgaattaaggtcatt

SEQ ID NO: 70074 - DNA, 252 bp, Glycine max
  Clone ID: 700839341H1
gaaggaaggagcaagggagggcaaacaaggaaggaacagctgggtacagaagggtaccaggaaatgggacgcaaatgagggttgagcactgtggacaaatcaggagaagaacgtgctcaagaggaaggcattggcatcgatgagtccaagttcaggactggtaataacaagaaccagaatcagaacgaagaccaggataagtgataatgtaacacccttcactagcatgtgtagtgtgttcttatgctgctt

SEQ ID NO: 70075 - DNA, 253 bp, Glycine max
  Clone ID: 700839342H1
gttctgccagcctctaaatgggcttgggagggtgatgagagtgatgatgaacaaaggagaagtggaaaaaatatcggcttaagctactcatcttctggtagtgagaacgtgggtgatggtcttgttaaagctgatgaatcagagtctgcagctgatacacgtttttcagctcatgctgacagtggaatgaatgaagagcagaggcaaaagctgagacgcttagaggttgctttaattgaataccgtggtctct

SEQ ID NO: 70076 - DNA, 251 bp, Glycine max
  Clone ID: 700839344H1
gagggcgtggggagcaccgaattggacgaggcgttcagcgccgcgacggctttcgtggccgccgccgccgccgatcggctatcgcagaaggtgtcgagcgacgtgcagctacagctttacggtctttacaagattgccaccgaacgtccctgcagcacgccccagccttcgcccctcataatgaccgcacgtgccacatggcaagcgtggcagaaattgggtgctatgcctcctgaagatgcaatgcagaa

SEQ ID NO: 70077 - DNA, 249 bp, Glycine max
  Clone ID: 700839345H1
caaccacaaattttgcagggagattctgttaagaagaaattataatgtcagaatttttttttgtataattaaattaaattgagctaggtcaggtttctctttctttctattttgaaaatcaggcacccagaaaaactgttgatgggccaagcaaaagagagtggagatgcggaagtaaaagcagaatacagattctcccataagtaataatactgtagtattatgttccttctcttttggcttgcttat

SEQ ID NO: 70078 - DNA, 247 bp, Glycine max
  Clone ID: 700839346H1
ttccaccccctctagattttctctctaactggttttccttagatctctcacaatgacctttaatcttatgcttttgttctgtttggttgcagtgatcaacaatgttgttgttccaactagtgcaagacaactcatgagtaccaccactacttcaccagacgagaaagaagtgatgatgaatattggcactgcaaatagagggcatgatgaaaaacatgatcatcaagtacaagtagatgatccacaa

SEQ ID NO: 70079 - DNA, 248 bp, Glycine max
  Clone ID: 700839348H1
attcattttaatcctaattctgcacttcttgatcattcgatttttctcctcaagatgcagatattcgtaaaaactttgaccggcaagaccatcacccttgaggtggaatcctccgacaccattgacaacgtaaaagctaagattcaagacaaggaagggatcccacctgaccagcagagacttatctttgcgggtaaacaacttgaggatggtcgcacccttgccgattacaacatccaaaaggatca

SEQ ID NO: 70080 - DNA, 247 bp, Glycine max
  Clone ID: 700839349H1
ctcgagccgggaaagttgattggttgactgacaagatgagaagccgtgaccacacagtctcagcaacccacggagacatggaccagaataccagggacattattatgcgtgaattccgttctgggtcttcccgtgtcttgataaccactgatcttttggctcgtggtattgatgtgcaacaagtgtctctagtcataaactttgatctccctacacagcctgagaactatctccaccgtattggtcg

SEQ ID NO: 70081 - DNA, 251 bp, Glycine max
  Clone ID: 700839351H1
cgaaacccttcttccattaccggcgaacgaagtcggtggcagaaaaggaacaacctcgattcccaaatcgtaaaatccgatgacgaccgctgcaagacccacatgggcacctgctaaaggtggcaatgaacaaggcggtactcgaattttcggtccctcacaaaagtactcttctagggacatcgcatcgcacacccctctcaagcccaggaaggaagggcaggacactcaggatgaattaaagagaaaaa

SEQ ID NO: 70082 - DNA, 255 bp, Glycine max
  Clone ID: 700839354H1
ctgtaattgtagtagtagacagtaggactatgagccaggaacagctcaagaaacctcaacgtgagcatagccaccatcacatactgcggcgttttcacagtctccgacgaactcgctttcaaacccatcgcgcgaatagacgcagctctcatggcagccacggagatccaggcattgggccaaactcactaaggaggtctcgcctcggtgatgcaatctgccgcaatcgaaaacctccgcgccggcgtcgtggcc

SEQ ID NO: 70083 - DNA, 255 bp, Glycine max
  Clone ID: 700839355H1
atccacagccgtccttcaaattccggccggccaatctgcaattccgattttccttcgatctcttgcgaatcccctttctgcaccttcctagcctttcattgacaacatgactctttccgatgacgaagacgagaatctagctcaatttctgtaatcagaagtcctctcggaggtctctgacaaggaagaggtcaatgtggaggaaccgaaagcacagagaaagcgcgtggactgaggatgagattactaacaaaa

SEQ ID NO: 70084 - DNA, 251 bp, Glycine max
  Clone ID: 700839356H1
actttgttatggaatatgctaaaggtggagagttgtttaagaaggtggccaaaggaaagctcaaagaagaagttgcacacaagtattttaggcagctagtgagtgcagtggatttttgtcacagtcgaggtgtataccatagagatataaagccagagaacattctgttggatgaaaatgagaatttgaaggtctcggatttcgggttaagtgcgttggccgagtccaaacggcaagatggcttgtgcaca

SEQ ID NO: 70085 - DNA, 248 bp, Glycine max
  Clone ID: 700839357H1
gtttcactcttcctctgcgctctaaccctatccgctgctcacggaagcaccacggttcaagacatcgcgagccagttgaaactcggggacaacgagcttctgcgcacggagaagaagttcaaggttttcatggagaattacgggaggagctactccacagaggaggagtatttgcgccgtttggggattttcgcccagaacatggtcagagcggcggagcatcaggcgctggaccccaccgccgtcac

SEQ ID NO: 70086 - DNA, 249 bp, Glycine max
  Clone ID: 700839358H1
gacaagatctccatatctgttcccaaaagcttgtttgtaagaatggcttccggtgaacagaaattccctcctcaacaacaacaaacacagcctgggaaggagcatgctatgactccagtaccccaattcactagccctgactacaagccttcaaataaacttcaagggaagattgcattagtcactgggggtgattctgggattggacgagcggtgtgtaacttgtttgccttagaaggtgctacgtgg

SEQ ID NO: 70087 - DNA, 248 bp, Glycine max
  Clone ID: 700839359H1
ggaaataattgatctttgaaaatgcagggaggaaagaaagctggagagtccatcaaggaaacagctgcaaacattggtgcttctgccaaggctggcatggagaaaaccaaggccactgtccaggagaaggcagaaagaatgacggcacgtgatccgatgcaaaaggagttggcaacccagaagaaagaggcaaagatgagccaggcagagctggacaagcaggcggcgcgtcagcataacacgcggcg

SEQ ID NO: 70088 - DNA, 249 bp, Glycine max
  Clone ID: 700839360H1
ggcacagctatgccaccaaatccaaccaacacagggtcgtcaaaacccctggtgggaagctcgtttatcagaccaccaagaagagggccagctggcccaagtgccccgtcactggcaagaggattcaggggattccacacttgaggcctgcagagtacaagagatcaaggttacccagaaaccgtaggactgtcaaccgtgcatatggcggagttttgtctggaagtgctgtcagggagaggatatccg

SEQ ID NO: 70089 - DNA, 247 bp, Glycine max
  unsure (1)..(247): unsure at all n locations
  Clone ID: 700839361H1
cacaactactacaagtacttccttacaatcaaaaccattaatnactatcggcaagttatcaaaagcactacgatgatcagggtcgcaatgttgacgagtatggcaacgttgagaagcaaaccgacgaatacggcaaccctgttcatgctgctagtgtcacctatgtagccaccagaactgctgctggtggttacagtgatgacattaataagcaacatgataccaccaatgcctacggcgtaacact

SEQ ID NO: 70090 - DNA, 244 bp, Glycine max
  Clone ID: 700839362H1
cttgcttccacttccattccaccatgccttctaatgatctcaaacatcgggtcaccaccactacagcaaccaccaacgacgtcaataggaccagcagaggcaaacgaatgctgatggccaaacgcggccttaagtcactcgccatagccgttgtcctccctctctctctcaccgccttatcagcttacataggctcctcctcctccagtgcccattacgcttcgagaagccccttctggttcca

SEQ ID NO: 70091 - DNA, 248 bp, Glycine max
  Clone ID: 700839363H1
cgacaaggagggtatccccccggaccagcaacgtctcatcttcgccggaaagcagctcgaggacggccgcaccctcgccgactacaacatccagaaggaatcaacccttcacctcgtcctccgtctccgtggtggcatgcagatcttcgttaagaccctcaccggcaagactattaccctagaagtcgaaagctccgacaccatcgacaacgtcaaggctaagattcaggacaaggagggaacccccc

SEQ ID NO: 70092 - DNA, 250 bp, Glycine max
  Clone ID: 700839366H1
cccttcttcagggtcaccgctgtcagggttagggtttttccaccttctttatttaccaatcttcttctactaccacttttccctcgttccctctcttagtctcttcaattgtaagctttttgcgctagggtttcctctgcaatctcttgtacttgaagctcgttccttcttccggatctcgatctatggatacccgctagatgggaagactcgaacccggcttcagcttaaatggcggattcaagaatcc

SEQ ID NO: 70093 - DNA, 251 bp, Glycine max
  Clone ID: 700839367H1
agctaatctgcaattgtcaaattttgatattattgcttcatatgctttcaaatgagatcaaaatgtaatgcctactacctcaaggattcaggatgacataattggtcctgctgtctccgctgtccagaaaattctagaagaatacggaaattggttatattccaaatatacccaacaagggagactatacaaggaatcctttgaaaaacgatggccctccttgagccatgaaagtagtcagataattttgc

SEQ ID NO: 70094 - DNA, 250 bp, Glycine max
  Clone ID: 700839368H1
cacacacaactactacaagtacttccttacaatcaaaaccaacaacaactatggcaagttatcaaaagcactacgatgatcagggtcgcaaggttgacgagtatggcaacgttgagaagcaaaccgacgaatacggcaaccctgttcatgctgctagtgtcacctatgtagccaccagaactgctgctggtggttacagtgatgacattaataagcaacatgataccaccaatgcctacggcgtagcact

SEQ ID NO: 70095 - DNA, 204 bp, Glycine max
  Clone ID: 700839369H1
tttggacagcgtgacggcggggaacgcggtgaaccggaaaaaggcgatgaacgcggcgatggctgcgctgaagagcgcgggggtggagggggtgatgatggacgtgtggtggggtttggtggagagagagaagcctggggagtataattggggagggtacgtggtactcatggaaatggcgaagaagcatggcctcatggtgca

SEQ ID NO: 70096 - DNA, 247 bp, Glycine max
  Clone ID: 700839371H1
cgccgaagaaggttcatccaatccccgaagcccttcaccgcattgcaaccatgtcgaggagaaaggtcagagagccaaaggaagaaaacgtgactctgggcccagctgttagagatggtgaacatgtctttggcgtcgctcgcatctttgcctccttcaatgataccttcattcatgtcactgatttgtctgggagggaaacgcttgtccgcatcactggtggaatgaaggttaaggctgacagaga

SEQ ID NO: 70097 - DNA, 249 bp, Glycine max
  Clone ID: 700839372H1
gcctgtgaatgctagaaaccctaggcacgttcgatttgatgctctcccatttgcaatcaagggcgagcgcattcggttcttgcacgcaaggctggtactaccgctgcatcggcctcgatccctgaattcatcattctttctcgcaccatctttttctattccgattcgatttgttgttgttgttgttgttgttgtgtttttgtttccttccttgacgaatcatcacgatgttgatgagcaagcgaagaa

SEQ ID NO: 70098 - DNA, 249 bp, Glycine max
  Clone ID: 700839374H1
actcaacctcttcctcttctctctctctctatccgctggtgttattcttcagctgtagctgcaaggtctcaaggaagcttataaaaagagagcacatctgttttattcagttccgatggcagggttaaattttgaagccacacatactgacaaccgtgatattctgaagatatttgcagctgaaggtgttgagttccttttatcttgtgaagggaaggtacccgtgtcagaatgcaatgggaaattatc

SEQ ID NO: 70099 - DNA, 245 bp, Glycine max
  Clone ID: 700839375H1
atccctttccctctctactcttcactttccatttccatttttttctggttttctttctccatggcctccggcgccgccgtcgccgccgaagacgacgctgtcaacggcttcactcggtcggagatgtactcggaaaacctcgccggcactgtcgacgcctacgaccgacacgtgttcctctgctacaagagctacgtgtcctggccggcacgcatcgaggcatccgacgccgatcccttcccaag

SEQ ID NO: 70100 - DNA, 243 bp, Glycine max
  Clone ID: 700839377H1
ggcatcaacagccttgtccacgaccagtacgctttgcaagaggaaacctcagcacatgcatattatcctaccctcttcacagacactccaaaatggaactctaagaactgatgtaactgcttcagcctcaaaagataatatcagcatagaaagtgagaagtgttgttcctctttgttggtgaacagaagaacagttttggcttctggggtttccttgttgggtttcacgggtgagagttggct

SEQ ID NO: 70101 - DNA, 231 bp, Glycine max
  Clone ID: 700839378H1
gtggcgagataaagtcatggtggaaatcctctctagagatatggttctgttgatcaagggcatatgcatatgctattccatatgtacctggtagtcttggttacctccaccgcataggcttcaccaggaagagagaaaggctcatcaacccaatggaccgaacctcaccactgccaccatcttcggttcagaaacaacaaggcatgtcagagtcacttccactaccctttc

SEQ ID NO: 70102 - DNA, 194 bp, Glycine max
  Clone ID: 700839379H1
ctcaaagcagcgaatagggccatggacggcgatatggaggaggaaggcgtgcttcatgtggagcgtcgtagggagaaaatgtgattctccttctcatccatcatcataataataataatcacatcttgtgttttgtaataataatgtagggttacctttttacttagtggatcctctttagctttcatcctcct

SEQ ID NO: 70103 - DNA, 246 bp, Glycine max
  Clone ID: 700839380H1
ctgctcgagcggctcgagcggctcgagcggctcgagcggctcgagcggctcgagagatgatcagaggcttcttcgtttacgagtttatgaaccgtggaagtctagaaaatcatctattcagaagaactgtacctcttccgtggtccaacaggattaagattgcccttggtgcagcaaaaggattggccttcctccataatggtcccgaaccagtcatttatagagattttaaaacatctacatctt

SEQ ID NO: 70104 - DNA, 244 bp, Glycine max
  Clone ID: 700839381H1
aaggatgagtccttcgggattgtcaacatgctctgacagtgcagttgaactagcatacaccccaagtttgattattgacagcagtgagaatgcattggagatgactttgagtcgccgtattatagaggatctccattattcatctgctcctagtacactggatggtggaatggatgatactatctacgaacaacttgagcaggctagagctgaggctgagaatgctacgctacgtgcataccag

SEQ ID NO: 70105 - DNA, 83 bp, Glycine max
  Clone ID: 700839382H1
gaaaattttcctggaaaattggggagtttggatcactgagtgatactgaagacgggcgtgtaataagatgatgtattatttcc

SEQ ID NO: 70106 - DNA, 249 bp, Glycine max
  Clone ID: 700839384H1
tgagaggcaaagcggttgttggtgttggttccagaatgataaggtgcatggctaaccccagaagagttcaaatggtggccaagcaaattaggagagagctttctcatatgcttctcaccgataaagtcttgcagtatgctgttcttcccgaagcctccttaggagccgaccgttacctctcttctctcaccaccatcaccgacgtccaagtctccgccgacttgcaggttgttaaggtgtatgttctgt

SEQ ID NO: 70107 - DNA, 249 bp, Glycine max
  Clone ID: 700839386H1
cttagagaagatcctgaactccaagcctgctggaaagaactcgtagaggtgggtcatggagacaagaaaaatgagccatggtggcctaagatgcaaactcgtgaagagctagttgaagcttgcgctatcatcatatggactgcttcagcacttcatgcagctgttaattttggacagtatccctatggaggtttaatcttaaaccgtccaactcttagtaggcgattcatgcctgagaaaggttctctg

SEQ ID NO: 70108 - DNA, 251 bp, Glycine max
  Clone ID: 700839387H1
cgagatgattagaagggagcttctaactttgctggagcatgacaatggtaagtatccacttgatgataaagtgatcaatggagaaaactacaaaggatgctaaaggaagagaaaaagcaggaaccaaaggtcaaacaaagaagggtggtggtgaggaacaaggaaaaagaagagaagaaacaggagaagaaaaacaatccagcctggaggagatttctaagcacagagctgaagctcaacaaaaagcatga

SEQ ID NO: 70109 - DNA, 245 bp, Glycine max
  Clone ID: 700839388H1
atcggaacgtgcggaagacacgtgtggtcgacctggtcctcgactgtgtcatcccttacatcgacgaccccaaggaccgcgacgccgtctcacaggtctgccgacgctggtacgaactcgactccctcactcggtagcacgtcaccatcgcgctctgctacaccaccacgccgtcgagcctccgccgccgcttcccgcaccttgagtcgctcaagctcaacggcaagccccgatcagcaatgtca

SEQ ID NO: 70110 - DNA, 271 bp, Glycine max
  Clone ID: 700839390H1
aatgcaagttcagcattcggctcgatgcggattcatcttcggtcattgtattttgtataataaaagaaagataataaagagaataatcatattaaatattaaatagaaaaaatggcccgatcatttatcaaaggccaatcttcggtagaagagaaggttcctttggaacacttatttctatttcagtataccgggtctctttctttcatttcaaaaaatttatagaatttcgattttgaaatgaaagaaaagtgtggggataaataaaatg

SEQ ID NO: 70111 - DNA, 235 bp, Glycine max
  Clone ID: 700839391H1
ctctctctttgcctcttggcgcaattcgatcgaagctatctacccttccatggcggcaggactctccaccgccgcaatcttaaagccctacaatctcgtccaacccccaatccctctttctaaaccaaccacatcactcttcttcaaccccttaagatgtttccatcacagtacaatccttcgagttcgacccagaagaagaatgagcggcttcaccgtttgcgtcctcacggag

SEQ ID NO: 70112 - DNA, 231 bp, Glycine max
  Clone ID: 700839393H1
caaagagatgcagaacttttgttcatgtggcaactgtatcagagatcaaaccatcagtcagaaaataagacagacatcctcaaacaaattgcggagacagtgaagcataggaaacacatagatggtagcgtggaattgattggagttttactgtatggaccaggaaaaggttcttctgttctacaatccgtgagggctcctggttcgtcccttgttgatgactggacatgc

SEQ ID NO: 70113 - DNA, 241 bp, Glycine max
  Clone ID: 700839394H1
ccaaacttgttcggtggtagacgaagcaacgtcttcgacccattctctctggacgtatgggaccctttcgaggggtttcctttttccacaggtcacgtgccttcctctggtggggaaagcagtgccatagccaacactcgcgtggactggaaggagactccggcggctcacgtgttcaacgttgatcttcccgggttgaagaaggaggaagtgaaggttgaagttgaagatgggaggtgct

SEQ ID NO: 70114 - DNA, 243 bp, Glycine max
  Clone ID: 700839395H1
gaaatggctgaagcacaactacgagaccagcatggcaaccctgtcccactcaccgatcaatacggtaatccggttatcttaactgacgagcgcggtaatcccgtccaactcactggtgtcgctaccaccgctaccggcacagcaggttctgggtttgggtcctatggtaccggtgcttacggtggtggtgcaagtgcaaccaccgttgcagatcttttggcaacccaaccaaggagtgcaggg

SEQ ID NO: 70115 - DNA, 227 bp, Glycine max
  Clone ID: 700839401H1
caacaactactacaagtacttccttacaatcaaaaccaacaacaactatggcaagttatcaaaagcactacgatgatcagggtcgcaaggttgacgagtatggcaacgttgagaagcaaaccgacgaatacggcaaccctgttcatgctgctagtgtcacctatgtagccaccagaactgctactggtggttacagtgagtgcttcaataagcacatgataccacca

SEQ ID NO: 70116 - DNA, 225 bp, Glycine max
  Clone ID: 700839402H1
atacaacaagaaaagaaaaaaagaagagttgagattccctttgaagaaaagatggcatcccataggcaaagctatgaagctggtcaaactaagggccgaactgaggaaaagacgaaccagacgatgggcaatattggagagaaggctcaagctgcaaaggagaagacccaggaaatggcccaagctgcaaaggagaagacccaacaaacagcccaagctgccaag

SEQ ID NO: 70117 - DNA, 82 bp, Glycine max
  Clone ID: 700839403H1
ggttgaatgaagaacctgagatcagcacaaatactgaagcccagtgttcctcttcttgttgcctcctcttttaagaacaaac

SEQ ID NO: 70118 - DNA, 83 bp, Glycine max
  Clone ID: 700839405H1
aaggaaaggcgtgtggtggctgcttcgaaagcttaataatttgtctacttccagaacatcatagttttcgcagcagcaaacta

SEQ ID NO: 70119 - DNA, 76 bp, Glycine max
  Clone ID: 700839406H1
agaagctcctatgtatttgttaaagacccggcctactaaaactctgcattaaagacttgtcgtattagagctccta

SEQ ID NO: 70120 - DNA, 81 bp, Glycine max
  Clone ID: 700839408H1
atcaatctgcctcgatcatggagcggagaacatttgggtttttgttgttgctcctccttgtcttagcttctgatgtgacgg

SEQ ID NO: 70121 - DNA, 226 bp, Glycine max
  Clone ID: 700839409H1
cgagccaaggctccaaagaaaaatctagggttcccaagcctaaagccttctctgctcctcctgctactaccgccaccaccgccactcctcactacgcttctcctgctcctcaaagcgcatcgtctgatgctgctgttgcccctgacgcttctcagaatgaccaagatgccaaaaaccctccaaggtataatgcattgatttttgaagctctatcagcactgaaaga

SEQ ID NO: 70122 - DNA, 218 bp, Glycine max
  Clone ID: 700839410H1
ccatttctcacctgacatgtgcagatttccttcgagcccctggagttcagacgcctgtaattgttcgtttctcaactgtgattcatgcgcgtgggagccctgaaaccttgacggaccatcgaggatgtgcagtgaagttttacaccagagagggtaactttgaccttgttggaaacaaccttcccgtcttctctgtacgtgacggcatgaaatttcca

SEQ ID NO: 70123 - DNA, 219 bp, Glycine max
  Clone ID: 700839412H1
gtggctataatgatgacaccaatagacatcatggaactaccggtgtctatggtatagacaccgataggcaacaacatgggactactggtggctatgccggtgacactggtaggcaacatgggaacatcggtggcccttactatggaaccaataccgcagacaccggtactggtcccagaagtggaaccacgggcatcaccggttatggaggcactggtg

SEQ ID NO: 70124 - DNA, 234 bp, Glycine max
  Clone ID: 700839413H1
tcggaatcgctcgagagcaggttgtggatgagtgtggaaggcttccactggctctgaaggtgattggagcttctttgcgagaccagaacgaaatgttttggttgaatgttaaaagcaggctctcccaaggccaaagcattggtgaaacctatgaaaccaatctgattgatagaatggcaattagtactaactacctgccagaaaagatcaaggagtgcttcttggacctgtgtt

SEQ ID NO: 70125 - DNA, 76 bp, Glycine max
  Clone ID: 700839414H1
gagtgctgtccaagaaactagaggagcgagctgatgcagctgcgaaatttgctgccactgaactcgaccaagtcaa

SEQ ID NO: 70126 - DNA, 223 bp, Glycine max
  Clone ID: 700839415H1
tcagatcgcgggctgccggagaatctcgattggagagagaaaggagctgtcaccgaagttaagttacagggtagatgtggatcatgctgggctttcagcaccacaggatctatagaaggagccaattttcttgccaccggaaagcctttcagtcttagtgaacaacagctccttgactgtgacaacaagtgtgacataacagaaaagacttcatgtgacaatg

SEQ ID NO: 70127 - DNA, 111 bp, Glycine max
  Clone ID: 700839416H1
cacaggatatacgggactctatatctcatcttcggtgccaattgtggagtgatgggcacatgcttctccgtattgattcgtatggaattagcacgacccggcgatcaaatt

SEQ ID NO: 70128 - DNA, 222 bp, Glycine max
  Clone ID: 700839417H1
agaccgagctagctagctagcaagcaagcacagagatggaggcatagcgaggccatgtcctcatgtgcttggcacgtgtgtcactcttcctctgcgctctaaccctatccgctgctcacggaagcaccacggttcaagacatcgcgagaaagttgaaactcggggacaacgagcttctgcgcacggagaagaagttcaaggttttcatggagaattacggga

SEQ ID NO: 70129 - DNA, 222 bp, Glycine max
  Clone ID: 700839418H1
agaacatatcgtgcattggtccttagatttttgaaagatcgaattgcagctctattgttgcttgaggtaagcactaggcagctaatggttcctgtataatctgtttgactctccatgccatttgttgattgccctagtacaaaatctcagtgtataaaacatccaagatgggctagttgcatctgtgattagttagttagggatgactttacttttttttag

SEQ ID NO: 70130 - DNA, 76 bp, Glycine max
  Clone ID: 700839421H1
gggctagctaagctaagctaaaactaaactctttcagtttgtttcagcttcagcttcttctgcttcttttgctttt

SEQ ID NO: 70131 - DNA, 221 bp, Glycine max
  Clone ID: 700839423H1
tgataaaatggggaagtttttgcatagtgttgagttttgtcgcagcattccatacgatgccgaagggaagagtttttgttgggtttgggaggctaagtagggtttgcgttgagaaagagagagatgggaagagaaaaggagacaacaaaggtagcttacacagtggaacagcttgtagccttcaatccatacaatcccgatattcttccagatctcgaaaa

SEQ ID NO: 70132 - DNA, 215 bp, Glycine max
  Clone ID: 700839424H1
acccggtggccttttccctctctttctctggaaaattcccccgattttctcgagaaagtgaaacgcaattatgagctttcaggacatctcggctgggcggcccttcagttcgaggcgcgggttgatgaacgggtagcaagacccgacgcaagcggtggctgccggaatattccagatcaacaccgccgtctccaccttccagagactcgtcaaca

SEQ ID NO: 70133 - DNA, 104 bp, Glycine max
  Clone ID: 700839425H1
agaacattgcctgttagggaagagatcctgagagccctccttaattcggatttgatcggcttccacactaccgacgacttgcggcatttcctctcctgttgtag

SEQ ID NO: 70134 - DNA, 220 bp, Glycine max
  Clone ID: 700839426H1
agagctaacttcaacacctttaattttctaaaagtaattcagcggctgaataccaagcggagaagatgagtcaggagcagccacggcgtcccaaaggccaaaaccccatcaaatacggcgacgtttttgtcgtctccggcgaccttgcacagaagcccgtcgcaccggaagatgctgccatgatgcaaagcgcggaaactcgagtgctcggacaaaccca

SEQ ID NO: 70135 - DNA, 202 bp, Glycine max
  Clone ID: 700839428H1
atatgtttgcgaggactttcattgagccctctcagaaaattagggactttggtgtgaagctgaagctatcgcccgttcgtgccgtgcttgaaggtaaacgtgttgtggttgtggatgattccattgtgagaggaaccacgtcgtccaagattgttaggctgctgaaggaggccggtgctaaggaggttcacatgaggattgc

SEQ ID NO: 70136 - DNA, 221 bp, Glycine max
  Clone ID: 700839429H1
aaaaacctaagcttagaattagaaacaaagaaaagaagaaaggaaagaattgatcgttgaaaatgcagggaggaaagaaagcgggagagtccattaaggaaacagctacaaacattggtgcttctgccaaggctggcatggagaagaccaaggccactgtccaagagaaggcagaaagaatgacagcacgtgatccggtgcaaaaggagttggcaacccaa

SEQ ID NO: 70137 - DNA, 223 bp, Glycine max
  Clone ID: 700839431H1
tgccattattttttgtctcattgcccccaaatatcaccgtttctctcaagctctctcaatcttttctcaatttgagtggctgcaaaaccccacgtgttacctccttcacttttttggctgcccccactttttttgttcacctctttcttcaaccaataatccctttggaggtttagggttttggtcctcgcggctctctcctaattaaaggatatttctttct

SEQ ID NO: 70138 - DNA, 225 bp, Glycine max
  Clone ID: 700839432H1
cagtgatgctgcacagaatgtcaaagattatgcaagtgatgcagtgcagaagagaaaagagtattctggtgatgcttctcacaagagcaaagaggcttctgattatgccagtgagacggctaagaagaccaaagattatgtcggtgatgctgctcagagaagcaaaggggctgctgaatatgaaagtgatgcggctcagaggaccaaagagtatgctggtgatgc

SEQ ID NO: 70139 - DNA, 76 bp, Glycine max
  Clone ID: 700839433H1
caatatcatacctgtgctcctaatttatatcccaagtttccacctatcgaatttcctcgttgctagctcctgtttc

SEQ ID NO: 70140 - DNA, 222 bp, Glycine max
  Clone ID: 700839434H1
aagaaggtaagttcccgttacagagatagaaaaaacagaacaaaacaaaagataaagaagaaaagaatgggttatgtttctatgaaagtggttctaatctccaccggggttttatccatggcaatgggtttgaaactcacacttcctttgctctcgcatttcctcctcaaccaagcccctcacgtgtggaccttcctcctcacgtgcttcactcccccttac

SEQ ID NO: 70141 - DNA, 221 bp, Glycine max
  Clone ID: 700839435H1
tactacaagtacttccttacaatcaaaaccaacaacaactatggcaagttatcaaaagcactacgatgatcagggtcgcaaggttgacgagtatggcaacgttgagaagcaaaccgacgaatacggcaaccctgttcatgctgctagtgtcacctatgtagccaccagaactgctgctggtggttacagtgatgacattaataagcaacatgataccacca

SEQ ID NO: 70142 - DNA, 220 bp, Glycine max
  Clone ID: 700839436H1
ctgtcttattgttacatagtcacagaaaaatggcaaatagaattctcctagttgtgtcatacaaaaatttggtcaaacacctccactcaactagtgcgaaaaatgcaaatgctcgtgtgcatactcaaggtggtgattcaattgtaggagcatcagcacaaggggcagtgaaggcaacagaggtgttggagaatgtgggagaaagggctaaggagacagt

SEQ ID NO: 70143 - DNA, 220 bp, Glycine max
  Clone ID: 700839438H1
aagcgcgttgcaatgaggaagcttgagaaggtacggaagaaggccaatgccatatcagatcagacagagatatctgatagttcgaagaggaagcaaattgaacaactatataaaagggctgttcccaagaggcctaaaaaggagtatgtagttgcaaagaaaggtgtccaggtaagggctggcaagggaaaagtccttgttgatcgcagaatgaagaagg

SEQ ID NO: 70144 - DNA, 223 bp, Glycine max
  Clone ID: 700839439H1
acgtctcttctcaaaaaccctacaaacaaaacactctctgcttcgcaaattcgaacctttgaatctgaatcatgccgcgcaagaagaaagctcacgacccattcttcaccaacgattcccgaaagcgccaaaaaccgaataaaaaactcgacgaagatgaggaagacgccgagatagaaagcgactttgatgaagacggcttcttcgccggcggcggtggcgg

SEQ ID NO: 70145 - DNA, 219 bp, Glycine max
  Clone ID: 700839440H1
gttaaaaactcaatatcaaattctttgtcccacaaaagatggggtttactcccacaagtactgcaacatgctttctcataatagcacctttggttgtgctatggtgttggaagctactaaagtgggtgtggctgaggccaaagagattggagagagcattaagggcacagggccttcaggggaatccctacagcctcttgattggggacactaaggaaa

SEQ ID NO: 70146 - DNA, 73 bp, Glycine max
  Clone ID: 700839441H1
gttacttgtcgatttgttgtgcaatcttacaagttccaaacttctctatttgggtattatgtgttctcacttc

SEQ ID NO: 70147 - DNA, 218 bp, Glycine max
  Clone ID: 700839443H1
aggagctatcatctctgatttcattccggcggcggcgatcgccgggtctcgccgcctgaccgccgattacctgtggccggatttgaagaagcggaagtctgacttggacgttgacttcgaggctgatttcagggattttaaagacgattctgatatcgacgacgacgacgacgatcaccaagtcaagccctttgctttcgccgcctcttctcgtctgt

SEQ ID NO: 70148 - DNA, 218 bp, Glycine max
  Clone ID: 700839445H1
ggaaaagcttgggtaggcctggtggtattgctgtgtttgattgtcacggccatcgccgaacaatgcggtcgtcaagctggcgggcagacatgtcccaacaacctatgctgcagccagtacggttggtgtggaaacaccgaagaatactgttccccttctaagaactgccagagcaactgctggggaggcggcggcggtggcggtggcggcggcggcgg

SEQ ID NO: 70149 - DNA, 110 bp, Glycine max
  Clone ID: 700839447H1
ctagtttttcactgcgtgttgaagttactgcaggaaacagcttatttcatgtggctgtggaaaatgatgacgagtcaacccagataattagacatcttaattcacagaaa

SEQ ID NO: 70150 - DNA, 108 bp, Glycine max
  Clone ID: 700839449H1
ataaatttccggttcacaacctttcttctccagcgttttcgatgctgcaaacacccttgaacaggttttccgcacgcgttgcgtattgagactggtccttcttcggaa

SEQ ID NO: 70151 - DNA, 223 bp, Glycine max
  Clone ID: 700839450H1
agcaatcctctacaggtttcaaaatgttgaaatcgggcatgggaattgaggagagatagcaagtgaagaagccagcacaagccagctcgagaaaagggtgtatgagagggaaaggaggtcccgagaatgctagttgcacctacaaaggtgtgaggcagagaacatggggaaaatgggttgctgaaatccgtgaacccaatcgaggtgctaggctctggctcgg

SEQ ID NO: 70152 - DNA, 222 bp, Glycine max
  Clone ID: 700839451H1
accaaacctctgcattattctcttctctcactctctctaagctcctcttttagtcttactcacaaacacttttttcactgcttccattacgaacatatatttattatatggctcctgaacttgtccccaccgttgtgaaatccagtgctgcgttcacgaaacccgcgacccttccaaggcgtgcctacgtgacattcctcgccggatacggtgactacgtga

SEQ ID NO: 70153 - DNA, 202 bp, Glycine max
  Clone ID: 700839452H1
ggcgaatcacgaaccggttttagggtacgttgtgctttacgtcaaagacgtagccgagtcccttgctttctatgccaaagccttcggctattctgttcatcgcttagacgagtctcacagatggggagagttggaaacggggaacacaactattgctttcactccgattcaccagcacgagaccgatgatctgaccggtgcg

SEQ ID NO: 70154 - DNA, 221 bp, Glycine max
  Clone ID: 700839453H1
gaatttcatcatccaacatcacacacaactactacaagtacttccttacaatcaaaaccaacaacaactatggcaagttatcaaaagcactaccttgatcagggtcgcaaggttgacgagtatggcaacgttgagaagcaaaccgacgaatacggcaaccctgttcatgctgctagtgtcacctatgtagccaccagaactgctgctggtggttacagtga

SEQ ID NO: 70155 - DNA, 82 bp, Glycine max
  Clone ID: 700839455H1
aggaactctttcgatataatatagaaagagacagagagagagagacagacaagaagaacaaagatgcaatcttcaaaggaga

SEQ ID NO: 70156 - DNA, 218 bp, Glycine max
  Clone ID: 700839457H1
cacaaaatttcagaagctagtgatcaatcatcaacacagtgctgagtgtgttgctctgtgaatccaccttcttcttccatcggaggaccatttcctcctggaatagaaatactaccacacttttcttttcctacttctctaagttgctaagttaattgctccttcatttcttcactcttcgttctcgcgtacccgtgtcacggtaactcgtggtgaag

SEQ ID NO: 70157 - DNA, 221 bp, Glycine max
  Clone ID: 700839458H1
cgacaaaattgaactgtaattgtagtagtagacagtagcaccatgagccaggaacagctcaagaaacctcaaggggagcaggaccccatcaaatacggcgacgttttcaaagtctccgacgaactcgctttcaaacccatcgcgccaagagacgcagctctcatgcaagccacggagaaccaagcattgggccaaactcaaaaaggaggtcccgcctcggt

SEQ ID NO: 70158 - DNA, 218 bp, Glycine max
  Clone ID: 700839459H1
ttcctcctccgtcgttgacgacagcgacgacaacatcgtttcctcgtcgtttcgacctcccttgccgttcgatctcaacgcgctgccgtttgatgatgatgctgccgtcgtggatgatgatctacgctgcaccgcgctttgtctctgatgattatcgtgcgatgatgatttttaatttctcattttttttatctcttcaacttgattttttgttattg

SEQ ID NO: 70159 - DNA, 81 bp, Glycine max
  Clone ID: 700839460H1
gcacattttctaaatcaaagagaaatatatcattcttcatctcaaatgtgctatattttatcttaaatgtgctatattttt

SEQ ID NO: 70160 - DNA, 222 bp, Glycine max
  Clone ID: 700839461H1
agaacaaaactacccttttgcttttgctctttgttctttgccatggagtggccacaacaacaatggccttccatgatgatgagggtggtgataaaaagtcaccaaaaagtttgtttttgatgagctactccacgagggttttcaagactgatgcaggggaaatgcgtgtgctgaaaagccatggtggtaggatattttataggcacatgcacattggcttca

SEQ ID NO: 70161 - DNA, 222 bp, Glycine max
  Clone ID: 700839462H1
ggaatttaacgaagagacaggaaagtttgttgtttacattcctcaagtgtgtgaggttggctacagggattcgtcagttctgcgtttctccaccagcgtgagtggctatttggagaaagggaagctagcagaaatagaaggaatcaagaccaaagtgctgatatgggtaaaagtgactgccatttcatccgagggaccaaagctccatttcacggccggcat

SEQ ID NO: 70162 - DNA, 221 bp, Glycine max
  Clone ID: 700839463H1
ggaattgcttgagaaggatctaggatgggcagcatggaaggtgcacgtggctgttgcgaaccaaaacgacaaagcggtgagacaaaagctcaaagagtggttgaagcttcctgtggtgtaccaacttggtgtgcactttgatccttgtactgtgaccatgtcgagttccccgaggttcaacatgtatgggaatgaatttgggatggggaaagcggttgcag

SEQ ID NO: 70163 - DNA, 79 bp, Glycine max
  Clone ID: 700839464H1
tcgtcactgctatggctggcatcggagaaaaccaaggccactgtccaagagcaggcacaaagaatgacggcacgtgatc

SEQ ID NO: 70164 - DNA, 81 bp, Glycine max
  Clone ID: 700839465H1
aagaaccttcgagatgggtacttcttgtgggcaatgaccgcttatggtttaggtctccttatcacatacgtggctttgaac

SEQ ID NO: 70165 - DNA, 82 bp, Glycine max
  Clone ID: 700839471H1
agtccgttccctctttcaaacctgttgttttttcaccaaagcggcgatggtaacgacgtcggtggtgccgtctaaccggcgt

SEQ ID NO: 70166 - DNA, 81 bp, Glycine max
  Clone ID: 700839472H1
ttacttgtcatttgggtgtgcaatctgacaagttccaaactgctctatcgcggtattatgtgctctcacttcccacacaca

SEQ ID NO: 70167 - DNA, 220 bp, Glycine max
  Clone ID: 700839473H1
gaaggaaactataaaatgcccccatttaaaaggagccatagtcacactgatgcaatgtctggtatgttccataaagggcctcgctgtgctggctgtggtgtctatccaataactggacctcgtttcaaatccaaagtaaaggaaaattatgatctttgcaacatttgtttcaatgaaatgggtaatgggacagattacatcagaatggaccaccctgcat

SEQ ID NO: 70168 - DNA, 78 bp, Glycine max
  Clone ID: 700839474H1
atgtcatttaatccaaacccgtgttctgatgcatggagtttggaatttttgaagcgtaccggatttcattgtgatatc

SEQ ID NO: 70169 - DNA, 220 bp, Glycine max
  Clone ID: 700839475H1
actctgcatcatcacaatggctgaagtacgttcacaacaacaacaaccccagcatgtgcaagtccacgcaaccacaacacacaccccacaacaccatggcggggaaggtggcagcggcattctgaacctcatcccggagatgtccctcacgggttcccaactcctagctctcctcgccggcgttccccttggtgcaatgctgctcctcctctccggcatc

SEQ ID NO: 70170 - DNA, 220 bp, Glycine max
  Clone ID: 700839476H1
agtcgtggtctttagcatttctcaccgactgcgaagggagagcgaataaaaaaaggcaaatcaaattcgagagaaggagagaatttagagagggaaaggatgaagatcacggcgttgttggtgcttaaatgcacgggcgagggatccgatccggtgattctggcaaacgcttccgatgtcagccacttcggctatgtccagcgttccagcgttaaggaat

SEQ ID NO: 70171 - DNA, 220 bp, Glycine max
  Clone ID: 700839477H1
atattggacccgcctctaataaaacccccaccactcagtcccagcccaaagggtgtcaagaggctctgtcatcccggagcctggaactgatttcagctgaaatggttaccattttagtgcatatccttgcttagcttcatatcagaattctcaacctcaaggttcacagaatgagaatgatccaaattatacaactatttttgttggtaatttggatcct

SEQ ID NO: 70172 - DNA, 214 bp, Glycine max
  Clone ID: 700839478H1
atggggtatcatccgaaccccgtcccgttctcactgtctcattcaaagcgttttcgaccctctccgaccatgggaacctgcttttccgccaccaaagtcagcggctcccacggcaacgcgtcaccgtcaacaagaaccgcaagggggccgcgaagccgaaatcagagacggcaacggcgaatcccctacggcacaaggcaagttcgcgccacgt

SEQ ID NO: 70173 - DNA, 224 bp, Glycine max
  Clone ID: 700839479H1
gcgacacgatacataacaccgctagctcttcaattcttctctctctcactactctctattcgttagtgttcttcaattcttcatcgcagacttagaatcatgggtttgcaaaaccaattaaacgacgtgtcgtcgggttcgattccgtcgctggtcttggcgcagatagcgacctgcgtcaactacctccgctccatgcttttcgcgcttttgcaaacccttgg

SEQ ID NO: 70174 - DNA, 108 bp, Glycine max
  Clone ID: 700839481H1
aggagaggcaaaagtaacttaaacagacgaaactccaattctttgtcagctgagaagcgcaggtaaaataggtgcggattgggaaacaggcaaggtcaaaattgtgaa

SEQ ID NO: 70175 - DNA, 221 bp, Glycine max
  Clone ID: 700839484H1
cgagaaaacagtaaagctaacttcaacacctttaattttctaaaagtaattcagcggctgaataccaagcggagaagatgagtcaggagcagccacggcgtcccaaaggccaaaaccccatcaaatacggcgacgtttttgtcgtctccggcgaccttgcacagaagcccgtcgcaccggaagatgctgccatgatgcaaagcgcggaaactcgagtgctc

SEQ ID NO: 70176 - DNA, 218 bp, Glycine max
  Clone ID: 700839485H1
cagagataacttgacaaataaaatcaccatgtctatcatcccaaacttgttcggtggtagacgaagcaacgtcttcgacccattctctctggacgtatgggaccctttcgaggggtttcctttttccacaggtcacgtgccttcctctggtggggaaagcagtgccatagccaacactcgcgtggactggaaggagactccggcggctcacgtgttca

SEQ ID NO: 70177 - DNA, 197 bp, Glycine max
  Clone ID: 700839486H1
cacatctgttaaaagataacgcaggtgtcctaagatgagctcaacgagaacagaaatctcgtgtggaacaaaagggtaaaagctcgtttgattctgatttccagtacgaatacgaaccgtgaaagcgtggcctatcgatcctttagtccttcggaatttgaagctagaggtgtcagaaaagttaccacagggataac

SEQ ID NO: 70178 - DNA, 218 bp, Glycine max
  Clone ID: 700839487H1
gaagacccctttttctggttattaacagagtcataaaaaaccaaagttttctattctctgtagctcacatgggctaagaatatctgactttggggtggaaagtatggttggcaaggagagtttgagaactgaggtcttgaacttgagctttgagaagcttatgatggttgaatgtggtggaaatagtgggaaaggagtgaacattaaagctggtgtga

SEQ ID NO: 70179 - DNA, 217 bp, Glycine max
  Clone ID: 700839488H1
agatcaccattactgatggtattgacaaaactagtgcaactttgcaatttagaaagttagcagattgtgattttcttaagagaaactttaagcagatgtctaatgttttgtgggtggctcctgaggacaaggcaagtttatggtcacaacttcattatgtttcgtgtaataatctggaaatgcaagaagcttatcttgtcaatctcgtaaatgtgtt

SEQ ID NO: 70180 - DNA, 216 bp, Glycine max
  Clone ID: 700839489H1
ggagaaacaaagaaaggaaataattgatctttgaaaatgcagggaggaaagaaagctggagagtccatcaaggaaacagctgcaaacattggtgcttctgccaaggctggcatggagaaaaccaaggccactgtccaggagaaggcagaaagaatgacggcacgtgatccgatgcaaaaggagttggcaacccagaagaaagaggcaaagatgagc

SEQ ID NO: 70181 - DNA, 82 bp, Glycine max
  Clone ID: 700839490H1
cgagcacaagttttgttctttcctagcaattcggcgcattcgtcttctgcttcaaggtttttttctacctgccctctctctc

SEQ ID NO: 70182 - DNA, 218 bp, Glycine max
  Clone ID: 700839491H1
gtggctgctttctctgtgaccgccaccacttcaccttcttcatgccttcttcaacgacatcgtttctccaccccttctttctatctacatggctcaccacggccacaaaataagaaaattgggattttcggaccattttccttcaatttgaggaggagaactttaatgtgtgcagtcaatcaagatgcaatggaagcgatgaaagacactggtgaaac

SEQ ID NO: 70183 - DNA, 219 bp, Glycine max
  Clone ID: 700839492H1
gggactgttattgttggggatgattgtgcactacctccacctcgagggattgcgggaagaagaggtttggcagggactattctggttcacaaggttgcaggagctgctgctgctggtggtctttctcttgctgatgttgctgctgaagcaaaacatgcatctgaaatagtgggaacaatgggtgttgctttgactgtgtgctcaattcctggtcaagtt

SEQ ID NO: 70184 - DNA, 222 bp, Glycine max
  Clone ID: 700839493H1
atgagaaaacaagaagtagtgagaagaagggagagaatggaggaaaaggcaaaagctgagcagaagaagataggtatgaccgagacttggttgaagaagcaccgtcttctttacaatggagccactagacaccctcttattattagcattcgcgatggcaccatcaacactgcttccttcaaaacatggctcgcacaggattacttgttcgttcgggcgttt

SEQ ID NO: 70185 - DNA, 222 bp, Glycine max
  Clone ID: 700839495H1
agaaaagagaagaagaagaagaaacattgcgaacatgaaaagttagaaccaagcggatggaggaatcggcggtgctcccccggcaatcgctcatcggcgccggcgaacttcagatcgcttctcttgcttctccgaggtttgtgccttgcggtttttttcagaggcatttgttgttggaaatcttgcagtacgggtttgtttggctcaccggtggaaaattgt

SEQ ID NO: 70186 - DNA, 227 bp, Glycine max
  Clone ID: 700839496H1
ctcgagccgtttttgtggttcatttctctcttccagatgccacttgccgttcttcaccctcacgattttctcaggaaaaacccatctaaccagtaccagaccataatccctcactctcccaacatgaatcctaataagtctcatcggacttcccgaaaccgtaagatgcggcccgatccaagcccacaaggcgttgtcagcccagcccggctcacattatccccgaa

SEQ ID NO: 70187 - DNA, 253 bp, Glycine max
  Clone ID: 700839501H1
atcaaaaccaacaacaactatggcaagttatcaaaagcactacgatgatcagggtcgcaaggttgacgagtatggcaacgttgagaagcaaaccgacgaatacggcaaccctgttcatgctgctagtgtcacctatgtagccaccagaactgctgctggtggttacagtgatgacattaataagcaacatgataccaccaatgcctacggcgtagacactggtagacagcattctagtggtggctacgatggt

SEQ ID NO: 70188 - DNA, 269 bp, Glycine max
  Clone ID: 700839502H1
aaagcctccatcaacaaagtgatcaaagttcctcttttgagtcttcgtgcttccttccacgatccttctcatcggacccctcatcatagatatttggacaaagggttctgaactcttagctactgagtgcgtaatcactgagatctgccttcatcctgggttggctttgttgatgggtgcttgctggagtaataggattaagtctgtgagtccttccaatacagggatcacttctagaactgtcagcaggagtggccatgacgtcagct

SEQ ID NO: 70189 - DNA, 267 bp, Glycine max
  Clone ID: 700839503H1
gtcgttctgttcaattcctcgccgagtttttcgtccagatgctacgaaccgttgccgttgatccacgcgccggcgaccttccgttttgattcaccggcaccgttttggctgttactttggttcttcagagagaagggagccatttatagaaattattttatggtgcgccgatgagcagaactgactctattggcagtagaaggagggggattcttctctgcttcggcttcagggtatactaagggcctgagccttctcctcttgggt

SEQ ID NO: 70190 - DNA, 263 bp, Glycine max
  Clone ID: 700839504H1
gaaccagatcatcacgacgaagaacaaccgtccgatctctggccagaagaagacgtgtatgtgctcccctacgacgcaccctgggtcctttcgatgcagcctccacaagaacataggaagcagcaaccacaacgccgattcgtacccttcgaaccggctcttcatagcggatctacgcatgttgagccggttcgaagggtacgaatcggctcaacatgcgtagatccgctatgaagaactcgctggtgagaatcggaggcgtg

SEQ ID NO: 70191 - DNA, 266 bp, Glycine max
  Clone ID: 700839505H1
caaaaccaaaacagtaaagctaacttcaacacctttaattttctaaaagtaattcagcggctgaataccaagcggagaagatgagtcaggagcagccacggcgtcccaaaggccaaaaccccatcaaatacggcgacgtttttgtcgtctccggcgaccttgcacagaagcccgtcgcaccggaagatgctgccatgatgcaaagcgcggaaactcgagtgctcggacaaacccaacccggcggagcagcttccgtcatgcaatct

SEQ ID NO: 70192 - DNA, 265 bp, Glycine max
  Clone ID: 700839506H1
gcaaaaggggaaacagaaggcttccaaagacagccacgtgtcggaggcgctcaacaagctcagggagcagaccaaagaggctgtgaaggggctggagtctatatccccacccactgccgatgatttaggtaaggatgccttgatggaagattgggtcaaacaatttgagcagcttgctggctctcaggacatggaatctattgtggagaccatgatgcatcaacttctgtccaaggagattcttcatgaaccaatgaaggaaata

SEQ ID NO: 70193 - DNA, 265 bp, Glycine max
  Clone ID: 700839507H1
gtggaatttccgccgccattcgaagctacagcgatggccataaccgccaccatttccgttcccttcacatcccccagtcgccgcactctcgcctccgtcaatagcctctctccgcgttctacccgatccactttgcccacaccgcaacgcactttcagataccctaattcgcgcctcgtcgtgtcttccatgagcaccgaaacagccgtcaaaacttcatccgcctccttcctcaaccgcacagagtccggcttcctccatttcg

SEQ ID NO: 70194 - DNA, 257 bp, Glycine max
  Clone ID: 700839508H1
acgaaaatgaacaatctagcttgaaagacatttccaagtacagcgctgaagctcaacaaaattcattcaatgctactgacgctgataaggaacgatacgagagggcaaaccaagcgacacgtgcagctgccaaagagagaaacaagcaggcaaataaggaggcaacaaaggcaaaagatgtcacaagagcgatggatcaacaaggcactcttcaaacagacaatgagacacaggacaatgaccagaagggatatggt

SEQ ID NO: 70195 - DNA, 266 bp, Glycine max
  Clone ID: 700839509H1
accaaaactaatgttgtcaatatggttgacattgcaaaggcattggcaaggcctgcgtcttacacgaccaagtattttggttgtgaacttggggcccagtcgaaatttgatgagaagaccggaacttctcacgtcaatggagcacatgatactactaagcttgctggccttcttgagaacttcattaagaaatatgtccagcgttatggttgtggaaatcctgaaactgagatcataatcactaagaaccaaatgatccagctgaa

SEQ ID NO: 70196 - DNA, 235 bp, Glycine max
  Clone ID: 700839510H1
ctcggctgacgcttgtgctggcgcttgcgttgttggacgcggtgctacgactcttagttagctagggccggcaatgctcgtggctggtgcttggtcattatcggctgctacctggttgctcctgcgagtggtcatatgctattctcaaagattaagccatgcatgtgtcagtttgaactagttcagattgagcaactgcgtatgggtcattatgtcagttattgtttgcttgatg

SEQ ID NO: 70197 - DNA, 257 bp, Glycine max
  Clone ID: 700839513H1
agacagaacaaacgaagaaaatggaagaaggagaagaagcggtgaatcgtagaacgaaacaacacgcggaacgcggaatcggaggtgctccaccggcgatcgctcatcgacgccggcgaacttcagatcgctgcacttgcttcaccgaagattgtgccatgcggatattcacataggcatctgcagttggaatcttgtagtacgggtttataaggatcactggtcgaaaattgtcatagatgggctgaggtctgctt

SEQ ID NO: 70198 - DNA, 261 bp, Glycine max
  Clone ID: 700839514H1
actatacatgttgtagtagtgtggatgacgaagatacctcactggattagattattcagggaaaacccactcttgctcatttcccttctcttcctctaaaacaccaaacctctcttgtttactttctatcaaacacagtgcgtgcttgtttgtacgtgttcttgttctcacgttctcctaattgtttcggtgtatgagtgacttacttggtggactaacaccatcagtaccaggaagactgcagcgatttcacctccgagg

SEQ ID NO: 70199 - DNA, 262 bp, Glycine max
  Clone ID: 700839516H1
gtcaaaaagaaaatcgatttccatgagaaaatacggacacagagacagagatagggagagagacaaggatatgggaagcacaaagtttctattgttggtgatggtgtttctcgcagtgtgcgtggggacatgcaggccttggggtgatgatgtagttgaagatggagaggaggccaaacattttgcagcaaaagccgtgcatgatgtcgaggtagagacccgctcttgggctgattgggctcaacacaagttctccattagt

SEQ ID NO: 70200 - DNA, 247 bp, Glycine max
  Clone ID: 700839517H1
ggaccgctacagctcataatacccgtgcgggtggaaccgccacgtattccaccaccggggaatatggtcagcccatgggggcccaccagacgtcggcaatgcctggccatggaaccgggcagcccacgggccatgtcaccgaaggagtggtgggctcacatcccattggaaccaacagagggccgggtgggaccgttagggctaaaaatccccgggggggtaacccgccgaatgattgtgggtactg

SEQ ID NO: 70201 - DNA, 266 bp, Glycine max
  Clone ID: 700839518H1
atcagagcgcgtgagacaagcagaaatggcggcggctacggcgatttctcagctaggctgtttttccgccgtccaccgcagctcacacctccggcgccgctcgtttctgttcccttcccctcgctccaagttatcggttgttatgagtctggagaggcatgacacggatactgctgggtctgataccaaaaatacactaagttatgcagttgatgtgtcaaagctacatgttgaagaaaagaagaactcatattcaacaaaagatg

SEQ ID NO: 70202 - DNA, 267 bp, Glycine max
  Clone ID: 700839519H1
cctacacgcagggtttcccgaagatttaacacctatggctcctaaagctgatagtttaaagaaggctgatccaaaggcacaagccttgaaaactgctaaggcagttaagtcaggtgctactttaaagaaaaagaccaagaagatccgaacatctgttaccttccatcgaccaaagaccttgaaagaggataggaacctaaatacccacgcattagtgctccacccaggaacaagcttgatcactatcagatattgaagtatcctctc

SEQ ID NO: 70203 - DNA, 264 bp, Glycine max
  Clone ID: 700839521H1
catgactcaaatggtctaaccacttggttgatcggactaagtccaatatgattcgctctagtcactttatacaaccttccttgtgcaattgattcatctcaagtagtctgattatccagcaataagatacaagagaaggaaaaaagagttacacttgtgtttatgaacagtaactggaggcgtttgtcagagctataagtggaggaatgatctatgacttgtggtgtgcttgtggtgatataatatgtgcggtatacgtttcat

SEQ ID NO: 70204 - DNA, 265 bp, Glycine max
  Clone ID: 700839522H1
cacacaactactacaagtacttccttacaatcacaaccagcaacaactatggcaagttatcacaagcactacgatgatcagggtcgcaaagttgacgagtatggcaacgttgagaagcaaaccgacggatacggcaaccctgttcatgctggtaatgtcacctatgtagacaacagaagttgttctggaggttacagtgatgacattgataagcaacatgataccacgcaatgggtacggcgtagacactggtagacagcattct

SEQ ID NO: 70205 - DNA, 263 bp, Glycine max
  Clone ID: 700839523H1
gaacacctaagcttagaattagaaacaaagaaaagcagaaaggaaagaattgatcgttgaaaatgcagggacgaaagaaagcgggagagtccattaaggtaacagctacaaacattggtgcttctgccaaggctggcatggagaagaccaaggccactgtccaagagaaggcagaaagaatgacagcacgtgatccggtgcaaaaggagttggcaacccaaaagaaagaggcaaagatgatccaggcggagctggacaagcag

SEQ ID NO: 70206 - DNA, 263 bp, Glycine max
  Clone ID: 700839524H1
ggaagtcggcaaaatggatccgtaacctcgggaaaaggattggctctgagggctgggcacgggggtcccagtcccgaacccgtcggctgtcggtggactgctcgagctgcttccgcggcgatagcgggtcgtcgcgtgccggtcgggggacggattgggaacgggcccttcggggcctcttccccgggcgtcgaacagtcaactcagaactggtacggacaaggggaatccgactgtttaattaatacaaagcattgcgatgg

SEQ ID NO: 70207 - DNA, 260 bp, Glycine max
  Clone ID: 700839527H1
cggctcgaggaaggaaccaatctggatggaaaactggaccaggcagatctgctaatagaatatttgaagctttgtgaaaaatatcccgtgccgtggagaatgattcgttctcatgttcataaattgttgggagactggttcagccttcagccacacatcagggaggaacttaacaaacaatctaaactgacttttgagtttctttatgacatggtggatcgacttaggagtacaggtactagtcttccactttacaaaaa

SEQ ID NO: 70208 - DNA, 260 bp, Glycine max
  Clone ID: 700839528H1
gccctgtagattcgttcccatggttcgatccttcccagtacaacgcggcgtgttcgaattctgatcgcttttacgcgacaaagggggacgaccctctaagcctaagtattcctcaatgaccgatagcgtacaagtaccgtgagggaaaggtgaaaagaaccctatttagggagtgcaatagagaacctgagatccgatgcgaacaatcagtcgaaggagcttagagcctttacttgatatttagtacagcgcactcactc

SEQ ID NO: 70209 - DNA, 258 bp, Glycine max
  Clone ID: 700839529H1
gttgaacttcgtgacgagcatgggaacccagttgcactgacagatgcatatgggaatccggtttggttaacggacgaggtaggcaacccggtgcacctcacggctgtggcaaccagtgcacacaaatctatgcttcagaatgacaccccacaagagcttcctcactaccaagagttcaagctcgtctcgaggatgaagggcatggagagatgatcagggacggactgaaggatgacatcgaagaggagttacgagctg

SEQ ID NO: 70210 - DNA, 245 bp, Glycine max
  Clone ID: 700839530H1
ggctcgagagacaatgaccagaagggttaaggtggagcaaaagacagcattggttctgtggaccacatcactacaccacttgtagtaaaggccaatcttacatcagaagatgtgacacaagacaatggccacaagggttatggtggagcaaaagacaccattggttatgtggaccacatcactacaccacttgctgtaaaggccaatcttaaatcagaagatgtgacacaagacaatggcccgaa

SEQ ID NO: 70211 - DNA, 260 bp, Glycine max
  Clone ID: 700839531H1
ctgatacgaaagtatcctgagggcctcgctgttattgacctaaaggatgcttaccccaccgtgatggaagatttgcaggctttgaaagctgcagggcagatttggctgctatccaacttcgattcacaggaagacattgcctaccctaacgaccccaaagtgcacattaaggtggatgatgacctgaaacagcttttccgcagtattgaattgcctcgtgatatgattgatatagaaaaggatcttcaaaagaatggaat

SEQ ID NO: 70212 - DNA, 260 bp, Glycine max
  Clone ID: 700839532H1
agcggcagaagaagacgccgcctccatggtgaagtactccagagaatccgagaatctcaacaagtcatgagatgccacatgcgctgacctcagactgcggtacaagaacactaggcagactgcctttgccatcaggacgttgcccctggataaaagcgtagatagcatacctggaaagatgctttggctcattaacaggccatcccattccgaacgttctgtggtggtgttgggaggcgaactaatctaacagcagacac

SEQ ID NO: 70213 - DNA, 175 bp, Glycine max
  Clone ID: 700839533H1
agtcacccctacaaaatctgtaaacctcgttgtactacccgtacaatatggtagatccacagggcgccattggcggaacctccaatcaagatgcccactaatgcaagtctgagtcctgcgaggacctgcactggatgtcacttctgggtcaactgcgagtagcagtactcatcca

SEQ ID NO: 70214 - DNA, 267 bp, Glycine max
  Clone ID: 700839534H1
gcttgatgactggtaaagatggagaattcattgaggacttgaatgatataaattctaagaatttccagagatgagcttccctgcctgctaattttacagatcatgaaaatctgttgcatagtaacactccaagacggcctagttatatggctccaactgaatctacaaaagctaagctaagaggacatggacaaggctctccaaggtctgttaccgattgggcatatgtaagtagtgtcacccggcggctttcactttcgtcttcgc

SEQ ID NO: 70215 - DNA, 279 bp, Glycine max
  Clone ID: 700839537H1
gctcagaattgggctcgcggaaagatttcgggagctttaggattactggaatgagtctcaaggtaaccttagacttggtcctcctgctccagacgggtggatttctgagtttagtcaacaaagggagagatatgagagttccgatacatgggctaactcatctgagctggagtattgtgcaagtggttgggtgtctgggtttgtgcattcctaattgtcatcgctagatctcgtgtgatggatgaacatgtctaagtatgctgcaagggagcaatgtcg

SEQ ID NO: 70216 - DNA, 263 bp, Glycine max
  Clone ID: 700839539H1
ctaagggaaaccatcaatagttcaacatcaagctcatccatcatatggctttggcacgtttggctttgaaaaacttgcaacaaagggtgtgtgcttcctctttcttgagtggcaatgttcacaagcagaggtggaacaatgagttgctgagaaggtttggtactgcagctggggacaagggaaaatctgaaggcactgaagttgctgtcactgaagggaaaaagtctaataggatgttcccaatgaggaggggcagaagatgg

SEQ ID NO: 70217 - DNA, 262 bp, Glycine max
  Clone ID: 700839541H1
ggaaatgaggattctgatggtaggtctcgatgctgctggtaagacaaccatcttgtacaagctcaagcttggagaaatcgtcaccactatccccaccatcggattcaatgttgagactgtggagtacaagaccatcagcttcactgtgtgggatgttggtggtcaggacaagatccgtccactgtggaagcattatttccagaacactcagggtctcattttactggttgatagctatgatagagatcgagtagttgaggca

SEQ ID NO: 70218 - DNA, 259 bp, Glycine max
  Clone ID: 700839542H1
tagcactgtggaattccttccttggagatcctgggaagtcattagtggaggtcttgattcaatgctcatgttgtgggacttctccaaagggcgctcctacaaagtagtggattttgctacatctgatgtgagtagtggcattgctgaccggtgtgtcaatcctgcttatgttcatgcaatagctattccagaagtcgacatgctagataaattagacaaaatatgtgctgttgcaaggggagatggagctattgatgtg

SEQ ID NO: 70219 - DNA, 265 bp, Glycine max
  Clone ID: 700839543H1
tcggttgcagaccgagctaactagctagcaagcaaacacagagctggacacttatcgaggacatgcgctcatgtacatggtacgtgtcacactcaaccttaacgctctaatcctaactgctgctcaccgtatcaccactgttcatgacatcgccaaaaagttcactctccaggacaacgatcttctgatgcacggagtagaagttcaaagttttcatccagaattactcgcagaactactgcacagtgccggagtcttttcgccg

SEQ ID NO: 70220 - DNA, 260 bp, Glycine max
  Clone ID: 700839544H1
cgattattggtgaacatgaacttagatgtatcctgattcctgactaccagatggattgaatagaatggctgttggtaagtaacccctcaagccagcagatagggaaattgttcatatatctcccggtcattatatttatattgatctttatatccacgaggagattggaattttgtttaaccaggctcttccacactaataaatcaagcagtgggacgtgcattcaggttgcagaggcattattcattgagtagttttat

SEQ ID NO: 70221 - DNA, 251 bp, Glycine max
  Clone ID: 700838927H1
gaaggatctagatcttgctatctgacataaaaattaccagcatggcttacactgcagttgccatgcctacatctccagcagctacctctgcaactatggacattgcaaaagagcataatggtcttcgccgctcgcaatccagcaaagaactatgcacacgttccattatgcggaggtcttattctgacaaccacctatgttgctccatcaatcgcatacaagccacatcagtgccgccaaaacttaagagc

SEQ ID NO: 70222 - DNA, 252 bp, Glycine max
  Clone ID: 700838928H1
ctggcgtcggcctgtgggctccccattcggcccgtctcaacacggaccaaggagtctgacatgtgtgcgagtcaacgggcgagtaaacccgtaaggcgcaaggaagctgattggtgggatccccctgtgggttgcaccgccgaccgaccctgatcttctgtgaagggttcgagtgagagcatacctgtcgggacccgaaagatggtgaactatgcctgagcggggcgaagccagaggaaactctggtggagg

SEQ ID NO: 70223 - DNA, 250 bp, Glycine max
  Clone ID: 700838929H1
gaccaacaccaacaagaagaacatcagttagatcaacaaaagcgtggtgtaatcggatccatgttcaaggcggtgcaagacacctacgagaacgccaaggaagctgtcgttggcaagaaagaaccttcgacgacgactaactcgtacagtaccagagaggttattcacgacgttgacattcaacccgatgacgcggctgcagcgagggaagtgagagacaaatcagcctcaaagtcaccaggtatctaca

SEQ ID NO: 70224 - DNA, 249 bp, Glycine max
  Clone ID: 700838930H1
tatagatagatatctatttgaattgcttcattcgcgaggagccgtatgaggtgaaaatctcatgtacggttctgtaataaagatggaattgagaaacaaccatcaattataacccccaaagaaccagatttcgtaaacaacatagaggaagaatgaaaggaatatcctatcgagggaatcatatttgcttcggaagatatgctcttcaagcacttgagccagcttggataacatctagacaaatagaag

SEQ ID NO: 70225 - DNA, 250 bp, Glycine max
  Clone ID: 700838931H1
gtgccaccacacagtgtccaagtgcacacaacaacacaccgctacgaagccggcgtcgtcccgccggctcgttttgaggcgccgcgttacgaagccggcatcaaggcgccctcttccatttaccattccgagagaggtccgacgacctctcaggttctcgcagttgacgccggccttccggtcggcggcatcctcctgctcctggcaggactgaccctggctggaactctcaccgggctggtggtggcaa

SEQ ID NO: 70226 - DNA, 261 bp, Glycine max
  Clone ID: 700838932H1
ttcggctcgaggtaagaaactctaattataaattcatgtgctcctccggttctaccagcagtgcaccaagaccttcctacttggaacaagcccacggcttggcttccttaaaagacatggataggtgtcataaccgtgccaacaactttgtctcaaggtccatgaccatgggttacgccacctcctacaacagaaccagtttaaggaacaacaacaacgtttcggtttcttcaccaagatctgggagattctacgacgcca

SEQ ID NO: 70227 - DNA, 258 bp, Glycine max
  Clone ID: 700838934H1
ttcttcttccacttccaacgccatgcctctttttggaattttccagataccctcatttatggatataatcactgacctcgccatgttcattactccgctatggattgcggttatcgtcggcgtcgtcgtgggctgggcgtggaagcccaaatgggcctttcaccccaaagacgctcttctcaagtttcgctctcctcgccctcccaatccccaaaacgacaccgcttttacctactccgccaccagttcctccgcgcg

SEQ ID NO: 70228 - DNA, 149 bp, Glycine max
  Clone ID: 700838935H1
caaaatccctctttgatcatcccttgttcgcgaatcgtgttcggtaggacaattgtcttggttccttttgatctctctcttggttggagcaacaaagataacaagtgcggcgaaattgctatggacccatctatcatgaagcttctaga

SEQ ID NO: 70229 - DNA, 200 bp, Glycine max
  Clone ID: 700838937H1
ggaagcatgagcttaatgggttcgttacgtgtgatagagctgcagctagtggcattcgcgttggttttctcagcaagtggtcttgtccctctactcgatttagcttattcggcccttatctccatctacctaatgctacttgggcgttttgcgcttccgtcgcatgggtgtgcgccgggcccgatggtccacgatagtgg

SEQ ID NO: 70230 - DNA, 254 bp, Glycine max
  Clone ID: 700838938H1
cttccatgatccgtggcggtgactcttcttcttcgtagcatttccccacacgttttcctcgccgaacggcgatcagagctcgccgccgatcgatttggcgtcgtagcagtttcatagtgacgttggactctgaaaacggcgcgttttgagatttggcttttcgcgtgcgttgtcgaagagagagaaaccaaaaaatgaatgggattggtaacgacggaggaggaggattgagcaacgtggagatggagtacata

SEQ ID NO: 70231 - DNA, 250 bp, Glycine max
  Clone ID: 700838939H1
ctcgagccggtttgtttgatggtatctactactcggataaccgtagtaattctagagctactacgtgcaacaaaccccgacttctggaagggatgcatttattagataaaaggtcaacacaggctctgcctgttgctttgatgattcatgataactcgtcggatcgcacggcctttgtgccggcgacgcatcattcaaatttctgccctatcaactttcgatggtaggatagtggcctaccaggtggtga

SEQ ID NO: 70232 - DNA, 253 bp, Glycine max
  Clone ID: 700838940H1
gaaacattggttttcctaagcgcccgccattgccaaagaggatagtgcgaaacaagaagaacaaaatttcccatttctcgttctgaaaatcggagttaaacactattattatatttgtgatttgtgatatcttctatctgattcagcatcatggttcagctaatgaggtctgatacggataatcactgtttgaaaaaggtgaagttggaggttcacgatgaaatcccccctcttcacacccacaagcgaccca

SEQ ID NO: 70233 - DNA, 252 bp, Glycine max
  Clone ID: 700838942H1
gaaagaacttccttataaccaaaaccaacaacaactatggcaagttatcagaagcactacgatgatcagggtcgcaaggtcgacgagtatggcaatgttgagaggcaaactgacgaatatggcaacccggttcatgccactagtgtcacttatgtagccaccaaaagtgttggtggctacaatgatgacgctaataagcaacatgatattactggtgtctatcccgagaaagacaccggtagacatcatttt

SEQ ID NO: 70234 - DNA, 249 bp, Glycine max
  Clone ID: 700838944H1
gctagctagctagcaagcaagcacagagatggaggcaaagcgaggccatgccctcatgtgcttggcacgtgtttcactcttcctctgcgctctaaccctatccgctgctcacggaagcaccacggttcaagacatcgcgagaaagttgaaactcggggacaacgagcttctgcgcacggagaagaagttcaaggttttcatggagaattacgggaggagctactccacagaggaggagtatttgcgccg

SEQ ID NO: 70235 - DNA, 248 bp, Glycine max
  Clone ID: 700838945H1
caagaaccacatccaagagaattggaggatccttgggattgggtttaagagcatgaaccatatcccaagaaccacatccaagagaattggaggatccttgacttcttctctcactttccagaaagccttcacatgttcacctttttatttgatgatttgggtgttccacaagattacaggcatatggatggttttggagttaacacatatacgctgatcaacaaggctgggaaagcagtgtatgtgaa

SEQ ID NO: 70236 - DNA, 242 bp, Glycine max
  Clone ID: 700838946H1
caagaagcttatcttgtcaatctcgtaaatgtgttacgagaactgtatttgcacagtccagaggaagctcgccaattgagaaggaaagctctctctcgtattgaatggctgcaaaaaactgatgtgcctaccatagcacagattgaagagttccattcgatgcagaggatgatgaatgctcctgattcaaatgataatattgatctactgttgagcattgatttgttgggtttacaaggagc

SEQ ID NO: 70237 - DNA, 246 bp, Glycine max
  Clone ID: 700838947H1
tagtggcctaccatggtggtgacgggtgacggagaattagggttcgattccggagagggagcctgagaaacggctaccacatccaaggaaggcagcaggcgcgcaaattacccaatcctgaccgttctctaggccaaaagatagcatctcgtctgagcatgaggccaaatatttaatgttgttgccaaccccagaatgattgttagagttgcagacgtgcaaagagtacgataaggatgtgatttt

SEQ ID NO: 70238 - DNA, 260 bp, Glycine max
  Clone ID: 700838948H1
ctcgggatccggctcgagggactctgcggctgatgcggcgaagagggcagtgggttacttgagcggcaagacagaggaaaccaaagagaaagtctcggagacggcagaggcgacggctaataaggcggcggagatgaaggaggccaccagggagaaggctgccgggactgcggaggcggccaagaacaaggccgcagaggtaaaggacagagctgcagaaaccgcggaggcggccaagaacaagactgccgagactgctg

SEQ ID NO: 70239 - DNA, 255 bp, Glycine max
  Clone ID: 700838949H1
gcttgctcgaagactttggagggcaaagtttcgccatggatgcatctgggaccgacatctttgagatttaccgaagatactgtgacataaaatcaggacatgtatatattggtggggaagaagggtacaggcaagacagtgaccttcaaaaggctaaggtttcaagggaaggcagctctccaaattggttgagtctcgtgttactacaggggtaacaatttttgatgaactttcaatgctcatgtcacggttgaa

SEQ ID NO: 70240 - DNA, 256 bp, Glycine max
  Clone ID: 700838950H1
aaaagaagaaaggaaagaattgatcgttgaaaatgcagggaggaaagaaagcgggagagtccattaaggaaacagctacaaacattggtgcttctgccaaggctggcatggagaagaccaaggccactgtccaagagaaggcagaaagaatgacagcacgtgatccggtgcaaaaggagttggcaacccaaaagacagaggcaaagatgaaccaggcggagctggcacaagcaggcggcgcgtcagcataacacgg

SEQ ID NO: 70241 - DNA, 255 bp, Glycine max
  Clone ID: 700838951H1
gtgccacagcaaccgtctgcattgcacattgcaagccaatctgttcgcagtgttaatgccaaagttgatactccaaagacatctgggaagtttactgatctcaaatcagtagtgtgggaaaatggtgcttcccctacctctaaggatgtatcaaatccaacaaattattctaacagcaaaccaggaaatcaacatgctgttgcttcaggagctgcctctgcaccattgaggaacccaaataaccgaaaatcccct

SEQ ID NO: 70242 - DNA, 255 bp, Glycine max
  Clone ID: 700838952H1
ctcgagccgctcaagattttatggacaagaggggaaccagaaaagcattgtcctcatatccaagaggataaccaatcaattgacagccaccattgatgggcacttcagcagcagatttgtaccctcccaagtattagtttatagaagagtgatagggtctcttaggacattatgtaacatttgtaactttgttgtaacagaatttcagccaaatggtatgacagcatagacttaagagttaaatcagcagctaag

SEQ ID NO: 70243 - DNA, 252 bp, Glycine max
  Clone ID: 700838953H1
cggagtgtctgtgcaaatttgcgttgttcttcgcggcacacctcactcactgaacggtaagtatggcggacaaggctgttacaatccgaacccgaaagttcatgaccaacaggcttctttccaggaagcagtttgtcgttgatgtccttcatccagggagggcaaatgtttccaaggctgaacttaaggagaagctggctaggatgtatgaagtgacagaccctaatactgtatttgtcttcacattccgaa

SEQ ID NO: 70244 - DNA, 251 bp, Glycine max
  Clone ID: 700838954H1
ctcgccgataaggggttttccaaagcaggagcaatgtcttcctcttatcttcctgccacaactgagtcacttgctctggcaaatgaggccaaagacccatctgaggccatctccattctttatcgggtacttgatgatccttcttcttcaccagatgctttgcgtatgaaagagcaagcaatcacaaacctcactaagcttctcactgatgaaaataggggagaggatctgtgcagccttctcactcagtt

SEQ ID NO: 70245 - DNA, 252 bp, Glycine max
  Clone ID: 700838955H1
cactagctcaattcctcgccaagtttttattgttccgacgtggcaatcggactgctgccgcctccgattcaacgcgcagtcgccggtgatttccgtcgctgattctccgacaccgttttggccatatattgaaatagttttctggtgcgccgatgaaccgacctgatgttattgacagtagaagggggaggattcttctcttcttcagcatcagggtatactaagggtctggcccttctcctcttgggtcag

SEQ ID NO: 70246 - DNA, 254 bp, Glycine max
  Clone ID: 700838956H1
gaataatggcttccatcctccactactttttagccctctctctttcttgctcttttcttttcttcttatccgactcagtcacccctacaaaaccaataaaccttgttgttctacccgttcaaaatgatggttccacagggctccattgggccaacctccaaaaaagaacccctctaatgcaagtaccagtcctggtggacctcaatggaaatcacttgtgggttaactgtgagcagcagtactcatccaaaacg

SEQ ID NO: 70247 - DNA, 251 bp, Glycine max
  unsure (1)..(251): unsure at all n locations
  Clone ID: 700838958H1
gtgtcgtttaaaaatgtcgcagttgctggataaagccaagaacttcgtgtcggagaaggtaaatgatatggccaagccggagggangtgtcactgacgtggacttcaagcgcgtgagctaagataatgtcgagtacttggccaaggtctctgttcgtaacccttattcaacttccatacccatttgtgagatcaactactctttcaaaagcgcatccagggagatagcatcagggaaaattccagacccag

SEQ ID NO: 70248 - DNA, 248 bp, Glycine max
  Clone ID: 700838959H1
cccaacaaaccggtttaggtgaactaggagaagacgttcttgcaatccacgccacacaagggtcgacccaacaacttggcccattggtcacagtcccacaattcctcttttcttgtgcaccttccttccttgttcaaaagggtcttcctagaaacactcaaggtgtggctgggttaggccatgcaccaatttctcttccaaaccaactcgcttcccactttggcctacaacgccaattcaccacttgc

SEQ ID NO: 70249 - DNA, 247 bp, Glycine max
  Clone ID: 700838960H1
acaagttgaaggcagatcaattcaaaccattcgagcaagtcacccttgaaccatttgagagggaccatgcctgtgtggttggtggatacagaatgcccaagaagaaaaaagatgctgctgagtagattgttttccagtagcccgtaggcgtgtaccaatgtcatttcatgagatttcgtgttaattttgttttgaaaccttggttatcaaaatactttgtaccttttatagtaaagtagtcaagtta

SEQ ID NO: 70250 - DNA, 244 bp, Glycine max
  Clone ID: 700838962H1
tcgtgagggagtgttacaggaggaaagggtttgggagaatgttgctgtctgcggtggcgaacaggcggtgaagatggagtacggaagagtcgaatgggttgttctcgattggaatgtgaatgcgattagattttatcaagagatgggtgctgaggtcttgaacgagtggagggtttgcaggttgactggggaggcacttcaggcttatggaggtgctgattagaatttaaaaatgtttcttttt

SEQ ID NO: 70251 - DNA, 244 bp, Glycine max
  Clone ID: 700838963H1
gaattagtggatgctgccaaaggtagtggcgatgccatacgcaaaaaggaagagactcatagaatggcagaggcaaatagagcttttgcacattttcgttaatccatgaacaggatctatatagacacatagacccatgaatccatacatctcgatcgaaaaagaatcgaaattgatgaatatatctctcgaaacaaacgaaaaggaaacgaaaaacaaaaacataaatcatggatcaattaag

SEQ ID NO: 70252 - DNA, 246 bp, Glycine max
  Clone ID: 700838966H1
aaaatttcaaaggagagaaaagacgaagcgaagtgtgattgggaacaatggctgaacacaaagaaccggtggagctgggacgtcgccggcttcgacccgtggaagtcgtcgcctccgccgccgcaaccggcagcggagcacggtgatcggaaacctagtgcgccgttggtgcgacggtactccatgtcggccacgtcggttcttccgcaaccgaagcacgctgtggctttcaagcttcagcggttg

SEQ ID NO: 70253 - DNA, 252 bp, Glycine max
  Clone ID: 700838967H1
cttgtttggatggaatatgtgatttgttttgtagatatggagtatgaagcaggatacttatcttcatgacttaagggagcattccaaggagatatataccatcagatggagccccactggtcctggtacaaataaccctaatcataaactggtgttggctagtgcttcatttgactcaactgtaaagctatgggatgtggaacttgggaaactcatgtacagcttggatggacacaggcatcccgtatattc

SEQ ID NO: 70254 - DNA, 252 bp, Glycine max
  Clone ID: 700838968H1
gagacaacctggtgaactgaaacatcttagtagccagaggaaaagaaagcaaaagcgattcccgtagtagcggcgagcgaaatgggagcagcctaaaccgtgaaaacggggttgtgggagagctatacaagtgtcgtgctgctaggcgaacagcagagaatgctgcaccctagatggcgagagtccagtagccgaaagcatcactagcttacgctctgacccgagtagcatggggcacgtggaatcccgtgt

SEQ ID NO: 70255 - DNA, 249 bp, Glycine max
  Clone ID: 700838970H1
aagaaggtagccacataaaatatgtatttttccatttgactttgttgcttgcattcaagtgtatctcatttaaagagcatcaaaagaattatgtgtctgcagagagttgacagtgcatttaattgtgactggtctagcaggtttctgtgacagtagttaccctgtctactgttctcttttatagtctgggccaaggattatttgtcctagtatggcagatttgtaatttgtttaaacttcattactgga

SEQ ID NO: 70256 - DNA, 248 bp, Glycine max
  Clone ID: 700838971H1
caccaccgcagagttttccaagtccaatctcacttcacttatcgccagggtttaatctgaatatctttcgcgttgccactgaggttgttatctttcttccaaaatggcgacggtgatgcagaagatcaaagatatcgaagatgagatggcaaagacccaaaaaaacaaggctactgctcatcatctgggcttgctgaaggctaaattagcaaagttgcggagggatatccttacaccttcatcaaaag

SEQ ID NO: 70257 - DNA, 250 bp, Glycine max
  Clone ID: 700838974H1
ccctaatcctgaggcactgaaagtgtgatatggcaagagtcatttcctcttcctgcgcacgcctcgcaatgcgcctcttctccaccaccaccacagccaccgcgttcgccgtcactttacccaaaccctcatcactctccctctcatcgcgtcgattcctcttccctctctcccatgccatcgtccctccctccacccgcgtcgccggaatccggtgccgcgttaaccgcgccggagactcggcgtactc

SEQ ID NO: 70258 - DNA, 240 bp, Glycine max
  Clone ID: 700838975H1
cggctcgagtgaagctaaaggaagagaacaagctgaaaccaaaggtcaaaccaagaagggtggtggtgaggaacagggaagaagaagagaagaaataggagaagaaaataaacaatccagcctggaagagatttttaagtacagagctgaagctcaacagaaagttaaggagagaaaggagagatcaaaacaagcagcaagtaatgaagctgccaaaaaaaaaaaaaagggcggccgccg

SEQ ID NO: 70259 - DNA, 247 bp, Glycine max
  Clone ID: 700838976H1
ccaagaggaggatgaggaggagaagcaaacaagtaggtcatggaggaagctcttggaaaccgtatttgggaaggtgaatgagaagatagagaacaaagacactgctggttcccctgcctcttacaacctctacgatgacaaaaaagccgatttcaaaaacgcttatggttggagcaaggcactgcatggaggcgagtatcctccactcagcgaaccggatattggagttttacttgtcaaactctca

SEQ ID NO: 70260 - DNA, 241 bp, Glycine max
  Clone ID: 700838977H1
ctcatcgtcatcgtactactactacccacgttctgctcctttgcggatcgtgtccgggtgacggttttcttgtagattatttgtttattaaatcgactcccttgttcgcccatacaaaagatggcagacaatgaggatggaagggataagactactcgtgggaatgaatgggaggttgtatctctgacagcatcgacatatgcagctgctcctggtcctgatgaagttgagatgaaggatg

SEQ ID NO: 70261 - DNA, 245 bp, Glycine max
  Clone ID: 700838979H1
cacacacacacacactaagaataatggcttctatcctccactactttttagccctctctctttctttctctttccttttcttcttatccgactccgtccccattccccaacaccacactaaccctacaaaacctataaaccttctggttctacccgttcaaaatgatgcttccacagggctccattgggccaacctccaaaaaaggacccctctaatgcaagtaccagtcctggtggacctcaat

SEQ ID NO: 70262 - DNA, 103 bp, Glycine max
  Clone ID: 700838980H1
ctcactctccctttctctagctcaatccctccactcttaaaccgcacttatcgttccctttcacacctcagacaattgccaaaatcccacccttgtgccctct

SEQ ID NO: 70263 - DNA, 250 bp, Glycine max
  Clone ID: 700838981H1
tcggaaacgaagaagggttctgttttcttttcgcgatgagggccaagtggaagaagaagcgtatgaggaggctgaagaggaagcgccgaaagatgagacagagatccaagtagtgcgttaaacctagtttgtttccgttgcttttacaattgcttatgttgtcaaataggacacccagttgttagtggcactggtctctcctctttgatgtcttgatacattttgttggattttatatcgtctcatgttc

SEQ ID NO: 70264 - DNA, 252 bp, Glycine max
  Clone ID: 700838982H1
atcgagaaagagaagaagcatatatatcaaaatggctgcagagatggagagggagtcattgataactgaagctcctaatgcaccagttactgcacagagaagggtcagaaatgacttagaaaattctctaccaaaaccatacttgccaagagcattgaaagctcctgatacgggtcacccaaatggaacagcaggccacaggcaccacaacttatctgttcttcagcagcattgtgctttttttgatcaaga

SEQ ID NO: 70265 - DNA, 251 bp, Glycine max
  Clone ID: 700838983H1
aaaatctgaatcttagggcaccaacacctttgatccaatgggttcggttgccgcagaagaactgaacttagatttaagatcctccttcgtccccaaaaccatcaccgatttcctccgccacctctccgccaacaacaaccaccctgccaccctccgcgatttcctctcccgcctcgaagacgagctccgcaagatccacgccttcaaacgcgaactccccctctccatgctcctcttaaacgacgcaattt

SEQ ID NO: 70266 - DNA, 251 bp, Glycine max
  Clone ID: 700838984H1
gccatttgggagttaggttctgcacgctctgcttccagcgagtgttctttcttcgtttcaacaccttaatttgcacacgctgcttcttcagcttgagaaatggcacaagaaacctttctattcacatctgaatctgtaaacgagggtcaccccgacaagctgtgcgaccagatctctgatgcagtgctcgatgcgtgccttgaacaggaccctgacagcaaggttgcctgtgagacatgcaccaagaccaa

SEQ ID NO: 70267 - DNA, 250 bp, Glycine max
  Clone ID: 700838985H1
cgaagtgctccaacttgaggaagtggaagatcccctagtcggagacgacgagcttctcatcggagtccacgccacttcccttaacagagccgatacctttcagaggaaaggctcctaccctccccctaagggcgccagcccttacctcggtctcgaatgttccggaactgtcctttccctgggtaaaaacgtttccagctggaaaatcggtgatcaggtgtgtgctcttctcgccggaggcgatatgccg

SEQ ID NO: 70268 - DNA, 247 bp, Glycine max
  Clone ID: 700838986H1
gtttgtgggagtactgcttatgttgcacaaacatcttggattcaaaatgggaccatcgaagagaacattatctttggtttaccaatgaacagacagaagtacaatgaagttgttagagtttgtagcttggagaaggacttggaaatgatggaacatggggaccagacagagattggagagcgcggaatcaacctaagtgggggtcagaagcagcgcatacagcttgccagggctgtgtatcaagact

SEQ ID NO: 70269 - DNA, 247 bp, Glycine max
  Clone ID: 700838987H1
cacaactactacaagtacttccttacaatcaaaaccaacaacaactatggcaagttatcaaaagcactacgatgatcagggtcgcaaggttgacgagtatggcaacgttgagaagcaaaccgacgaatacggcaaccctgttcatgctgctagtgtcacctatgtagccaccagaactgctgctggtggttacagtgatgacattaataagcaacatgataccaccaatgcctacggcgtagacact

SEQ ID NO: 70270 - DNA, 249 bp, Glycine max
  Clone ID: 700838988H1
caaagaaaggaaataattgatctttgaaaatgcagggaggaaagaaagctggagagtccatcaaggaaacagctgcaaacattggtgcttctgccaaggctggcatggagaaaaccaaggccactgtccaggagaaggcagaaagaatgacggcacgtgatccgatgcaaaaggagttggcaacccagaagaaagaggcaaagatgagccaggcagagctggacaagcaggcggcgcgtcagcataaca

SEQ ID NO: 70271 - DNA, 250 bp, Glycine max
  Clone ID: 700838989H1
aacaaagaaaagaagaaaggaaagaattgatcgttgaaaatgcagggaggaaagaaagcgggagagtccattaaggaaacagctacaaacattggtgcttctgccaaggctggcatggagaagaccaaggccactgtccaagagaaggcagaaagaatgacagcacgtgatccggtgcaaaaggagttggcaacccaaaagaaagaggcaaagatgaaccaggcggagactggacaagcaggcggcgcgt

SEQ ID NO: 70272 - DNA, 246 bp, Glycine max
  Clone ID: 700838990H1
caagaagccacaagcagacggtgaacccaccgaatgcggcgacgttttcggtgtctccaccgccgcggagcctcacgctgcgccggtggtgtccgccggtatcggttcggctgccatagatggcgaccccataaccatcggagaagctctggaagcggcggcaatatcgatcggggataaaccagtggaccaaaatgacgccgatgcgattggcgtcgcggagattagggccaccggagagaataa

SEQ ID NO: 70273 - DNA, 243 bp, Glycine max
  Clone ID: 700838993H1
aaaaaaagcttcatcatcatcttcttcttctctgcatcatcacaatggctgaagtacgttcacaacaacaacaaccccagcatgtgcaagtccacgcaaccacaacacacaccccacaacaccatggcggggaaggtggcagcggcattctgaacctcatcccggagatgtccctcacgggttcccaactcctagctctcctcgccggcgttccccttggtgcaatgctgctcctcctctccg

SEQ ID NO: 70274 - DNA, 243 bp, Glycine max
  Clone ID: 700838994H1
gcgctgcgtgcagaaacagagaaggagagaagaatggacgaggagaatggttacagtgggagtagcagctcaaacttggagactacaaaagcagagagatctgtgtggctgatgaagtgccctttggtggtggctaagtcatggcaggctcatcctccttctcaacctctcgccaaggttgtgctctcccttgatcctctccaccctgaagaagacgatccctctgcagtccagtttacaatg

SEQ ID NO: 70275 - DNA, 242 bp, Glycine max
  Clone ID: 700838995H1
ctcacgttctctttcacacactaagcgtgaactaatatcgaaattcaattataccctgaccctgtgttagtttcgtgtgttgagaagcagagagaggcagagatgcaaggaagcgcagtgacggtgaagccttggatttcgagcctgaggacgatgacttgatggacgaggacggcgcccccgacgccgacgcttctccgcctcaacctaagctcaaatccgccatcaccgccgccgccgcc

SEQ ID NO: 70276 - DNA, 244 bp, Glycine max
  Clone ID: 700838996H1
ctcgagccgcgaaactggtttatgggttgaagtctggttcaggatttgtgggggaagagaagagcactcacaccatatccattatcaatggacttggccgcgaacttcaccacttagacctgaccggcgtggtcattttggacgcccgaaagccctccgcactccgccaccttccgccacgcgttctcagcagaacaaacaccaacaccaatttgatttacacgaaccggttctcgggcccacc

SEQ ID NO: 70277 - DNA, 269 bp, Glycine max
  Clone ID: 700839002H1
tcgcatgcacgcgcaagtccgtcgtcaagcgccagtccggattcggaccatctacgaaagtcagctccttgagtatgaccctgataggcacttggctgttttctggatttcctgtgaggctggcacctatgttaggactatgtgtgtgcacttaggcttgcttcttggtgtgggtagccacatgcaggagcttaggagggtcaggtctgggatcatgggggagaaggataacatggtctccatgcatgatgtcatggatgctcagtggg

SEQ ID NO: 70278 - DNA, 249 bp, Glycine max
  Clone ID: 700839003H1
cctttgttcactcttcttctcttgcggctagggttttagcgcagttcttctagatttaaggaagatgggtaaggaaaaggttcacatcagtattgtggtcattggccatgtcgactctgggaaatccactaccactggtcacctgatttacaagcttggaggtattgacaagcgtgttattgagaggtttgagaaggaagctgctgagatgaacaagaggtctttcaagtatgcctgggtgctggacaa

SEQ ID NO: 70279 - DNA, 247 bp, Glycine max
  Clone ID: 700839004H1
tcagaatccaaaccctaggaaatttccccttcagacgaaaccctagatttcctctcacaaatctctctcagcttccccattctcgggattcggcgtccagatcacagatcccgttcaattttttttccgcatcccccgatcgggtttggattctgaagaaagttcaattccgcacaaattcgagacaattgctgctgtcgaggctcgcgttgcgcatgggtaagattctgagagaaaccgcgaggcc

SEQ ID NO: 70280 - DNA, 244 bp, Glycine max
  Clone ID: 700839005H1
gaattgtggagaaccgaaagatgctaatagggacggaaggatcgattaccgcgactttaggcggtacatggatgacaaggagttggagctttaccgcatatttcaggctattgatgtggagcacaatggctgcattctccctgaagagctctgggatgcacttgtcaaggctggtaggtattctggtactactactttgttcattgtgttttgtgcctcgtggcttgtaagttgtaattattgc

SEQ ID NO: 70281 - DNA, 244 bp, Glycine max
  Clone ID: 700839006H1
ggaatataagaactaagatggattggatcggagcgtaccgcggaggccagagaagcagggactggtgcgacccttcatcaccattcactgatttgtgggaccctcgtcgtgtcggtgacgctgatgatatcacctcctctctcgcccatgctcacgttgactggcgtgagactgataaagctcatatcttccgtgctgatcttccaggggtgaagaaagaggatctgaaggtgcaggtggagga

SEQ ID NO: 70282 - DNA, 243 bp, Glycine max
  Clone ID: 700839007H1
gagaaaccctagcaaaaatgccggctggtcacggtttgagatcccgcaccagagattccttctctcgtcccttcaggaagaagggtaccatcgccctcaccacatacctcagaacctaccacgtcggcgattatgtcgacgtcaaggttaacggcgccgtccacaagggaatgcctcacaagttctaccatggccgcaccggtcgcgtctggaatgtcaccaaacgtgctgttggggtcgaag

SEQ ID NO: 70283 - DNA, 244 bp, Glycine max
  Clone ID: 700839008H1
actactacaagtacttccttacaatcaaaaccaacaacaactatggcaagttatcaaaagcactacgatgatcagggtcgcaaggttgacgagtatggcaacgttgagaagcaaaccgacgaatacggcaaccctgttcatgctgctagtgtcacctatgtagccaccagaactgctgctggtggttacagtgatgacattaataagcaacatgataccaccaatgcctacggcgtagacactg

SEQ ID NO: 70284 - DNA, 243 bp, Glycine max
  Clone ID: 700839011H1
gaagaagaaaaaaacaataagtaacagaaatggtggttctcacaatggtaactcaatgcactacgggatcctggttggtgaagtgaaagcaaatttcaagaaaggtgttggggcaaatgaattgctgtcccatcttgcagcacttcctgcacctgctcaagaaaagatgagtgcactggttgaagctctatttgatggaattgataaaggttttgctaaagaagctgataagaagaagaacta

SEQ ID NO: 70285 - DNA, 244 bp, Glycine max
  Clone ID: 700839013H1
agaattctttgatggaaattttccagtggattcttggttaccaatttttgtgaattgtctttatcctgtaagtcaattaccttcagaagctgtcgttgtaaatgtcacatgtggtagtggacgtggtggtttacccaccactgcttggattagttctgcagttaacaatcgctcctcagagatcaacaaaaggattcgcacagcacttgggaaaggtaagaaaattgtttttcttactagagtt

SEQ ID NO: 70286 - DNA, 241 bp, Glycine max
  Clone ID: 700839014H1
ttcgaaatggctgaggtagaaccaatatccacctacgtagacttcggggagagagaatattttgttgcggatgaaagagggtacgattacttgctgtacaaaatggctgaagaatttctcttcacatccaagggaagaatcttggacaatcgtctcaaactcaacaaggtcgtccgggaattgcagtattcaaaaagtggtgttacggtgaaaacggaggatggttgcgtttacgagacca

SEQ ID NO: 70287 - DNA, 243 bp, Glycine max
  Clone ID: 700839015H1
cattttctcacaactatcacgccccaccaccaccatgtccataaatctacgcacccacgccttcgcgggtaacccgctccgatcccccaaccgggtcgacccgttttcgcccgcctccgcgctcgagaccctcacgacccgaatcctcgacgccgcgcacgtgtcctcaccgtccgtggattttaaggtcttgccttttagaaatgggagggtgctggcttcttcggagagtggtgacactgg

SEQ ID NO: 70288 - DNA, 243 bp, Glycine max
  Clone ID: 700839016H1
gaaaacctaagcttagaattagaaacaaagaaaagaagaaaggaaagaattgatcgttgaaaatgcagggaggaaagaaagcgggagagtccattaaggaaacagctacaaacattggtgcttctgccaaggctggcatggagaagaccaaggccactgtccaagagaaggcagaaagaatgacagcacgtgatccggtgcaaaaggagttggcaacccaaaagaaagaggcaaagatgaacc

SEQ ID NO: 70289 - DNA, 262 bp, Glycine max
  Clone ID: 700839017H1
tgcagctccaggcgcttcgcaagaaatcgcagttccaataatcgccgaaatcgatctctacaagtacgacccatgggaccttccaggaatggctttgtacggagagaaagagtggtattttttcacgccgagggaccgcaagtacccgaacggttcgcggccgaaccggtccgcggggaccggatactggaaggcaaccggagcggataaaccggttggctaaccgaaacctgttgggatcaagaaagcattggttttttac

SEQ ID NO: 70290 - DNA, 246 bp, Glycine max
  Clone ID: 700839018H1
ggaggaccgagtgcctcccacgcccggtcgtactcataaccgcatcaggtctccaaggtgaacagcctctggtcgatggaacaatgtaggcaagggaagtcggcaaaatggatccgtaacctcgggaaaaggattggctctgagggctgggcacgggggtcccagtcccgaacccgtcggctgtcggtggactgctcgagctgcttccgcggcgagagcgggtcgtcgcgtgccggtcgggggacg

SEQ ID NO: 70291 - DNA, 245 bp, Glycine max
  Clone ID: 700839019H1
gctgataatagcggagacgcgaactgatgtgtattcgaatcctaggagctagtaatcgacgatatgcttatattggtgacattgttgttgctgtaatcaaacaagcagtaccaaatacgaacttagaaagatcagaagtgatcagagctgtaattgtacgtacttgtaaagaactcaaacgtagcaacggtataataattcagtatgatgataatgctgcagttgtcattgatcaagaaggaaat

SEQ ID NO: 70292 - DNA, 242 bp, Glycine max
  Clone ID: 700839020H1
aagatcgtcagtaacggagttggactggtgccaccacacctggctcaccttttgtacgaggggctccactcccgtttggaatctgcgggtattgacggtgttaaggttgacgttatacacttgctcgagatgctatccgaggaatacggtggccgtgttgagctagccaaagcttattacaaagcgctcactgcttcggtgaagaagcatttcaaaggcaatggggtcattgcgagcatgga

SEQ ID NO: 70293 - DNA, 241 bp, Glycine max
  Clone ID: 700839022H1
gaacaatggcgtctctctctcacctcaacaaactcctctgcatgccgccgctcaactcttcaccctctacttcgccaccgcgcagagcgtcggagtttcgaccaaatctgtcggaaggccgaggatggtcgccgatttcgcgaggccggtggggcgtgtccgagcggtgacgagcgacgacgagtggggcccggagaaggaggaggaggcatacggcggaggagtggcggtggaggagaaa

SEQ ID NO: 70294 - DNA, 242 bp, Glycine max
  Clone ID: 700839023H1
ggccgaaacaatgccggaaagtgatcgctgggatgcgtgtcttgcccgaccaatcagtagtttccacgagcaatgcactcaacttggtgaaggcagcataggggttaaattcagttacaatcatccatcaggacattcacacactgtcaggacctttgtatatcgacccaccagtgttccaacttactgcatttgatatatatattggcttgctctgaatctgaaattgcttatgcttggtt

SEQ ID NO: 70295 - DNA, 243 bp, Glycine max
  Clone ID: 700839024H1
gtcgttacatggttgtttatcagtatgggtcagctgttttgtttaatatcgaggatcatgaagtggaaagttacctggaattagttaagaagcatgcatctggtttacttcaagatatgaggaaagatgattatgcgataaaggagaagccactgcaagttgaggacatgcaaggaggtccagactacatagttctgaaatcgttggatactgatggtatccgtataattggaagtgtattgg

SEQ ID NO: 70296 - DNA, 241 bp, Glycine max
  Clone ID: 700839025H1
gagagaggttttgatgcaacgctgtcactgagaaaggatctctatctacgaaggagcggaataaaacccttctctctgtgattaagagaatggcttcagatcggaaacttcacacttttgaggaggtggcaaagcacaaccagaccaaggattgctggctcatcatttctggcaaggtgtatgatgtcacccctttcatggaggatcatcccggaggtgatgaggttttgttatctgcaac

SEQ ID NO: 70297 - DNA, 241 bp, Glycine max
  Clone ID: 700839026H1
cctaggttttcttctcagttctcacctcgcttttcgcgccacctcttcagtcttcattcttctcacttcaagaatcacgacccaaccgtgcaaaccttttcaggtgtgtaaatggggttatctgccaagaaatctagaaaaagaggaaaaagtgacagtgattcagatgactacgataatatggagtatgaagaggtggaggatgattatgatgacgatggtgaggaggaggatgaagaag

SEQ ID NO: 70298 - DNA, 241 bp, Glycine max
  Clone ID: 700839028H1
atcggttttgggaagaactgatattgtttttgcattttttaacattttgtttatttattaaatgaacccaaacctgcaaattaaaaacaaaaccaatccaggcgaaaactaaatcaatctatgcattatatattacattaaaattattattaaataaatattaataaatacaataatgtcaatacctaactatcatctataatctaagatttacttaagtctaacatttgcaaaatttctt

SEQ ID NO: 70299 - DNA, 236 bp, Glycine max
  Clone ID: 700839031H1
ggcagagagagagggagcttgaagagaaagagaaacaaaggagagaagcattgttgggtagagctgctgctgaaccagctcctcctgcccgtccattggaatcgggatctgctgctcctgcggcagctgccgccgccgccgctgctccaacacctgggaaatacgtacctaagttcaggcgagagagaaccgaaagcgcaggagctgcgcctcctccagaaacagatcgctggaac

SEQ ID NO: 70300 - DNA, 246 bp, Glycine max
  Clone ID: 700839034H1
gaagattctgcagttatcttatccaaattatttgaagatgagatagttgaaaatgctaggagtctattggataactataatttaatgaaggatggcttcaagcctgtgaaaattaagtcagggcatcattggtggaagtcatcatgttatgaaaagttagagaaaattggtggttctgatttcagtgcttgggcaagtgagtatgtacctgcatatcggttagagattgacaccaagatattggga

SEQ ID NO: 70301 - DNA, 243 bp, Glycine max
  Clone ID: 700839035H1
ctctagataggtaaaaatggctactccgccggtggtaaggtttccgatcttcacggcggtgagggcggtcggcgttgccgttactgttcttctgctgacgtgggccgtccatttcagaggaggcctcgctctcgtctctgataacaaagatctcatctttaatgtccatccagtgttgatggtgattgggcttgttctaatcaatggtgaagggatgcttgcatacaagactctatctggaac

SEQ ID NO: 70302 - DNA, 240 bp, Glycine max
  Clone ID: 700839040H1
aaagaatcaaagaaaggggtggtggctgcttcgaaagcttaataatttgtttatttccagaacatcatagttttcgcagcagcaaactaacaaattactcatatcatataataagatggcccgttctctctcgcaagccaaacgtattggtgtccttgttgctcaatctatctccctaattcccgttcatcggcgaggttacgcagtggcatccgatgtatcggtaagagttggattggg

SEQ ID NO: 70303 - DNA, 237 bp, Glycine max
  Clone ID: 700839042H1
atccggatctgtgcattttgatgctgtgaatgagtattcatgctcagaaacggaaaaagataagcccagtggtcaagtattggtttttgatgcaaacacaaccaaccttcattacaacggaatgctgcagatggggctggatggattggttgaaaatgaggacccactgacacttcccttcttgtgggagtaggtagctaactaagtggttatgtctttgttgggaaatttttggat

SEQ ID NO: 70304 - DNA, 237 bp, Glycine max
  Clone ID: 700839043H1
accttgtttgtctccaatcaaaacctttcaagctggcgttcgaaaaccaagacaaccctgtccgagaaatcaagcccaagaataggagaatcatgggtgctggaggccctgatgatgaggacaacaacaggtggccaccgtggctgaagcctctgctaaaagaaagtttctttgttcaatgcaagcttcacgctgattcgcacaagagcgagtgcaacatgtactgcttggattgta

SEQ ID NO: 70305 - DNA, 240 bp, Glycine max
  Clone ID: 700839048H1
tatcggccacatttagattcccttctggggaggtccgtttgatatccaaaaactgctcggcaacagtcggacaagtgggaaatgttggagtagaccagaaaaatttaggtagagccggatctaaatgttggctaggtaagcgtcctgtagtaagaggagtagttatgaaccccgtagaccatccgcatgggggtggtgaagggagggccccaattggtagaaaaaaacccgcaactcctt

SEQ ID NO: 70306 - DNA, 244 bp, Glycine max
  Clone ID: 700839049H1
caaagatcttccttacaaaagtttgttttcaaagtgtgttttgtttcccaaatcctactcttgtgaccacaacccttcctcctctttcttttgaaacctctttttttctattccccaaccaaacaagcaaacgctactcactcatcatcactgagatcatggctcctaatatcaccactgtcaaaaccaccatcaccgacgctcaagccaaggtcgccaccgatcatggtcgtgcctacgtcac

SEQ ID NO: 70307 - DNA, 240 bp, Glycine max
  Clone ID: 700839050H1
ggcaggaagagcaggtaatactggggttgctgtcatgctttatgatccaaaaagatctaacatacctagaatagaaagagagtccggtgtaaaatttgaacacgtatccgcccctcagcccgatgatattgccaaagctgttagtggggaagctgctgaaatgattatccaagtgtctgatagtgtggttcctgcattcaagtctgctgctgaagagcttttgaacagttctggtttacc

SEQ ID NO: 70308 - DNA, 238 bp, Glycine max
  Clone ID: 700839051H1
agagtccattaaggaaacagctacaaacattggtgcttctgccaaggctggcatggagaagaccaaggccactgtccaagagaaggcagaaagaatgacagcacgtgatccggtgcaaaaggagttggcaacccaaaagaaagaggcaaagatgaaccaggcggagctggacaagcaggcggcgcgtcagcataacacggcggccaaacagtccgccaccacggctgggcacatggga

SEQ ID NO: 70309 - DNA, 238 bp, Glycine max
  Clone ID: 700839052H1
agaaaacctaagcttagaattagaaacaaagaaaagaagaaaggaaagaattgatcgttgaaaatgcagggaggaaagaaagcgggagagtccattaaggaaacagctacaaacattggtgcttctgccaaggctggcatggagaagaccaaggccactgtccaagagaaggcagaaagaatgacagcacgtgatccggtgcaaaaggagttggcaacccaaaagaaagaggcaaaga

SEQ ID NO: 70310 - DNA, 238 bp, Glycine max
  Clone ID: 700839053H1
aaaaaaagcttcatcatcatcttcttcttctctgcatcatcacaatggctgaagtacgttcacaacaacaacaaccccagcatgtgcaagtccacgcaaccacaacacacaccccacaacaccatggcggggaaggtggcagcggcattctgaacctcatcccggagatgtccctcacgggttcccaactcctagctctcctcgccggcgttccccttggtgcaatgctgctcctcct

SEQ ID NO: 70311 - DNA, 236 bp, Glycine max
  Clone ID: 700839054H1
ggcggccaccgcaagcaacaatgacgtcgccgccgccaacgacggtcccgtgatgagccttatcaacaagcgcctccgcgctctccgcaagaagctgaaccgcatcctcgccatggaagaggccgtcaccttgggcaagcccttgaacaaggagcaggaagaggttctacgctccaaaccctccgtcctcgccctcatcgatgagctcgataagctccggcaacctctcgccaccg

SEQ ID NO: 70312 - DNA, 222 bp, Glycine max
  Clone ID: 700839056H1
gcacatgatcgaggacgactgcgccgacagcggcatccctctgccgaacgtgacgagcaagatcctggcgaaagtgatcgagtactgcaagaagcacgtcgaggccgcgaatcccgaagacaaaccctccgaggacgatctcaaagcctgggacgccgatttcgtcaaggtcgaccaggccacgctcttcgatcttatcctggctgcgaactacttgaacat

SEQ ID NO: 70313 - DNA, 234 bp, Glycine max
  Clone ID: 700839057H1
caaaaagctgatgtgcctaccatagcacagattgaagagttccattcgatgcagaggatgatgaatgctcctgattcaaatgataatattgatctactgttgagcattgatttgttgggtttacaaggagcaggtaaagcttttccaaacaagattgtttttgatgataagcttgtgttggctaacacacaagaattctttgatggaaattttccagtggattcttggttacca

SEQ ID NO: 70314 - DNA, 233 bp, Glycine max
  Clone ID: 700839058H1
gctgctgctatacagttgaaagaaaagcttgaagcatccctatccaaaagttgattgtcagatcatatttatgtgtagcatctcaatgatattgtaaaccatgttagaaatactctgtcttgtaggttaagtggctaacataatattgttcttagtgcaaaaaaaaaaaaaaaaaaaaaaaaaaaaggggggcccgccgattaagaacccccccgcccggggaattatttccg

SEQ ID NO: 70315 - DNA, 233 bp, Glycine max
  Clone ID: 700839059H1
cggatctagagtcttcagtttctcctcgttgttcttcgctttcctgttttcaatttcgattctttcgttaatttaataagatgtttgggagggcaccgaagaagagcgataatacgaggtactacgaaatcctcggcgtctccaagaacgcttcgcaggatgatctgaagaaggcttacaagaaagccgccattaagaatcaccccgacaagggcggtgatcccgagaagttt

SEQ ID NO: 70316 - DNA, 234 bp, Glycine max
  Clone ID: 700839061H1
gggcaagaacggagaccatacaatacgaattctagaccttatgatatgaacgcggttcctgatggttggttagactgcccaccacatgggcaagaaataggatgtataatcccttcaaaggttccacttggtgattccttcaatgattacatttcaagtcaaaaatatactcccaagcaagcaattcatcaacaaagagtcttaggtagagaacttggtttagtgattgatctg

SEQ ID NO: 70317 - DNA, 236 bp, Glycine max
  Clone ID: 700839063H1
ggaaaaaagcatcaccgtcttagccattgctgctccctcgtcttctccatttttcaacgctttttcccagaggtactccttgaagatctccttcaattttcttttcgggtttatttcaataaattaagattaatatttgtgtaaaagatttgtgatttcaattttgaaattgaagccatattataggataggattttcattattactggtgttattagttagagtatggtttattt

SEQ ID NO: 70318 - DNA, 240 bp, Glycine max
  Clone ID: 700839065H1
cacacaactacaagatagaacttccttataaccaaaaccaacaacaactatggcaagttatcagaagcactacgatgatcagggtcgcaaggtcgacgagtatggcaatgttgagaggcaaactgacgaatatggcaacccggttcatgccactagtgtcacttatgtagccaccaaaagtgttggtggctacaatgatgacgctaataagcaacatgatattactggtgtctatcccga

SEQ ID NO: 70319 - DNA, 234 bp, Glycine max
  Clone ID: 700839067H1
cgccgtcagaaaacgcataagtaattaccccgaacaagctaggaagaacatgcatagggttagggttagggttccggtgtccgtggcgcaggttctgaagcacgagccgcggctaatttcccttgcagtggaagggttctacgatagagatatagacacgatgaagttcgcgtcgaggatggagaggtttgtggagagagggaaagcggaggagttggtgtgcgtttcggtgaa

SEQ ID NO: 70320 - DNA, 230 bp, Glycine max
  Clone ID: 700839071H1
atcatctcgcagtagcgctaaacgcccctttatggaagaagacgacgacgaattctccaaaaagccaccagcaaaaagggttaggtttccaaagggaaagaaagtgaagccaggagatgaagtggtggtggacaaagcaaatgttgaggagggtgaagaagttgacttggtgaatgctaaaactgctaccaatgctgccaaagagcgggaaaaactcagaaggtttctaa

SEQ ID NO: 70321 - DNA, 229 bp, Glycine max
  Clone ID: 700839073H1
gaagagattaaggggaagaaatattttggaggggagaatataggataccttgacattgcacttggatggatctcttactggcttcctatttgggaggaagttggatcgatacagataattgacccattgaaatttccagccatcactgcatggatcaccaattttcttagccatcctgtgatcaaggacaacttgcccccaagagacaagatgcttgtttacttccaca

SEQ ID NO: 70322 - DNA, 232 bp, Glycine max
  Clone ID: 700839074H1
cacaaaacaaaaacaaaacaaaacagtgtctttgattacgagagagagagaacaaaacaatcaacacaatggcttctgagcaaatgcctcgcagagagaacaacagcaatagggtgatagagagagaggttcacgttgagacacacagaaaagagtccctccctgataagggaagggttgtgatagagagtgagaagaaggagaaagagagagagttggcttctgatagagc

SEQ ID NO: 70323 - DNA, 231 bp, Glycine max
  Clone ID: 700839075H1
agctgataagagagataccaacaagaaaagaaaaaaagaagagttgagattccctttgaagaaaagatggcatcccataggcaaagctatgaagctggtcaaactaagggccgaactgaggaaaagacgaaccagacgatgggcaatattggagagaaggctcaagctgcaaaggagaagacccaggaaatggcccaagctgcaaaggagaagacccaacaaacagcccaa

SEQ ID NO: 70324 - DNA, 230 bp, Glycine max
  Clone ID: 700839076H1
ggaaacagctgcaaacattggtgcttctgccaaggctggcatggagaaaaccaaggccactgtccaggagaaggcagaaagaatgacggcacgtgatccgatgcaaaaggagttggcaacccagaagaaagaggcaaagatgagccaggcagagctggacaagcaggcggcgcgtcagcataacacggcggcgaacaggctgccacggcagggcacatgggacaacccat

SEQ ID NO: 70325 - DNA, 229 bp, Glycine max
  Clone ID: 700839077H1
agagaaggttgctctagatgaacttttgtgcggaaaagttctacctcacttaagagtcatatcagaaaatgttcaagatgcaataacaagaacagaacggattattgcttccctatctggggtctggtctggtccaagtgtcattggagacaaaaagtatgttgatgccgcaaattgcagcctctggtgacttatgtgctgtcacttggaaggattctagagagaagaa

SEQ ID NO: 70326 - DNA, 232 bp, Glycine max
  Clone ID: 700839079H1
cctacggcaacgcttcatttgaatcaacactccttcctcttcctctctctcgtccattttagttcaactttgaataattctccttcgtatcaagtcttcctcatcttcaccacctttttgtaagtggatatttatgtgtctaagaacataaactaaaaaaccaaggcgagtgaccgaaaaaaaatgtcaggtgtgtctctagcagtgtctggtccaccagcagcaacagtgg

SEQ ID NO: 70327 - DNA, 234 bp, Glycine max
  Clone ID: 700839082H1
cttgagagaaaagtagtgtattaagactacaaattttcaattttacaatggcgtcgaggcaacaaaaagaggatcgagctgaggcagctgcgaaagttgctgcgaaagaactcgaacaactcaaccgagaaaaagaccgtgatttcagtgttggtgttgcagaccaacaccaacaagaagaacatcagttagatcaacaaaagcgtggtgtaatcggatccatgttcaaggcgg

SEQ ID NO: 70328 - DNA, 230 bp, Glycine max
  Clone ID: 700839085H1
gctaaccatgcaatacggcaatatgttgacattgtttcggaaaagcagaaatatgataaattggtaaagttgctagaagacatcatggatggcagccgaatactgatatttatggataccaaaaaaggatgtgatcagattactaggcaactccgcatggatggatggcctgcactttcatttcatggagataaaagtcaagcagaaagagtttgggtgctctcagaatt

SEQ ID NO: 70329 - DNA, 229 bp, Glycine max
  Clone ID: 700839087H1
cacacaactactacaagtacttccttacaatcaaaaccaacaacaactatggcaagttatcaaaagcactacgatgatcagggtcgcaaggttgacgagtatggcaacgttgagaagcaaaccgacgaatacggcaaccctgttcatgctgctagtgtcacctatgtagccaccagaactgctgctggtggttacagtgatgacattaataagcaacatgataccacca

SEQ ID NO: 70330 - DNA, 231 bp, Glycine max
  Clone ID: 700839088H1
aaagaatcaaagaaaggggtggtggctgcttcgaaagcttaataatttgtttatttccagaacatcatagttttcgcagcagcaaactaacaaattactcatatcatataataagatggcccgttctctctcgcaagccaaacgtattggtgtccttgttgctcaatctatctccctaattcccgttcatcggcgaggttacgcagtggcatccgatgtatcggtaagagt

SEQ ID NO: 70331 - DNA, 230 bp, Glycine max
  Clone ID: 700839092H1
gaacaatcattctctgattctctgcgctccagatttaatgcagtatccatgagatacaaagattcaatttcgaagggcacaaggggatggaaggagaggctcttctctcccaattcttctatgtcagaacttggttcagaagttaggagagaattgaatgctaaaattgctagcgtgtcccgattgatggagcgccttgaaacaagagaaaataatagtgctgcaggaac

SEQ ID NO: 70332 - DNA, 228 bp, Glycine max
  Clone ID: 700839093H1
ctttgggtggggaaggcctgagaaagtggctgtcacatccgttgataaaacgggtgcgttttcgctctcggagagtagggatcatagtggagggattcaaattgggttggcgttgaccaagaatcaaatggaggcgttttctagggtttttgctcaaggacttgagtccttggaatcatgatgatgaggaatctttggtgagagaaagaggttagtggctcaattaaa

SEQ ID NO: 70333 - DNA, 229 bp, Glycine max
  Clone ID: 700839094H1
gttctcccggtggccgtggctgcgcttctctaccggctcgaaccattcaagccggttcttttgccggtccagctgggccggtccaccgtggcggttccggctcgtaacggccacatgcaagatggatcggaacgtgtgggtgagggacacttggagggcccggaagacttggcctacgacgctgcggcacgtgtcgtttataccgggtgtgaggatgggtggatcaagc

SEQ ID NO: 70334 - DNA, 230 bp, Glycine max
  Clone ID: 700839095H1
acttttagtgctggtgagaggtcgcgccacgacgattctccagattacaccatatttgttggtgacttggctgcagatgttactgattatcttcttcaggagacatttagggctcgttataactcggtgaagggtgcaaaagttgtcattgataggctaactggccggaccaagggatatggctttgtaaggttttcagatgagagtgagcaagtgagggctatgactga

SEQ ID NO: 70335 - DNA, 243 bp, Glycine max
  Clone ID: 700839101H1
cacacaactactacaagtacttccttacaatcaaaaccaacaacaactatggcaagttatcaaaagcactacgatgatcagggtcgcaaggttgacgagtatggcaacgttgagaagcaaaccgacgaatacggcaaccctgttcatgctgctagtgtcacctatgtagccaccagaactgctgctggtggttacagtgatgacattaataagcaacatgataccaccaatgcctacggcgta

SEQ ID NO: 70336 - DNA, 232 bp, Glycine max
  Clone ID: 700839102H1
ggaaatggctatgcccctgttcttgactgccacacttcccacattgctgtcaagtttgctgaactcatgaccaagattgacaggcgatctggcaaagagcttgagaaggaacccaagtttttgaagaatggtcatgctggtgttgttaagatgattccgaccagacccatggtggttgaaactttctctgagtaccccccacttggtcgctttgctgtcagggatatgcgtc

SEQ ID NO: 70337 - DNA, 234 bp, Glycine max; identical to SEQ ID NO: 67879
  Clone ID: 700839103H1

SEQ ID NO: 70338 - DNA, 235 bp, Glycine max
  Clone ID: 700839104H1
gagaaagacaccggtagacatcattttggtcgtggttacgacggtgacactaacaagcaacatgatgctactggtgtttatcccggaatagacattggtagagatcatgggactaccggtgtttatggcctaaacaccgacagacatcatggaacttctggggtgaatcccgggatagacacccataaccaacaacatgggactaccgttggttatgctggtgacactggaaggc

SEQ ID NO: 70339 - DNA, 235 bp, Glycine max
  Clone ID: 700839105H1
tacttattcagtagttcttctctctcgaattttcactcactttctgtgcatcaatggcggcgataagtctccggaaggggaacacgcggcttccgccggaggtgaaccgcgtgctgtacgttcggaaccttcccttcaacatcaccagcgaggagatgtacgacatctttggcaaatacggcgccattcgccagatccgcatcggcaccaacaaggacactcgcggaaccgcttt

SEQ ID NO: 70340 - DNA, 234 bp, Glycine max
  Clone ID: 700839107H1
catcagtacccatttttgtactaagaagcatttgttacatttatgtaaccaaaggaaaatcaaaagtacgcaggaggtgaagctcggtggcgaaatcaacatgcaacgcagtgaaagcatgcgactaaagaaaaagaagagaagaaacaggagaagaaaaacaataaagcctggaggagatttctaagcacagagctgaagctcaacaaaaagcaatgagttcaattgaaggtg

SEQ ID NO: 70341 - DNA, 235 bp, Glycine max
  Clone ID: 700839108H1
aaacaagcccctaccaagaagaaggattcagtgctgaaagcagaactcgagagaagaacaagagaggtagagggaagagagtggaacaaagaggagaaacaaagaagttgtccaagagggaaagtagaggcagagaaagcaagaccaatggaagaaacaaaactggaagctaaaggaagagaaaaagctgaaaccaaagagggtggtggtgaggaaaaaggaatgagaagagaag

SEQ ID NO: 70342 - DNA, 234 bp, Glycine max
  Clone ID: 700839111H1
agaaaatctgacttctgttgaagattacagaagtcaagtattcgatgttgaagttgaaaatgctggattgcttctgcagaatgaaacatttggaggatacagtacgccaggttgcaatagcaaagctaatttatgtggtgataataatattgattccagggccagggccaccaagtcatctagtgatactgtacaagatatggttattggccccctaccaagagattgccttgt

SEQ ID NO: 70343 - DNA, 235 bp, Glycine max
  Clone ID: 700839112H1
gcagttaacaatcgctcctcagatatcaacaaaaggattcgcacagcacttgggaaaggtaagaaaattgtttttcttactagagttgatccttttccagtagctttactggctgttctttttggtgttaagaatgaaattctgagttctaacgccactaatcctatgctgacgcgacttcttgaaaactgtaggagtctcaaatatctggttgatgagtgtccttttgcatttg

SEQ ID NO: 70344 - DNA, 233 bp, Glycine max
  Clone ID: 700839113H1
ctcttctttctctctctaccattgccatggatccctacaagcaccggccatccagcgccttcaattctcccttctggactacaaattctggtgctcctatttggaacaacaactcctctttaaccgttggagctagaggtccaattctgcttaaggattatcatcttgtggagaagcttgcaaattttgatagggaacgtatcccagaacgtgttgtccatgccaggggcgct

SEQ ID NO: 70345 - DNA, 238 bp, Glycine max
  Clone ID: 700839114H1
gaagcaggttgtggctgagtgtggaaggcttccactggctctgaaggtgattggagcttctttgcgagaccagaacgaaatgttttggttgagtgttaaaagcaggctctcccaaggccaaagcattggtgaaacctatgaaaccaatctgattgatagaatggcaattagtactaactacctgccagaaaagatcaaggagtgcttctaggacctgtgttcttttcctgaggataga

SEQ ID NO: 70346 - DNA, 239 bp, Glycine max
  Clone ID: 700839115H1
gatctttgaaaatgcagggaggaaagaaagctggagagtccatcaaggaaacagctgcaaacattggtgcttctgccaaggctggcatggagaaaaccaaggccactgtccaggagaaggcagaaagaatgacggcacgtgatccgatgcaaaaggagttggcaacccagaagaaagaggcaaagatgagccaggcagagctggacaagcaggcggcgcgtcagcataacacggcggcg

SEQ ID NO: 70347 - DNA, 234 bp, Glycine max
  Clone ID: 700839116H1
cacaaggatatagggactctatatttcatcttcggtgccattgctggagtgatgggcacatgcttctccgtattgattcgtatggaattagcacgacccggcgatcaaattcttggtgggaatcatcaactttataatgttttaataacggctcacgcttttttaatgatcttttttatggttatgccggcgatgataggtggatttggtaattggtttgttccgattctgata

SEQ ID NO: 70348 - DNA, 233 bp, Glycine max
  Clone ID: 700839117H1
tgaccctgcttcccaattttactccacagctctccccgccaatcagcttcccggctccgaattcgataagcctctattgaatttaaactcccaggcttaggagtttttgcataggttccgtggctccactggccttgaggagacatgggatgagatacagcgtgatggggcggctgcccaaatgcggcaactgccaccggggattcaacagccgccgttggatgggacaccgc

SEQ ID NO: 70349 - DNA, 227 bp, Glycine max
  Clone ID: 700839118H1
ctctgactatgccggtgatgctgctcagaaatcaaaggactatgccggtgacactgctcagaaaaccaaggactatgccggtgacactgctcagaaaaccaaggactatgccggtgacactgcacagacatcaaaggactatgccggtgatgctgctcagaaatcaaagggctatgacggtgatgctgcacaaaagaccaaagaatctgctggtgatgctgctcaga

SEQ ID NO: 70350 - DNA, 234 bp, Glycine max
  Clone ID: 700839119H1
gcaacacacagtaatgatccatatgttgatgactattaccaccaaggctgtcttgcgagaaagtcatctggtgctaaattgaggcatcacttgtctccagctcagataaaggaactccctctacgacgctcttctaatgctgaaccacatgctttacttcaagttgatgcactagggagacttccattctcatcaattcgcaggcctcgtcctctgatggaagttgatactccc

SEQ ID NO: 70351 - DNA, 234 bp, Glycine max
  Clone ID: 700839120H1
ggtggctataatgatgacaccaatagacatcatggaactaccggtgtctatggtatagacaccgataggcaacaacatgggactactggtggctatgccggtgacactggtaggcaacatgggaacatcggtggcccttactatggaaccaataccgcagacaccggtactggtcccagaagtggaaccacgggcggcaccggttatggaggcactggtggcactgattatgga

SEQ ID NO: 70352 - DNA, 235 bp, Glycine max
  Clone ID: 700839123H1
gaaagcttgaagcagaagagagagatgtcatcatcttcagacctggacaggcaaatagagcagttgaagaggtgtgagcctcttaaggagtctgaagtgaaggtgctctgcctcaaagccatggaaatcctcgtcgaagagagcaacgttcaaagggtcgacgctcctgtcaccatatgtggtgatattcacggtcagttttatgacatgaaggagcttttcaaagtaggagggg

SEQ ID NO: 70353 - DNA, 232 bp, Glycine max
  Clone ID: 700839126H1
caaaacaaaaacaaaacaaaacagtgtctttgattacgagagagagagaacaaaacaatcaacacaatggcttctgagcaaatgcctcgcagagagaacaacagcaatagggtgatagagagagaggttcacgttgagacacacagaaaagagtccctccctgataagggaagggttgtgatagagagtgagaagaaggagaaagagagagagttggcttctgatagagcca

SEQ ID NO: 70354 - DNA, 234 bp, Glycine max
  Clone ID: 700839128H1
gaaacgacggagactaaatctctaaaacgcttgaaaccctaaaactctgtgtcctccgccgttcacatcattgtcgacgttcgttcagttgctcacactctcaacagagaagagaagagaatgagaggaaggagctatagtccatcgcctcctcctccacgttacagcagaagaggaggagggaggagtcccagccctaggggccgctatcctccccgtccccgacaacaagat

SEQ ID NO: 70355 - DNA, 235 bp, Glycine max
  Clone ID: 700839132H1
cgaagaagaatccaaaagcaatcccatctgtgtgtttgcacatcagaagggagggctatcaaactcaaaggattgctctgaatcggtttagtcttcttcgtttttcttcaaattcctcgtgacagatctaatctaatcaggcttttgggggtgtttcagacattgcatgcatatgggagcagtggttgtgttggatgctataaaaggcctacactgagtgctactgtggatgtgc

SEQ ID NO: 70356 - DNA, 231 bp, Glycine max
  Clone ID: 700839133H1
tgccgaagaacaagggaaagggaggtaagaacaggaagaggggaaagaacgaggcggacgacgagaagcgggagctggtgttcaaggaggacgggcaggagtacgcgcaggtgctccggatgctggggaacgggcggtgcgaggcgatgtgcatcgacgggacgaagaggctctgccacatccgcgggaagatgcacaagaaggtgtggatcgccgccggagacatcatcc

SEQ ID NO: 70357 - DNA, 235 bp, Glycine max
  Clone ID: 700839134H1
gcgaactctacgactccatcttcgacaagttcgacggcgaccggagcggcgccgtcgaccgccgcgagttccgcgacgagatgaggaagatcatgctcgccatcgccgacggcctcggatcgttccccataaggatggtcctcgaagacgatcccaatagtcttcttcagaaagccgcggatcttgaagcctccaagacctgaaatccaaacggcgacgttttgagttcggttcg

SEQ ID NO: 70358 - DNA, 233 bp, Glycine max
  Clone ID: 700839135H1
cacaactacaagaaagaacttccttataaccaaaaccaacaacaactatggcaagttatcagaagcactacgatgatcagggtcgcaaggtcgacgagtatggcaatgttgagaggcaaactgacgaatatggcaacccggttcatgccactagtgtcacttatgtagccaccaaaagtgttggtggctacaatgatgacgctaatagcaacatgatattactggtgtctatc

SEQ ID NO: 70359 - DNA, 230 bp, Glycine max
  Clone ID: 700839136H1
atcccaggcgaggagaaagatggaggggaaggagcaggatgtgtcgttgggagcgaacaagttccccgagagacagccgattgggacggcggcgcagagccaagacgacggcaaggactaccaggagccggcgccggcgccgctggttgacccgacggagtttacgtcatggtcgttttacagagcagggatagcagagtttgtggccacttttctgtttctctacatca

SEQ ID NO: 70360 - DNA, 231 bp, Glycine max
  Clone ID: 700839137H1
cttaattagtgttcatgaatatgtcaagccttactttagtggttctaaattgaaaagctttctagctggtcataatatcaccattactgatggtattgacaaaactagtgcaactttgcaatttagaaagttagcagattgtgattttctcaagagaaactttaagcagatgtctaatgttttgtgggtggctcctgaggacaaggcgagtttatggtcacaacttcatta

SEQ ID NO: 70361 - DNA, 232 bp, Glycine max
  Clone ID: 700839138H1
caaaaggatacagagtaactggttccgtctgtgacgtggcgtctcgtgcagaaagacaagacctcatagctagagtctccaatgagtttaatggcaaactcaatatccttgtaaacaacgtgggaacaaacgtaccgaaacatacccttgatgttacggaggaagacttctcatttctgataaatacaaatcttgaatctgcttaccacctaagccagcttgcacatcctct

SEQ ID NO: 70362 - DNA, 127 bp, Glycine max
  Clone ID: 700839139H1
ccatcagtacccatttttgtactaaggagcatttgttacatttatgtaaccaaaggaaaatcaaaagtacgcaggaggtgaagctcggtggcgaaatcaacatgcaacgcagtgaacagcatgcgac

SEQ ID NO: 70363 - DNA, 234 bp, Glycine max
  Clone ID: 700839140H1
ctcgagccgattcggctcgaggcagggagagtacaacgtgagagtacaactcaataagaatcaaccagcacagtgtgttcccactgaacaagatatcatccaccatcgtagggtcgacctctggaggaaccatgattagcacctcaactcctcacatggttctccagcaatccgtgtaccaggctttcactcaggtgtttgctcagcagctaccaaagcaagcacaggtgaaat

SEQ ID NO: 70364 - DNA, 232 bp, Glycine max
  Clone ID: 700839142H1
gagaaaaaggaaacaaggatagaccagaactgaaaacacgaaccagagaggtaataggaagaacggagaaagaaagaggaagagaaagtggaggacaagtagtggcagagaaaggaagagaaacagaaactgcaaggggaagggttggtgctgaaaatgaaggtgcaagatcaaccgctgttataacttgcacgttggaaaaaggtggtggtactcagaaaccaataagaga

SEQ ID NO: 70365 - DNA, 230 bp, Glycine max
  Clone ID: 700839143H1
aaaagggaccatggaggcaaattcaggtgccagcgaccgaatttcgagaatcgccggccacctccgcccccagagagaggatgatgtttgtttgaagcgtacgacttgccgtgcaaaaggtggggtctccggattcaaggtggccatattgggtgccgcagaggcatagggcaacctctggcgatgttgatgaagatgaatccactcgtttcacttctccacctctacga

SEQ ID NO: 70366 - DNA, 230 bp, Glycine max
  Clone ID: 700839145H1
ggcgatttctgatacatggcggagatcacgaacacgaggaagtgaagggtgagtccttgttggagaagatttctgggaagatccacgaccacgattcctcgtcttcgtcggattccgacaacgacaaaaccagcgccactgattccttcaagtctaatgttttcaggcttttcggcagagaaaagcccattcatcatgttcttggcggtggaaaaccggctgatgttttt

SEQ ID NO: 70367 - DNA, 229 bp, Glycine max
  Clone ID: 700839147H1
ctctcttctctcttccatctcctcggttaaactgaaccaattcaatattcccagctagttcttcattgaagaagctatggactttcttaactttatgcttaacttgttggtccctccaggcagtatgctcaccttggctttctcatggccagcactttgcttcctcaatgtttgtgagtggctttatagtagtatatatggtgaggatatcgataataaagtcgtcata

SEQ ID NO: 70368 - DNA, 233 bp, Glycine max
  Clone ID: 700839149H1
tctcttttgatggacaagctaagtatcctctaaaccttggccttggaaacaaggaattgaagaatgcaaagaatgttcagtatcttccatctagatggtgtgtggcaagcccctctactgatgctcaaaatgtagcaaaccatatgagaattgcatgcagtgttgcggattgcaccacacttgattatgggggttcatgtaatggaattggagagaagggtaacatctcatat

SEQ ID NO: 70369 - DNA, 231 bp, Glycine max
  Clone ID: 700839151H1
caacaagttgaatcaaacagtgaaagtaaaacattgtgcaattaatcatcaactgcaagtagccagtgcataagatcaatggcgtcaagacagcaattcaaggaagacagagccgaggcagctgcaaaactcgcagcgaaagacatcggcgacatcaacagaacaaacgagcgcgacgaggggtacgacttgcacgacgaagccaacttcaagcaagcacgagctgaagca

SEQ ID NO: 70370 - DNA, 230 bp, Glycine max
  Clone ID: 700839152H1
ccttctcagcgaagacgaccccagcttccctcacctcaaatctggcctcctcatcctcaccacgcaccgcctactctggctcccggactccgccgcatccgccggcggcaccgccgggccatccccctcgccgccgtctcccacattttctcccccaagatgtccctgcggaaggtgttcgcctcgccgcgggtccggttccaggtgtcactgtcgccggagggaagggt

SEQ ID NO: 70371 - DNA, 228 bp, Glycine max
  Clone ID: 700839153H1
attcaatctgcctcgatcatggagaggaaaacatttgggtttttgttcttgctcctccttgtcttagcttctgatgtgacggtgaagagagcagaggcgaaagattgcttgacaaggaggcacgggttccagggtagatgcttattcgacaggcaatgtgcacatgtgtgcaggagcgatggtttcatcggtggtcagtgccgaggccctcttcgcaaatgcttttgc

SEQ ID NO: 70372 - DNA, 229 bp, Glycine max
  Clone ID: 700839154H1
gtttgtcacgagacccatagtgctgccaaattatagtaactctctttctctatctgaagaagaagaagttctgaagaagcatgtgtggaggtgctatcatctcagacttcattggtgtgaagcgtggccgcaacctcgccgcgcaggaactgtggtccgagcttgaccctttctctgacctccttggcttcgataccaccaccaccaccaccaaccaaccaccccttcc

SEQ ID NO: 70373 - DNA, 78 bp, Glycine max
  Clone ID: 700839155H1
gtgccaatacatcatatgttgagagttgttgggacatgtaaagcctacgtggtggtggagcagggttgttcacttttg

SEQ ID NO: 70374 - DNA, 227 bp, Glycine max
  Clone ID: 700839157H1
aagactttgaccgggaagaccatcacccttgaggtggaatcctcggacaccattgataatgttaaggccaagatccaggacaaagagggcatccccccagatcagcagaggctgatttttgccggtaaacaacttgaggatggaagaacccttgctgattacaacattcagaaggaatccacccttcacttggtgcttcgtttgagaggtggtatgcagattttcgt

SEQ ID NO: 70375 - DNA, 225 bp, Glycine max
  Clone ID: 700839158H1
atcgattctctcccttctctttctctctgcgacaccagatgatggagacgacggcgaacgaacacgctgtcgttgcgccaatcgcggcgttgttgttggtggtgctactcgcggcgagtgtggtggtggaggctcaggagaactcggacgtgaagacgctggtgaagcacatgcacgggaagaagtactgcgacaaaggatgggaatgtaagggctggtcaattt

SEQ ID NO: 70376 - DNA, 228 bp, Glycine max
  Clone ID: 700839159H1
gcggtgtcaacattatgcacttcccacccgagactgcttatttgtagatcctttacatgatgggaaaacaatgctcaaaatttggaacctcaataaatgttccggggttttgggtctgttcaattgccaaggaggaggttggtgccctgttactaggcgaaacaagagtagctctgactattcacactccgtgacttgctttgcaagtcctcaagacattgaatgggg

SEQ ID NO: 70377 - DNA, 222 bp, Glycine max
  Clone ID: 700839160H1
gtgaaagcaaatttcaagaaaggtgttgggagcaatgaattgctgtcccatcttgcagcacttcctgcacctgctcaagaaaagatgagtgcactggttgaagctctatttgatggaattgataaaggttttgctaaagaagctgataagaagaagaactactttgctgctgctgttgctgaggagggatcccagctgttattgcttcatgctattgaagaa

SEQ ID NO: 70378 - DNA, 230 bp, Glycine max
  Clone ID: 700839161H1
cccaaacccttggcggctgcgagacccgttgtgttctctcttctctctctcttcttttttttttctctttccctctcttcttcgctccttttagggttttctcaactcttcgatttggggcttaaaccctctccgattcagattcggatttagggcttccctttctctattccgcctccaaagaaaaacagatctcgtggttggttcgtcatggccaccgttgctaatcc

SEQ ID NO: 70379 - DNA, 233 bp, Glycine max
  Clone ID: 700839163H1
attcaattcaatctgcctcgatcatggagaggaaaacatttgggtttttgttcttgctcctccttgtcttagcttctgatgtgacggtgaagagagcagaggcgaaagattgcttgacaaggaggcacgggttccagggtagatgcttattcgacaggcaatgtgcacatgtgtgcaggagcgatggtttcatcggtggtcagtgccgaggccctcttcgcaaatgcttttgc

SEQ ID NO: 70380 - DNA, 235 bp, Glycine max
  Clone ID: 700839164H1
cctttcttagtgatacttcaatcgtacagagaagcattggctaataatgacgaagtcaaaattgctgagttggaatcgtcattaaaatccattgaagatgagaaaatagaacttgaagggaaaatagcttctttatcagaggagttatcaatagaaaaggatcggattctaaggattagtgcagactttgacaattttcggaagaggacagagagagatcgcctttcattggtca

SEQ ID NO: 70381 - DNA, 229 bp, Glycine max
  Clone ID: 700839165H1
cctttcgggattggtttctatggcttctgaagtaatagagtaccgatgctttgtcggtgggcttgcttgggccaccgacagcgatgctctcgagaaagccttctctcattatggtgagatcgtcgaatcgaaggttatcatcgatcgtgaaactggaagatcgagagggtttggatttgtgaccttcgaatcggagcaggcgatgaaagacgcaatcgaaggaatgaac

SEQ ID NO: 70382 - DNA, 227 bp, Glycine max
  Clone ID: 700839166H1
ctcgctgaaaattagggtttcgtttcggaggtagacgaagatgttcggaagggcaccgaagaaaagcgacagcaccaggtactacgaaatcctcggcgtttcgaagaacgcttcgccggatgatttaaagaaggcttacaagaaagccgccattaagaaccaccctgacaaaggcggtgatcctgagaagttcaaagagcttgctcaagcctatgaggttctgagtg

SEQ ID NO: 70383 - DNA, 223 bp, Glycine max
  Clone ID: 700839167H1
ggcgaacagggcgtgcaaggggcgtgggagacggcgaaggacactacgcagaagatcaaggagacggtggttggcaaggatgatgatgatgatgatgatcatggtgatggtcatggtggtcttaaggatgatgatgttgtggagatgaggaggagagttggtaagagattaccatgagaagggttattagagaacacagaatcaatggcttcatttagtactt

SEQ ID NO: 70384 - DNA, 228 bp, Glycine max
  Clone ID: 700839168H1
acaaaaacaaaacaaaacagtgtctttgattacgagagagagagaacaaaacaatcaacacaatggcttctgagcaaatgcctcgcagagagaacaacagcaatagggtgatagagagagaggttcacgttgagacacacagaaaagagtccctccctgataagggaagggttgtgatagagagtgagaagaaggagaaagagagagagttggcttctgatagagcca

SEQ ID NO: 70385 - DNA, 226 bp, Glycine max
  Clone ID: 700839170H1
caaacctgttgtttatggtcggagttggaaggcgtctgaactgcgtctgaagtcttgggacgaccttcataagttgtggtatgtgttgttaaaggaaaagaacatgttgatgactcaacgtcaaatgcttaatgcacagaacctgcgttttcctaacccggagcgcatccctaaggtgaggaagtcaatgtgtcgcatcaagcatgtacttactgagagagcaatt

SEQ ID NO: 70386 - DNA, 226 bp, Glycine max
  Clone ID: 700839171H1
gtctgtatctgaggtgaatgatgaggatgatgacgaggaaggcagtggcgaggaggaggatgacgattagagaatggactgatgataatagcatttatgtaggttctgatgattttgatcatccgtgtaggtggtctggtcatttccttataaacatatttctctttccaaaaaatatttccctgctcctccgtccgtaaattgctcgtctttccaaaacgtgaat

SEQ ID NO: 70387 - DNA, 223 bp, Glycine max
  Clone ID: 700839172H1
ctcactaccaccaaagactgagaagaggggttgaattaactgcttgcaagcatggcgaagagcaaggaagacataacctatgcaacatcacaagcaaggctttcagaagatgaagcagtgagagtggcctacgagcatggctcaccccttgaaggaggaaagattgctgactctcaaccagttgacttgttttcaagtgcacacaatatgccaaagagtggcc

SEQ ID NO: 70388 - DNA, 224 bp, Glycine max
  Clone ID: 700839173H1
gtcacaaccgtcttgaaattaagaccaactgggtcattgatcacaatctcaattggtagcacaacatcaagggaaagtgaaaaagaaaggtatatttgatcagggatatggcaactcgaagatatgagtttggaaggatgaatgaggctagccacccagactccatcagagctgccttggctgaattcctctccacttgcatctttgtctttgctggagaaggc

SEQ ID NO: 70389 - DNA, 84 bp, Glycine max
  Clone ID: 700839174H1
gcgatactgacgtgcatatcgcacgtctgacttgggtataggggcaaaagactaatcgaaccgtctagtagctggttccctccg

SEQ ID NO: 70390 - DNA, 225 bp, Glycine max
  Clone ID: 700839176H1
ctagttctagatcgcgagccaaacgtattggtgtccttgttgctcaatctatctccctaattcccgttcatcggcgaggttacgcagtggcatccgatgtatcggtaagagttggattgggtaatattgggcgaaggaatggaatcgtgggaggtgtagaagagaagcctgatacaagagatggttcaaaagcctactcaactgattgggccccagacccagtaa

SEQ ID NO: 70391 - DNA, 230 bp, Glycine max
  Clone ID: 700839177H1
gcaccatgagccaggaacagctcaagaaacctcaaggggagcaggaccccatcaaatacggcgacgatttcaaagtctccgacgaactcgctttcaaacccatcgcgccaagagacgcagctctcatgcaagccacggagaaccaagcattgggccaaactcaaaaaggaggtcccgcctcggtgatgcaatccgccgcaaccgaaaacctccgcgccggcgtcgtgggc

SEQ ID NO: 70392 - DNA, 227 bp, Glycine max
  Clone ID: 700839178H1
aaaaaggatagattattatgtatcgattgaatcaatgactattcatgattccataattgaatcaattacatactggatccaagctaaaggaatgttatggtaaaacttcgtttgaaacgatgtggtaaaaagcaacgtgcgacttgaaagacatgattagattagctgtggattcttacatccgccattttttctagtatatagaaatgaacatgctcttgactcga

SEQ ID NO: 70393 - DNA, 202 bp, Glycine max
  Clone ID: 700839181H1
atactagcgatactgataagagagataccaacaagaaaagaaaaaaagaagagttgagattccctttgaagaaaagatggcatcccataggcaaagctatgaagctggtcaaactaagggccgaactgaggaaaagacgaaccagacgatgggcaatattggagagaaggctcaagctgcaaaagagaagacccaggaaatg

SEQ ID NO: 70394 - DNA, 223 bp, Glycine max
  Clone ID: 700839182H1
tgtcaagccttactttagtggttctaaattgaaaagctttctagctggtcataatatcaccattactgatggtattgacaaaactagtgcaactttgcaatttagaaagttagcagattgtgattttctcaagagaaactttaagcagatgtctaatgttttgtgggtggctcctgaagacaaggcgagtttatggtcacaacttcattatgtttcgtgtaat

SEQ ID NO: 70395 - DNA, 226 bp, Glycine max
  Clone ID: 700839183H1
aagtaattcagcggctgaataccaagcggagaagatgagtcaggagcagccacggcgtcccaaaggccaaaaccccatcaaatacggcgacgtttttgtcgtctccggcgaccttgcacagaagcccgtcgcaccggaagatgctgccatgatgcaaagcgcggaaactcgagtgctcggacaaacccaacccggcggagaagcttccgtcatgcaatctgccgcc

SEQ ID NO: 70396 - DNA, 227 bp, Glycine max
  Clone ID: 700839185H1
ctcccccaagacaataataaaccctccctccccgcccctattctccacaaactcaacttgctcgacgccaccgatgccccccaatcctgggatgagattagcaaaacactccaagacctcaaatccccctccacctcaccccaacaacaacctcaacctccacaaaagaccaagtccttccacacggtggaagagctagacgccaagctcaaccccaagcccgagcc

SEQ ID NO: 70397 - DNA, 225 bp, Glycine max
  Clone ID: 700839186H1
gtcggatcagaatcgcacggtttacgtcgcgggcggacacgacgaggagaagaacgcgctgaggtcagcgcttgcgtatgacgtggccatggacgtgtgggtcccgctccccgacatgtcgcgtgagcgagacgagtgcaaggccgtgttccgacgcggcggcgcgctctgcgtcgtcggagggtactgcacggagatgcaggggcgcttcgagcggacgcggag

SEQ ID NO: 70398 - DNA, 227 bp, Glycine max
  Clone ID: 700839188H1
cttcaacaagttgaatcaaacagtgaaagtaaaacattgtgcaattaatcatcaactgcaagtagccagtgcataagatcaatggcgtcaagacagcaattcaaggaagacagagccgaggcagctgcaaaactcgcagcgaaagacatcggcgacatcaacagaacaaacgagcgcgacgaggggtacgacttgcacgacgaagccaacttcaagcaagcacgagc

SEQ ID NO: 70399 - DNA, 223 bp, Glycine max
  Clone ID: 700839190H1
atggaaacaaatttgtttaaattgtctcttgatgatgttgaaactcctaaaggttccatgttggatcttaaaatttctcaatctaaaattgcacttcccaaaaacacagttggaggaaccattctgcgtagtgatctattggcaaattttttgacagagggcaattttagagcaagtgttgatttgcagcgcactcatcgtattaaaggaatgattaaaatgg

SEQ ID NO: 70400 - DNA, 224 bp, Glycine max
  Clone ID: 700839191H1
ggaaaggctggcacagattgagagggctgagaggagaattgaaaatttggggagggagaaagataatctggaagctgaattacagagagtaagggattcggagaaggatgcacttaccagagctgtgaaactagaggagaaggtgcaacagagagagaaggatttagaagcccttttggacaaagataagacacacaggcgaaatagtgcccagattcttgaac

SEQ ID NO: 70401 - DNA, 225 bp, Glycine max
  Clone ID: 700839192H1
atctacattggatttgcatcctgatctattttagatcttagcttatgtttattaatatcatctttattggttaattgctgggaaactgaaatggaactacatctggaatattctggtcattagtgctttagaggccttactttaaaatttcaggataagatgccctgtaacttaccttttacaggttagaatgtttatagtcttttaactgttgtgtttaagtat

SEQ ID NO: 70402 - DNA, 226 bp, Glycine max
  Clone ID: 700839193H1
atagcacaacacagcagttacgcaaggtctttatttgttcttcctcaagcaccggcaacgcaaacggatgcattacaaaaaataaaatgagataagaaattaaaagaagacgacgttctctctcggttttgattcccaatggcaacgcgaaagctgattcgtgatttgttactctccaaacgatcccttcttcaccaccagggttggagtaggagtagaaggttac

SEQ ID NO: 70403 - DNA, 227 bp, Glycine max
  Clone ID: 700839194H1
gcaaactgagtttttccttgtgagtttgactcttgaagacattccaaaccatggaagcattcactttgtttgcaattcgtggatttacaatgccaaactcttcaaaagtgaccgcattttctttgccaaccagacatatcttccaagtgagacaccagctccactagtcaaatatagagaagaagagttgcataatttaagaggagatggaactggagaacgcaaag

SEQ ID NO: 70404 - DNA, 222 bp, Glycine max
  Clone ID: 700839195H1
ctaattgcaaagatgaataccaagcccgttttcttcttgtgcttcctctgtgcactgcttctcatctctgttgtggcaactgagccatccaaagatgagacacaagcagaagaaccaaagacacagccagatgcctggggaagaggtggaagtggggggcatgatggaagctggggacacggtggagactgggggcatggcggaggaggacacggtggagga

SEQ ID NO: 70405 - DNA, 231 bp, Glycine max
  Clone ID: 700839196H1
tgatctttgaaaatgcagggaggaaagaaagctggagagtccatcaaggaaacagctgcaaacattggtgcttctgccaaggctggcatggagaaaaccaaggccactgtccaggagaaggcagaaagaatgacggcacgtgatccgatgcaaaaggagttggcaacccagaagaaagaggcaaagatgagccaggcagagctggacaagcaggcggcgcgtcagcataac

SEQ ID NO: 70406 - DNA, 267 bp, Glycine max
  Clone ID: 700839201H1
ctcgagcgattttgcatgctcttctcttcccaagaataagcaccgctcaaacagataccatttttgaaactgcttcttctctgttttcttctctgttttctcctctgcttccattctgcatccactcttttctctcttcttctttgtttctttgtttctctgtctctcttggtccctcaccaaatgtaaagaaggattttctcacacccggcgccattagtccttctttcagattttaggtgtggttactagttttttggatttgga

SEQ ID NO: 70407 - DNA, 262 bp, Glycine max
  Clone ID: 700839202H1
gatgcatgtaagtggacaaatcggaaccacattcctgggaattgatcttcccaataggtatgtggtcctaataatggttttgaaatgtggagttctgagtgggcaaatcaaacttcatggcatttgagttttccttattgacaatcccaaacagtctacagtttttgatattctcttgggaatttctcaagattttgaaattgctggtaatactcttatgccagctttttctgttccacaggctactgccagatcttctgaa

SEQ ID NO: 70408 - DNA, 95 bp, Glycine max
  Clone ID: 700839204H1
gtctgatataatatattagcaactacgtagtcgaggttggaatattttgtactgaatgtcctcatgttttcttcaagtttagttaaaaaataata

SEQ ID NO: 70409 - DNA, 254 bp, Glycine max
  Clone ID: 700839205H1
gtcaactgattcctagcaaacatgctcgagagcttaactttgacatggaggatttggacataccatggagtgatcttgtcctaagagagaaaatagggtcaggttcttttggaactgtacatcgtgctgagtggaatggctcggatgttgctgtgaaaattttgatggaacaggattttcatgctgagcgcttcaaggaattcctaagggaggttgcaataatgaaacgtttacggcatccaaacattgttttg

SEQ ID NO: 70410 - DNA, 256 bp, Glycine max
  Clone ID: 700839206H1
accgcacgaatatcttgttgtttggagcgatccgagaaaaactctgtaaacatgttggtttaccaggacctccttacaggtgatgagcttctctctgactccttccgttacaaggaaattgagaatggaatgctgtgggaagttgacgggaagtgggttgttaaaggagcagttgatgtagacattggtgcaaacccttctgctgagggtggaggagaagatgagggagttgatgatgcagctgttaccgttgttg

SEQ ID NO: 70411 - DNA, 248 bp, Glycine max
  Clone ID: 700839207H1
cgtttaggttaatggaagagaaaaccgtgccggggattattgacaagttcgggtggtgcacgtgggacgcgttttaccttaacgtgcacccggaggaggtgcgggaaggaattaagggcctggtggagggagggtgtcctccggggttggtactgatcgacgacggttggcaaacattttgccgtgacgacgaagccgtgagcgacggggggagtttaaattgctctgtgccgggggagcagatgctg

SEQ ID NO: 70412 - DNA, 257 bp, Glycine max
  Clone ID: 700839208H1
cttttatcttcccaagatggagcattcaagggaagctaagatttggaacaatgtgtttgagaaagctgagaaggtagcaggcatcgaaagaggaagcataagggcaactgttctgatagaaacacttcctgcagtgtttcaaatgaatgaaattttgtatgaactgaaggaccattcagtgggtttgaactgtgggcgttgggattacattttcagttatgttaagaccttccaagctcatccagatcgcctcttac

SEQ ID NO: 70413 - DNA, 257 bp, Glycine max
  Clone ID: 700839209H1
cccggtcgccctacgcgactggcgcttcaaaaggtagttgacttgcttactcgttagagtaggggtcgcgagagagcagagcgtaccgccctgccatagtcgcgagtctgtttatagtcgcgactgttgtcatagtcaacaaggttgaaacttccaggaaaaaacttcgaattgggagggcgatcctcccggtgaactgaccgtaccccaaaccgacacaggtgaacaagtagagtatactagggcgcttgagagaa

SEQ ID NO: 70414 - DNA, 257 bp, Glycine max
  Clone ID: 700839210H1
ggagcatcagtgagagaaactgtttaggcacaatcaggaatgctgctaatgtctgctgtgttcagttctctgctcattcctcccatttgctggcctttggatctgcggattactcaacatattgttatgatcttcgcaatcttagaagtccctggtgtgtactggctggccatcgtaaagctgtgagctatgtcaaattcttggactctgaaacacttgtttctgcttctactgataatacattgaagatctgggat

SEQ ID NO: 70415 - DNA, 261 bp, Glycine max
  Clone ID: 700839211H1
cttttccttttcccttccgttggtgccattcgtgcagcaccgagctctctcatttctccggcgataactctcccttttccggcgaattcaccgcttcctcgatatgaatcccgagtatgactatctgttcaagctccttctgattggagactctggtgttggtaaatcatgccttcttctaagatttgctgatgattcatacattgagagctacataagcaccatcggagttgattttaaaattcgcactgttgagcagga

SEQ ID NO: 70416 - DNA, 260 bp, Glycine max
  Clone ID: 700839212H1
gttcttaaccagaagcgcgctttttcgcttttcaaagtctctcccttatgccccttcactctcccttaaaccctccatggtcaccttctcctctactcccaattcaggctggagaaatgcagcagaaggaggaagaagagacggaagaaccaattggacgtatgattctgccgaggcaagacgcgaggcagatgaaatgtctgagagtgccaaagaaacgatgaatgaaggctatgacagggccaaggatcaagcgcggg

SEQ ID NO: 70417 - DNA, 246 bp, Glycine max
  Clone ID: 700839213H1
aacgccgaaaaatcacaaagcggaaaatgaatatgcacgtcgacccgacccggacgaagcaggttcgggtcaacatgctccttcgtgttcatcgtgaacaccataaccctctcttcggcgcaacacgaggtcaaaagcccgtccatgaagttcagtattcccgaggcgcttattctcgccgttttgtccgcgcagaaccggtccagatcctcgatcaccaccaccgacttcggcgtcgattggagg

SEQ ID NO: 70418 - DNA, 260 bp, Glycine max
  Clone ID: 700839214H1
atcagttaaaaccagaattatctttctctactgaacctaaaactccctacccttcttctaccaaaatcaatgatcaccacttgccacaacactccagtgcaagtgcaacaaatgctcaatatccttcagctagaagtcatgatcagtttctacctgaatattcaagtcaaaccaaaaccccaaaaacctatggagacaaccaaaccactcaaacaaggcatcaagaagagaacaaaggcaatgataaaccatcaacaatc

SEQ ID NO: 70419 - DNA, 263 bp, Glycine max
  Clone ID: 700839215H1
caactacaagaaagaacttccttataaccaaaaccaacaacaactatggcaagttatcagaagcactacgatgatcagggtcgcaaggtcgacgagtatggcaatgtcaagaggcaaactgacgaatatggcaacccggttcatgccactagtgtcacttatgtagccaccaaaagtgttggtggctacaatgatgacgctaataagcaacatgatattactggtgtctatcccgagaaagacaccggtagacatcattttgg

SEQ ID NO: 70420 - DNA, 250 bp, Glycine max
  Clone ID: 700839216H1
agaaaacctaagcttagaattagaaacaaagaaaagaagaaaggaaagaattgatcgttgaaaatgcagggaggaaagaaagcgggagagtccattaaggaaacagctacaaacattggtgcttctgccaaggctggcatggagaagaccaaggccactgtccaagagaaggcagaaagaatgacagcacgtgatccggtgcaaaaggagttggcaacccaaaagaaagaggcaaagatgaaccaggcgg

SEQ ID NO: 70421 - DNA, 94 bp, Glycine max
  Clone ID: 700839217H1
gcactgtattgtacaattcctttatttgtgggatttgttgctcacacgataattcatgaaattatagaatggaatggtacctatggcatgggcg

SEQ ID NO: 70422 - DNA, 258 bp, Glycine max
  Clone ID: 700839218H1
ccagtgttgaagaggcctacaacaagctaatagttgaacttgagaaaagtgttcctacattggttggcattgaatgtcccaaggatgagaaacttcctcgtcgcaaaatttttgacaaacctaagacgcgctgcttcactattctccctatggagtttaatcttgtggttcgtcagaagtttttaaattttgtgaggttcattatgaagaaaagggacaagcttagttgtcaagttggaatcaacccatactccatgg

SEQ ID NO: 70423 - DNA, 250 bp, Glycine max
  Clone ID: 700839220H1
tatcatttatcagtatcgaatgctagtctaaatatatttatgatgaatattccgaacggtgataagtggaccttcccattaagcagatcctagatcagtcacctccgtgcagttctgtgccctgctcccaacaataacgccccggccacagcactagtacgaagacccaaaaccagagcaacagtgccacctacagccacccacttccagtctatgccattacccttttgtgcggtattactcatggcta

SEQ ID NO: 70424 - DNA, 256 bp, Glycine max
  Clone ID: 700839222H1
caactacaagaaagaacttccttataaccaaaaccaacaacaactatggcaagttatcagaagcactacgatgatcagggtcgcaaggtcgacgagtatggcaatgttgagaggcaaactgacgaatatggcaacccggttcatgccactagtgtcacttatgtagccaccaaaagtgttggtggctacaatgatgacgctaataagcaacatgatattactggtgtgtatcccgagaaagacaccggtagacatc

SEQ ID NO: 70425 - DNA, 257 bp, Glycine max
  Clone ID: 700839223H1
tgtaattgtagtagtagacagtagcaccatgagccaggaacagctcaagaaacctcaaggggagcaggaccccatcaaatacggcgacgttttcaaagtctccgacgaactcgctttcaaacccatcgcgccaagagacgcagctctcatgcaagccacggagaaccaagcattgggccaaactcaaaaaggaggtcccgcctcggtgatgcaatccgccgcaaccgaaaacctccgcgccggcgtcgtgggccgcc

SEQ ID NO: 70426 - DNA, 258 bp, Glycine max
  Clone ID: 700839224H1
cgtgaagtaaggttaagtctgttggtggagatagagaagcggaagcaagctgaagaatccatcaacaacatgagaagccaatgggaaagcattaggcaagggttatatcaagcaggaattattttgcctgcatatcttaatgccactgctgaggatgagcagctgacttctgatcccgtggaagatctatgtcaacaagtttatattgctaggttcatatcaaatgccattggaaaaggaattgccagggcagagttg

SEQ ID NO: 70427 - DNA, 257 bp, Glycine max
  Clone ID: 700839226H1
gagagacacaaaggatgttctggttgttactgccaaagggagcagtgcggagattataccctttctcaaaacgtgggtgaaccttcccatggccgttgggttcatgttgctgtacacaaagctagcgaatgttttgtcaaagcaagctcttttctactccgtgattcttccattcattgctttctttggggctttcgggtttgtgttgtaccctctcagcaactatattcaccctgaggcgtttgcggacaagcttc

SEQ ID NO: 70428 - DNA, 278 bp, Glycine max
  Clone ID: 700839227H1
tcggagttcggcacgcgcaactactaccttacaatcagaacgcagcaacaactcatcggcaagttatcaggagcactacgatgatcagggtcgcaaggttgacgagtatggcaacgttgagaagcaaaccgacgaatacggcaaccctgttcatgctgctagtgtcacctatgtagccaccagaactgctgctggtggttacagtgatgacattaataagcaacatgataccaccaatgcctacggcgtagacactggtagacagcattctagtggtg

SEQ ID NO: 70429 - DNA, 254 bp, Glycine max
  Clone ID: 700839229H1
aatttttgacaaacctaagacgcgctgcttcactattctccctatggagtttaatcttgtggtccgtcagaagtttttagattttgtgaggttcattatgaagaaaagggacaagcttagttgtcaagttggaatcaacccatactccatggaatggactggtttggccaatagattactgagtaagggcaacgatattctgtgttgcgattatgctagtcttgatggattgattaccaggcaagttatgagca

SEQ ID NO: 70430 - DNA, 263 bp, Glycine max
  Clone ID: 700839231H1
gagataccaacaagaaaagaaaaaaagaagagttgagattccctttgaagaaaagatggcatcccataggcaaagctatgaagctggtcaaactaagggccgaactgaggaaaagacgaaccagacgatgggcaatattggagagaaggctcaagctgcaaaggagaagacccaggaaatggcccaagctgcaaaggagaagacccaacaaacagcccaagctgccaaggacaagacttgcgacacttcccaagcggcaaagg

SEQ ID NO: 70431 - DNA, 265 bp, Glycine max
  Clone ID: 700839232H1
cacatgcaagaatttgtaagatctttctttttcaaaagggaagtagagaataaattgaatgaagcacttatatgaagctcggtttgagccaaaatgtttgaggttaagtgttttttgtctattatatgtcagctttttaatctttgcttccactatattgaacaagtagtaattacattctcctgattattctgttaatatagttcaggttgttttttctattagctttgtacatcaaatggttttatgattcaaaataggtttt

SEQ ID NO: 70432 - DNA, 254 bp, Glycine max
  Clone ID: 700839233H1
gagagaattgttgctctaataaagtttcgttaaactgcctgtaattctcttcctctttcaatcccctttctcaacacaatcaaaatttcttctggtttcttcgaatccgagatccgcttccaatctcgttaatgggtccattttattttggaacattttaatgggttctttcgcattgcaaacaatttagtcctcaaaagggtgttgtttcagatcctaggtttttctacatttgctcacatcccaacaattta

SEQ ID NO: 70433 - DNA, 259 bp, Glycine max
  Clone ID: 700839234H1
ctgaattccagtagttgttgtgttctgaagagagaacatgtcaagcaattcagatgcagcagcagcgacggtgcatgctcgtggccgtttggccatgctcgctgctcacctcctcccctttgaactcactgatcacgacgccctccgccctatccctctctccgctcagttgccgccgacgaacctcgccggaagtatgaccgtcgtcgacgacagaaccggcaagaagtaccagcttcaggtctccaaagaaggcact

SEQ ID NO: 70434 - DNA, 255 bp, Glycine max
  Clone ID: 700839235H1
cggctcgagcggctcgagctgaagcatctagtacatggagcaaagcagcatcacaatgtgaaaaatgtatatgtatggcatgcactagctggttattggggtggagtgaagccagcagcaaccggcatggaacattatgacactgccttggcatatccagtgcagtcaccaggcgtgctaggaaaccaaccagacattgtcatggacagcttggctgtacatggccttggcctagtgcacccaaagaaggttttc

SEQ ID NO: 70435 - DNA, 254 bp, Glycine max
  Clone ID: 700839236H1
gtcgcattcgtctcctccagagattcaacaaacgctccccacaacttgagaactttcgagactaccggattgtccagtttcagtcaaaacccaacacaatccttctcccccaccatgctgacgccgatttcctcctctttgtccttagcgggagagccatacttaccttggtgaacaacgacgacagagactcctacaaccttcaccctggcgatgcccagagaatcccagctggaaccacttactatttggtt

SEQ ID NO: 70436 - DNA, 249 bp, Glycine max
  Clone ID: 700839237H1
cggaggatctgttctgttccataaggtaatgcaaattccctctctttttttttcccactttttctttggtttcttcatttcatattatgtcatcatttctgaaaattttgatattgctgatgctgtctggttcatatcatagaaacttaattgaaaggttttctttgtagcaatatgagtaatacccatcaaaactttttctgtttgatgaaacaatttgatctcctccccgtttcgttatactcctct

SEQ ID NO: 70437 - DNA, 255 bp, Glycine max
  Clone ID: 700839238H1
gtgtgtgcaagcgtgtcatcagagtcaacaaatatgaatgagctactccaatggaatgacctctatggagaaggaggatcaagaaaaatgagatctctgagctatttcatgtaaagctctctctctgtatagcatttcttgcttaggctattcttatatcaccaactattgatgtggaaatcccatcattggttctgcctctctctattgtgatatatcatcataggttttctttcccctttttccaaccctcac

SEQ ID NO: 70438 - DNA, 255 bp, Glycine max
  Clone ID: 700839239H1
cgccgaagaaggttcatccaatccccgaagcccttcaccgcattgcaaccatgtcgaggagaaaggtcagagagccaaaggaagaaaacgtgattctgggcccagctgttagagatggtgaacatgtctttggcgtcgctcgcatctttgcctccttcaatgataccttcattcatgtcactgatttgtctgggagggaaacgcttgtccgcatcactggtggaatgaaggttaaggctgacagagatgaatcgt

SEQ ID NO: 70439 - DNA, 251 bp, Glycine max
  Clone ID: 700839240H1
gatatgcatgagctcattgccaagaaggaagagaaaagtgatattaacatgatggagttgctatggcaggagacacacaaggaatttgtgaagtggaaatttatgactgaccatcgccttactgaaatcatgacttctttgaaggatgttcagggaaagtatggtgaattgatgatttggaaaactacagttgcgcaacaacttatggaaataactaataaattgaatgatcttcaagcatctagggaatg

SEQ ID NO: 70440 - DNA, 258 bp, Glycine max
  Clone ID: 700839241H1
atatgatatagaaagagagagaagaagaaaagaagaacaaagatgcaatcctcaaaggagaagatgaaaaacatggcaagtgctgccaaggaacaagtcgacatctataaagccaaaatagacgagaaggcagagaaagcaacggcaagaacagaagaggagagggtgatagcccatgagcacgcaaaggcaaaggaagctggagcaaagatggagctgcatgaagctaaagcaaggcatgcagcagagaagctaagc

SEQ ID NO: 70441 - DNA, 255 bp, Glycine max
  Clone ID: 700839242H1
aaaagaaaagaagaggaaaaggagagtggagaggaagaaaaggattgaagttgttgctgtgagaaagagaaagagtgaaatcggagtttgggaaggaattgcaatcaatggatgtgataaagacgcagcaaatctcatctcgaccaatcgagaaggtggtggttcaccctctcgtgcttctcagcatcgtcgacaactacaacagagtcgccaaagacactcgcaagcgcgtcgtcggcgtcttgctcggctcct

SEQ ID NO: 70442 - DNA, 267 bp, Glycine max
  Clone ID: 700838635H1
caaaaagtttacgttacaaatcgcataataaccgtcctaagtttattgagagaattttgcaagtgtgagaaacatggcatctcgtcaaaacaacaagcaagagcttgatgaaagagcaaggcaaggagagactgttgtcccgggtggaactggtggcaagagcctggaggctcagcaacaccttgctgaaggaaggagcaagggagggcaaacaaggaaggaacagctgggtacagaagggtaccaggaaatgggacgcaaaggagg

SEQ ID NO: 70443 - DNA, 263 bp, Glycine max
  Clone ID: 700838636H1
ctcgagccgtttgaagaagcggttaagttgaacagggctctatcagaagcaacgtccaaggacactgttgctgaaattatggatcagttgaagagtgctatagatgatgaacggtatcatgatgcttcgagattgtgtaaatgcactggaagtggactggtgggttggtgggtagggtactcaaaagcctcagatgacccctttggtagaattatacatataagtcctggtatgggtagattcattggcaagagttacagtcc

SEQ ID NO: 70444 - DNA, 140 bp, Glycine max
  Clone ID: 700838637H1
gcggcatcgttgtattgttcttacacatctttctctctctcactttcggtttctaaaccaaaaccctaatcgagatcacaatcggatcgtaaacaaacagagagcagccatggacggtgattcgtcttggagtgctcgac

SEQ ID NO: 70445 - DNA, 259 bp, Glycine max
  Clone ID: 700838638H1
gcagaaaccccaacgtcagaaccgtcgatggcatgcgcgctatgtatggagaagactactatatctgcagatttcagaaaccaggggaaatggaggctcagatggctcaagttggcacagaacgatgatcttgcctattatgtttccaaatatgagaaatcgggcttcactggacccttgaactattaccgaaatatgaacttaaattgggagctgacggcaccatggactggagtgcaaatccaagtggcggtaaaat

SEQ ID NO: 70446 - DNA, 256 bp, Glycine max
  Clone ID: 700838639H1
acacggcggcgaacaggctgccacggcagggcacatgggacaacccatggggacccatcagacgtcagctatgcccggtcatggaaccggacagcccacgggccatgtcaccgagggagtggtgggctcacaccctattggaaccaacagaggcccgggtgggactgctacggcccataatacccgtgcggggggaaacccaaatgattatgggtatggaactgggggtacttacaattaaataatgatgatttag

SEQ ID NO: 70447 - DNA, 254 bp, Glycine max
  Clone ID: 700838642H1
ttaacaacagcacaaagcgggttactgtctgttcaagctaccatctctctctctctttcttagtgcctccttgccagaagttaaaatggcccaagaaactttcctattcacatctgaatcagtgaacgaggggcaccctgacaagctctgtgaccagatctccgatgctgtgctcgatgcatgcttggagcaggaccctgacagcaaggttgcctgtgaaacctgcaccaagaccaacatggtgatggttttcg

SEQ ID NO: 70448 - DNA, 254 bp, Glycine max
  Clone ID: 700838643H1
gaacggccggtcaatgcagttgcaatgtcacctctacttgatcatgtatgtatctgtgtgttgtaaattagttaaccttgtgttgtgatattcttgtcatttatctatgcaagtaatttttcttctgctttatttgattgaggtctttatccttgaaatcggcatcctataattttgggaacctggttaaatatattttcaacacctttctttcttgctagagatttattccacatagaccacaatcatgattc

SEQ ID NO: 70449 - DNA, 255 bp, Glycine max
  Clone ID: 700838645H1
cttaaattaattatagaaccatgtttgcaactaccaattcctccactttgtcacctttattctctttcagtagaacaacagcaacctctctgccttccaaacccacattctggaatttggttccaatgaaacaatcttcttctccggggcacttggccttagccttagacaatccacgtagaacacttcacgtgtcttgtggctccacatcaccacatgcttcccagagatcatcaattcaggggggtgaagctt

SEQ ID NO: 70450 - DNA, 259 bp, Glycine max
  Clone ID: 700838646H1
tgggtggactgaaatcggtggagaacgcgcacgatgattcggtgtgggcggtcacctgggtacccgcaaccgccaaccgaccaccgctcctcctaaccggttccctcgacgagaccgtcaggctctggcgctccgacgacctcgttttggaccgcaccaacaccggccactgcctcggcgtcgcctccgtcgccgcccaccccctcggctctgtcgccgcctcctcctccctcgacagcttcgtccgcgtcttcgatgt

SEQ ID NO: 70451 - DNA, 262 bp, Glycine max
  Clone ID: 700838647H1
atactagcgatactgataagagagataccaacaagaaaagaaaaaaagaagagttgagattccctttgaagaaaagatggcatcccataggcaaagctatgaagctggtcaaactaagggccgaactgaggaaaagacgaaccagacgatgggcaatattggagagaaggctcaagctgcaaaggagaagacccaggaaatggcccaagctgcaaaggagaagacccaacaaacagctcaaagctgcaaagacaagacttgc

SEQ ID NO: 70452 - DNA, 264 bp, Glycine max
  Clone ID: 700838648H1
ggctggccttgtcggtcaccgggacgtcaccgacgttaccggcgaccgtggcgtcacagtcacagaaactaaagtccctggaagacgcattataaccgaggctgttggtggccaggttgtggagcagtatgtggaggcaactccggttgaggcagggcgaacagtgcaattaaggagaatgccataacaataggagaggcattggaggcgacggcacagactgtgggtcagaaagcggtggatcagagtgacgcctccgcgatt

SEQ ID NO: 70453 - DNA, 145 bp, Glycine max
  Clone ID: 700838649H1
gtggagttagggctttacagtgtttctcttccttcttcttcttcttcttcttcttcttcgttgaatcgcgattgttctgtgcgagagaaagaagagagagatcgaaaatggcgttggctttcgacgagttcggaaggccgttcat

SEQ ID NO: 70454 - DNA, 139 bp, Glycine max
  Clone ID: 700838650H1
gtgagaagaagaagaaaagcgtggtgggtgcagaaaagaagaagagtgatagtgggcgagctcgtaaaaacgtgtacagaggaatcaggcaaaggccatggggcaattgggccgcgaagataagggacccacacaaggt

SEQ ID NO: 70455 - DNA, 142 bp, Glycine max
  Clone ID: 700838651H1
ctggttttggcgattcttatggaagttttggtggtagcgggtatggtcctggttcttataggtcacttggaggttttgggggtaggcttggtgattatggtgggtatggggctggagatgaatttggtggtagttttggggg

SEQ ID NO: 70456 - DNA, 260 bp, Glycine max
  Clone ID: 700838652H1
cacacaactactacaagtacttccttacaatcaaaaccaacaacaactatggcaagttatcaaaagcactacgatgatcagggtcgcaaggttgacgagtatggcaacgttgagaagcaaaccgacgaatacggcaaccctgttcatgctgctagtgtcacctatgtagccaccagaactgctgctggtggttacagtgatgacattaataagcaacatgataccaccaatgcctacggcgtagacactggtagacagca

SEQ ID NO: 70457 - DNA, 258 bp, Glycine max
  Clone ID: 700838654H1
ctgggttcgagacgaaaaaaaccggtttaatacacgaaccgttagaagatgattttgcacaatatattaacaggacattgagtgtggcggtgcatgatttaagaattcagcttggcttctccgcgccggctgaaatccgagccgtttattcatgcagtgggggacccactgcgctgagctcaaactcagctcggcttggtgatttatacgctgaagaggagaaggagttgttggtggaggttagagtgcccacgtcag

SEQ ID NO: 70458 - DNA, 256 bp, Glycine max
  unsure (1)..(256): unsure at all n locations
  Clone ID: 700838655H1
atttctctttatttattcaattataaaaaccttatcataaaactctatttatttacaaataacaactccttttaaattagtctacaaaaaatgggatgttacaagggtcattatgaattcttggtcatgccttttgggttgactaatgcatcatccacctttcaggcacttatgaatgaagtngttcaacccttcttaaggcagtttgcatgagtattttttgatgatatacttgtatatagtagtagccttgagg

SEQ ID NO: 70459 - DNA, 254 bp, Glycine max
  Clone ID: 700838658H1
ttcgaagcctctcgaatccaaactcaacagaacattcatttccctataaattcgacgtcgtttcgttccgctctcactccaagaaaacgttttgcagaagattccaatcggagctcagaaaaaaaagaaacctaatcgccgatcgcgtcgaaagtccctaagcttacatcctgcttctagatagttggtaatcttatctgagggtagtagctagtaccatgggagaagtggcagtaatgcactctgagcctctg

SEQ ID NO: 70460 - DNA, 254 bp, Glycine max
  Clone ID: 700838659H1
cgagaacaaaaaaaaaaacgtgattcgctcttctcttcgaataaaccacaaaaccaacaaacgagaagaggattgagagaagatggggttgtcgttcacgaagctgttcagcaggttgtttgcgaagaaggaaatgaggattctgatggtaggtctcgatgctgctggtaagacaaccatcttgtacaagctcaagcttggagaaatcgtcaccaccatccccaccatcggatttaatgttgagactgtggagt

SEQ ID NO: 70461 - DNA, 139 bp, Glycine max
  Clone ID: 700838662H1
aaatggccttgctcggttatcactggtcaacgacggtggcgttatagaacaaacatttttgtggggaaggtattctgtggaaatgtctgctgtagtttacaaggattgggtttttacagatcaagcattgcctgctgat

SEQ ID NO: 70462 - DNA, 262 bp, Glycine max
  Clone ID: 700838663H1
gcttctcctcctagccatggccactaccgcctactgtagctccaaagaaatgaaggctttaaagatggtccaaatccaggtctcacaagctaggagttgggttgatggctacgtgagattgcatggccttttggataaaaaatatgtggccctagaagactgtgtcaagctctatggggagagtgagtctaggctttctcacatgttgactgacatgaacgtttataccacacatgatgcacttacatggattagttctgtg

SEQ ID NO: 70463 - DNA, 267 bp, Glycine max
  Clone ID: 700838665H1
ctcgagccgttgctccaatgtgttctgacgccaggagatccatacatgcccttaccaaatgacgaaattattgcaagggtagcaaaacaggttttggcactgttcccatcatctcaaggtttggaagtgacttggtcttctgttgttaaaattggccaatctctgtaccgtgagggtcctggtaaagatccatatagacctgatcaaaagacaccagtgaggaatttctttcttgctggctcttacacaagcaggactacatagaca

SEQ ID NO: 70464 - DNA, 140 bp, Glycine max
  Clone ID: 700838666H1
cctgtattaacagtgaaaagtgcatctgaagagacagaatgcaaggacccgggggtggcagggatcgtttctttgattttggcgatccttttggtggttttggaggctttggttcctttggacctcccaggagtttaatc

SEQ ID NO: 70465 - DNA, 261 bp, Glycine max
  Clone ID: 700838667H1
cccaccgctacgaccccgaccggcaccaccaccccgtggatccatatgagcagaaccctagggagcccctcgcgtggggcggcggtggctaccacgcgccgggccagggcgatgtggaccccacgtcctacgtccgtgtgtacaccgtggagtccgacgccgacgtggcggggagaacaacctccaagagatgggtaatgagtgatagggatagaggaagagagatgcacgagtcttcttctggtttagtgagtagtaatg

SEQ ID NO: 70466 - DNA, 262 bp, Glycine max
  Clone ID: 700838669H1
ctcacagtcaaattgacgagaaagaggaggctccagatgaagatgatgacgacgacgtgcaatggctgacagatacatcacttgatgctgcccgtcaacgtatccaagaacagttaagtgctgtgacagctgatatggttatgctttctacagatgaaccagagaagaagaaaaaaacaataagtaacagaaatggtggttctcacaatggtaactcaatgcactacgggaccctggttggtgaagtgaaagcaaatttcaa

SEQ ID NO: 70467 - DNA, 261 bp, Glycine max
  Clone ID: 700838670H1
caaaaatgcaatctatgtccctgacgctgagcaagaggctctccaattcaaagcctctcttcagaatctcttccagcctcgtcgctcacgcatcctccgccacaacctctccgccgccaccttcgccgccagtcccctctccctccgccctcaacagcctcctcaccgctccgtggtccgccactcagtcacgcggaatcacgctttccggatctgatattagagtcgggaatctcattggaaaccgaggacgcgctcacg

SEQ ID NO: 70468 - DNA, 137 bp, Glycine max
  Clone ID: 700838671H1
cgatgtttcaatttgaaagttcaaagctcccctttcacatttcaattctctctcttttaaaccctgctctccattttgtctcttcctttctctctctacaaagagtgcgtgtgagagtgagagagagagagagaggg

SEQ ID NO: 70469 - DNA, 254 bp, Glycine max
  Clone ID: 700838672H1
ccattccagctcttaacaattacatgagacagagaaagggttgacggacagagaacccaccttttgttgtattgcagatccatccgctctgccaccaggtgaatggaaggaagtggcggtggcggtgcttcaccgtctgcaccggtgaagcagtatttgcacgatttctcgaagctgtttcagtactatctggataaatccactccacattccacgtacagatggattgggactttcgtgatagcatccatcta

SEQ ID NO: 70470 - DNA, 252 bp, Glycine max
  Clone ID: 700838673H1
ggaaaaaccttcaaatatgatataattggtgctggttcacattcttcaggagattttcctgaaaaggaagatcaagaaaaacccaaaaagattgatgccagattgagacaaagaatagatcctcaatacaatgaggttcaggctcagatggaaacaaatttgtttaaattgtctcttgatgatgttgaaactcctaaaggttccatgttggatcttaaaatttctcagtctaaaattgcacttcccaaaaac

SEQ ID NO: 70471 - DNA, 252 bp, Glycine max
  Clone ID: 700838674H1
ctcgagccgagaagctttgcagacttccaacgctttggaaattctcagcaaatatgatataatagtagatgcaacagataatgctcctacccgatacttgatcagtgattgctgtgtggttctaggaaagcctcttgtatcaggtgctgcactgggattggaagggcagcttactgtctacaattacaatggtggtccttgctatcgatgcctctttccaactccaccacctagaacagcatgccaaagttg

SEQ ID NO: 70472 - DNA, 251 bp, Glycine max
  Clone ID: 700838675H1
aaacggggtgtgtcccatttgtgggaagaaggtgggagtggatctcgttggacattttactacacaacatgggaacttcttgagggtgcagcgcaaaaggagggtcaggaaaggaggctctgcttcaacaatttctatattgagaaaagagttacaagaaggagccttgcagtcccttcttggaggttcttcatacttagcttcctcaaattccgagcccgatcctctgttatcatcatttatgtttaacc

SEQ ID NO: 70473 - DNA, 248 bp, Glycine max
  Clone ID: 700838676H1
aattctgttaaacttgttttattatactgctactatggagcaccttcctgttgaagtgattggtaacacattatctcttctcggttctgcccgagatgttgtggttgcttctgtaacttgtaaaaaatggagggaagcatggcgcaatcacctccacagtctttcattcaactactgtgattggcccctctttcatgactttacctctgctaggttggaaatactcatcactcagacaatcttccaaa

SEQ ID NO: 70474 - DNA, 261 bp, Glycine max
  Clone ID: 700838679H1
tgcagaccgagctagctagctagcaagcaagcacagagatggaggcaaagcgaggccatgccctcatgtgcttggcacgtgtttcactcttcctctgcgctctaaccctatccgctgctcacggaagcaccacggttcaagacatcgcgagaaagttgaaactcggggacaacgagcttctgcgcacggagaagaagttcaaggttttcatggagaattacgggaggagctactccacagaggacgagtatttgcgccgtt

SEQ ID NO: 70475 - DNA, 141 bp, Glycine max
  Clone ID: 700838680H1
ttgcactctgccctttgggaggagtttgtaacatggctgctctacctactgcggagttagtgatgcaaatgcaacacatgtagcaagtggtgatgtgagggtgctgcatccagtgttcaaggtttatggccaggccacggc

SEQ ID NO: 70476 - DNA, 263 bp, Glycine max
  Clone ID: 700838681H1
gaaaagatagccttgctgggtgccatacagtctctctttgaaggttcaatgtacacctttgtgtttctatggactcctgcattgagcccaaatgatgaagagattccccatggttttatttttgcaacatttatgttggcttcaatgttgggaagctcgcttgcatcgaggttgatggcccgttcttcactccgagtagagagctatatgcagattgtttttgcagtttcttctgctgctctgatgctccccattttgaccac

SEQ ID NO: 70477 - DNA, 263 bp, Glycine max
  Clone ID: 700838682H1
cttttagtgttttttctttatgagttttgctggttttggtccaacaacatagtgttttcatcatgggaaacgcttgtgcaaaaggaaaaccagttgctcatgtctcttcctccaatttttctggaggtaagaagcatgcaagtaggccaaagcagtattcaaattcttctgaacaactatctgctccaataacttcagaattaaatgttcccaaatccttctccagtaacctaaaatccttcagcttgaatgatcttaaagag

SEQ ID NO: 70478 - DNA, 259 bp, Glycine max; identical to SEQ ID NO: 58184
  Clone ID: 700838684H1

SEQ ID NO: 70479 - DNA, 256 bp, Glycine max
  Clone ID: 700838685H1
gttcaaatgagaactttgaaggccgaagaggggaaaggttccatgtgaacggcacttgcacatgggttagtcgatcctaagggacgggggaagcccgtctgatagcgctctgtgcgcgtactccgaaagggaatcgggttaaaattcctgaaccgggacgtggcggctgacggcaacgttagggagtccggagacgtcggcgggggccccggaaagagttatcttttctgtttaacagcctgcccaccctggaaac

SEQ ID NO: 70480 - DNA, 137 bp, Glycine max
  Clone ID: 700838686H1
agaagagggagagagagagagaaaataataagaaaaagaaaacttgaaaactttgagggattgattagaaaaagggacatggagattctcatcttccaatgatcccttcaaccccacaaattttcccgtttggattt

SEQ ID NO: 70481 - DNA, 254 bp, Glycine max
  Clone ID: 700838687H1
ggaagactattgacctagaacagggatgggatttcatgctgaagggcatcaccaagctcaagaacattctcgaaggcttgcccgagcctcaattcagctccgaggactacatgatgctttacacgaccatctacaacatgtgcactcaaaagcctcctcatgactattcccaacagatttacgacaagtataaggagtcttttgaagagtacatcgtatcaacggtattaccttctttgagagagaaacacgat

SEQ ID NO: 70482 - DNA, 248 bp, Glycine max
  Clone ID: 700838688H1
ggcgagagaatcggatgcccccggagcaaaggagtatgtgcatattcgaattcagcagaggaatgggaagaagagtctgaccacagtgcaagggctgaagaaggagttcagctacgagaagatcctcaaggacctcaagaaggagttctgctgcaacggaaccgtggtgcaggacaaggagcttggcaagatcatccaactccaaggcgaccagcgtaagaacgtctcccacttcctcgttcaggctg

SEQ ID NO: 70483 - DNA, 257 bp, Glycine max
  Clone ID: 700838694H1
gagtgagtaatcgagaaagagaagaagcatatatatcaaaatggctgcagagatggagagggagtcattgataactgaagctcctaatgcaccagttactgcacagagaagggtcagaaatgacttagaaaattctctaccaaaaccatacttgccaagagcattgaaagctcctgatacgggtcacccaaatggaacagcaggccacaggcaccacaacttatctgttcttcagcagcattgtgctttttttgatc

SEQ ID NO: 70484 - DNA, 252 bp, Glycine max
  Clone ID: 700838695H1
gtggcatccgatgtatcggtaagagttggattgggtaatattgggcgaaggaatggaatcgtgggaggtgtagaagagaagcctgatacaagagatggttcaaaagcctactcaactgattgggccccagacccagtaacaggttactataggcccattaaccacacccctgaaattgacccggtggagcttcggcataggttgctccgatcacctccactagagcctagaggagttgctggacacccatga

SEQ ID NO: 70485 - DNA, 252 bp, Glycine max
  Clone ID: 700838696H1
gttgtttgccatgaactgtaactgcactagtgttggccacatgccttcaaccaaagaggaaggtcacgattttcaggaggctaaagccaagacaacacaaactgcgaacaaggccatggaaactggtaaagatgggaaagaagccgcagagtcatggacagaatgggctaaagagaaactcactgaaggtcttggcttcaaacatgatcaagaatcaccactaagaaagtctctgactaagccggtgatgct

SEQ ID NO: 70486 - DNA, 263 bp, Glycine max
  Clone ID: 700838701H1
gagaagctcgtggtggtgttcgtgatgttgggaagttcgaaatgagaactgaagggggagaaaaaggaaacaaggatagaccagaactgaaaacacgaaccagagaggtaataggaagaacggagaaagaaagaggaagagaaagtggaggacaagtagtggcagagaaaggaagagaaacagaaactgcaaggggaagggttggtgctgaaaatgaaggtgcaagaacaaccgctgttataacttgcacgttggaaaaagga

SEQ ID NO: 70487 - DNA, 245 bp, Glycine max
  Clone ID: 700838702H1
gtgagaaacaaagaaaggaaataattgatctttgaaaatgcagggaggaaagaaagctggagagtccatcaaggaaacagctgcaaacattggtgcttctgccaaggctggcatggagaaaaccaaggccactgtccaggagaaggcagaaagaatgacggcacgtgatccgatgcaaaaggagttggcaacccagaagaaagaggcaaagatgacccaggcagatctggaccagcaggcggcgc

SEQ ID NO: 70488 - DNA, 248 bp, Glycine max
  Clone ID: 700838704H1
cggctcgagcttgcttcgtgcttgggatgcttagccgtgtcgatccaaaggtacaggctccacaggcgctctgcatctgccccacccgggagctggccattcagaacatcgaggtgctccgcaggatgagggaagtacacggggattgcatccgagtgccttgtgccattggaccgggatgcggttcatgtatcgaaaagggcacctattatggcacaggtggtgattgggaccccagggacagtcaa

SEQ ID NO: 70489 - DNA, 240 bp, Glycine max
  Clone ID: 700838705H1
aatgtgtgtttgtcacgagacccatagtgctgccaaattatagtaactctctttctctatctgaagaagaagaagttctgaagaagcatgtgtggaggtgctatcatctcagacttcattggtgtgcagcgtggccgcaacctcgccgcgcaggaactgtggtccgagcttgaccctttctctgacctccttggcttcgataccaccaccaccaccaccaaccaaccaccccttccagac

SEQ ID NO: 70490 - DNA, 246 bp, Glycine max
  Clone ID: 700838708H1
gttagatacttcgttcatcacggcggtggacagatcacaaccacgagatatccacttccgctgatgatggtaatgattctctgaatggtcacatcatatctactacagttggaggaaaaaatgggaagcccaaacagactaaaagttatatagcagaacgcattgtggggactgggtcatttggaattgtcttcctggctaaatgcttggtaactggcgagccagtggccattaagacggttttac

SEQ ID NO: 70491 - DNA, 242 bp, Glycine max
  Clone ID: 700838710H1
gagtaattgcggaatctgctagaattttctaataatggcgaaagacgttgagcaggtcacagagcaaggtgaatactccgcgaaggactaccatgaccctcctccggcaccgttgatcgacccagatgagctcacaaagtggtccttgtacagagccgccatagctgagttcatagcaacactcctttttctttacatcaccgtgttgaccattattggctacaagagacagagtgacacca

SEQ ID NO: 70492 - DNA, 241 bp, Glycine max
  Clone ID: 700838711H1
gcgacgcgtctggtgcactgcgagctgcgctcggcgaggcccgcggttcggccgagggaaccggccggtccggttcaggttacgatccccaaacccaaacccaaagcggcggaggcggaaggcgcgaacatcgttttgcagccgcggttgtgcactctcagatcctacggttcggatcgagccggggtgcttatcaagactcgcaaggagggtgaccatgatgacgtgtcacccttcttcg

SEQ ID NO: 70493 - DNA, 236 bp, Glycine max
  Clone ID: 700838713H1
caaacaaaaacattggatggcaacgacaactagaacaactttcctcaaacgacgcagcatctccgcttccgccgaatctccctccagctacaggatccgcttctctccgataatggactccaacgagtccttcccttccagcttctccaagtttaactccgccctcaccgcgggcctcttaaacccaatgtccccccctcccgacaagacccgatccagcccaaccctcttcgaaa

SEQ ID NO: 70494 - DNA, 238 bp, Glycine max
  Clone ID: 700838714H1
gccaccacaaattacatagtaactctttttctcgaatccacagagtgagactcatcgtgtgaacaacgataacggcatgtttgagcgtacttgaaaaatttgagcggccatggacgaaaccgccgtaacgacgaagcctgattggctcaacaaccgcgcgagggtcgccggagagagaaccgaagaatttttctgtggcggcgacgacgaagaggaatgcgacgacgaggcttgggac

SEQ ID NO: 70495 - DNA, 240 bp, Glycine max
  Clone ID: 700838715H1
ggctgcttcgaaagcttaataatttgtttatttccagaacatcatagttttcgcagcagcaaactaacaaattactcatatcatataataagatggcccgttctctctcgcaagccaaacgtattggtgtccttgttgctcaatctatctccctaattcccgttcatcggcgaggttacgcagtggcatccgatgtatcggtaagagttggattgggtaatattgggcgaaggaatggaa

SEQ ID NO: 70496 - DNA, 241 bp, Glycine max
  Clone ID: 700838717H1
cgagcttcgatagtgatttagcagattcttcctttgcggtcgaatcatggagcccatggacatcgttggtaaatcaaaggaagacgcttcgcttcctaaagcaacaatgacaaaaattattaaagagatgttacccccagatgtacgtgttgcaagagatgcccaagatctattgattgagtgttgtgtagagtttaaaaaccttgtctcgtaagaatccaatgaagtctgtaatagagag

SEQ ID NO: 70497 - DNA, 252 bp, Glycine max
  Clone ID: 700838720H1
aaagaagaaaggaaagaattgatcgttgaaaatgcagggaggaaagaaagcgggagagtccattaaggaaacagctacaaacattggtgcttctgccaaggctggcatggagaagaccaaggccactgtccaagagaaggcagaaagaatgacagcacgtgatccggtgcaaaaggagttggcaacccaaaagaaagaggcaaagatgaaccaggcggagctggtacaagcaggcggcgcgtcagcataaca

SEQ ID NO: 70498 - DNA, 241 bp, Glycine max
  Clone ID: 700838721H1
gggactctctgaccttggatcctgaatcagctacaattgagaggaatcgatctctcaccaaagaggaaattaatgctttctggaaaacaaagaaggaggccgagttagaacacctcaaagctctttccaaattatctgagactattcgggcccgcaaatgcgagtattcagaaaattctcacaggtcaagtaccgcgaccgtggccttaggcatggatggtgacaaaaaaagtttggagaa

SEQ ID NO: 70499 - DNA, 246 bp, Glycine max
  Clone ID: 700838722H1
atttgaaagaaattttcagtaactttggtgaggttataagtgtggagttggcaatggatcgaactgtcaatcttccaaaagggtatggatatgtgcagttcaagacaagaggggaggctgaaaaagcattattgtacatggatggtgcccaaatagatggcaatgtcatcaaggcaagatttactctacctccaaggcagaaagtttcaccacccccaaagacttctgctgttgctccaaagagag

SEQ ID NO: 70500 - DNA, 247 bp, Glycine max
  Clone ID: 700838724H1
gaaaaaccatctcaacctcaggaagctgaagagaggccatcagaaggaattggcgaaactgtgaggcagtatgcacaaaaaccaaagccaagtgaaagaaaccctcagaaggagggaaccggaagcatcgtgtttacagcaataggcgaaacagtaagcagtgccggtgagaaggtaaagaaaccgtttaaaaacactatgggaggagaaagtgaaggaggaggagggaaagaagaggggaagagtg

SEQ ID NO: 70501 - DNA, 240 bp, Glycine max
  Clone ID: 700838725H1
ggaaactcgtgcgatatgccgccgcctccaacctcgcccgatcgcggcggttctccgcgcgattcctggtccgtgcattgttcacaagcgcggtgccgacatactccatgacccctggttcaacaaggatacagggtttcctttgactgaacagggatatgttggggcttcggggcctcttacctcctcgtgttatatcctttgagcagcaatatgatcgctttatgaattcattccgat

SEQ ID NO: 70502 - DNA, 239 bp, Glycine max
  Clone ID: 700838727H1
ttcagagacagacactgccaactatatcatcgacagatggtatagaaaccacgggaatagttggtggtaacatggcttccaaaagaaaaagaaaggcatggtcagaagaagaggacatgcagctacgagctgctgttcaaagatggggtgaagggaattgggcaaccatggcaaaaggagacgactttcctattaagagaagtgctacacagttggctcagaggtggagcattttacga

SEQ ID NO: 70503 - DNA, 240 bp, Glycine max
  Clone ID: 700838728H1
ggacaagaaggatttgtatgttaaaagtgttcaaagaactgtcatttggatgggaaaaagacaggaaactgtggaagatgtcccctgtggtaacactgttgctatggttggtttggatcagttcataacaaagaatgctactttgactaatgaaaaggaagttgatgcccatcccattcgagctatgaagttttctgtctcacctgttgttcgtgttgctgttcaatgtaaggttgcatc

SEQ ID NO: 70504 - DNA, 241 bp, Glycine max
  Clone ID: 700838730H1
cagaatctgaaaagagtgaaaattcaggatgtgctaatactaagggtctatttatacttgatgaagacatcagtaacaagactgagttggaatttggtttaaatggcttgaaggatgtgcctgttactgtgagcactaatgtccaagagatggtaaggccagcttctcaagaaaatgtggcacactctagggtttttaactcctccatatccacagaacaatctttggattgtttacctgc

SEQ ID NO: 70505 - DNA, 246 bp, Glycine max
  Clone ID: 700838731H1
agggaaacaacaaggacgcaaaatgacacaatagcccttcttccctgtttccagcttttctccttctctctctccatcttcttcttcttcttcactcagtcagatccaactcctcagataacacaagaccaaacccgctttttctgcatttctagactagacgttctaccggagaagcgaccttagaaattcattatggtggcaacagctgctacttcatcatttttccctgttacttcaccctcg

SEQ ID NO: 70506 - DNA, 216 bp, Glycine max
  Clone ID: 700838732H1
ctactacaagtacttccttacaatcaaaaccaacaacaactatggcaagttatcaaaagcactacgatgatcagggtcgcaaggttgacgagtatggcaacgttgagaagcaaaccgacgaatacggcaaccctgttcatgctgctagtgtcacctatgtagccaccagaactgctgctggtggttacagtgatgacattaataagcaacatgata

SEQ ID NO: 70507 - DNA, 206 bp, Glycine max
  Clone ID: 700838734H1
gtccattatgaaaagagaaagaggtttaaaattgacacattgattccttttttgcttatatgatttttggtgaactgtatgcatcaaaaggtgcatgtacggctcttaaggaaaaaaatggaatcctaatcaatcgactttatcgagaaagattactttttttaggtcaagaggttgatagtgaaatatcgaatcaactaattagt

SEQ ID NO: 70508 - DNA, 249 bp, Glycine max
  Clone ID: 700838735H1
tctcgagccgaatcggctcgaggattgttgtgactcgttcttctgcgtcgttatcttcttcttttgttgtttgtgtgttagttttttctctcacctgaaaatgtcttgctgcggtggtaactgtggttgcggaagcgcctgcaagtgcggcaacggctgcggaggctgcaagatgtacccagacttgagctacaccgagtcaaccaccaccgagaccttggtcatgggagtggcaccagttaaggctca

SEQ ID NO: 70509 - DNA, 246 bp, Glycine max
  Clone ID: 700838737H1
caaaagaggaagatggagctgtggaacagagcccgaagctttgcggaagaagcagcgaaacgatcccaggaactgtcgttgggagctagagctacccaattcaccaacatcatagcagaaaccaccaaagaaatcgcagcgcaagcttccaagcacttgccccgaccttatgccataaacgacgtcgatctccaccgttttggcatcaccgaagagttgagggactttgtcaaaggaatcaccatc

SEQ ID NO: 70510 - DNA, 243 bp, Glycine max
  Clone ID: 700838738H1
cgactctctcgaagttagtttaggtttagggttaagttttcttttccttcaatcttgcaaattcttctccgcacgatgcctcccgggcctctctgaaatccccatgacgtgaacgccccgatgcacgtgccaaatcgccgccgttcgtgttgcagtttagccccaattttcccacggttgatctgtgtcaaacttcttttcgaacaccacacgtgttctctgaaaacggagctagtcctaaag

SEQ ID NO: 70511 - DNA, 243 bp, Glycine max
  Clone ID: 700838739H1
gttcgttcgattgattcaatatcgatgaacctagaaaagagagttgatacttggaatgggcgtataacaaaaattcttggcattccttggggattcttgattggtgctgagctaacgatagcgcaaagtcgtatttctttggttaataaaattcaaaaagtttatcgatcccagggagttcacattcataatagacatatagaaattattgtgcgtcaaataacatcaaaagtcttggtttcc

SEQ ID NO: 70512 - DNA, 244 bp, Glycine max; identical to SEQ ID NO: 68658
  Clone ID: 700838740H1

SEQ ID NO: 70513 - DNA, 235 bp, Glycine max
  Clone ID: 700838741H1
gtcttcttgacccgacgatggcgagtgaaaagttggtgctggcagtgatcagggccgcgaggccaaccttccgcaaccaaaacgacaaaatcgcatttgccgttcactcctccttcctcacctccggctatgtcctcaccgctacaggtccccaggccctctccgacaatgcgttttctgacccatccaatgacgaggtatccgttgatcattggaacgagctgaacgatgcgta

SEQ ID NO: 70514 - DNA, 241 bp, Glycine max
  Clone ID: 700838742H1
agaagatggtggttgcaatgatgcttatatttcttctaatttctacgcaaatggagagcgttgagcccgatgctgcagattgcttggatggttgcactactgcctgtgttcaaagcgactcgaggcttcaagcacggtgtgatcgcaagtgcagcattagatgcggtccagattccacaatcaaggaggacatgggttgagtatgtaaagtcacagcgcaagcaagcagtgtctgcttgac

SEQ ID NO: 70515 - DNA, 241 bp, Glycine max
  Clone ID: 700838743H1
cggctcgagaacagcaacaattttcatcttatgagttactactttattagagtctagcaatcaataatttattcttcatcatcatcaacatcaaccaccacatgaaactctctctctctctctctctcacacacacacacagtgtctcagactcaactcaacataaacactactgatcactgatcaccacaaacacttccaccacctcaacctaacatgtcatcgcagggttacctccacc

SEQ ID NO: 70516 - DNA, 242 bp, Glycine max
  Clone ID: 700838744H1
gcctcgagcaggacccagacagcaaagttgcctgcgaaacatgcaccaaaaccaacttggtcatggtcttcggagaaatcacgaccaaggccaacgttgactacgagaagatagtgcgtgacacctgcaggaacatcggcttcgtctcaaatgatgtgggactggatgccgacaactgcaaggtcctcgtcaacattgagcagcagagccctgatattgctcagggtgtaaacggccacctt

SEQ ID NO: 70517 - DNA, 243 bp, Glycine max
  Clone ID: 700838745H1
cgagaaagttgaaactcggggacaacgagcttctgcgcacggagaagaagttcaaggttttcatggagaattacgggaggagctactccacagaggaggagtatttgcgccgtttggggattttcgcccagaacatggtcagagcggcggagcatcaggcgctggaccccaccgccgtccacggcgtcacgcagttctccgatctcaccgaggacgagtttgagaagctctacactggcgtca

SEQ ID NO: 70518 - DNA, 242 bp, Glycine max
  Clone ID: 700838746H1
aaagaccggaacataaggcgggcaagagagtttgtttcttctctcttcaatggaaggcggcgaacaggttctcccttcggccaccaccgtcgccgccgccggctatcccaacgtctctcctcctccgctcgctgatcctgtcggtgcttccgatctcgctgctgctgcctcggacgacgttgttgcggaacctgaaattcacgcgctgatttcagacgaagagcacgatcacgatcacgatc

SEQ ID NO: 70519 - DNA, 246 bp, Glycine max
  Clone ID: 700838747H1
gcattgcatttcgttactttcatttgttgtgcaatcttacaagttccaaacttctctattttgttattatttgttctcacttctcacacatacagatttaagccttttatattatcatggcttctaaggtggtttcggttttggttatagcgatgatgttgtttgccatgaactgtaactgcactagtgttggccacatgccttcaaccaaagaggaaggtcacgattttcaggagtctaaagcca

SEQ ID NO: 70520 - DNA, 76 bp, Glycine max
  Clone ID: 700838748H1
cggtgcgctcagtgtgggtccagatgttgatgttaggtttttcgcctcacaagcagtacaatcgtgtgatcaagtc

SEQ ID NO: 70521 - DNA, 246 bp, Glycine max
  Clone ID: 700838750H1
caagaggctgctgaggcataccttgttgggctctttgaggacactaacttgtgtgccattcacgccaagcgtgtgactattatgcccaaggatattcagctggcaagaaggattcgtggtgagcgtgcttgagttggtgcgttctgtgtttgtgaagatggattgttggtggctgcggatggtgttttgttactaagttttctttttgttgaagcctataggttattagggaaaaataggtgttta

SEQ ID NO: 70522 - DNA, 246 bp, Glycine max
  Clone ID: 700838752H1
ctcgagccgaatcggctcgagaaaaaaaatccaaaaaaagaaaaataaaacgcttaacgcagtacaaaaaccacagtttcaatcacatctctctctctctttctcgcaaatttctactttctggtaagattttctctctcgttttctcgggaaaacctcgggatctgtgtttgcttgacgcgattccacgatttcccctaatttttcggtctgaaattgcgattttttgttcttcgtttttgtttc

SEQ ID NO: 70523 - DNA, 245 bp, Glycine max
  Clone ID: 700838753H1
caagccccactcaaccaccacacctctcctcgttcacgctacccctttctgctcttcttctacctttcaagttttaaaagtataaagatggcagagacattcctatttacctcagagtcggtgaacgagggacaccctgacaagctctgcgaccaaatctccgatgctgtcctcgacgcttgcctcgagcaggacccagacagcaaagttgcctgcgaaacatgcaccaaaaccaacttggtcat

SEQ ID NO: 70524 - DNA, 243 bp, Glycine max
  Clone ID: 700838754H1
gactacgatcttcgatagtgctttctcagattcttccttcgtggtaaccggtcgaatcatggagcccatggacattgttggcaagtcaaaggaagacgcttcgcttcctaaagcaacaatgacaaaaattattaaagagatgttacccccagatgtacgtgttgcaagagatgcccaagatctattgattgagtgttgtgtagagtttataaaccttgtctcgtcagaatccaatgaagtttg

SEQ ID NO: 70525 - DNA, 242 bp, Glycine max
  Clone ID: 700838755H1
aaggaaagaagcagaggctgaggaaacaatgaagatattggtgaccggcgcatccggtttcctcggtggaaaactctgcgacgccctcgtccggcaaggttactctgtcagggttctcgtaagatccaccagcgatatctccgccctttctccgcacatcgaaatcttctacggcgacatcaccgactacgcctctctcctcgccgcctgcttctcctgcactctcgtcttccaccttgccg

SEQ ID NO: 70526 - DNA, 243 bp, Glycine max
  Clone ID: 700838756H1
ggcattgttgttggagtgagcgaagaatatgtattctagagattcatggggtggaccgttggagataaacgcgacggactcggcgacggtggacgagcggagccggaacctgcaggacgttgacagggcagcgctgtcgcgtcccttggatgagacgcagcagagctggctccttggccccggcgagcagacgaagaagaagtacgtcgatctcggctgcatcatcgtcagccgcaagatctt

SEQ ID NO: 70527 - DNA, 240 bp, Glycine max
  Clone ID: 700838757H1
agaaaacctaagcttagaattagaaacaaagaaaagaagaaaggaaagaattgatcgttgaaaatgcagggaggaaagaaagcgggagagtccattaaggaaacagctacaaacattggtgcttctgccaaggctggcatggagaagaccaaggccactgtccaagagaaggcagaaagaatgacagcacgtgatccggtgcaaaaggagttggcaacccaaaagaaagaggcaaagatg

SEQ ID NO: 70528 - DNA, 239 bp, Glycine max
  Clone ID: 700838758H1
cctttttatctctatctttcttcacatcttaaccttgttcttaccagatggctgcctcagttaaactcttatttttgtcctttctctcgttgttcatctctttctccatagctcaaacctctttcagaccaaaggcacttgttcttcctgtaaccaaagatgtttctgcctcagttcctcagtatgtcacacaaatcaaacaaagaaccccacttgtggcagtgaaactaactgttgat

SEQ ID NO: 70529 - DNA, 241 bp, Glycine max
  Clone ID: 700838759H1
tgcagaccgagctagctagctagcaagcaagcacagagatggaggcaaagcgaggccatgccctcatgtgcttggcacgtgtttcactcttcctctgcgctctaaccctatccgctgctcacggaagcaccacggttcaagacatcgcgagaaagttgaaactcggggacaacgagcttctgcgcacggagaagaagttcaaggttttcatggagaattacgggaggagattatccacaga

SEQ ID NO: 70530 - DNA, 239 bp, Glycine max; identical to SEQ ID NO: 68687
  Clone ID: 700838760H1

SEQ ID NO: 70531 - DNA, 240 bp, Glycine max
  Clone ID: 700838761H1
aaggcttatggtggatacctaggcacccagagacgaggaagggcgtagtaagcgacgaaatgcttcggggagatgaaaataagcgtagatccggggattcccgatataggtcaacctttcgaactgctgctgaatccacgggcaggcaagagacaacctggtgaactgaaacatcttagtagccagaggaaaagaaagcaaaagcgattcccgtagtagcggcgagcgaaatgggagcag

SEQ ID NO: 70532 - DNA, 227 bp, Glycine max
  Clone ID: 700838764H1
aagagattgtggaatttgtgatcacacaacataagcatatatatagaaagatgtcaagggcacaaggagcacaaccaaaggagtcaaaaacagcaacaacatatgagtcagtagaaggaggagagaaccgaacaaggactgacttgctttcaagggaggatcaaggctgcattcaagtggaaaaacttcaggagaaggtccatgatcctgctggcaaaggtggtcct

SEQ ID NO: 70533 - DNA, 255 bp, Glycine max
  Clone ID: 700838765H1
gtgactcgttcttcttcgtcgttatcttcttcttttgttgtttgtgtgtttgttttttctctcacctgaaaatgtcttgctgcggtggtaactgtggttgcggaagcgcctgcaagtgcggcaacggctgcggaggctgcaagatgtacccagacttgagctacaccgagtcaaccaccaccgagaccttggtcatgggagtggcaccagttaaggctcaattcgagagtgctgaaatgggtgttcccgctgaga

SEQ ID NO: 70534 - DNA, 214 bp, Glycine max
  Clone ID: 700838766H1
ctgtgttaccgtcgactcctgaatccatattgcaaaggcaaaacacagaagattctgccaggaatggatccttatcaactccaagcacaaggcaagagccttcaagttctcgtgttgtaaatatcaatattctggctgctagtggaccccaaaacaaccaagaatctgagagacaaataccaagcagtgtacttcagtttttaaggacattctt

SEQ ID NO: 70535 - DNA, 247 bp, Glycine max
  Clone ID: 700838767H1
atcgcgaacatcccaatgaccaaaaatcctccaatatatatatataacttccccgttctctcatactcaacagaaaattgaaaaccaacataacaatgtcgttgattccaagtttcttcggcaccgggcgaagaaccaacgtcttcgaccccttctccctcgacgtgtgggacccattccatggcttccccggcaccaccgccctctccgctccgcgctccgagacggaggccttcgccaacacgcg

SEQ ID NO: 70536 - DNA, 248 bp, Glycine max
  Clone ID: 700838768H1
gcggctgtgtgattaattatgttccactttctcaccaacttctttttcttcttctgggttcccattcaatttttatttctttcacttcacggaaacgcaaaactctcttgtctttgttcatcttcctctgttcctcagaacaattctcactaccccttataaatatatactcaagatgaagtgtttcttcttcaaggagaagtgcaaatccgccccggaactgcacaagaagacaacccccgccgtga

SEQ ID NO: 70537 - DNA, 245 bp, Glycine max
  Clone ID: 700838769H1
tgccagtagtcatatgcttgtctcaaagattaagccatgcatgtgtaagtatgaactaattcagactgtgaaactgcgaatggctcattaaatcagttatagtttgtttgatggtatctactactcggataaccgtagtaattctagagctaatacgtgcaacaaaccccgacttctggaagggatgcatttattagataaaaggtcaacacaggctctgcctagttgctttgatgattcatgat

SEQ ID NO: 70538 - DNA, 243 bp, Glycine max
  Clone ID: 700838770H1
aaacacttatcatattactaacaaaaatggaactaacattccctcatcaagacgaagatgattccgttgtttctgattgcgagagcggtgtttcgggcagtggagtcgtggtggcaccaccaccaccaccaccacaacaacaacaacgtggttttttcgttaggcttggagaaggtgacgtggttcacgatcttatcaagacaaggtttattcgtggcctcggcatgctcgggcctaaaaccg

SEQ ID NO: 70539 - DNA, 240 bp, Glycine max
  Clone ID: 700838771H1
ggccaacaacaacgaagaggaagaggaagcagtggcgccaatggtgaagttgggttcttacggtggtgaggttcggttggtggttggtggggaggaatccgctgcggaggagaccatgctgctttggggtattcagcagcccacactttccaaacccaatgccttcgtctctcaagcttccttgcaactctccctcgactcttgtggccactctctctccattcttcaatccccttcctc

SEQ ID NO: 70540 - DNA, 244 bp, Glycine max; identical to SEQ ID NO: 67315
  Clone ID: 700838772H1

SEQ ID NO: 70541 - DNA, 241 bp, Glycine max
  Clone ID: 700838773H1
tacaagaaagaacttccttataaccaaaaccaacaacaactatggcaagttatcagaagcactacgatgatcagggtcgcaaggtcgacgagtatggcaatgttgagaggcaaactgacgaatatggcaacccggttcatgccactagtgtcacttatgtagccaccaaaagtgttggtggctacaatgatgacgctaataagcaacatgatattactggtgtctatcccgagaaagacac

SEQ ID NO: 70542 - DNA, 240 bp, Glycine max
  Clone ID: 700838774H1
ggaatcccttctggatttccgctcacagttatttgtaatagcatttttaatgagatgctcattagatatagctatgaaaaattactgcgccaggctaaagctccaagtatgtttttacaatccttcaaaaattttgtttctttgtgtgtgtatggtgatgataacttaattagtgttcatgaatatgtcaagccttactttagtggttctaaattgaaaagctttctagctggtcataat

SEQ ID NO: 70543 - DNA, 73 bp, Glycine max
  Clone ID: 700838775H1
cattctcatatcctcaatcaccccccctcgcactcgctcttcccttcctctggtggcgacaatgtcgactcct

SEQ ID NO: 70544 - DNA, 241 bp, Glycine max
  Clone ID: 700838776H1
gtaaacaagcagcaagtaatgaagctgccaaagagagaaacaagcaggcaaataaggaggcaacaaaggcaaaagatgtcacaagagagaagggtcaacaaggcaatcttaaaacaggaaatgagacacaagacattggccaaaagggttatggtggagcaaaggataccattggtagagtggacaacattactacaccacttgctaaaaaggctcaagttgctggtaacaccactgttca

SEQ ID NO: 70545 - DNA, 241 bp, Glycine max
  Clone ID: 700838777H1
ctcaaagggtgtcctgagaaggaatcacacaagagaaattttgggtggatcttggcaatttaaatttggtcactaaatagtaagaaagaaaaccatagtttatatagttttcatgtccttgctaacggtggcgcaccaaagggggtcaggtgagtttatgcggttcacggaaagtcatggcggcggtggtggcggtgacggcgatggtgaatatggttatggacatgatgatggtagaggt

SEQ ID NO: 70546 - DNA, 244 bp, Glycine max
  Clone ID: 700838778H1
aaaacttccacttgagagaaaagtagtgtattaagactacaaattttcaatttttcaatggcgtcgaggcaacaaaaagaggatcgagctgaggcagctgcgaaagttgctgcgaaagaactcgaacaactcaaccgagaaaaagaccgtgatttcagtgttggtgttgcagaccaacaccaacaagaagaacatcagttagatcaacaaaagcgtggtgtaatcggatccatgttcaaggcgg

SEQ ID NO: 70547 - DNA, 246 bp, Glycine max
  Clone ID: 700838779H1
ctcaatcctggttttggaattcgacaatggagcagaagaggagcagcaagatgtacaacctgttcgtgaagcacttggacgggaaaaccctaaccctcctattcccctctccgatcctctacgcgagttccatcaaggatcgcctcttccaactcactggaatccccgcccaccaccagcgcctcgtcaccggctgtcgccacctcaacgatgacaaatccgctatccagtgctccccgggggacg

SEQ ID NO: 70548 - DNA, 238 bp, Glycine max
  Clone ID: 700838782H1
caaacgcacatgtcgccacttccaaggtgtggaaaccgttaaggcagatctatcgtcgaacaaagtgactgttaccggcaaattggatgccgagaagctgcgagataagatcgccgagagaaccaagaagaaggttgacatcatctcagctccgcccaaaaaagaagccgccgccacggaaaatccaccggagaagaaggttgaagagaagaaacctgaagagaaaaaaccaaagaaa

SEQ ID NO: 70549 - DNA, 243 bp, Glycine max
  Clone ID: 700838784H1
gtagtgatgtaccatagtgctcagttattttctagagctaacttatttcttttataatttgttctcagattcctccattgttgatattctccggcctaagtgcagcatttggaggtaacttctgttctagcctatttcttagatttatattagggccttcaaattttaatagtgctcactgctgaatatttgaaaactattgtgttgtagtggctttaacataaaaagaagcatgaaatgata

SEQ ID NO: 70550 - DNA, 241 bp, Glycine max
  Clone ID: 700838786H1
cggcggcgttaaaatcgttaaatcgaacggttccaaacgctggacgttgctcaaaggacgaacgtgcttccacaacgcgtggagcccaacggagaagaacgtgatatacacctccgtcggtccaatcttcgagtcggtttataaaacggttcaaatcgcgcgcatcgagttcgacccggttcatttaactaacgaccgtgaagatgttccgtttaagttaacgattctcacgagagaagac

SEQ ID NO: 70551 - DNA, 239 bp, Glycine max
  Clone ID: 700838787H1
gctgagagcgttaaaattaggatgggggcgattacatgtgatgagatgggtgaagattatgtctctgtctctctgaagatgcatgggaattttatgcaaggttgaatttaactgatgactcatgcgaatcagagtggctgtatactttgtggcgcagggtaattaatacgggaaaggggaatggtaattaatgctatattaacttttggtcaaattagcattgttacaggtcgaatatg

SEQ ID NO: 70552 - DNA, 242 bp, Glycine max
  Clone ID: 700838788H1
cccatgctttccactgaacttgcttgccctacatatcaatgacgaggaatgcctccgccgctctcttccgtcatcgcgctgccattctcaagtccgcacatttacatcacgaatgtttcactgaaattatcttacgcaaatgcgtgccgttggattaccgttgctcgtctttcttatggcaccgcaattcatattcaactggtttcaccagcgtgcatggcgaaacgccctctgctgagtat

SEQ ID NO: 70553 - DNA, 239 bp, Glycine max
  Clone ID: 700838789H1
gtgggaatcggattaggttctgcgtgcacaggcgaaaaccctaatcctgaggcactgaaagtgtgatatggcaagagtcatttcctcttcctgcgcacgcctcgcaatgcgcctcttctccaccaccaccacagccaccgcgttcgccgtcactttacccaaaccctcatcactctccctctcatcgcgtcgattcctcttccctctctcccatgccatcgtccctccctccacccgcg

SEQ ID NO: 70554 - DNA, 241 bp, Glycine max
  Clone ID: 700838791H1
tgcagaccgagctagctagctagcaagcaagcacagagatggaggcaaagcgaggccatgccctcatgtgcttggcacgtgtttcactcttcctctgcgctctaaccctatccgctgctcacggaagcaccacggttcaagacatcgcgagaaagttgaaactcggggacaacgagcttctgcgcacggagaagaagttcaaggttttcatggagaattacgggaggagcttatccacaga

SEQ ID NO: 70555 - DNA, 239 bp, Glycine max; identical to SEQ ID NO: 68687
  Clone ID: 700838792H1

SEQ ID NO: 70556 - DNA, 237 bp, Glycine max
  Clone ID: 700838793H1
tgaatcgactaaaaaatgaaatgaatcatttcatattgatagtattgctatgcttagtccccaaagaaccagatttcgtaaacaacatagaggaagaatgaaaggaatatcctatcgagggaatcatatttgcttcggaagatatgctcttcaagcacttgagccagcttggataacatctagacaaatagaagcgggacggcgggcaatgtcacgaaatgttcgccgaggtggaca

SEQ ID NO: 70557 - DNA, 242 bp, Glycine max
  Clone ID: 700838794H1
atttaatttagtagaactttttatccttgtaaaacttttggtccctccaacgtaaaactctttgatataccaaacatggatcagtcatgacagtttttgtggtaaaacttttggtccttgcagctttattctatttggtatattatgtgtggggtcacttttgatttttgttgacctttcaataatgatattgacaggttttattggaatttaaggagtatgctactgaagttgttcacacg

SEQ ID NO: 70558 - DNA, 240 bp, Glycine max
  Clone ID: 700838796H1
gagacttggaaccggagagatcaagtggttgatccgacggtgtacacgggactgttgggcaccgcctttacttgcttgcggtcctaccaggttaccggttgccggaacgacttaatattatccagcgaaatcattgacacgtgtgtcaccgctgcacgtgcctccctcaggcacgtgacttttttgtgtggtagaggaggcgtttatgcgcttggtgctgtcgttgccaattacatgggg

SEQ ID NO: 70559 - DNA, 250 bp, Glycine max
  Clone ID: 700838801H1
ggctcgagaaaagaggaaggaagaggcagaggacaagacatgatgagtagtagaacagtagatcctaaagagccagcagatcaggaggatgcactcagatcaaggataatcaagctcaatgacaagctcaagaaattcaattcctattcctcattcctcaatatcctcaatctcatgtctcttacttggcatctcgtttatttggctcaacgacttcaccatatttgctaaaccaaatactctaccaaag

SEQ ID NO: 70560 - DNA, 260 bp, Glycine max
  Clone ID: 700838802H1
gacagcgtgtgagagagccaagagaacgctctcttccacagcgcagacaactattgaaatcgattcactatacgaagggattgatttctatgctacaattacgagagctaggtttgaggagatgaacatggatttgttcaggaagtgcatggagccggtggagaagtgtttgcgtgacgccaagatagacaagagtcaggttcatgaggttatgcttattggaggttccactaggatccccaaggttcagcaactcttgc

SEQ ID NO: 70561 - DNA, 257 bp, Glycine max
  Clone ID: 700838803H1
tccacatgctaaaattttgcacccctttattatataaccgtttcattctctatagcatctcaaagggtgtccaaagaaggaatcacacaagagaaattttgggtggatcttggtaatttaaatttggtccaaaaatagtaagaaaaaaaaaccatagttcatttaattttcatgtccttgctaacggtggcgcaccaaagggggtcaggtgagtttatccggttcacggaaagtcatggcggtggtagcgctgacgt

SEQ ID NO: 70562 - DNA, 257 bp, Glycine max
  Clone ID: 700838804H1
gttctgccttcttctctccctcgattcaattcaattctcatcatattcctcagatttagataaagaagatgcagaagggtagagaagttcgagataataacatttttgaaccaagaggatttggagattttgggggctttggatttcatagaagtatgatgccaagtctttttggagacagggacccatttgatgatccctttttcactgatccatttgatagcttgtttggtccaagttctgcatcaagagcaatg

SEQ ID NO: 70563 - DNA, 256 bp, Glycine max
  Clone ID: 700838805H1
ctaattcccaattcctttctccaatcgctcctccctccgcgccacgtcgctaggctctgtagggttctgagttccgattcgcgagggaaaatgagcacgcagaagaagcgaccgtaccacatagaagcgttcaagcaccgcgccgtgggggatcccaagtacgccgagaagacatggaaggttctggaacacgctattcatgagatatacaatcacaacgctagtggccttagctttgaagagctttacaggaatg

SEQ ID NO: 70564 - DNA, 254 bp, Glycine max
  Clone ID: 700838809H1
gctatgtttgcgtactttgatagggacaacgttgcgctgagaggtcttgctaagttttttaaggaatcgagtgaagaagaaagagagcatgctgagaaattgatggagtatcagaacaaacgtggtggaagagtgaagttgcagtcaattgtgatgccgctttctgagtttgatcatgcagataagggagatgcgctgcacgcaatggaactcgctctctcattagagaagctaacgaacgaaaagctccttaa

SEQ ID NO: 70565 - DNA, 253 bp, Glycine max
  Clone ID: 700838810H1
aaaggattctacccgccgctcgatgggaattgcgcttcaaggcgtctcgtagggctaatccgcctcacgagggtcaccaacggcacgtgcctttggggggccgaggccccctactgctggtcggcaaacggacggcgggcgcacgcgtcgcttctagcccggattctgacttagaggcgttcagtcataatccaacgcacggtagcttcgcgccactggctttctaaccaagcgcgatgaccaattgtgcgaa

SEQ ID NO: 70566 - DNA, 249 bp, Glycine max
  Clone ID: 700838812H1
ggggagtttggctggggcggcacatctgttaaaagataacgcaggtgtcctaagatgagctcaacgagaacagaaatctcgtgtggaacaaaagggtaaaagctcgtttgattctgatttccagtacgaatacgaaccgtgaaagcgtggcctatcgatcctttagtccttcggaatttgaagctagaggtgtcagaaaagttaccacagggataactggcttgtggcagccaagcgttcatagcgacg

SEQ ID NO: 70567 - DNA, 242 bp, Glycine max
  Clone ID: 700838813H1
cttggacattttagccaacatcttctcatttctctccccagactcgttggctagagcaagatcagtttgcaagaattggcacaaatgttccaaggcttatcctatagccacaacaacctcttcatggttcttggctcttccaattcgcaaccatagaccatattgctacgctcataatccagtgatagataaatggcaccaactctctctaccaatcccatcaattcgaccaattggtccaa

SEQ ID NO: 70568 - DNA, 228 bp, Glycine max
  Clone ID: 700838814H1
gtacaactcaaatttccattttcatacaagttacattttgttacctatactactacactctagttgttccaccactagcgtttgtggcaacaactttgatttgaggttctggtttttttgtataatcaacaagtatttgaggcttctatttgatactcatcgagtcttcattccaccgagatcagttcattttgaacaaagtgaatatcttctcatccttagccgaca

SEQ ID NO: 70569 - DNA, 244 bp, Glycine max
  Clone ID: 700838816H1
gaaaaaaagtttgcatttgtgtgtaggcatgacaaagaatgacaaagctggaacagcagagaataaagcatccaaagatgaaacgtcatctaaagattctccagcagcacaaagagctactacagctacttctggacctgcaactggttttccaggcaacccttttgatttctctgcaatgtctggcctgctcaatgatccaaatatcaaagcaattggcgaaccagatgcaaaagatccatca

SEQ ID NO: 70570 - DNA, 230 bp, Glycine max
  Clone ID: 700838817H1
attagtttctaagtgctgagaaaaatgtctgctatggtagaggtataggttggggaactgacaaagcttcgagaaaaattcttgcccgcaaacctttcttattatccaaagccaaagatggatcagataggaaccaagacgacaaggaaactcaaactgcggtggttaagagagacactactaatggaaccatgtctagaggcatcggtatgactgcttatagatcgatt

SEQ ID NO: 70571 - DNA, 244 bp, Glycine max
  Clone ID: 700838818H1
tgcagaccgagctagctagctagcaagcaagcacagagatggaggcaaagcgaggccatgccctcatgtgcttggcacgtgtttcactcttcctctgcgctctaaccctatccgctgctcacggaagcaccacggttcaagacatcgcgagaaagttgaaactcggggacaacgagacttctgcgcacggagaagaagttcaaagttttcatggagaattacgggaggagctactccacagagg

SEQ ID NO: 70572 - DNA, 257 bp, Glycine max
  Clone ID: 700838819H1
gtcttttttcactcttcagttctcgttgttgttcttcgctttcctgaaactagggttttcaatttcgattcattcgttaataattaaagatgtttgggagggcaccgaagaagagcgataatacgaggtactacgaaatcctcggcgtctcgaagaacgcttcgcaggatgatctgaagaaggcttacaagaaagccgccatcaagaatcaccctgacaagggcggtgatcccgagaagtttaaagagctggcacaa

SEQ ID NO: 70573 - DNA, 256 bp, Glycine max
  Clone ID: 700838820H1
ggaatttgctagcggacactacaaagatcattgagaagaataaaacaacgtgcaaacgcaaagacgattgttgcagaaagatcgttactgaagcgttgttagctctcggatacgacgcttccgtatgcaaatctcgctgggaaaaatcaactttctgtccagctggggaatatgaatacattgatgtgataatgggaaaggagcgggtggtggttgacgttgacttcagatcagaattcgagatagctcgacccac

SEQ ID NO: 70574 - DNA, 257 bp, Glycine max
  Clone ID: 700838821H1
tgaggatgatgacgatgatgtgcaatggcagacagatacgtcacttgatgctgctcgtcaacgtatccaagaacaattaagtgctgtgacagctgatatggttatgctttctacagatgaaccagagaagaaaaaagaagcaagtaatggaaatgatggttctcagaatggtaactcaatgcactgcaggaccttggttggtgaagtgaaagcaaatttgaagaaaggtgttggagcaaatgaattgctgtcgcaac

SEQ ID NO: 70575 - DNA, 254 bp, Glycine max
  Clone ID: 700838822H1
ctttaattttctgaacgaaattcagccacagaatatcaaagggagcgaagatgagtcaggagcagccaaggcgcccccaaggccaagaccccatcaaatacggcgacgtttttgacgtctacggtgaccttacacagatgcccattgcaccggaagatgctgccatgatgcaaagcgcggaagctcgagtactcggaaaaacccaacccggcggagcttcttccgtcatgcaatccgccgccacaaggactgaa

SEQ ID NO: 70576 - DNA, 255 bp, Glycine max
  Clone ID: 700838823H1
tttccgttcatttcctctgttttttcttcaaatccattatttcgtggaaatcccgaaatttaaccatgcttctccgaaccgccgcctccgccgcttctgcttcgtccctctccctcttcagccctacctccgaacctctccgttcggttcccgctacgtggattggtggttcgcgccgcgaaaggatccacgaaccaccgcgccctaaccggcgtgatctttgaaccgttcgaagcggtgaagaaggagctcgat

SEQ ID NO: 70577 - DNA, 254 bp, Glycine max
  Clone ID: 700838824H1
tgacactggagtggaacctgcttattatggtagtgatgaaccacgttctcctggtgatgctccccaggcagaggagggtgaagaggacgaagaaattaaggatcttttcaagataggtaagaaaaagaagaagtatgagagaagtcctgcagaaatagcttatgtagttgagactgtcatggctgagcttgaggttacagctgaggaggatgctgaacttaatagacaggggtagcctgccgttaataaactca

SEQ ID NO: 70578 - DNA, 252 bp, Glycine max
  Clone ID: 700838825H1
tgaaaaattgatgcgtgaaaggacacacctgctgttggcttgttgttcaaggatggcaatttgtaagaaagatgtttggagagttgaatgtggaatcccttctggatttccgctcacagttatttgcaatagcatttttaatgagatgctcattagatatagctatgaaaaattactgcgccaggctaaagctccaagtatgtttttacaatccttcaaaaattttgtttctttgtgtgtgtatggtgatga

SEQ ID NO: 70579 - DNA, 248 bp, Glycine max
  Clone ID: 700838826H1
gggattgaaaaaagaattcagctataacaagatacttaaagatgttaagaaagagttctgttgcaatggaacagttgttcaggacccagaactaggacaggttattcaacttcaaggtgatcagaggaagaatgtttctaccttcctggtccaggctggtatcgtgaagaaggagcatatcaagattcatggtttctgagcggttggagtctcaagtgtcaagtcttacgtgcctgcctatgtgttgg

SEQ ID NO: 70580 - DNA, 244 bp, Glycine max
  Clone ID: 700838827H1
aggagatgtcctttgcggttgcagtgccattaagagtaggttcagatgattgtcatgatagtggcaatttggaggatgaagttggtattgcggaagtcataccaccaattcaagatagggaaggagagagtcctatgttggatatgatatcacaaaatagaagcactttggttgctggtgatgaagagttaaccatggaaattgaggaggattcgttgtcgtttgacggtgaccagtttgttga

SEQ ID NO: 70581 - DNA, 224 bp, Glycine max
  Clone ID: 700838829H1
ggcgcgcatagaggattgtcgaaaaccatgactgtggcggatgaggacccgtcggatcctcacgcggttcgtgcgaagattcggtcttgttcgatctggctcggaataagttcgagaggatccagaaccttcggccgtgcctccgcttctccaaagcagttccgccgtcgcaggcggcgccgactcacctgcggcgtgctgtagaacagcctatcccggaggcg

SEQ ID NO: 70582 - DNA, 247 bp, Glycine max
  Clone ID: 700838830H1
gacgcgacgaggggaaacacgagccgtcggatttgatcacggaaaccatgaatctgacggctccaaacctttcacttcccagtgaaactgaaacattcttgagcgcagcaatttccctcaaggacaaggtggtggaggagacttggaaccggagagatcaagtgagtgatccgacggtgtacacgggacagatgggcaccgacctttactgtctgcggaccaaccaggataccggatgccggaacga

SEQ ID NO: 70583 - DNA, 238 bp, Glycine max
  Clone ID: 700838831H1
caaaacagtaaagctaacttcaacacctttaattttctaaaagtaattcagcggctgaataccaagcggagaagatgagtcaggagcagccacggcgtcccaaaggccaaaaccccatcaaatacggcgacgtttttgtcgtctccggcgaccttgcacagaagcccgatgcaccggaagcatgctgccagaagcaaagcgcggaaacacgagagcacggacaaacccaacccagcgg

SEQ ID NO: 70584 - DNA, 260 bp, Glycine max
  Clone ID: 700838833H1
cgcttgtgctgccttcgtttgcgtttttatcacagaggaattaacatatatatagcaagcatggcagtcacactctacgaccttagctcttcctctgggttgaagaaacttgatgagtaccttctcccacgcagttacatcaccgggtaccaagctacaaaggatgatcttactgtttatgcagctttgccaactgctccatcagatgaatatggaaatgtttccaggtggtacaagcacattgatgctttgttgagaat

SEQ ID NO: 70585 - DNA, 248 bp, Glycine max
  Clone ID: 700838834H1
cacaactactacaagtacttccttacaatcaaaaccaacaacaactatggcaagttatcaaaagcactacgatgatcagggtcgcaaggttgacgagtatggcaacgttgagaagcaaaccgacgaatacggcaaccctgttcatgctgctagtgtcacctatgtagccaccagaactgctgctggtggttacagtgatgacattaataagcaacatgataccaccaatgcctacggcgtagacactg

SEQ ID NO: 70586 - DNA, 253 bp, Glycine max
  Clone ID: 700838835H1
taaaatttatgtttaggtcattttttcttgtacataatccaataaatgtgcatagggatgaggataccgagtcagatgatgatttgctggaaaaccagaatgaacagcagatttcaagtgatacctttaagaggaaaccttctgatattgtaactgttacatctgatgtggttgaaatcaatgatgttttatccttgcattcttctgtcaaggttaccaccagggcagctggtcggaatggacaatataggaa

SEQ ID NO: 70587 - DNA, 255 bp, Glycine max
  Clone ID: 700838836H1
gggcacttcccgaagtgttaaaagaatgcctctttctatagggggaggagctggtgcaaagaatgctattcttatgaatatgccaaatgctgttctttcaatgtggagatattttgttggagatctcgtctttgaagtttctaagatgacttctccctacattaaatgtacagtctctttcttcatagcatttggaaatttggctgatgacaccatcaattttgaggcttttccccacaagctggtgcagtttgg

SEQ ID NO: 70588 - DNA, 253 bp, Glycine max
  Clone ID: 700838837H1
caattttactttgccataacggtgagtttagagagggaataatggatggaagagcgggctgttgcatcaccaggtatgtacccggtgcatcccacgggtccaccgtcgacaaaataatgcttaggtttcgtccaatcgctcccaaacccgccgccgcggccaccgcttccgacggctcttcgtccgagagcagtgacgcttttctcaaaaacggaaccactaaaagaacgtacgtaagagataacaactacac

SEQ ID NO: 70589 - DNA, 255 bp, Glycine max
  Clone ID: 700838838H1
gaagaagaaggacttccatcacctcccttggatgaaggggctttctttgtcactcaggctggttcaatggaactgtcacagttctttgatggcatggacgacgacggaaatcctcgaccaactgggccattcagcaagaaccgtgagaatggcagaaagccggttttcgacagccatgttgtagagaagaggaagtcgcaggcttcccatgacacagccatcattgaccgggatgttaagagtcagcagcaagca

SEQ ID NO: 70590 - DNA, 253 bp, Glycine max
  Clone ID: 700838839H1
gaagaaaagcctccattattattgaagagccacggtaaatctgggtcttgtatctggactgatcatattctatttcatattctaattcatttggccaattagatgttgaaagcctgtggagtgggttcttccccctgccaccagaattcatatgtagttgaatatctcatgatcaacatacatgataattgagatattgtggtcgatgtaaaaaagattgggaacaattaacatattagacctttatactatt

SEQ ID NO: 70591 - DNA, 254 bp, Glycine max
  Clone ID: 700838840H1
gggaaaaacacaagacggcgcacatagattttgtcgaagaaacatccgaggaacaaggttctgtgcagagcgggactgtgattcaacgggagtagaatgtcttgcgccaccttcaatgttgcagcttctttgaatcttcatggacgtactaagcaagcagtttctaagccatttgggtcaagaaatcactgtactttccctaagttttcttttctctattctgagaccttgaatttgagctccacttattatag

SEQ ID NO: 70592 - DNA, 252 bp, Glycine max
  Clone ID: 700838841H1
gctatgtttgcgtactttgatagggacaacgttgcgctgagaggtcttgctaagttttttaaggaatcgagtgcagaagaaagagagcatgctgagaaattgatggagtatcagaacaaacgtggtggaagagtgaagttgcagtcaattgtgatgccgctttctgagtttgatcatgcagataagggcgatgcgctgcacgcaatggaactcgctctctcattagagaagctaacgaacgaaaagctcctt

SEQ ID NO: 70593 - DNA, 218 bp, Glycine max
  Clone ID: 700838842H1
caaattatggcatcagttgtaatcttcatttcttctgatatttgataattttatgtgtccaaaattgatttaagttttttatttctttggataacttacaggaggtgttcgctgtctgtccatcttaaaccttatctttgctatcgtctttggtggtcttgccttgtttcttggttcaactctcttgacattgatgagcaactgctctaaacctctgt

SEQ ID NO: 70594 - DNA, 248 bp, Glycine max
  Clone ID: 700838843H1
ctcgagccgctaagcttagaattagaaacaaagaaaagaagaaaggaaagaattgatcgttgaaaatgcagggaggaaagaaagcgggagagtccattaaggaaacagctacaaacattggtgcttctgccaaggctggcatggagaagaccaaggccactgtccaagagaaggcagaaagaatgacagcacgtgatccggtgcaaaaggagttggcaacccaaaagaaagaggcaaagatgaaccag

SEQ ID NO: 70595 - DNA, 248 bp, Glycine max
  Clone ID: 700838844H1
gaagaagaaacttaatcgatcatcacttcacttcactaatacatcatggcagacgagacccagaacaagtatgagagctctgaggttgaggtccaggatcgtggtatttttgactttctcggtaagaaaaaggatgaagaagacaagcctcatcctcaggaggaggtcatcgccaccgaatttcaaaaagtcactgtctcagaccaaggagagaacaagcacagcctcttagaaaagcttcaccgatc

SEQ ID NO: 70596 - DNA, 247 bp, Glycine max
  Clone ID: 700838845H1
aaacaattcaattcaatctgcctcgatcatggagaggaaaacatttgggtttttattcttgctcctccttgtcttagcttctgatgtgacggtgaagagagcagaggcgaaagattgcttgacaaggaggcacgggttccagggtagatgcttattcgacaggcaatgtgcacatgtgtgcaggagcgatggtttcatcggtggtcagtgccgaggccctcttcgcaaatgcttttgcagcaagcca

SEQ ID NO: 70597 - DNA, 226 bp, Glycine max
  Clone ID: 700838846H1
aacaaatttgtttaaattgtctcttgatgatgttgaaactcctaaaggttccatgttggatcttaaaatttctcagtctaaaattgcacttcccaaaaacacagttggaggaaccattctgcgtagtgatctattggcaaattttttgacagagggcaattttagagcaagtgttgatttgcagcgcactcatcgatattaaggacatgattactatgcggccaca

SEQ ID NO: 70598 - DNA, 239 bp, Glycine max
  unsure (1)..(239): unsure at all n locations
  Clone ID: 700838847H1
ccaaaacactcaagttaacttcaacacctttaattttctgaacgaaattcagccacagaatatcaaagggagcgaagatgagtcaggagcagccaaggcgcccccaaggccaagaccccatcaaatacggcgacgtttttgacgtctacggtgacgctgcacagatgcccattgcaccggaagcatgcgccatgangcaaagcgcggaagcacgagntaacagaaaaacccaacccggc

SEQ ID NO: 70599 - DNA, 216 bp, Glycine max
  Clone ID: 700838848H1
gagaatataggaatataagaactaagatggattggatcggagcgtaccgcggaggccagagaagcagggactggtgcgacccttcatcaccattcactgatttgtgggaccctcgtcgtgtcggtgacgctgatgatatcacctcctctctcgcccatgctcacgttgactggcgtgagactgataaagctcatatcttcgtgctgatcttccagg

SEQ ID NO: 70600 - DNA, 246 bp, Glycine max
  Clone ID: 700838849H1
gttgaaggaaatggctgaagcacaactacgagaccagcatggcaaccctgtcccactcaccgatcaatacggtaatccggttatcttaactgacgagcgcggtaatcccgtccaactcactggtgtcgctaccaccgctaccggcacagcaggttctgggtttgggtcctatggtaccggtgcttacggtggtggtgcaagtgcaaccaccgttgcagatcttttggcaacccaaccaaggagtgg

SEQ ID NO: 70601 - DNA, 254 bp, Glycine max
  Clone ID: 700838850H1
caacttcacatcccaagtcattataatgaaccatcctggccaaattggaaatggttatgctcctgtgcttgactgccacacttctcacattgccgtcaagtttgccgaacttgtgaccaagattgacaggcgatctggtaaggagattgagaaggagcccaaattcttgaaaaatggagatgcaggttatgttaagatgattcccaccaagcctatggtggtcgaaactttctccgagtatcctcctcttggtc

SEQ ID NO: 70602 - DNA, 255 bp, Glycine max
  Clone ID: 700838851H1
ggatcgccgccggagacatcatcctggttggactcagggactaccaggacgacaaggctgacgtcatcctcaagtacatgcccgacgaggccaggctcctcaaggcctacggcgagctccccgataccagctcgcctcaacgagggcatcggcgccggcttggacgaggaggacgacgccaccgccaacgactacatcgagttcgaggatgaggatattgataaaatctaatccctctctcgccctcaattatca

SEQ ID NO: 70603 - DNA, 255 bp, Glycine max
  Clone ID: 700838852H1
cactcactcactcactcactcactcactcgcaagcaaaaagaaagaatcccaggcgaggagaaagatggaggggaaggagcaggatgtgtcgttgggagcgaacaagttccccgagagacagccgattgggacggcggcgcagagccaagacgacggcaaggactaccaggagccggcgccggcgccgctggttgacccgacggagtttacgtcatggtcgttttacagagcagggatagcagagtttgtggcca

SEQ ID NO: 70604 - DNA, 254 bp, Glycine max
  Clone ID: 700838853H1
aaaacccttctgcgtttttttattataaatttttttgtcaataaagggatcaaggggttgggggatcaaatggtaaagttcttttgttggtaaattggaggattagaaacatgactattgctttccaattagctgtttttgcattaattgctatttcatttattttattgattagtgtacctgttgtatttgcttctcctgaaggttggtcgaataacaaaaatgttgtattttccggtacatcattatggatt

SEQ ID NO: 70605 - DNA, 242 bp, Glycine max
  Clone ID: 700838854H1
tggatccctgcctcttcattccgcttccagcgttctctatgataagtcactcataaacttgggaggtaacatagacttaagattacgactttccatcagcctagaccgtgtctttcggggcctaaaatagagtactagtattatctttattacaacgtgaccttcatgctccatcctcttgtgccatagtttttcagatacactagtttccttccgacaccatttcttccttaataactgcg

SEQ ID NO: 70606 - DNA, 250 bp, Glycine max
  Clone ID: 700838855H1
ggagctggagctcactcaaactacagcaccaagtccatgagagatgagggtggttatgaggtgattaagaaggccattgaaaagcttggattgaggcacaaggagcacattgcagcatatggagaaggcaacgagagacgtctcactggaagacatgaaactgcagacatcaacaccttctcttggggtgtggcaaaccgtggaagctccattagagttggaagagacacagagaaaaatggcaaaggtt

SEQ ID NO: 70607 - DNA, 250 bp, Glycine max
  Clone ID: 700838856H1
ctccttgactgtgacaacaagtgtgacataacagaaaagacttcatgtgacaatgggtgtaatggaggtcttatgacaaatgcctacaattatttgctcgagtctggtgggttggaggaggagtcttcatatccctacactggggagagaggtgaatgcaagtttgatccagagaaaatagcagttaagatcacaaatttcaccaatatccctgctgatgagaaccaaattgccgcatatttagtaaaaa

SEQ ID NO: 70608 - DNA, 251 bp, Glycine max
  Clone ID: 700838857H1
cttctctggttgattcggatctagagtcttcagtttctcctcgttgttcttcgctttcctgttttcaatttcgattctttcgttaatttaataagatgtttgggagggcaccgaagaagagcgataatacgaggtactacgaaatcctcggcgtctccaagaacgcttcgcaggatgatctgaagacggcttacaagaaagccgccattaagaatcaccccgacaagggcggtgatcccgagaagtttaaa

SEQ ID NO: 70609 - DNA, 249 bp, Glycine max
  Clone ID: 700838858H1
gagactagttcataggctgggttttactacagaagaatcaatagcagcacaggtgctgtatcggatgacacttattgcaggcaggcaaagtggtcaaatgtttagcgtagagtctgcaaaggagactgcttcgcgtcttgaagctgagggaagagatgattttgatttttctataaatattctggttcttgggaaagcaggtgtgggcaagagtgctacaataaattcaattttcggcgagacaaagac

SEQ ID NO: 70610 - DNA, 246 bp, Glycine max
  Clone ID: 700838859H1
atgagatgatgggatcagggaaattgaaatatgtgaggcctttggctttggatggggacagggttttgttcgaacacaaccgtagcaagctctgttggtataacctcaaaactggtgacgtgagttgcgttaaaataactgctgcaattggaaacacgattgaaggcacggtttgtgtagaaagccttgttccgccaactttactgaatctgcgtgatgagagccagagccaggagaaaaatggga

SEQ ID NO: 70611 - DNA, 228 bp, Glycine max
  Clone ID: 700838861H1
cacaactactacaagtacttccttacaatcaaaaccaacaacaactatggcaagttatcaaaagcactacgatgatcagggtcgcaaggttgacgagtatggcaacgttgagaagcaaaccgacgaatacggcaaccctgttcatgctgctagtgtcacctatgtagccaccagaactgctgctggtggctacagtgatgacattaataagcaaccatgatccaccaa

SEQ ID NO: 70612 - DNA, 206 bp, Glycine max
  Clone ID: 700838862H1
gtgagaaatggtttatccgggtcattatttgtattgtactcctgaggtttgatgctctcattagtcagtgtttatttattttgccgagcaaaaaaaagtgtttatttattttagtttttgcattttttttaaaggatgtataaggatttgaattgaagcacggtaccctgaatctcctgtcctccatctacagggttcaagaggca

SEQ ID NO: 70613 - DNA, 207 bp, Glycine max
  Clone ID: 700838863H1
ttcttcttcatcttacagtgtcaggggtgcagttggttgcatatgttcgtatttggctattgaatgaattgcactagtgttctactgcaaattttttgacatatattggtgacgggatattttctagatggggggagcatgttctaggaagcaagagtgggataacgaagagtgatcttatcagaggacaaccacgaagagtatgca

SEQ ID NO: 70614 - DNA, 183 bp, Glycine max
  Clone ID: 700838864H1
gttgctgttaaggttctgagatcggagcaattgaatgatgccttagaggatgagtttgctcaagaagtggcaattctgaggcaggtgcatcataaaaatgttgttcgtttcattggtgcatgtacaaagtgtccacatttgtgcataataacagtactttcaggggatttattagctaaaaca

SEQ ID NO: 70615 - DNA, 255 bp, Glycine max
  Clone ID: 700838865H1
aacaataccgggctcattgagtctggtaattggcatgagtacaatctaaatcccttaacgaggatccattggagggcaagtctggtgccagcagccgcggtaattccagctccaatagcgtatatttaagttgttgcagttaaaaagctcgtagttggaccttgggttgggtcgatcggtccgcctccggtgtgcaccggtcggctcgtcccttctgccggcgatgcgctcctgtccttaactggccgggtcgtg

SEQ ID NO: 70616 - DNA, 254 bp, Glycine max
  Clone ID: 700838867H1
ctctatataaaccctttaacctatctcttcttgtcacatagcatagctttgaatacaaaaccaagttaatgttgcaatcgcataataataaccatccaaagtttattgagagaaatttgcaagtttgaaaagaaacatggcatctcatcaacaaaacaagcaagagcttgatgaaagggcaaggcaaggagagactgttgttccgggtggcactggtggcaagagccttgaggctcagcaacatcttgctgaag

SEQ ID NO: 70617 - DNA, 252 bp, Glycine max
  Clone ID: 700838868H1
gaatgaatgtgaaagatgatttggtggtgttgcttgatcatattcagtatgcttgcaagagaattgcagcacttgtggcttctcctttcaattacagccttggcaaacaaactgctcttggttctgttggttctgatagggatgctccaaagcctcttgatattgtctcgaatgaaattatcttgtcatcactccgaaaatccggaagagttgctgtcatggcttcagaagaaaatgacgcaccgacttgga

SEQ ID NO: 70618 - DNA, 253 bp, Glycine max
  Clone ID: 700838869H1
gggtcgtcttcggatcggtggaacttgactgcgccggcgtgaattccgacgctgcgagtggcaccgaattgcgatagcggtgacgaatatgaaggttttcgttaagactctcaaaggcactcacttcgaaatcgaagtgacgccgcaagacacggtttctgaagtgaagaaaaatatagaaactgttcagggtgcagatgtctatcctgctgcacagcaaatgctaattcatcaagggaaagttcttagggat

SEQ ID NO: 70619 - DNA, 252 bp, Glycine max
  Clone ID: 700838870H1
ggcgagagaatcggatgcccccggagcaaaggagtatgtgcatattcgaattcagcagaggaatgggaagaagagtctgaccacagtgcaagggctgaagaaggagttcagctacgagaagatcctcaaggacctcaagaaggagttctgctgcaacggaaccgtggtgcaggacaaggagcttggcaagatcatccaactccaaggcgaccagcgtaagaacgtctcccacttcctcgttcaggctagcct

SEQ ID NO: 70620 - DNA, 250 bp, Glycine max
  Clone ID: 700838872H1
cgcattaaaaaaaaaaattagaaaacaatatagatacgatcttttatcctataattttatcaattatgcagataagaaagactcatatatttatggatatagatccctatttcaagtaaaaaaaaaccaagtgatttcttctaattacaacacgtataaaaaagaattattggatatcatagataatctctttatcaagaattatatatcggaagatgcgattctagatatggaaaaaaatatgtataga

SEQ ID NO: 70621 - DNA, 251 bp, Glycine max
  Clone ID: 700838873H1
tgaaggaatgcctatatcaaaagagcctgggatgaaggggaatttgagagttaagcttgacgtcaagtatccttcaaggctaactccagagcagaagtctgatctgaggagagttttagggtaggaaacataaacgactgtttggaaagcgtcaatcttagtgaaacagatagataggtaattcagctgagtttccatcattttgcatcaacttgttttatcttttggttaaagtcatgaagattactagt

SEQ ID NO: 70622 - DNA, 250 bp, Glycine max
  Clone ID: 700838874H1
ggaaaattagcctcacaaaagcaaagatcaaacaaaccaaggacgagaacacgatgttgcttgaacttgcacttggtttattggttttggctctgtttctgcacttgcgtcccacacccactgcaaaatcaaaagcacttcgccatctcccaaacccaccaagcccaaagcctcgtcgtcccttcataggacaccttcatctcttaaaagacaaacttctccactacgcactcatcgacctctccaaaaa

SEQ ID NO: 70623 - DNA, 152 bp, Glycine max
  Clone ID: 700838875H1
gtaagaatggcttccggtgaacagaaattccctcctcaacaacaacaaacacagcctgggaaggagcatgctatgactccagtaccccaattcactagccctgactacaagccttcaaataaacttcaaggagaagattagcattcagtcac

SEQ ID NO: 70624 - DNA, 232 bp, Glycine max
  Clone ID: 700838876H1
aatcgcgtcattatatgctattttttttaaaaagttttttaatcggtgtattttgagcttttctattccttgatttcaagttttttagcaagtgttacttgttgcatattagcggttaagacaatcacgtctaatgtggttattttctttgctcactgtttatgaacttgttcccttttcagttttggttttgcgtcgtggtgcatttgtatttcggaagttgaacggtttg

SEQ ID NO: 70625 - DNA, 233 bp, Glycine max
  Clone ID: 700838877H1
ccagtaaccattacaactttggcggagtggctgcgcgctgttattaccacattccaatactacctgctacccgggtcagctccccttcttttcacttcccgtatatataagcttatataaaccccgttgattctaatccaaactcaacccgacccgaattctttgtttaaaaagagagagagaaatgatactggtggcgatcgtggcggaggtgctggaggagtatacggcgt

SEQ ID NO: 70626 - DNA, 237 bp, Glycine max
  Clone ID: 700838878H1
gtgcaacaagctatgcaatatattgatgagacaccagatatcgaaactcgcatagaactcatcaaaacgttgaacagtgtgtctgcagggaagatatacgtggaaattgagagagctagattgatcaagaaacttgcaaagattaaggaagaacaagggcttatagctgaagctgctgatttgatgcaagaaatgcggcggaaactttggcgccaggccaagacgtagaaatgcatc

SEQ ID NO: 70627 - DNA, 214 bp, Glycine max
  unsure (1)..(214): unsure at all n locations
  Clone ID: 700838879H1
cattttctctcttcttcttctctagtgagaaatttctctttcattgtgtgtggtcagtgagatgtatgtagcttccatgcgcaagtctttcaaggactccttgaaagtccttgaagctgatatccaacacgccaataccctggcctcagattttccaagggagatatgatggtgcatgccgtcagatgagaagntantcagatcagcagcacac

SEQ ID NO: 70628 - DNA, 229 bp, Glycine max
  unsure (1)..(229): unsure at all n locations
  Clone ID: 700838880H1
tcgagctcgagccgaatcggctcgcgtgtaattattgactgctgttcaagtcccttgtgcgctacgccgctacatgatatagctatcctgtcattcatgattacttacctttcctctccttgttctcagttgtacgcaataggaagcgagcagttgcagttggatcctcattaaaatctaataagaaggcttcaagcttagntagataggcaagccttttttaaacaaa

SEQ ID NO: 70629 - DNA, 254 bp, Glycine max
  Clone ID: 700838881H1
attgaacaagcaaagaaggctccttgaacaggacaaaacaaaacaaactggtcttgttgtgttaagcctaattgctatcaatattcaatattttatactattctttattcttattcttccagttatatggtttgtatttgctaatagctcccatcaaaggcccaaaaatgggtaccatcgttgaagcagataacacatataccaagatcctaggaagatggccagtcttttattatggcatgggacacatgctc

SEQ ID NO: 70630 - DNA, 251 bp, Glycine max
  Clone ID: 700838882H1
agcttctgaagtgtgtcgtgggtggagagaggcaatttgctttggccttactcggttatcactctcatggtgtagcaagaacatgaataacttggtcctatccctttctcctaaattcacaaaactgcagactttaatccttcgtcaagacaagcctcaactagaggacaatgctgttgaaactatagcaaatttctgtcatgacctccaaatcttggacctcagcaaaagtttcaagcttactgatcgct

SEQ ID NO: 70631 - DNA, 254 bp, Glycine max
  Clone ID: 700838883H1
gttgttctctctctctctagagttcttatttcctctctctagaattttctatccgttcatccccctcacaaattagggtttttgcgaatcttttattgtctgaaatcgaatccaacgtttcagccatggtttccgattcaatcgccgccgtgccgattccctccgccgcaaacaccaggaacccggggaagaagaagaggaccaacaggtccgcgaaattgaagcagtacaaaatcgatgcgcgccgcgagcaa

SEQ ID NO: 70632 - DNA, 253 bp, Glycine max
  Clone ID: 700838884H1
gcggcggaatcccacctgggattctgctaatacgaggaaagcaatggaacctccagacgcaccgctacatggtgctcctcaccaccttcgtcgcctacgcgtgctaccacgcgtcaagaaaacccaccggaatagtcaagagcgtcttatgccccgaacacaaaggaacctcgcaaggctggagcccattcaacggtcacgatggaacgtcgaagctgggcgaaatcgacgtggcgttcttagcgtgttcact

SEQ ID NO: 70633 - DNA, 255 bp, Glycine max
  Clone ID: 700838885H1
catgagtacgtttctgttccatacaatttcgatttgactgacgaggccgactcaggaggcagtcgagacgttcggcagcatcactggcttgacagatgcagtagcgctgcaaaaattagaggagcatggcgataatctcaatgaggcagtccatgcacatttgagtgccggagacagagatctaacgaccggctctcgcaacagctctgccgtatttcctcaagatgattgcatggctatagatgatcagcatga

SEQ ID NO: 70634 - DNA, 252 bp, Glycine max
  Clone ID: 700838886H1
cttcgttttccccgctttcaacaccgctcatcttctcttctctttgctctgctaatcatggcaaccttgtctactaatcattgcacattacaaactgcaagcaaaaatccatccattgttgccaccatagtgaagtgtccttcttctttaaggtctgtgaagagcgtttccagatctttcggcttgaagtcggcctcttcatttagagtcactgccatggcttcttacaaggttaagctgattggcccagat

SEQ ID NO: 70635 - DNA, 253 bp, Glycine max
  Clone ID: 700838887H1
cggaagaagaacagtcctttcttgtatgatctggtcattacgcatgccctcgagtggccttctctcactgtggagtggcttcctgaccgccacgaaccacctggcaaagactagtccctccagaaggtcatcttgggcacccacacttctgagaatgagcccaattacctcatgctggcccaggtccaactccctcttgatgatactgagaatgatgcccgccactatgacgatgatcgccccgacattggtg

SEQ ID NO: 70636 - DNA, 247 bp, Glycine max
  Clone ID: 700838889H1
gaaagggggtgggtcaaaattccgccggagaaaatctttgttcggtgtttgcaatcgggagagagagcaaggtcccttctcaaggatggcgatgactgtacacgtccttgctgggttggcttttatgttttcagctagcattttgcttcagattctggcatgtgcaatatataacaattggtggccaatgttatcagctctgatgtatgtgctggttcctatgccttgcttattctttggaggtgga

SEQ ID NO: 70637 - DNA, 244 bp, Glycine max
  Clone ID: 700838891H1
tacttgtgggccaaggctgttcttctcacatctaccacagtagccacagctggtcttacaattcaggtcccattggctgccattgtggataccttgactggcaatgctccgcgctttatggattaccttggagcgatagctgtcatgattggcttcactggaatcaacattccttctgatacttttagcaaatccacagaaactactgtggcattggaaaatgagaacttgaatacaaggactg

SEQ ID NO: 70638 - DNA, 231 bp, Glycine max
  unsure (1)..(231): unsure at all n locations
  Clone ID: 700838893H1
aaaccttgttgttctacccgttcaaaatgatggttccacagggctccattgggccaacctccaaaaaagaacccctctaatgcaagtaccagtcctggtggacctcaatggaaatcacttgtgggttaactgtgagcagcagtactcatccaaaacgtaccaagcacccttctgccactccacccaatgctctagagccaacacccaccacagccacagntgccccgcggc

SEQ ID NO: 70639 - DNA, 172 bp, Glycine max
  Clone ID: 700838894H1
gatttgactacatgaaaatatcatttttgcgagacatcaaagctcaacaaagaagtttacgagactattcaaagacctatgctcggtccaaatattatgatgaagcaaaaccttggagtgaaaggtgtgatgttgcatttgcctgtgcttcacccaatgaaattgatcaatc

SEQ ID NO: 70640 - DNA, 223 bp, Glycine max
  Clone ID: 700838895H1
cttccaccaagttatgggtttccttgtgttgcttcttttctccctcttaggtctctcttctagttccagcatatcaactcatcgttccatattggaccttgacctaaccaagtttaccacacagaaacaggtgtcttcactgttccaactatggaagagtgagcatggacgtgtctaccataaccacgaagaagaggcaaagagacatgtagattttcaagaa

SEQ ID NO: 70641 - DNA, 210 bp, Glycine max
  Clone ID: 700838896H1
gcagagatgggcacatcggtggcccttactatggaaccaacaccgcagacaccggtactggtcacagaagtggaaccacgggcggcaccggttatggaggcactggtggcactgattatggaacaactggtggcactggttatggaagtggaactgggtatggagtcaacactgggggctcgcacaccgaagcaggactctggaaggaac

SEQ ID NO: 70642 - DNA, 261 bp, Glycine max
  Clone ID: 700838901H1
aaaaaacattgcccttgttctttcaaagttaccaaacacaagtacacaacacaacagcaacatatggcgtctgaacaattggctcgcagagagaacaccaccaccgagaaggagattcacgttgagaaacacagggttcccaagatggccacccacttcgagcaccttgcggagcaagctaaagaatctgacatcaccgctgggaaggatactccgcagggtagcatagaagccttgcagctggagagagggtcaaagatc

SEQ ID NO: 70643 - DNA, 272 bp, Glycine max
  Clone ID: 700838902H1
cggctcgagatttatccatttagacagacattgtggttacccatagtctcatagtgtcatactgcaacacaaaacaatgggttcccttatggcaggatgggactctacccacatagatcctcaatcagccacacttaaaaggaaccgctcactcaccaaggatgaaattgatgcttactggaaatcaaagaagacgatagaggaagaacaccttagagctatttccaacttgtcagagactattcaggctagcaaaagcacagaacctgaga

SEQ ID NO: 70644 - DNA, 262 bp, Glycine max
  Clone ID: 700838903H1
ctagaaagtgggaaagacagtgatgtcagttttgaagtgaatggagaaattttcgctgctcataaattggttctagcagctcgctcacctgttttcagggctcaacttttcggtccgatgaaaaatcagaatacccattgtataaaagttgaagacatggaggctccagtctttaaggcattgcttcatgttatatattgggactcactacctgacatgcaagagcttactgggttgagctcaaaatgggctactaccttga

SEQ ID NO: 70645 - DNA, 122 bp, Glycine max
  Clone ID: 700838905H1
gaaccatcaaacgagagcagttacacagataaaatctcctccgcaaccacagcaatagctgacaaagccatcactgccaaaaatgttgtagcttcaaagctcggatacggtgatgacaccac

SEQ ID NO: 70646 - DNA, 257 bp, Glycine max
  Clone ID: 700838907H1
cgtgaatcgtgatttagcatttaccacaccaaaatcaatctgcggagtcagaaagccatggatccctacaagaatcggccatcaagcgccttcaattctcccttctggactacaaattccggtgctcccatctggaacaataactcatcgctgactgttggatctagaggtccaattctgctggaggattaccatctggtggagaagcttgcaaactttgacagggaacggatccccgaacgtgttgtccacgctcg

SEQ ID NO: 70647 - DNA, 259 bp, Glycine max
  Clone ID: 700838908H1
gcagaaagaaaagaccatcaaagtttcacttcagccttatccggtttagggtttcggtttttgacccaacctttgacgtatcgaaaccttaagtttcggatcaggtctgagcaatctggttggtagaacctttggtcttagagagtcaagttttatgtctgaattagacgatcaaattcctactgccttcgatccttttgctgatgcaaatgctgatgactcgggtgctgggtcaaaggagtatgtgcatattcgcgta

SEQ ID NO: 70648 - DNA, 259 bp, Glycine max
  Clone ID: 700838909H1
agaaatgctaatgtgcggtcacgattgagagatggttttggcccatcagtagctcacgtttgtgcctatcatggtcaaccagattgtatgcgggaattactattagctggagctgatcccaatgcagtggatgatgaaggtgaatctgttctgcatagagcaattgccaagaagtacacagactgtgctcttgtgatattggagaatggaggctgtagatcaatggccatcttgaattcaaagaatctgacaccgttgc

SEQ ID NO: 70649 - DNA, 254 bp, Glycine max
  Clone ID: 700838910H1
ctcattctggacactattactgctatgttcgcacttcaaataacatgtggtataccttggatgacaaccgggtaagtcatgtaagtgagcgggaagttttaaaccagcaagcatacatgttgttttatgttcgtgatagaaaaagtattgttccaaggaagcctgttgacattgctaagaaggaaaatatgaagactaatttgaatgtaaatagagaatcttcaacttcaaaccatgtattgaaggaatatcca

SEQ ID NO: 70650 - DNA, 257 bp, Glycine max
  Clone ID: 700838911H1
aaataattgaaaaatacattcaattatgtcttcgcgtatcaaatattttcttttcatatcgatgcgtacgatatttttccagcaattaatgtatgtgagacagaaactttcacttacagttttttctttttaatattgtatttcattttttttaataattaataaaataataataataatgaataaaaaaatcaaataataattaataaaaagaaaaaagtgtaaatcaaatagaaatttataaaatctatgatcct

SEQ ID NO: 70651 - DNA, 254 bp, Glycine max
  Clone ID: 700838912H1
actctctatgaatctcgtgcaataatcagatacttagctgagaagtataaagaccaagggactgacttattaggaaagacaatagaagaaaagggtctagtggaacaatggcttgaagtggaagctcataactttcacccaccactctacaacttggttattaatgttctgtttgcgccattaacgggggctccttcggaccaaaaagtgatagaagaaagtgataaaaagattgagaaggtgctggatgttta

SEQ ID NO: 70652 - DNA, 252 bp, Glycine max
  Clone ID: 700838913H1
ggcgagtgaggaatgcagagaaatgagaattcgtcattggctgagtccttctgaggcaggtggccctgccaaacgcagaagctccggcagaaattgccaccgcaaacacgtcgaagacgggtagtaatagcactcggtttcattctcccacattcccaattctgagcgttaagatgagtgagaaagagaaaggcaataatagtgagggacagtcgacgttgctgcacggcaagtacgagcttggtcgtgtgc

SEQ ID NO: 70653 - DNA, 250 bp, Glycine max
  unsure (1)..(250): unsure at all n locations
  Clone ID: 700838914H1
gcatgggccacgccgttcacgtgcttagagttccctctgccgagatcgtatactggaatcactcagcagaaactctgtatggatggaaggaccgtgtggaacttggcgttcgtggttgcggcagggaccgtgctggttttgagcgcgagcganggtgcctggcatgcctcgtcagtgcaagacaggattgggagcagcagtgggaatttgagtgtgtcttcgagagagggttctgcttctgcctctgcct

SEQ ID NO: 70654 - DNA, 251 bp, Glycine max
  Clone ID: 700838915H1
gagatcttattgaaatgtttgggcatgtgggtgcagtttaattccattatgtattttgttgaaggattgagcattttattgaagtgattataatttattgatgataatggttgggaatttggctgaattggttcaagttttttaattgaaatgctagggcatttgggtgcagtgttaatgtgtaattgtggtttgtgctttgttccaggattaaactcccatctggttcaaaaaagattgttcctagtgac

SEQ ID NO: 70655 - DNA, 279 bp, Glycine max
  Clone ID: 700838916H1
acgcgtacgcagacttcggctcgagggttagctgaattgagttctaagcaggattatgcaaattatggattgtcatatctcatcgactatgtacacggaaaaagccagaaaaagcccgaattgttgcaggagcaactgaaactttcagggaagtcccctaatttgatcacatataaaggaactccaaatctaatgggtcttaaagacattgcagaaacattgtctggtttagacatgtctgcttcagatagtgtcatgccagatggcggggataaacga

SEQ ID NO: 70656 - DNA, 261 bp, Glycine max
  Clone ID: 700838918H1
ctgcgtctcgagtccgcaacgagcagcagctcctggacgatgaccatagccaccaacacaaccttacataaacttccccttccaactctcaccactcgcatctcgcgcgtgccaccaacgcgccactctctccctctctttccctcctcttcctctctccaaacccgccatgtcctccgccgctccggtcaccgaactcagcgacgagtccgacttcgaatctctcctctctcccgacggccacatctccatctgcggctt

SEQ ID NO: 70657 - DNA, 258 bp, Glycine max
  Clone ID: 700838919H1
gtcttttttcactcttcagttctcgttgttgttcttcgctttcctgaaactagggttttcaatttcgattcattcgttaataattaaagatgtttgggagggcaccgaagaagagcgataatacgaggtactacgaaatcctcggcgtctcgaagaacgcttcgcaggatgatctgaagaaggcttacaagaaagccgccatcaagaatcaccctgacaagggcggtgatcccgagaagtttaaagagctggcacaag

SEQ ID NO: 70658 - DNA, 258 bp, Glycine max
  Clone ID: 700838920H1
gagtaatcgagaaagagaagaagcatatatatcaaaatggctgcagagatggagagggagtcattgataactgaagctcctaatgcaccagttactgcacagagaagggtcagaaatgacttagaaaattctctaccaaaaccatacttgccaagagcattgaaagctcctgatacgggtcacccaaatggaacagcaggccacaggcaccacaacttatctgttcttcagcagcattgtgctttttttgatcaagat

SEQ ID NO: 70659 - DNA, 256 bp, Glycine max
  Clone ID: 700838921H1
aaaatgatgtgttgtggcttattaaaaacagtgtgcaagattttgggggctatcgaggtttgttctttttctcctacgtttgatttttacagcaggaaatgctcctgaaaattttgggtgcattgatgcacaagcattgagctgttggattgtggatatgtagaagaataaatcaattgcaaggaatattcatcttgagcatgatcagcaggtgatgatgtcgggtttctcaatttgaaagtggttcccggaaaga

SEQ ID NO: 70660 - DNA, 255 bp, Glycine max
  Clone ID: 700838922H1
gtccttaaacactcatcagtcatcaccatggccaagctagttttttccctttgttttctgcttttcagtggctgctgcttcgctttcagttccagagagcagcctcagcaaaacgagtgctagatccaaaaactcaatgccctcaaaccggataaccgtatagagtcagaaggagggctcattgagacatggaaccctaacaacaagccattccagtgtgccggtgttgccctctctcgctgcaccctcaaccgc

SEQ ID NO: 70661 - DNA, 258 bp, Glycine max
  Clone ID: 700838924H1
cgagaagggatgccgcccttacatgtgcaacactagttatcgccactcaaactgtcttgatcagttctgcaagtcttttgcagacacctcatcaaccattcctcaagtagaaggtcaaatttcagatacttttgaaagtagaattgatgtgcccgaagacagaaatgaggggactgtccaaagtagaattgatgtgccagaagacagaagtgagggtttggttacaatgcaagccttatcctgcgaaaatgatgcaaa

SEQ ID NO: 70662 - DNA, 252 bp, Glycine max
  Clone ID: 700838926H1
caaaaagtttacgttacaaatcgcataataaccgtcctaagtttattgagagaattttgcaagtgtgagaaacatggcatctcgtcaaaacaacaagcaagagcttgatgaaagagcaaggcaaggagagactgttgtcccgggtggaactggtggcaagagcctggaggctcagcaacaccttgctgaaggaaggagcaagggagggcaaacaaggaaggaacagctgggtacagaagggtaccaggaaat

SEQ ID NO: 70663 - DNA, 244 bp, Glycine max
  Clone ID: 700838277H1
gggacaagaagccgcagagtcatggacagaatgggctaaagagaaactcagtgaaggtcttggcttcaaacatgatcaggaatccaaagaatccaccactaacaaagtctctgattatgccatgacactgcacagaaatccaaggattatgcaactgacactgctcagaaatcaaaggactatgcaggtgatgctgctcagaaatcaaaggactacgcaggtgatgctgctcagaaaaccaaag

SEQ ID NO: 70664 - DNA, 243 bp, Glycine max
  Clone ID: 700838278H1
accgccatggatcccaaccccggaaccttccctctcctctcctacatcatgtcgcgcctcccttccctcactcccagacccgccgccccggcaccctccgattccgaccaattcgacatcgaacagccaccggagattgtgggccaaatgccgcacctggcggacccggagctggtggcctctatgggccgggccgtggcacaggtgacgcaggcccgctcggtcctcaccctcatcggggag

SEQ ID NO: 70665 - DNA, 243 bp, Glycine max
  Clone ID: 700838279H1
atttaattaaataaatttgacaggagaagctgggtttgggcggaacgggagagagagggttccttccggtcgctgtaatcggtttggctgagaagggaatcgaaaatcaattgaggaagaaggtgtcggtgacagcgggtgttagtgatactgtgatagcagttagggataagctcagaggtaaaattggccaaactaaagttaagcgttattggcctggtaaagttcctgaatgggctgatg

SEQ ID NO: 70666 - DNA, 245 bp, Glycine max
  Clone ID: 700838280H1
aataaaccgaatgagagcattaacctcttcttcttccactttcattccaaagcgttattccttcttcttcttcctctccattctcttcgctcttcgatcctcgtccgggggctgctccgaataccccaccaccacgcgccgatggccacgataggaggcttacgcgactcccaaggctctcagaacagcgtccaaaccgaggccctcgctcggttcgccgtcgatgaacacaacaagaagcagaa

SEQ ID NO: 70667 - DNA, 243 bp, Glycine max
  Clone ID: 700838281H1
cacaattacaagacccagtgaaggaagcgcaaaattttccaacagttggcgaaactggtttatgggttgaagtctggttcaggatttgtgggggaagagaagagcactcacaccatatccatatcaatggacttggccgcgaagtgtcaccacttagacctgaccggcgtggtcattttggacgcccgaaagttctccgcactccgccaccttccgccacgcgttctcagcagaacgtacatc

SEQ ID NO: 70668 - DNA, 241 bp, Glycine max
  Clone ID: 700838282H1
gaagataggtatgaccgagacttggttgaagaagcaccgtcttctttacaatggagccactagacaccctcttattattagcattcgcgatggcaccatcaacactgcttccttcaaaacatggctcgcacaggattacttgttcgttcgggcgtttgtcccatttgtggctagtgtgctgataaaagcgtggaaggaatcagattgcagtggtgacatggaagtcatattcgggggcatg

SEQ ID NO: 70669 - DNA, 240 bp, Glycine max
  Clone ID: 700838283H1
aaaagttttatgttatagggcaagcctattaaactcctacattggataaatacgtgttgtttatcttgtgaatgtggactaattgataaaaattggaatcagggtgttgaggcttcagaaggacacaagtattgtgtgctgggcaggttgtcatctgaagttggatggagctactatgataccattagggtaagtgtttgccttgtgagaggttttgctatcttaatatttcaaaatgtg

SEQ ID NO: 70670 - DNA, 238 bp, Glycine max
  Clone ID: 700838284H1
ctccttttctctccatttttgttgtggagaattgggagtggttacacgacagtgttttcacttctactaggtgcaagcattctgtgtcgtgatgttgtattccttcgtttcaatgaataataaaatcgtggttgtgcaaaaaaagaaaaaaaaaagggtgtcagccaactagggatctcgactgcccgggatttaatcccggaaggggacctgaaggcacacgcattttccaaaaagt

SEQ ID NO: 70671 - DNA, 240 bp, Glycine max
  Clone ID: 700838286H1
agagaattcgaggtgtagatatgaagaatgattttgcctttgttgaatttagcgatcctcgggatgctgatgatgctagatatagcttggatggtcgtgatgttgaaggaagtcgtatcatgtggaatttgccaaggggggtcctcgtggttcccgggaaaacttgggtcggggactacctcctggatctggacgatgctttaactgtggcattgatggtcattgggcccgagattgcaa

SEQ ID NO: 70672 - DNA, 240 bp, Glycine max
  Clone ID: 700838287H1
gttgaatcaaacagtgaaagtaaaacattgtgcaattaatcatcaactgcaagtagccagtgcataagatcaatggcgtcaagacagcaattcaaggaagacagagccgaggcagctgcaaactcgcagcgaaagacatcggcgacatcaacagaacaaacgagcgcgacgaggggtacgacttgcacgacgaagccaacttcaagcaagcacgagctgaagcagctgcaaagctggcgg

SEQ ID NO: 70673 - DNA, 234 bp, Glycine max
  Clone ID: 700838288H1
gttctagatcgcgagctaccgcccttttttgtttttatttttttttttgtcttcgtttcattctctctggaggtatttgaccctttcgagggggggccggtggccacaggtcacgtgccttcctctggtggggaaagcagtgccatagccaacactcgcgtggactggaaggagactccggcggctcacgtgttcaacgttgatcttcccgggttgaagaaggaggaagtgaag

SEQ ID NO: 70674 - DNA, 242 bp, Glycine max
  Clone ID: 700838289H1
ggctgctgctatcgaatactcggataaggagggtaagggcggtgaagtgcagtacttcaatccccttttctctcttctccttttatttcatcactcacacatgcccagttctctccaccagatggattgccttatgatgaattcttttcacaaagatctgagtctctcttgaaggttcttaggtcaggtgccaggataaagaaggaagcctttcaggctgcttccattcctgttgttttggt

SEQ ID NO: 70675 - DNA, 241 bp, Glycine max
  Clone ID: 700838290H1
ggcaacaaaggcaaaagatgtcacaagagaaatggatcaacaaggcaatcttaaaacagaaaatgagacacaggacaatgaccagaagggttatggtggagcaaagtacaccattggtagtgggaccacattactacaccatttattgtagaggccaatcttaaatcagaaaatcagatacaagacaatggccaaaagggttatggtggagcaaaggacacaattggtagtgtagaccaca

SEQ ID NO: 70676 - DNA, 241 bp, Glycine max
  Clone ID: 700838291H1
gaaaaagttgctttaaatatttttttagtgtgtttgtctaagcttttaaaaaaaatcaaagtccgatattttttttactatttttgagtggctttctcaaaaaactactatgaagagccaagattattgtataaaatgtcttgaatatttgtgtatggttaaaagttataaaagcattctaaagtcgaacatagtacaaaaccataagccaaacgtaataaaatacattatagatgctttt

SEQ ID NO: 70677 - DNA, 236 bp, Glycine max
  Clone ID: 700838293H1
gcagcacagaagacaaaggattatgccactgacgcagcacagaagaccaaagattatgctactcagaagaccaaggactatgcaagtgatgcaactgatgctgcaaagaagactaaagatatgctgctcagaagactaaggactatgcaagtgaagctagtgatgttgcacagaacacaaaagattatgctgctcagaagaccaaggactatgccagcggtggtgcgcagaagacc

SEQ ID NO: 70678 - DNA, 240 bp, Glycine max
  Clone ID: 700838294H1
ctcgaacccttgagcttccacgcagccagcaaaaatctcttgaatccttgagcttccacgcagcaagctcgatctctcgaacttccaccgccaccctccgtcaacaagtttgccttcccttgtgaagagctccgtcgaagtgcatcatctctctctcacttgtggcatcgtgtgtctcattgggcagaaaccctaggccccaatcccgtgaaggataagaaggaataatgaagaagaaga

SEQ ID NO: 70679 - DNA, 169 bp, Glycine max
  Clone ID: 700838295H1
ggatagaccaagaaagcctgaagtggttccagaccttttgaagaatgatttggtattccagttaatgtggcagatcaccagctagatgagacgctggagcatggcagctgataatcagaagcacagtgcactggccatcatcagaagaggtcgccgcatgttgtcacat

SEQ ID NO: 70680 - DNA, 244 bp, Glycine max
  Clone ID: 700838296H1
gcatttcgttactttcatttgttgtgcaatcttacaagttccaaacttctctattttgttattatttgttctcacttctcacacatacagaatatagacttttatattatcatggcttctaaggtggtttcggttttggttatagcgatgatgttgtttgccatgaactgtaactgcactagtgttggccacatgccttcaaccaaagaggaaggtcacgattttcaggagtctaaagccaaga

SEQ ID NO: 70681 - DNA, 221 bp, Glycine max
  Clone ID: 700838301H1
ccaaggatgtgtcgcagcaaatcaaaatggccaacaagaaaatgaagaaggaacaatattcttgtgaccatccacctgcatcatgggattggaggaaaaaaggtgtcatcacccaagtaaagtaccaagggggttttgaaaccgtttggcgttttctgccacgggagccatagaagcagcacatgcaatagcaacagggagaccttgttagcctttctgaa

SEQ ID NO: 70682 - DNA, 225 bp, Glycine max
  Clone ID: 700838303H1
tctcgagccgaatcggctcgagcgtatttcatagtcagaggtgaaattcttggatttatgagagacgaacaactgcgaaagcatttgccaaggatgttttcattaatcaagaacgaaagttgggggctcgaagacgatcagataccgtcctagtctcaaccataaacgatgccgaccagggatcagcggatgttgcttttaggactccgctggcaccttatgaga

SEQ ID NO: 70683 - DNA, 226 bp, Glycine max
  Clone ID: 700838304H1
cacccaacaaacactctctttggtaccaagcggttgattggtaggcgctttgatgacgctcaaacacataaggagatgaaaatggttccattcaagattgttaaggctccaaatggagatgcatgggtggaagccaatgggcagcagtattcccctagtcaaattggtgcctttgttctcaccaagatgaaggaaactgcagaagcttatctaggatagtcaattt

SEQ ID NO: 70684 - DNA, 222 bp, Glycine max
  Clone ID: 700838307H1
tggtcgcagaagtggaaccacgggcggcaccggttatggaggcactggtggcactgattaaggaacaactcgtggcactggttatggaagtggaactgggtatggagtcaacactgggggtgcgcacactgaagcaggatataggcatgaacatcgtcagcatgaccaatctcatggtgatcagaacgagaagtaagggattatggtcaagattaaggagaa

SEQ ID NO: 70685 - DNA, 91 bp, Glycine max
  Clone ID: 700838309H1
ggagagcgcaatgggaatgagtatcttatcaatctcattgactcccctgggcacgttgacttctcatctgaggttactgctgcactccgta

SEQ ID NO: 70686 - DNA, 224 bp, Glycine max
  Clone ID: 700838311H1
aaagccaatgattagaggcatcgggggcgcaacgccctcgacctattctcaaactttaaataggtaggacggtgcggctgctctgttgagccgcgccatggaatcgagagctccaagtgggccatttttggtaagcagaactggcgatgcgggatgaaccggaagctgggttacggtgcccaactgcgcgctaacctagaccccacaaagggtgttggtcgatt

SEQ ID NO: 70687 - DNA, 223 bp, Glycine max
  Clone ID: 700838312H1
ggagcaagtttacgagctcttctcgcgtgctggggaaatcaaaaagatcatcatgggcttggacaagaacacaaaaacgccttgcggcttctgtttcgttttatattattctcgtgaagatactgaggatgtttgcaaatacataagtgggacgatactggatgatcgtcccattcgagttgattttgattggggatttcaggatggtagacaatgggggcgt

SEQ ID NO: 70688 - DNA, 224 bp, Glycine max
  Clone ID: 700838313H1
cagagagaggcagagatgcaaggaagcgcactgacggtgaagccttggatttcgagcctgaggacgatgacttgatggacgaggacggcgcccccgacgccgacgcttctccgcctcaacctaagctcaaatccgccatcaccgccgccgccgcccccaaaaagaccaagggtcgcggattccggcaggacaccgacgccaaccgtgacactcgcctctccggc

SEQ ID NO: 70689 - DNA, 212 bp, Glycine max
  Clone ID: 700838314H1
ggctcgagcttcgcgaaggtgtaccacgcgcgccacctgaagacgggaaagagcgtggcgatgaaggtggtgggcaaagagaaggtggtgaaggtaggcatgatggagcagatcaagagagagatctcagccatgaacatggtgaagcacccaaacatcgtgcagcttcacgaggtcatggcgagcaagtccaagatctacatcgccatgga

SEQ ID NO: 70690 - DNA, 224 bp, Glycine max
  Clone ID: 700838315H1
cggctcgagcggctcgagcggctcgagcggctcgagaaaaaatttgaaagaattcaccaccctttttgctcagtttatatatttaatttttctcctgctctcagctgctgtaggtaattgttgcggtgctgttttggcaaagagggagagagagagagacccaaaagagactatgctcggggactcagctctgttgggaggaggaggaggagaaggttgtgcct

SEQ ID NO: 70691 - DNA, 122 bp, Glycine max
  Clone ID: 700838319H1
cattcttggtggtgggatagtcacatcagccccaagaattctaagtggctttcagaaaaccttgaagagatggaccggagtgtgaagcgaatgttgaagctgatagaagaggatgcagattc

SEQ ID NO: 70692 - DNA, 221 bp, Glycine max
  Clone ID: 700838320H1
ctcgctaaaaccctaaaccccattttcccattccacaacactcttcccttctcctcttcaatcctttctcgccagaagctcactcgccggagcctatcccgctccgtcctccgtcctaccgccggcgaactttccggcagcgtcgactacgatgaagaatcgggcgaattggacgacctcgatctcgtcggcctcgagcaagaagtccaatgatgccgtcg

SEQ ID NO: 70693 - DNA, 220 bp, Glycine max
  Clone ID: 700838323H1
ctcgagccgaatcggctcgagttcatgtgacaatgggtgtaattgaggtcttatgacgaatgcctacaattatttgctcgagtctggtggggtggaggaggagtcttcatatccctacactggggagagaggtgaatgcaagtttgatccagagagtatagcagttaagatcacaaatttgaccaatatccctgctgatgggaaccaaattgccgcatat

SEQ ID NO: 70694 - DNA, 224 bp, Glycine max
  Clone ID: 700838326H1
gaaaaattgatgcgtgaaaggacacacctgctgttggcttgttgttcaaggatggcaatttgtaagaaagatatttggagagttgaatgtggaatcccttctggatttccgctcacagttatttgcaatagcatttttaatgagatgctcattagatatagctatgaaaaattattgcgccaggctaaagctccaagtatgtttttacaatccttcaaaaattt

SEQ ID NO: 70695 - DNA, 224 bp, Glycine max
  Clone ID: 700838327H1
ttttgattggagagagaaaggagctgtcaccgaagttaagttacagggtagatgtggatcatgctgggctttcagcaccacaggatctatagaaggagccaattttcttgccaccggaaagctcgtcagtcttagtgaacaacagctccttgactgtgacaacaagtgtgacataacagaaaagacttcatgtgacaatgggtgtaatggaggtcttatgacaa

SEQ ID NO: 70696 - DNA, 223 bp, Glycine max
  Clone ID: 700838328H1
atgagatgctcattagatatagctatgaaaaattactgcgccaggctaaagctccaagtatgtttttacaatccttcaaaaattttgtttctttgtgtgtgtatggtgatgataacttaattagtgttcatgaatatgtcaagccttactttagtggttctaaattgaaaagctttctagctggtcataatatcaccattactgatggtattgacaaaactag

SEQ ID NO: 70697 - DNA, 225 bp, Glycine max
  Clone ID: 700838330H1
cacgagatatggcttcaactctgcttcccctggcaaccttcttcttagttctctccgcttcttatctccagattgctggggcgaaagcacaaccgttgactagtctcaagcttaactctccgatccttcaggagtctattgctaaagagatcaatgaaaatcctgaggcaggatgggaggctgctataaatcctcatttctccaattatacagttgaacaattta

SEQ ID NO: 70698 - DNA, 219 bp, Glycine max
  Clone ID: 700838336H1
ggattctacccgccgctcgatgggaattgcgcttcaaggcgtctcgtagggctaatccgcctcacgagggtcaccaacggcacgtgcctttggggggccgaggccccctactgctggtcggcaaacggacggcgggcgcacgcgtcgcttctagcccggattctgacttagaggcgttcagtcataatccaacgcacggtagcttcgcgccactggctt

SEQ ID NO: 70699 - DNA, 221 bp, Glycine max
  Clone ID: 700838337H1
cacaaaacaaaaagtttacgttacaaatcgcataataaccgtcctaagtttattgagagaattttgcaagtgtgagaaacatggcatctcgtcaaaacaacaagcaagagcttgatgaaagagcaaggcaaggagagactgttgtcccgggtggaactggtggcaagagcctggaggctcagcaacaccttgctgaaggaaggagcaagggcaggcaaaca

SEQ ID NO: 70700 - DNA, 220 bp, Glycine max
  Clone ID: 700838338H1
cagattgatcagaagaatgaagcagttctcttgcctataaatggaagcatggtaccttttcatgtggctttcattcgaactgtttccagccagcaggacaccaaccgcaattgctatgtcagaattatttttaatgttcctgggactcctttcagtcctcatgatgcaaactcaatgaagttccctggatctatatatttgaaggaggcgtcattccgct

SEQ ID NO: 70701 - DNA, 101 bp, Glycine max
  Clone ID: 700838339H1
gtaatatactttggacttctcgttgagcattagcttacagcattaaatattgttgaccttgttcatgtcgcgcaacgagttctaaatggaagatgcatttt

SEQ ID NO: 70702 - DNA, 222 bp, Glycine max
  Clone ID: 700838341H1
gaaaacctaagcttagaattagaaacaaagaaaagaagaaaggaaagaattgatcgttgaaaatgcagggaggaaagaaagcgggagagtccattaaggaaacagctacaaacattggtgcttctgccaaggctggcatggagaagaccaaggccactgtccaagagaaggcagaaagaatgacagcacgtgatccggtgcaaaaggagttggcaacccaaa

SEQ ID NO: 70703 - DNA, 223 bp, Glycine max
  Clone ID: 700838342H1
gcagatcgtgacagtggagggaggcctcagcgttatcagccccaagtggcaagaacaagaagacgaagacgaagatgaagacgaagaatatgaacaaactccctcttatcctccacgacgaccaagccatggaaagcatgaagatgacgaggacgaggacgaagaagaagatcaacctcgtcctgatcaccctccacagcgaccaagcaggcccgaacaacaa

SEQ ID NO: 70704 - DNA, 222 bp, Glycine max
  Clone ID: 700838343H1
aacctctttatttcggagttttctttctttggatctttgtctaatgtgggagcaatggtgggagctatagcgagtggtcagatagctgaatgtatcgggcgcgaagggtcattgatgattgctgcgatccccaatataatagggtggcttgctatttcttttgccaaagattcctcatttttgtatatggggaggttgttggaaggttttggcgttgggatt

SEQ ID NO: 70705 - DNA, 224 bp, Glycine max
  Clone ID: 700838344H1
ctcgagccgcaaaaccaacaacaactatggcaagttatcaaaagcactacgatgatcagggtcgcaaggttgacgagtatggcaacgttgagaagcaaaccgacgaatacggcaaccctgttcatgctgctagtgtcacctatgtagccaccagaactgctgctggtggttacagtgatgacattaataagcaacatgataccaccaatgacctacggcgtaga

SEQ ID NO: 70706 - DNA, 210 bp, Glycine max
  Clone ID: 700838345H1
ccattcactaatcactaccaattgctaaagatatttcactcactggtcacactactaatacagctttctggagatggcttcaactgtctcttacatgcttctacttccccttctagtgatggttgcctttgctggggacttaaacaaagactttgacatcacatggggagatggccgctccaagatactaagccatggagcgtgactcac

SEQ ID NO: 70707 - DNA, 223 bp, Glycine max
  Clone ID: 700838346H1
gccgaagttttcaaaagagctggtacttacgatcccaagagacttttgggagtcactatgcttgatgttgttagagccaatacgtttgtggcagaagttctgggtgttgatccaagggatgtggatgtcccagttgttgggggacatgctggaatcacaattttacctcttctttctcagattaaacctccttgctctttcaccccaaaagatattgagtacc

SEQ ID NO: 70708 - DNA, 224 bp, Glycine max
  Clone ID: 700838347H1
cggctcgagaacaaagaaaggaaataattgatctttgaaaatgcagggaggaaagaaagctggagagtccatcaaggaaacagctgcaaacattggtgcttctgccaaggctggcatggagaaaaccaaggccactgtccaggagaaggcagaaagaatgacggcacgtgatccgatgcaaaaggagttggcaacccagaagaaagaggcaaagatgagccagg

SEQ ID NO: 70709 - DNA, 219 bp, Glycine max
  Clone ID: 700838351H1
tgaggaggaaagcaatgatggtcagctttacaagctttgtgcaatttgccatagtttgggaggagcttctatgttaatgtatgttgttacgcgtaggatagaagccaagccccatagactttcaagattggttttgttatcacctgctggttttcatcatgactctaacctagtcttctctgtggcggagatgtattgtttttgctggcccctatttgg

SEQ ID NO: 70710 - DNA, 219 bp, Glycine max
  Clone ID: 700838352H1
tgtctctctgcttgcttcttgttgttgtaactaaggaacaagagattgcttcttcttcccttttgttttcaaatttcaatttttcatcgggttctctgaaatggagagagatttcatgggtctcaactcaaaagaacctcttgctgtggtgaaggaggagatgcacgtttatggcttcgaagactctggcttcacaaagggtcggattgcacagtggtc

SEQ ID NO: 70711 - DNA, 218 bp, Glycine max
  Clone ID: 700838354H1
cttcttctcttgcggctagggttttagcgcacttcttctagatttaaggaagatgggtaaggaacaggttcacatcagtattgtggttattggccatgttgactctgggaagtccactaccactggccacctgatctacaagcttggaggcattgacaagcgtgttattgagagatttgagaaggaagctgctgagatgaacaagaggtctttcaagt

SEQ ID NO: 70712 - DNA, 220 bp, Glycine max
  Clone ID: 700838356H1
aaagaacaagggattctcttcatccaagttcgctagtaggacatattgtaatggcaacagtggaagcatcccatgaagctatggctacggtggccaacaaggcaccaatcactgctgagagaaaggtccctgaggacttggacagcaaactccccaaaccatatttgcctagagctttgagtgcccctgacacagagaatgtgaatggcacgtggggcca

SEQ ID NO: 70713 - DNA, 219 bp, Glycine max
  Clone ID: 700838357H1
gagaaattggatctcagaattcgcggtggaaacaatgggaagtgcatcatccgaagaatgaatatttagggttgtgtggatcagggtgtgtgggtagaattacttcagtggcagggcgtttaacttgtggaatcgaagaaggggtatgatattgaaagggggaattcgagggatatgctgtaatttagggttggacttgtcttgacagtgattgggagc

SEQ ID NO: 70714 - DNA, 221 bp, Glycine max
  Clone ID: 700838358H1
gaacctcccatgagagtaatgatgatgcttttgaacatgttggttcaatacttgttaacatctcaaaacagcggaaagggagggagcttctacttgaccctaaacggggtctcttaaagcagataatcagacagtttgattccaacagttcattgagaaagaaaggggtctctggaactattcgcaattgttgttttgaagctgagaatcagctacaaaat

SEQ ID NO: 70715 - DNA, 221 bp, Glycine max
  Clone ID: 700838360H1
taagcttagaattagaaacaaagaaaagaagaaaggaaagaattgatcgttgaaaatgcagggaggaaagaaagcgggagagtccattaaggaaacagctacaaacattggtgcttctgccaaggctggcatggagaagaccaaggccactgtccaagagaaggcagaaagaatgacagcacgtgatccggtgcaaaaggagttggcaacccaaaagaaag

SEQ ID NO: 70716 - DNA, 219 bp, Glycine max
  Clone ID: 700838361H1
cgtgtttttaatgaatgtggctttggttatactatgttgttcgaacattattgtttggttagtttgattctagaacactgaattgatttggtcagtttaattctcacatgacctttggaataaaaaatttattaggtggtagttgcattttggttagagaagaagacaaaaatagtagcctattcttaaaaattgtgccattcaagttaatccttgaaa

SEQ ID NO: 70717 - DNA, 223 bp, Glycine max
  Clone ID: 700838362H1
cgatatctttcatcgcctacggcaacgcttcatttgaatcaacactccttcctcttcctctctctcgtccattttagttcaactttgaataattctccttcgtatcaagtcttcctcatacttcaccacctttttatatttatgtgtctaagaacataaactaaaaaaccaaggcgagtgaaaaaaaaaaaatgtcaggtgtgtctctagcagtgtctggtcc

SEQ ID NO: 70718 - DNA, 229 bp, Glycine max
  Clone ID: 700838364H1
tcgagggggaagtatggacacaaaaaacaagcttggaaaggacatcattctgagaagaatagctcaaggcctgaacaaacaggagatgaggagaatcatggctctaatgatcatcatgaagatacccatgaggaagaagatggggatcatttgtcaaaggataagggtgggcagaggtatagaaatcaaggaagatcaagaaaacataaatatcgtgctggaaatggaa

SEQ ID NO: 70719 - DNA, 220 bp, Glycine max
  Clone ID: 700838365H1
ggagacgagttgcttcttcaagaaggccatagtagaagtgtatatggtttggctttccacaatgatggatcattggctgcatcttgtggactagactccctggctcgtgtttgggacctccgaactggaagaagtatccttgcactggaaggtcatgtcaaaccggttctcggcatcagtttttcacccaatggatatcatctagccacgggtggtgaag

SEQ ID NO: 70720 - DNA, 219 bp, Glycine max
  Clone ID: 700838366H1
ctcgagccgaatcggctcgagcggctcgagaaagagagagagttagcttctgatagagccaagtctggaaatatagttaaggaggacaaagtggttgaagaaggaagaagaggaaaagaaagtggtggtggtggtggtgttcagcatgagaggaagtttgaaacgaaagttgaagagaagaagggttttggggaaaaggctgaactcgagggaataaca

SEQ ID NO: 70721 - DNA, 219 bp, Glycine max
  Clone ID: 700838367H1
cgaaccgggaaaagcccaccatgaaaatcggtcgccctcggcgtccgaattgtagtctggagaagcgtcctcagtggcggaccgggcccaagtcccctggaagggggcgccagagagggtgagagccccgtcgtgcccggaccctgtcgcaccacgaggcgctgtcggcgagtcgggttgtttgggaatgcagccccaatcgggcggtaaattccgtcc

SEQ ID NO: 70722 - DNA, 219 bp, Glycine max
  Clone ID: 700838369H1
catggattctctactggcgaactatgcctcttcagatgaagaagaagatcaacagccatccccaccaaaaacgacgacgttttcctcccttcctcaacccaaactttctctgtttcaatcccttcctcaacccaaatcttctctgtttcaatcccttcctccacccaaacaaccttccaccgaaagctcttccctccctaaccctaaccctaaccctga

SEQ ID NO: 70723 - DNA, 218 bp, Glycine max
  Clone ID: 700838370H1
aaagaaaggaaataattgatctttgaaaatgcagggaggaaagaaagctggagagtccatcaaggaaacagctgcaaacattggtgcttctgccaaggctggcatggagaaaaccaaggccactgtccaggagaaggcagaaagaatgacggcacgtgatccgatgcaaaaggagttggcaacccagaagaaagaggcaaagatgagccaggcagagc

SEQ ID NO: 70724 - DNA, 217 bp, Glycine max
  Clone ID: 700838371H1
gtgtgattgagttaaagttgctgaagacaatgagttggacaataatgcaattggaacaatctggaaatccttctatagatattcactgctatgttgatgatgccaataaaattccttaatttacaacattgtttggcctcaagtgtgctttgtaggaactaggaagcgaaacctttgcaattccatgaacataatggaaatcgtttacccgttgggt

SEQ ID NO: 70725 - DNA, 221 bp, Glycine max
  Clone ID: 700838374H1
gattcagcacactttcaacctaaaaagccagcaggccaggcagataaagaacaacaaccctttcaagttcctggttccacctcaggagtctcagaagagagctgtggcttagagccctttttgtatgtgctaccccacttttgtctttttggcaatagtgctagcaaccaataaataataataataataatgaataagaaaacaaaggctttagcttgcct

SEQ ID NO: 70726 - DNA, 218 bp, Glycine max
  Clone ID: 700838376H1
attttgtaagaatgggtctagtcacaactgagaggaacagtctagacccagctgcagctccgtttgctaaaaatccaagagacatagaagggcttactgagggtgctagtataattgaagtggttaagaagattaggtcacatgtgctccttggtttgtctggcgttggtggtatttttaatgaggagccttgcttcatacatggctgaggaagatat

SEQ ID NO: 70727 - DNA, 218 bp, Glycine max
  Clone ID: 700838377H1
aaaagactttctctttacaaattttgtaactttcaagactcagctaataaacatcaaaagatgtctctgattccaagtatttttggtggccgaaggagcaacgtgttcgatcctttctcccttgacgtgtgggaccctttcaaggattttcattttcccacttctctttctgctgaaaattctgcatctgtgaacactcgtgtggattggaaagaaac

SEQ ID NO: 70728 - DNA, 221 bp, Glycine max
  Clone ID: 700838378H1
tccagacaaaaaagtggtgtcatcatgtgagaagaagaagaagaaaagtgtgagtgcagaaaagaagagtggtgggcgagctcggaagaacgtgtacagaggaatcaggcaaaggccgtggggcaagtgggccgcggaaataagggacccacataagggcgtccgcgtctggctcggcaccttccccaccgccgaggaagccgcccgagcctacgacgacg

SEQ ID NO: 70729 - DNA, 222 bp, Glycine max
  Clone ID: 700838379H1
ctccgacgtggcgaggaacgaaggcgtgagcgtgaccgaaaccaaagtgggctgccaccgcgtcatcacggagttcgtgggaagacacgtggtggggcagttcgtggagcccgacgtccccatgaacaccccaggcaccgcgctggagcgtgacgccataaccatcggcgaggctctcgaggcatcggcgatagccggagcaagcgacaagccggtggatga

SEQ ID NO: 70730 - DNA, 222 bp, Glycine max
  Clone ID: 700838380H1
ctaagcttagaattagaaacaaagaaaagaagaaaggaaagaattgatcgttgaaaatgcagggaggaaagaaagcgggagagtccattaaggaaacagctacaaacattggtgcttctgccaaggctggcatggagaagaccaaggccactgtccaagagaaggcagaaagaatgacagcacgtgatccggtgcaaaaggagttggcaacccaaaagaaag

SEQ ID NO: 70731 - DNA, 197 bp, Glycine max
  Clone ID: 700838381H1
tcgtaattcggctcgagggaagaaattctgtcttctagtgcaagtgatttcagaactgcaatggtgagtaaaaatagcaagcctcaagctactgcaatgcatgtgggagctataggaattatcattgatagtttcgcaagtcctgactgcaacatagttggtgcagtgcttttggttgatacttatcataccaatcc

SEQ ID NO: 70732 - DNA, 218 bp, Glycine max
  Clone ID: 700838382H1
caaccagatagacacagtgaaacgcgaagatggggcaaacatcaccgagcaagacctcttgcagataccaagaggagcccgcaccatggaaggtctcagattgaacacaagggtgggaattcagtacgtggcggcgtggctcaccggaagcggttcggtgcctctatacaacctcatggaggatgctgccactgctgagatcagcagggtgcagaatt

SEQ ID NO: 70733 - DNA, 217 bp, Glycine max
  Clone ID: 700838383H1
aaatttaagatggattggacattcacaaggattcaaaccaatactttgtatttagctatatttagactacatattagaccttaagtaaagcagtttaatactttaatcaacttaaatggagaaccaattaatatttaaattctcagatattggaggcagagcgtgtctcccaatctcctatagagggaattatacaaacttctgttgtatcataaag

SEQ ID NO: 70734 - DNA, 217 bp, Glycine max
  Clone ID: 700838384H1
cacacacaactactacaagtacttccttacaatcaaaaccaacaacaactatggcaagttatcaaaagcactacgatgatcagggtcgcaaggttgacgagtatggcaacgttgagaagcaaaccgacgaatacggcaaccctgttcatgctgctagtgtcacctatgtagccaccagaactgctgctggtggttacagtgatgacattaataagca

SEQ ID NO: 70735 - DNA, 216 bp, Glycine max
  Clone ID: 700838385H1
ctctttctgcaaaagctacgaagctgtgttctgatccttcaaattaggttgtatgctttttttggggagttaaatggatgctaggccgtggatttggtcaatttgatctcaattgaaattttttagtatttctgatggactcgaaaactagttctagagctctcccaaaacaccatcagaagacggctgggattcaaacccttgaggcaaaagaca

SEQ ID NO: 70736 - DNA, 217 bp, Glycine max
  Clone ID: 700838387H1
caaaaatcatatcttccactccacaacctcaaacttctctctctctctctcttttcctattctcaatatcccacaaacccttttctctattccatctaaagatccattatttctgcaatttcaatatatgggtcttcattaattcactaagattctgcataaatcatcgtttccattgaagtttctgttccgatggagttaatttcgggattgccag

SEQ ID NO: 70737 - DNA, 215 bp, Glycine max
  Clone ID: 700838388H1
tctcgagccgaatcggctcgaggttggtgttagtcttggtgtagtgtagctagggagggatatatatctgagtaagatggcatcagagcttgaattgcccccaggcttcagattccatccaacggacgaggagctggtgttgcactatctctgccgcaaatgcgcgtcgcagccaatcgccgttcccatcatcgccgaaatcgacctctacaaat

SEQ ID NO: 70738 - DNA, 216 bp, Glycine max
  Clone ID: 700838389H1
atttggtcttggagagggcattgatgagcgacctgctcttctaagtgctattatagatctcttgccagatgaaaagccacgcatgatcagtgggcttggactcccggaggagatcttggagggcattgatgctgggattgatctttttgattcaacgtacatctattccctcacacttggaggatttgcactaacgttttcactagacaagggtgg

SEQ ID NO: 70739 - DNA, 219 bp, Glycine max
  Clone ID: 700838391H1
aaagctaacttcaacacctttaattttctaaaagtaattcagcggctgaataccaagcggagaagatgagtcaggagcagccacggcgtcccaaaggccaaaaccccatcaaatacggcgacgtttttgtcgtctccggcgaccttgcacagaagcccgtcgcaccggaagatgctgccatgatgcaaagcgcggaaactcgagtgctcggacaaaccc

SEQ ID NO: 70740 - DNA, 217 bp, Glycine max
  Clone ID: 700838392H1
gctggtacctacccttttccaagaactagttatgtcggttgagtaattttattttcggaaaaaattaaaaaatagagagaggaaattgattggtggtgcaaggcataaagaggagaattggtggggataggcaaaggaggtgagtagtgaatagggtttttgattgattgagaattgaaattgatggatcgcagtgtgtcacgctcacgctctcctt

SEQ ID NO: 70741 - DNA, 220 bp, Glycine max
  Clone ID: 700838394H1
tcttaaccagaagcgcgctttttcgcttttcaaagtctctcccttatgccccttcactctcccttaaaccctccatggtcaccttctcctctactcccaattcaggctggagaaatgcagcagaaggaggaagaagagacggaagaaccaattggacgtatgattctgccgaggcaagacgcgatgcagatgaaatgtctgagagtgccaaagaaacgat

SEQ ID NO: 70742 - DNA, 217 bp, Glycine max
  Clone ID: 700838395H1
gcagcaccttaggatggcatagccttaaagttaagggcgaggttcacacgaagaaaggcttattgtggatacctaggcatgcatgaatgaggaagggcgtagtaagcgacgaaatgcttcggggagttgaaaataagcgtagatccggggattcccgatataggtcaacctttcgaactgctgctgaatccacgggcaggcaagagacaagctggtg

SEQ ID NO: 70743 - DNA, 221 bp, Glycine max
  Clone ID: 700838396H1
cttgcatacagcactacctagctcgcaagcaagcacagccatggatgcctcgcgtcgccatgttctcatctgctttgcacgtgtttcactcttcctctgcgctctatccctatccgctgctcacggatcctccacggttcaagacatcgcgataaagttgacactcggtgacaaccatcttctgcgcatgtactagaagttcgtggctttcatcgatactt

SEQ ID NO: 70744 - DNA, 252 bp, Glycine max
  Clone ID: 700838403H1
acaagaaagaacttccttataaccaaaaccaacaacaactatggcaagttatcagaagcactacgatgatcagggtcgcaaggtcgacgagtatggcaatgttgagaggcaaactgacgaatatggcaacccggttcatgccactagtgtcacttatgtagccaccaaaagtgttggtggctacaatgatgacgctaataagcaacatgatattactggtgtctatcccgagaaagacaccggtagacatca

SEQ ID NO: 70745 - DNA, 247 bp, Glycine max
  Clone ID: 700838405H1
ctttaggttttccttccgtgcgtttactcggaactactcttccactcttcgtttaaaatgtctgacgtggaagagtatcgttgtttcattggtggccttgcgtagtcaacatctgatagaaagttaaaggatacgtttgacaagtttggcaagcttattgaggcacaggtggttgttgacaagttctctgggcgttctcgtggttttggatttgtcacattgatgacaagaaagcaatggacgaggc

SEQ ID NO: 70746 - DNA, 250 bp, Glycine max
  Clone ID: 700838407H1
gaaactcggggacaacgagcttctgcgcacggagaagaagttcaaggttttcatggagaattacgggaggagctactccacagaggaggagtatttgcgccgtttggggattttcgcccagaacatggtcagagcggcggagcatcaggcgctggaccccaccgccgtccacggcgtcacgcagttctccgatctcaccgaggacgagtttgagaagctctacactggcgtcaatggcggcttcccgtca

SEQ ID NO: 70747 - DNA, 251 bp, Glycine max
  Clone ID: 700838409H1
cgtggtcacaagaaacgcggcaatgccagcttatgcgtcctctgccttaccgcattcgcagttaggacattctggtgaacctcatggttggttttattgtttgcctcgctttcgccagggatttaccacgcctgctcaaaccttcaatgcagaggaaaaactccctgctggccatgccaatggtttaggggtggaagttgcgccgaatagggaatcgggtttccctcagaagcaattgctggttattgatc

SEQ ID NO: 70748 - DNA, 249 bp, Glycine max
  Clone ID: 700838410H1
caactgccaagaaggtccatgaggtcacaagacatgttacaaatccaccttcacaaagcacagaacgaagacagcatcaccatggagataattcaagtgatgattctggtgctgaagaagaagatattattgtgaggattgactcaccaagcacgctatcttttcgctagtcttcagggtgaagaatcttttgtgattatttgtttgttgtgcaataaatggtgcctctgtatcaccaacattgtacat

SEQ ID NO: 70749 - DNA, 248 bp, Glycine max
  Clone ID: 700838411H1
tcaagctttatgtcaggagggtgtttataatggacaattgtgaggagctcattcctgagtaccttggatttgtgaaaggtgttgttgactccgatgacttgccgctcaacatctctcgtgagatgctgcaacaaaacaagatcctgaaggtgatcaggaagaatctcgtgaagaagtgcattgagatgttcaatgaaattgcggagaacaaggaagattacaacaagttctatgatgctttttcgaag

SEQ ID NO: 70750 - DNA, 253 bp, Glycine max
  Clone ID: 700838412H1
gccaaacgacactttcgagcattgcagctagtaaggccgcggcaacccaaaaatccgccgctcatggctcggccaatggaagaaacgcggcccctgcggttaagttttcgaacgacacagagaggcttcagcatattaatagcattcgcaaggcccctgtgggtgctcagatgaagcgtgttattgatctccttctagagacacgacaagcttttacaccagagcagataaatggggcatgctatgtcgacat

SEQ ID NO: 70751 - DNA, 254 bp, Glycine max
  Clone ID: 700838415H1
cacacaactacaagaaagaacttccttataaccaaaaccaacaacaactatggcaagttatcagaagcactacgatgatcagggtcgcaaggtcgacgagtatggcaatgttgagaggcaaactgacgaatatggcaacccggttcatgccactagtgtcacttatgtagccaccaaaagtgttggtggctacaatgatgacgctaataagcaacatgatattactggtgtctatcccgagaaagacaccggta

SEQ ID NO: 70752 - DNA, 259 bp, Glycine max
  Clone ID: 700838416H1
ggctactatccatttgggagcaactgagctgcttggagagtatttttcttcttctagaaaaaattacagaccctcatcccagagagttagctgtatgcattgcgagacatatcagaaattcattcagttttctggttgcggttagccaccttccattatacttgagggagattcttcaagggcacaagctaccttagaggctgaaattgcggctgcgtataatttgaattctggcatttgctgcatctgaatatctctg

SEQ ID NO: 70753 - DNA, 251 bp, Glycine max
  Clone ID: 700838418H1
gaaattactttgccattgggtctttttgccattctgcttggtagaactttgaaaggttctgtttttggaggactcagggccatttcagacctttccattttagctgacaaaggccacaaaaaggaattccctcttcaagaactcttcacccatgaggtcacattagcagacataaacaaagcatttgagctactaaaacaacccaattgtgtcaaagttgtcatcaacatgccatagtcatattagcgcaa

SEQ ID NO: 70754 - DNA, 249 bp, Glycine max
  Clone ID: 700838420H1
atcgagtcatctgtatcatgcatatgcatggttcaagctctttttattgcaaaaaagcttcaataagaatctgagtcagaaagatttgcaattaatagcttcatctgttgttctggctgcactttcagtgcctcctcatgatcacacccacggtgcatctcatttggaactggagcatgaaaaagagagaaatttgagaatggctaatctcattggctttaatcttgaaactaaacctgaaagcagaga

SEQ ID NO: 70755 - DNA, 247 bp, Glycine max
  Clone ID: 700838421H1
tgggaagctgactgagaaagttctgagactttttatagcaactgggtgttctaaggcaaaatcagactgttagtttgtacgatagtctgtaccttgcaagatgtctcaagcagttatcaacgataatgcagtggacattgtgattggtagcactgcattctgatcgtacaacttttatgaatgaatggaggccaattttctcccgctttcacctgataatagtaaaagatcctgacctcaaggagga

SEQ ID NO: 70756 - DNA, 126 bp, Glycine max
  Clone ID: 700838422H1
gacggtactacgcgggttttccatgactgcgcgaacatcgtccgtcactctcccgacaaaatcacgatacgctctcctcttccccctctccgcttctacgaattctccgattctttcttccgtcgc

SEQ ID NO: 70757 - DNA, 251 bp, Glycine max
  Clone ID: 700838424H1
aagcccttaaaccccaacccaaatctccatcaacaacagcaagagttccatggtcgttgaatcccaacaatgaaagctctgagaaccctaagaagaaccctctattccccaacacccgcaaccgtttttcgcgccttcttctccgcacaaccacagccgcaccacgatgaccccaccgactcctccgtcttcgatagttcccactacgcccttgaggccgagcccacgctcaagcccgagccaaagcccac

SEQ ID NO: 70758 - DNA, 251 bp, Glycine max
  Clone ID: 700838425H1
ctcccaacacattctggtcaccggtggtgccggtttcattggcacccacaccgtcgttcagcttctcaaagctggcttcagcgtttcaataatcgacaatttcgataactccgtcatggaagcagtggaccgcgtccgccaagtggttggccctctgctttctcagaacctccaattcacccagggcgatctccggaatagggatgacttggagaaactcttctccaaaacaacatttgatgccgtgatcc

SEQ ID NO: 70759 - DNA, 250 bp, Glycine max
  Clone ID: 700838426H1
ggagcgagctgaggcagctgcgaaagttgctgccaaagaactcgaacaagtcaacagagaaagaagagaccgtgatttcggtgttgttgctgaacaacaacaacaacatcatcaggaagatcaacaaaaacgtggtgtaatcgggtccatgtttaaggcggtgcaagacacctacgagaacgccaaggaagctgtcgttggcaagaaagaagctactaataacgcgtacagtaatacagaggttattcac

SEQ ID NO: 70760 - DNA, 254 bp, Glycine max
  Clone ID: 700838429H1
gttctcttttgtgttagtgagagaaagttctctctgcttctctctcttagactcaaaaccctattgcgtgctttgcaatcgaccccgattatggccaacagtaacctccctcgaagaatcatcatggaaacgcagcgtttgctcagtgagccagcacctggaattagtgcgtccccttcggaagacaatatgcggtatttcaatgtgatgatccttggcccaactcagtcgccttatgaagggggcgttttcaa

SEQ ID NO: 70761 - DNA, 254 bp, Glycine max
  Clone ID: 700838430H1
gtgggttgaaagtggatatctagctgcccttgtggaaatgggggatggtatggtcctgaaattggaagatggaaggctgtgctagctaaaccctattcaaaacattgcaccaatcttggatatggaagttgtagattatcatgatgagaagcaagatcaaatgtttgcttgctgtggtgtggcaccagaggggtcattaaggattattcgaaatggtattaatgtggaaaatctacataggactgcttctatat

SEQ ID NO: 70762 - DNA, 260 bp, Glycine max
  Clone ID: 700838432H1
cacaaaattgaactgtaattgtagtagtagacagtagcaccatgagccaggaacagctcaagaaacctcaaggggagcaggaccccatcaaatacggcgacgttttcaaagtctccgacgaactcgctttcaaacccatcgcgccaagagacgcagctctcatgcaagccacggagaaccaagcattgggccaaactcaaaaaggaggtcccgcctcggtgatgcaatccgccgcaaccgaaaacctccgcgccggcgtc

SEQ ID NO: 70763 - DNA, 253 bp, Glycine max
  Clone ID: 700838433H1
aacatgtcgaaaaattaaagctcttcatctttatgactgcctgagagccaataaatcaactgcagcatggggtgtagaggcacgtgtaccattcttggataaagaatttatcaacgtagccatgagtatagatccggaatggaaaatgataaggcctgatcttggaaggatagagaagtgggtattacgcaatgcatttgatgacgataagaatccatatttaccaaagcacatattgtacaggcagaaggaa

SEQ ID NO: 70764 - DNA, 251 bp, Glycine max
  Clone ID: 700838434H1
tttttacagatgatgtactcattcctagaccgagttgtcaacttgggacttcctaggacaagagatttccaaggtgtgaaccccaacagctttgatgggcatgggaactacagcattggcattaaggaccagggtgtcttcccagagatcagagctgatgttgttggtaagcctcggggaatggatatctgcctcgcaacaacagctaaaaccgaccaagaagcacacaaattgttggctcttatgggtat

SEQ ID NO: 70765 - DNA, 250 bp, Glycine max
  Clone ID: 700838436H1
gttgaaggaaatggctgaagcacaactacgagaccagcatggcaaccctgtcccactcaccgatcaatacggtaatccggttatcttaactgacgagcgcggtaatcccgtccaactcactggtgtcgctaccaccgctaccggcacagcaggttctgggtttgggtcctatggtaccggtgcttacggtggtggtgcaagtgcaaccaccgttgcagatcttttggcaacccaaccaaggagtggcagg

SEQ ID NO: 70766 - DNA, 245 bp, Glycine max
  Clone ID: 700838437H1
gttagttttttgcgatcaaagtaaaatcaaagctatgcaggaggcgaactcggtggcgaaatcaacatgcaacgcatggaagtatgcaactaaaggagaagaaggtgagggatttgatggtggacaagaagaggctagtggaggtgccgtacatggcgtcgctggcccacacaatgactacactggtagcgaacaaggttgtggcggtgccggtggctgcgccgccggcggaaatggatcggagc

SEQ ID NO: 70767 - DNA, 248 bp, Glycine max
  Clone ID: 700838438H1
gttggaaaaggctcgtgaggaggtctacagtgttgtgggaaaggacagacttgtggacgaagttgacactcaaaaccttccttacattagagcaatcgtgaaggagacattccgcatgcacccgccactcccagtggtcaaaagaaagtgcacagaagagtgtgagattaatggatatgtgatcccagagggagcattgattctcttcaatgtatggcaagtaggaagagaccccaaatactgggaca

SEQ ID NO: 70768 - DNA, 244 bp, Glycine max
  Clone ID: 700838439H1
attaagactacaaattttcaatttttcaatggcgtcgaggcaacaaaaagaggatcgagctgaggcagctgcgaaagttgctgcgaaagaactcgaacaactcaaccgagaaaaagaccgtgatttcagcgttggtgttgcagaccaacaccaacaagaagaacatcagttagatcaacaaaagcgtggtgtaatcggatccatgttcaaggcggtgcaagacacctacgagaaacaaagaagc

SEQ ID NO: 70769 - DNA, 247 bp, Glycine max
  Clone ID: 700838440H1
gcttacaaagctttacgtgatcgagcaccataccctgccaatcgtgttgtatgccatctcagtgggagctttgctttcatagtttttgacaagtccacttctaccctttttgtggcttctgatcaagctggtaaggttcctctttattggggaatcacagctgatggatatgtagcatttgctgatgatgcagatttgcttcaaggttcttgtggcaagtcacttgcttctttccctcaagggtgtt

SEQ ID NO: 70770 - DNA, 249 bp, Glycine max
  Clone ID: 700838441H1
atatgatatagaaagagagagaagaagaaaagaagaacaaagatgcaatcctcaaaggagaagatgaaaaacatggcaagtgctgccaaggaacaagtcgacatctataaagccaaaatagacgagaaggcagagaaagcaacggcaagaacagaagaggagagggtgatagcccatgagcacgcaaaggcaaaggaagctggagcaaagatggagctgcatgaagctaaagcaaggcatgcagcagag

SEQ ID NO: 70771 - DNA, 248 bp, Glycine max
  Clone ID: 700838442H1
ccagcttcgcatgagatcaactcaagatttgaagggaaggttgactgtccacttccaaggggaggagggtattgatgcaggtgggcttacaagggaatggtatcaattattgtccagagttatttttgataaaggagcactgctttttactacagtgggcaatgaatcaacatttcagccaaaccctaactctgtttaccaaacagaacatttatcttatttcaaatttgttggtagagtggtcggta

SEQ ID NO: 70772 - DNA, 250 bp, Glycine max
  Clone ID: 700838443H1
agcagcaagtagatgatgcggctaagttagtaggaactttgctagaagagaaagtttcatcattgaaaagcaatattgaaactttatctattcctgctgccaagaaagctgacatcaagatcaagatagttcggcttcaggatcaagtaagaaaagcacaaaagcaggtcgctgaggaaaacaagcgtaaagctgtaatgattacagcagagaaggctgaacttgctgtttcaaatgggaaaacattttg

SEQ ID NO: 70773 - DNA, 250 bp, Glycine max
  Clone ID: 700838444H1
ctctctcacgttctctttcacacactaagcgtgaactaatatcgcaattcaattataccctgaccctgtgttagtttcgtgtgttgagaagcagagagaggcagagatgcaaggaagcgcagtgacggtgaagccttggatttcgagcctgaggacgatgacttgatggacgaggacggcgcccccgacgccgacgcttctccgcctcaacctaagctcaaatccgccatcaccgccgccgccgccccca

SEQ ID NO: 70774 - DNA, 249 bp, Glycine max
  Clone ID: 700838445H1
cactgatgtggttgtgcttttggacaacgaagcaatatacgatatctgcagaagatcattagatatagaaaggccaacttacactaacttgaaccgtctgatatctcaaattatctcttccttgaccacttccttgagatttgatggtgcgattaatgtggacattaccgagttccagactaatctcgtgccatatcctcgtattcacttcatgctttcatcttatgcccctgtaatatctgctgcaaa

SEQ ID NO: 70775 - DNA, 253 bp, Glycine max
  Clone ID: 700838446H1
tgcagaccgagctagctagctagcaagcaagcacagagatggaggcaaagcgaggccatgccctcatgtgcttggcacgtgtttcactcttcctctgcgctctaaccctatccgctgctcacggaagcaccacggttcaagacatcgcgagaaagttgaaactcggggacaacgagcttctgcgcacggagaagaagttcaaggttttcatggagaattacgggaggagctactccacagaggcggcatattt

SEQ ID NO: 70776 - DNA, 258 bp, Glycine max
  Clone ID: 700838448H1
gttctcttttgtgttagtgagagaaagttctctctgcttctctctcttagactcaaaaccctattgcgtgctttgcaatcgaccccgattatggccaacagtaacctccctcgaagaatcatcaaggaaacgcagcgtttgctcagtgagccagcacctggaattagtgcgtccccttcggaagacaatatgcggtatttcaatgtgatgatccttggcccaactcagtcgccttatgaagggggagttttcaagttg

SEQ ID NO: 70777 - DNA, 250 bp, Glycine max
  Clone ID: 700838450H1
caattactttaaggatgagtaaacaagacttgttgaaagttcagcagagctgtgttctcaaggttaatatccactgcgatggctgtgagcaaaaagtcaagaaactgctgcagaaaatcgatggggtttattctgtgagagtagatgcagatgaagggaaagtggtagtggcaggagatgtggatccagcgaaactggtaaaaaagctaaagaggggagggaagcatgctgagatatgccagaaccagaa

SEQ ID NO: 70778 - DNA, 249 bp, Glycine max
  Clone ID: 700838451H1
gaaagaagtgcaatggacatcggaacctatggctatcctacaccagcagtgaaaaagattgagtcttactatgatgtgccagagggagtggatattcggggaagatatgatgcagagtttgcaaaaatcctcacaaaagatgctttgaaattcgttgctgacttgcaacgtgagttcaggaaccatatcaagtatgcattagagtgcagaagagaagcaaagaagaagtacaatgaaggggctcttcca

SEQ ID NO: 70779 - DNA, 249 bp, Glycine max
  Clone ID: 700838452H1
ccttgttctttcaaagttaccaaacacaagtacacaacacaacagcaacatatggcgtctgaacaattggctcgcagagagaacaccaccaccgagaaggagattcacgttgagaaacacagggttcccaagatggccacccacttcgagcaccttgcggagcaagctaaagaatctgacatcaccgctgggaaggatactccgcagggtagcatagaagccttgcaagctggagagagggtcaaagat

SEQ ID NO: 70780 - DNA, 244 bp, Glycine max
  Clone ID: 700838453H1
tgttgttatacatggtcataaggtgaaccagcaaatgtcatttatttaaaatttaaaattatgggaatgctttaatatgatggacttagattaggcggcaatacgagaacagcagcacaattttgttatccgttgcagccatgcagcaaattgtagagattcaaactaatatagaacaaagagatgggcacatgcatagttgcacacacaaagtacggagaaactgggagaatcacttcaatag

SEQ ID NO: 70781 - DNA, 246 bp, Glycine max
  Clone ID: 700838454H1
gcttggaagaacctcactgaagaattaaggagagaaaaatcaacatcaaagttataacgatgaagcccattgacgataaacaagagacagtgacgatcagagcggtgagccacgacgaggaagggagaaagagggtggaaaaaatagagctcaacactcacaacatccacactataaagtacgtcgagaagaagctcatcaacaagggtgtgcagcgcaaggaccgccacccagccgacggcatca

SEQ ID NO: 70782 - DNA, 246 bp, Glycine max
  Clone ID: 700838455H1
catgttactagtgcctttcatttccctcctcttctcaacgcattatatatttattcaccgacctcggttttcgtgctgcgttttctgcttttcataaaaccccatttcttttctctctatctctaagccaaagctcgaagcttttcaccatttgagatctggggttggagctttttcccttttctgggttgcttgcagcattttcgccgttagagttaagagacaccaaaatatgggaagcaagtg

SEQ ID NO: 70783 - DNA, 246 bp, Glycine max
  Clone ID: 700838456H1
gtcgaaaggcggttcgcttcaaaaggacgtgccatggagagcatcgtcttcttctgcgaagccatccccaaaattcaccacagtccccttcttcgcgtatcccaaacacctgtttccgattacggtatctccgtcatgaggcatccggaccctataggtggtggattgggtcatgaggccatagtggaaccagctggccctgattgtctcgtacctggccagaaaatgcccatccaattacttggc

SEQ ID NO: 70784 - DNA, 247 bp, Glycine max
  Clone ID: 700838457H1
tcaacctcaatctctcagaatccacagaaaagatcattgctgagtacatatgggttggtggatctggtatggacctcagaagcaaagccaggactcttcctgggccagtgagtgaccctgcaaaacttccgaagtggaactatgatgggtctagcacagatcaagctccaggggatgacagtgaagtcattctatacccacaagctattttcaaggacccctttaggagaggaaacaatattcttgt

SEQ ID NO: 70785 - DNA, 244 bp, Glycine max
  Clone ID: 700838458H1
cgcaggtgatgctgcacagaatgtcaaagattatgcaagtgatgcagtgcagaagagaaaagagtattctggtgatgcttctcacaagagcaaagaggcttctgattatgccagtgagacggctaagaagaccaaagattatgtcggtgatgctgctcagagaagcaaaggggctgctgaatatgctagtgatgcggctcagaggaccaaagagtatgctggtgatgctaccaagagaagcaaa

SEQ ID NO: 70786 - DNA, 246 bp, Glycine max
  Clone ID: 700838459H1
caagtatgcctgggtgctggacaaacttaaggctgagcgtgaaagaggaatcaccattgatattgctttgtggaagtttgaaacaacaaagtattattgcacagttattgatgcgcctggacatagggatttcattaagaatatgattactgggacatcccaagctgactgtgctgttcttatcattgattcgaccactggtggttttgaagctggtatttccaaggatggacagactcgtgaaca

SEQ ID NO: 70787 - DNA, 249 bp, Glycine max
  Clone ID: 700838460H1
ctactacaagtacttccttacaatcaaaaccaacaacaactatggcaagttatcaaaagcactacgatgatcagggtcgcaaggttgacgagtatggcaacgttgagaagcaaaccgacgaatacggcaaccctgttcatgctgctagtgtcacctatgtagccaccagaactgctgctggtggttacagtgatgacattaataagcaacatgataccaccaatgcctacggcgtagacactggtagac

SEQ ID NO: 70788 - DNA, 250 bp, Glycine max
  Clone ID: 700838461H1
gatgaggatgaggtcaaagagagggaaaacaagcaagaatacaacctactctgtgattggataaaacaacaacttggtgacaaggtggccaaagttcaaatctcaaatcgcttgagttcatctccttgtgtgcttgtatcagggaagtttggttggtctgcaaacatggagagactaatgaaggcacaagcccttggggacactgcaagtttggagtttatgagggggaggagaatattggagattaatg

SEQ ID NO: 70789 - DNA, 256 bp, Glycine max
  Clone ID: 700838463H1
caaaaccaaaacactcaagttaacttcaacacctttaattttctgaacgaaattcagccacagaatatcaaagggagcgaagatgagtcaggagcagccaaggcgcccccaaggccaagaccccatcaaatacggcgacgtttttgacgtctacggtgaccttgcacagatgcccattgcaccggaagatgctgccatgatgcaaagcgcggaagctcgagtactcggaaaaacccaacccggcggacttcttccg

SEQ ID NO: 70790 - DNA, 117 bp, Glycine max
  Clone ID: 700838464H1
acaggcaccaatgggtggcatgatgggttcactgcgcgtgatagaacttcagctggtggccttcatcttggtgttctcagcaagtggcctcgtcccactccttgatctagtgttccc

SEQ ID NO: 70791 - DNA, 252 bp, Glycine max
  Clone ID: 700838465H1
taataaagaaaatcgtgaataaaagagcgtgacgagactttttatcaattcgagatgttagaaggtgcaaaattaataggtgccggagctgctacaattgctttagcgggagctgctgtaggtattggaaacgtattcagttcattaattcattccgtggcaagaaatccatcattggcaaaacagttattcggatatgcaatcctgggctttgctctaaccgaggctattgccttgttcgcattaatgatg

SEQ ID NO: 70792 - DNA, 248 bp, Glycine max
  Clone ID: 700838466H1
ggttcatcatcataaccttcaatgaaaagaaatggctgaggcaagcattggcagcaaaagcagcagatggtctttacagggaatgacagctctcgtcaccggtggatccaaaggaatcggatatgctatcgtggaggagttggcacagcttggagccactgtgcacacttgcgctcggaacgaagctgaactcaatgaatccgtaaatgaatggaacacaaaaggatacagagtaactggttccgtct

SEQ ID NO: 70793 - DNA, 246 bp, Glycine max
  Clone ID: 700838468H1
gtataattggttccagaacaggcgtgctcgctccaaaagaaagcagcagaatgtggcacctagtgctaatgctgaatcggaagtggagactgaggttgattctaaggataagaagacaaagccggacgaatttcagtcccctcctagcgtttctgctgtgcctgctgatgataatttaggcttccagaaccatggcagtttgcagtacttgaatccagagtccaacaaaccagattctgtgttccc

SEQ ID NO: 70794 - DNA, 240 bp, Glycine max
  Clone ID: 700838469H1
tagcacttcgctgtctgaggttctggattctcagtgtttgcggaggcagcatcatcttttagggaagaatggatcatcaagggcatagccagaacccatctatgggggttgttggtagtggagctcaattagcatatggttctaacccatatcagccaggccaaataactgggccaccggggtctgttgtgacatcagttgggaccaatcaatccaccggtcaacctgctggagctcagc

SEQ ID NO: 70795 - DNA, 245 bp, Glycine max
  Clone ID: 700838470H1
ctcagagtaaagagaaaactcttgcaaaaatggagcggggtggacttgcagagaaggtggtaagagacaaagttttggtattccgctttgttgatgtgggaaaacttcccccgcctgtcctccagtttgttgaggtgacatttgggtacactcctgataatctgatctacaagaaccttgactttggggttgatttagactctaggattgctctggttggacccaatggagctgggaagagtacg

SEQ ID NO: 70796 - DNA, 244 bp, Glycine max
  Clone ID: 700838471H1
gaaacaaagaaaggaaataattgatctttgaaaatgcagggaggaaagaaagctggagagtccatcaaggaaacagctgcaaacattggtgcttctgccaaggctggcatggagaaaaccaaggccactgtccaggagaaggcagaaagaatgacggcacgtgatccgatgcaaaaggagttggcaacccagaagaaagaggcaaagatgagccaggcagagctggacaagcaggcggcgcgtc

SEQ ID NO: 70797 - DNA, 245 bp, Glycine max
  Clone ID: 700838472H1
cagaaacctccgtttcgcgagacaccccgtccgtacatggtctgttcacgcggatcgggttgattgaccaccaccaccaccaccaccaccaccatcgcgcgtgagatgcacaccgcgagcaggagcaacggcggcggcgtgctggcgtcgcggacgagttcgcggtcggtgacggagacggtgaacgggtcgcacaagttcgtgataaagggatactccctggcgaaggggatcggagtggggaa

SEQ ID NO: 70798 - DNA, 246 bp, Glycine max
  Clone ID: 700838473H1
gtgagaagaaggcagggttgatgttgggcagtgagacgatgggggagagcgagaaaggagagcgatggagcggacgatgacgaatctgacggagatggcctccaatctcgactctctccagaagcttctcctcaccaaagccgtcttcgtcgacgacgacaccttctccaaagcctccctcgccgccgaccaagcccgctccatcaagctcctccaccaacgagtccaaaccgtggagagagaggt

SEQ ID NO: 70799 - DNA, 243 bp, Glycine max
  Clone ID: 700838474H1
atttggttacagaatccaagggaccatcctggcatgcaatctactccatactataacatgccagggcaaacacctcatgcggcttacatgccatcacacactggtcatgcttccttcaatggagccacagctcagtcttctcacatgcagttccccggcatgtaccacacccctccacagccggcagccatggctagtcctcaccatttaggaccaccagccattggcaacaatgttggagtt

SEQ ID NO: 70800 - DNA, 245 bp, Glycine max
  Clone ID: 700838475H1
tgaacttttaagggaggcagaaaagctggttgcaaccaagattcatccgatgacaataatatcaggttttcgaatggcagcagagtgtgctcgtaatgctttgttggagaaggttgtggacaataaagcagattctgagaaattcaggtcagacttattgaacattgcaatgactactttgagctccaagattctctcacaggacaaggagcattttgcaaaattagctgtggatgctgtaatga

SEQ ID NO: 70801 - DNA, 248 bp, Glycine max
  Clone ID: 700838476H1
tggcacaagttgaacttcgtgacgagcatgggaacccagttgaactaacagatgcatatgggactccggtttggttaacggacgagaaaggcaacccggtgcacctcacggctgtggcaaccaatgcacacaaatctatgcttcagaatgacaccccacaagagcttcctcactccaagagttcaagctcgtctgaggatgaagggcatggagagaggatcaggaagggactgaaggataacatagaa

SEQ ID NO: 70802 - DNA, 249 bp, Glycine max
  Clone ID: 700838477H1
cgagaattgtatttgcacagtccagaggaagctcgccaattgagaaggaaagctctctctcgtattgaatggctgcaaaaagctgatgtgcctaccatagcacagattgaagagttccattcgatgcagaggatgatgaatgctcctgattcaaatgataatattgatctactgttgagcattgatttgttgggtttacaaggagcaggtaaagcttttccaaacaagattgtttttgatgataagctt

SEQ ID NO: 70803 - DNA, 251 bp, Glycine max
  Clone ID: 700838478H1
ctcgagccgattcggctcgaggctgaatttccatcagccaaaccggcaattggtgtctttgttgcagcagttgctcctcggctgcagcctagattttattcgatctcctcatctccaagaatggtgccaaacagaattcatgttacctgtgcattagtacatgagaaaatgcccaccggaaggattcacaaaggagtgtgttcaacatggatgaagaattctgtaccattggagaaaagccaggactgcag

SEQ ID NO: 70804 - DNA, 255 bp, Glycine max
  Clone ID: 700838479H1
cacaaacttatgaagcaatgaggcaattgacattagttgtcatcctttttgctgttttgagatcccggcaaaaggaacaacgattgagtctgcgttgttaaataattttttgtgaacacaagttcgtatatgttgtgtattctgcattttatagcagactttcgatgttttgcaatggcggtaaaattgcatttatactgtcctagactgttttgattaattgatttaagtttaattacttgttagatctctata

SEQ ID NO: 70805 - DNA, 253 bp, Glycine max
  Clone ID: 700838480H1
gtcactaacagtgcctttcatgccaatcacttcacatatttgaaccccacaatatctaagtttggtcccagtgctgtttggcctggttgtcatcctgtagaatttcctcttccagtacctattgttgcaccaatccctgttcccatttcagtgtcacaagctctgtgtcatggtttggaaagtccaagttcggcttcagttcttcctgaggacattgataatattggggattccaatcaagtggtaaaaactt

SEQ ID NO: 70806 - DNA, 114 bp, Glycine max
  Clone ID: 700838481H1
tgttaacataaatgggcatttttgttctcctgtttttctattcatgccaaagcatccaaacatgttccattgtgcattacagtaattactatactgtaaaccattttttttcag

SEQ ID NO: 70807 - DNA, 249 bp, Glycine max
  Clone ID: 700838482H1
cagagctgaagctcaacagaaagttaaggagagaaacgagagagcaaaacaggcagcagaagctgccaaagagagaaacaagcaggcaaataaagggaatgaagaaggcagaagagaaagagaaagtggtgggggtgttcatcatgaggctaagtttgaaactaaaggtgaaaaaaagaaggatttagtgggaagagagcggaacaaagaggagaaacaaagaagcagtccaagaggaaaagtagaggc

SEQ ID NO: 70808 - DNA, 243 bp, Glycine max
  Clone ID: 700838484H1
gacgattcctctcaactcctccaagcagcttctgattttgttcactacccagggcctcacagcgatgattcctccagggactttctcaatcgtttccctctcccagtcatcatcaatgcattacagactcagttagatgtgcctggcctagaaaatactcttgttgcatgccttgaaaggttattcaatacgaagttgggtgcttctctgatcccacagtatatgccttttgttcaagttggt

SEQ ID NO: 70809 - DNA, 239 bp, Glycine max
  Clone ID: 700838485H1
tgaaggtgctagtggagaaattgctcttacagcagctggtggattgaggcaaattcctggaataaccgagacctttgaaaatgctgcattgattggaattcattatggtggaaatttttatgaatttgtgccatggaatggtgttgttaactgggaagttactacttggggttattggtttatgtcagcagacaatggcatatatgtggttgaatgagatgcaacaactgaggatccag

SEQ ID NO: 70810 - DNA, 243 bp, Glycine max
  Clone ID: 700838487H1
attgaaacagaaaatttgaagagtttgtttattgtgaaaaaaagaaaaatgcaggcagcaaagaaagccatagagacctttaaggaaaccgcagccaacattggcgcctctgccaagtctggcttggagaaaaccaaggccactatccaagagaagaatgagaagatgaatgcagaagatcaaactcaaatggatatggctaccaagaggactcaagagaagatcaaccaggctgagatggag

SEQ ID NO: 70811 - DNA, 244 bp, Glycine max
  Clone ID: 700838489H1
ggaggctgttgcatcgccaggtatgtacccggtgcatcccacgggtccaccgtcgacaaaataatgcttaggtttcgtccaatcgctcccaaacccgccgccgcggccaccgcttccgacggctcttcgtccgagagcagtgacgcttttctcaaaaacggaaccactaaaagaaagtacgtaagagataacaactacaccagcaaacgaagaatccgccggagaaagaacacttcctcgccgg

SEQ ID NO: 70812 - DNA, 244 bp, Glycine max
  Clone ID: 700838490H1
agctggtgcagtttggagagattcaggaaaaagttgtattgaaattttcacaagaggaatttcttacagcttggtcaactcaggtgcgtcctgcaacaactctgttggctgatgggtgtccatatttgtatgctatggtgcatgatagttcagtgtctacaataccaggtgattttgtcattggtgttaagttgacaaccataaacaatatgtgtgcatatgggctcaatcctggtatttcagg

SEQ ID NO: 70813 - DNA, 243 bp, Glycine max
  Clone ID: 700838491H1
ctcgagccgaatcggctcgagatgccagagtacgggaatcaataaggactgctgtggattagatttgccttgtgccctctgccatttctcagactgattctcaaatcggagctcatccaagttcaacaatggagttggagggggcaattgtttgatacagtaatgcaataggcagacaaatgcttattgaagctatggatgacactaatctgcagtgaaggtgctgctaagaattctgatctg

SEQ ID NO: 70814 - DNA, 249 bp, Glycine max
  Clone ID: 700838492H1
cactcactcactcactcactcactcactcgcaagcaaaaagaaagaatcccaggcgaggagaaagatggaggggaaggagcaggatgtgtcgttgggagcgaacaagttccccgagagacagccgattgggacggcggcgcagagccaagacgacggcaaggactaccaggagccggcgccggcgccgctggttgacccgacggagtttacgtcatggtcgttttacagagcagggatagcagagtttg

SEQ ID NO: 70815 - DNA, 251 bp, Glycine max
  Clone ID: 700838494H1
gtgagaaacaaagaaaggaaataattgatctttgaaaatgcagggaggaaagaaagctggagagtccatcaaggaaacagctgcaaacattggtgcttctgccaaggctggcatggagaaaaccaaggccactgtccaggagaaggcagaaagaatgacggcacgtgatccgatgcaaaaggagttggcaacccagaagaaagaggcaaagatgagccaggcagagctggacaagcaggcggcgcgtcaca

SEQ ID NO: 70816 - DNA, 254 bp, Glycine max
  Clone ID: 700838495H1
cttcctagaaacactcaaggtgtggctgggttaggccatgcaccacatttctcttccaaaccaactcgcttcccactttggcctacaacgccaattcaccacttgcctttctcgctaccctacttcaaagggtgctataatattcggggatgcacctaacaacatgcgacagtttcaaaaccaagatattttccacgatttggccttcaccccattaaccatcaccctgcagggagagtacaacgtgagagtca

SEQ ID NO: 70817 - DNA, 253 bp, Glycine max
  Clone ID: 700838496H1
gagagagcgagcagtttcagacacagagagaggggtttgggattggagggattgacgctgcgtctcttcctcttctctttcgatccatccctcattcctaatcctccaatccaaccacctcagcctcacactcacatatacacatatctgaacgcgtatcgtccctcctatggcttcaaagcgcatcctcaaggagctcaaggacttgcagaaagacccaacaacttcttgcagcgctggtccagtagctgag

SEQ ID NO: 70818 - DNA, 218 bp, Glycine max
  Clone ID: 700838501H1
gaagtacatagctgcaaaaagttccacgttttatggagttgtaaaaaaataagaataagaatgtcttgttgtaatactatatatagtaataataatgtgtagctgcatgatgtttattataataaagttgttttatttatggaaatctatcatgcagatgcagtacatgttccacgctttgtggagttgtaaataaataagaatgtctttttgtgatt

SEQ ID NO: 70819 - DNA, 243 bp, Glycine max
  Clone ID: 700838503H1
gacgtcggcgggggccccggaaagagttatcttttctgtttaacagcctgcccaccctggaaacggctcagccggaggtagggtccagcggctggaagagcaccgcacgtcgcgtggtgtccggtgcgcccccggcggcccttgaaaatccggaggaccgagtgcctcccacgcccggtcgtactcataaccgcatcaggtctccaaggtgaacagcctctggtcgatggaacaatgtaggca

SEQ ID NO: 70820 - DNA, 250 bp, Glycine max
  Clone ID: 700838504H1
aatctctctctgattgtttgggtttgaagcttcccttctttcctctatgaacttcctcacaatcaaaacaaaaccaccacaaggtttcttttcttcctgtgcttgaactccacaaagccaaggaaggaaaacaaaccaaaccaatatcccttatatcccacttgttcaacctgtgcggtttatccttgaaatatggttcaaagaaaggtgcctagcaagcttggcatcgaagctgaacatgttaaatcag

SEQ ID NO: 70821 - DNA, 246 bp, Glycine max
  Clone ID: 700838506H1
cttttgggtatatggcccctgagtatgcgtcaagtggcaaattgactgagaagtctgatgtatattcttttggagtcgtgcttttggagctaattaccggaaggaagccagtagatgcatcccaacctttgggagatgagagcttagttgaatgggctcgacctttactgagtcatgcactcgacactgaggaatttgatagtttggcagatccaaggctagaaaagaattatgttgagagtgaat

SEQ ID NO: 70822 - DNA, 251 bp, Glycine max
  Clone ID: 700838509H1
tggcgcttagaatggaagaagaacaatctgtgaacggcacgatgtctgggtccaaaacgacgcaggagttggcgatggaagggcaggagtacttggaagaaaccatagagaacgctttccagatcctctcttccatgaacgacgagctctgcaaccccgttttatggtctacctctccctccacctcccccaatgccgacgccacttccgacaactccaaccaccacgccgacgccagtgccgcctctgcc

SEQ ID NO: 70823 - DNA, 250 bp, Glycine max
  Clone ID: 700838510H1
atttcaaatttaaagagtttgatgcagctgttgaagacctttcagcttgcgtgaagctagataaggataatacatctgcctacacatatttgggtttagcattatcttcaattggtgaatataagaaagctgaggaagctcatctcaaatcacttcaacttgacaaaaatttccttgaagcatgggcacatctgactcagttctatcaagatttagctaagccaacaaaggctcaggaatgtataaataa

SEQ ID NO: 70824 - DNA, 251 bp, Glycine max
  Clone ID: 700838511H1
gtcaagcctctctacattagagtctcgcgccgctacggcgaaaaactcagcttaaaccccgccgcaaaagcaccgcctccgccgcccacggcggaaccagaaggtgttagtgttggtggcggcgaaacaaacgtgaagagtagtactcaaggccaaaaactaccagcagggcttagcgttgtgtgcaagcatttggggaaaagccgttcagcatcttcggcggtggcggcggcggctcctccggcggtgtt

SEQ ID NO: 70825 - DNA, 251 bp, Glycine max
  Clone ID: 700838513H1
gcaggaagcatacatggattatggctacctaaaatcccttttgaaagacataatgctccacaagcaaagaaagaagccacattccagtgccaccccagcagcactaatgcgaaagctatcacttaacagaaccttcagcggcctcacacacagatactaccagcccgtgagccctgagcatgacatcgagaaccaacccattttggtgcactcagtgaagcgagatggtcatgaaaaatatgagactaatt

SEQ ID NO: 70826 - DNA, 251 bp, Glycine max
  Clone ID: 700838515H1
gtcagagacaaataatgaccatggctttgctattgactccaatgttgaacagactgatgaatggccatcgattgagcatcaaccagctgtttctgtatccttggttgtagatggtcatccaacgtctgagtaccatacaaactcgtctaactctggtgaagctaatcagcagctgaagacccatgtaaatgaatttgtagctgaagatgatcctgttgagaatcccgacattgttggatctgctaaaagta

SEQ ID NO: 70827 - DNA, 260 bp, Glycine max
  Clone ID: 700838516H1
cattatttcaatcaaacacttatcatattactaacaaaaatggaactaacattccctcatcaagacgaagatgattccgttgtttctgattgcgagagcggtgtttcgggcagtggagtcgtggtggcaccaccaccaccaccaccacaacaacaacaacgtggttttttcgttaggcttggagaaggtgacgtggttcacgatcttatcaagacaaggtttattcgtggcctcggcatgctcgggcctaaaaccgaggt

SEQ ID NO: 70828 - DNA, 253 bp, Glycine max
  Clone ID: 700838517H1
cgacaaaaacggtatggagatatattcaagacaaacatattggggtgtccttgtgtgatgatatcaagccctgaggccgctagaattgtgcttgtgactcaagcacatctcttcaagccaacataccctccaagcaaagagaagttgatagggccagaggctgtgttctttcaacaaggtgcctatcactccatgctcaagaggttggttcaagcctcttttttaccctccacaattaagcactcagtctctg

SEQ ID NO: 70829 - DNA, 249 bp, Glycine max
  Clone ID: 700838518H1
agataaggcaatgaatctgatgcaggcggttcgctacgacgcctacgggggaggtcctgccggcctcaagcacgttgaagttgccgttcccagtccaaaggcaaatgaggttttaatcaaactggaagcagttagcattaaccctattgattggaagattcagaagggtcttctccgtcctttatttctccccagaacctttccccacataccttgcactgatgtggctggagaaatagttgagatcgg

SEQ ID NO: 70830 - DNA, 244 bp, Glycine max
  Clone ID: 700838520H1
ctctcacatacatggacctaaccaacgacacaaattctcaaaaccctccacaacccaacaccaccacaaacggttccctcaagcaccaccaccaccacccaaccaccgtgtcaccgccgcaacagccaccctccacgacggttttctacaaagagtgcctcaaaaaccatgcagccagcataggtggtcacgcgcttgatgggtgcggtgaattcatgccctcttcttcatccaaccccaatga

SEQ ID NO: 70831 - DNA, 246 bp, Glycine max
  Clone ID: 700838522H1
gtgggattgacaaccctttcattaaccctttgggtgctggggcacctagcttggctgaacttgcttgttctagaatgctggtgtgtgttgctgagaaggatggcttaagggacagaggggtttggtactatgaggctgtcaagaaaagtgggtggaaaggggaaatacaactctttgaagagaaggatgaggatcatgtttatcatttgctcaaacctgcactcaatcaagattctcataaggctg

SEQ ID NO: 70832 - DNA, 252 bp, Glycine max
  Clone ID: 700838524H1
aaaattttgtttctttgtgtgtgtatggtgatgataacttaattagtgttcaaaaaatgtgtcattgccaaacaacagccaacagctgtctttgggaaccaatagtacattggaaaataaagaaaatagtcaggatggtggtgagaatgagaacaatgcgacaaggaatggaaattctgcaaaccatcaaattgttgagcagtgtgatgagcaaaaagtggctgatacttatacacaatctaatggtaaaga

SEQ ID NO: 70833 - DNA, 251 bp, Glycine max
  Clone ID: 700838526H1
gaaattcagattggtcaattaaattaagggctttcttttcactccaatgacgaagaagaattctaaaaagacaacaagccagttacaagagaatactgttgcagaagaggagagaccttcttctacacccagaaaagcagttaatgaaattgatgaaatattcgctggaaaaaagaggaagaaatctgaaatggtaaacaccggaaaacctgatgaagtaactaagaagactgactaaacgaagaagaaaa

SEQ ID NO: 70834 - DNA, 254 bp, Glycine max
  Clone ID: 700838531H1
aggagttaccgtgatacattgttttcatttcctgtctctagaattttctatccgctcatccccctcacaaattagggtttttgcgaatcttttatcgtctgaaatcgaatccaacgtttcagctatggtttccgattcaatcgccgccgtaccgattccctccgccgcaaacaccaagaacccggggaagaagaagaggactaacaggtccgcgaaattgaagcagtacaaaatcgatgcgcgccgcgagcaat

SEQ ID NO: 70835 - DNA, 257 bp, Glycine max
  Clone ID: 700838532H1
cctcgatcggaaaccttgcaggggcaaactcattgttgaacgcattgccagaggaagtgattcagcacacttttaacctaaagagccagcaggccaggcaggtgaagaacaacaaccctttcagcttcctggttccacctcaggagtctcagaggagagctgtggcttagagagccctttttgcatgtgctaccacacttttgtccttttgggctctagctagtgctggtagcagtaaataagaatgaataaaagaa

SEQ ID NO: 70836 - DNA, 254 bp, Glycine max
  Clone ID: 700838533H1
gacttttgtgaagaaagatggtaggagtgtaccatttgagttgtacaaaaggcgcacatctgcatttgttcggagagaaacttttctagatattgcctgtgatgctctggcagagtacaagtatgtgggtcctaaccagagagcagacttggtattagcctgcaggatccgtgaaaggaaagagtcggtgacagtgttactatgtggcactagtggctgcggcaaatctacattgtctgcattgctgggaagta

SEQ ID NO: 70837 - DNA, 248 bp, Glycine max
  Clone ID: 700838541H1
gaatatgtcaagccttactttagtggttctaaattgaaaagctttctagctggtcataatatcaccattactgatggtattgacaaaactagtgcaactttgcaatttagaaagttagcagattgtgattttctcaagagaaactttaagcagatgtctaatgttttgtgggtggctcctgaggacaaggcgagtttatggtcacaacttcattatgtttcgtgcaataatctggaaatgcaagaagc

SEQ ID NO: 70838 - DNA, 248 bp, Glycine max
  Clone ID: 700838542H1
gttgaatacatcagtgtagcgccttggccgacaggtccgggtaatctttgaaatttcatcgtgatggggatagatcattgcaattgttggtcttcaacgaggaattcctagtaagcgcgagtcatcagctcgcgttgactacgtccctgccctttgtacacaccgcccgtcgctcctaccgattgaatggtccggtgaagtgttcggattgcggcgacgtgagcggttcgctgcccgcgacgttgtga

SEQ ID NO: 70839 - DNA, 233 bp, Glycine max
  Clone ID: 700838545H1
aaacctaagcttagaattagaaacaaagaaaagaagaaaggaaagaattgatcgttgaaaatgcagggaggaaagaaagcgggagagtccattaaggaaacagctacaaacattggtgcttctgccaaggctggcatggagaagaccaaggccactgtccaagagaaggcagaaagaatgacagcacgtgatccggtgcaaaaggatttggcaacccaaaagaaagaggcaaa

SEQ ID NO: 70840 - DNA, 249 bp, Glycine max
  Clone ID: 700838546H1
aactactacaagtacttccttacaatcaaaaccaacaacaactatggcaagttatcaaaagcactacgatgatcagggtcgcaaggttgacgagtatggcaacgttgagaagcaaaccgacgaatacggcaaccctgttcatgctgctagtgtcacctatgtagccaccagaactgctgctggtggttacagtgatgacattaataagcaacatgataccaccaatgcctacggcgtagacactggtag

SEQ ID NO: 70841 - DNA, 255 bp, Glycine max
  Clone ID: 700838548H1
acctaagtgagaaacaaagaaaggaaataattgatctttgaaaatgcagggaggaaagaaagctggagagtccatcaaggaaacagctgcaaacattggtgcttctgccaaggctggcatggagaaaaccaaggccactgtccaggagaaggcagaaagaatgacggcacgtgatccgatgcaaaaggagttggcaacccagaagaaagaggcaaagatgagccaggcagagctggacaagcaggcggcgcgtca

SEQ ID NO: 70842 - DNA, 252 bp, Glycine max
  Clone ID: 700838549H1
gtaatgttaaacccaggaagatggaatctgtggttcagaaaaatatagcccaggttggtgttagatatgtttccccttattttcataatgatagtgaggagaagattaaaggcaaaccattggatatggaaagcaaatctggatccattgctttacccacctttggaaattccattgagaataaactggacggaaataatagtggggagacaattaaacaacacggacttgatagtcatattgattctgttg

SEQ ID NO: 70843 - DNA, 244 bp, Glycine max
  Clone ID: 700838553H1
cgaccactgtaattgatccagcagatgttggagccttggaatctgcattggagcagcacaatgtgtctctattcttcactgagtctcctaccaatccattcctgagatgtgttgatattaagctggtttcagagctttgccacaagaaggggactttgctctgtattgatggtacatttgcaactccattgaaccagaaggcccttgcccttggcgctgatctgattctgcactccttaacaaa

SEQ ID NO: 70844 - DNA, 244 bp, Glycine max
  Clone ID: 700838554H1
gtcagagaaaccctaggtaagaagaaaagatgccggctggtcatggtttgagatcccgcaccagagattccttctctcgtcctttcaggaagaagggaaccatcgccctcaccacatacctgagaacctaccacgtcggcgactatgttgacgtcaaggttaacggtgccgttcacaagggaatgccccacaaattctaccatggccgcaccggacgcgtctggaatgtcaccaaacgtgctgt

SEQ ID NO: 70845 - DNA, 250 bp, Glycine max
  Clone ID: 700838556H1
ctcgagccgctcgagccgtgcagaccgagctagctagctagcaagcaagcacagagatggaggcaaagcgacgacatgccctcatgtgcttggcacgtgtttcactcttcctctgcgctctaaccctatccgctgctcacggaagcaccacggttcaagacatcgcgagaaagttgaaactcggggacaacgagcttctgcgcacggagaagaagttcaaggttttcatggagaattacgggaggagcta

SEQ ID NO: 70846 - DNA, 247 bp, Glycine max
  Clone ID: 700838558H1
aagaaatacaacgagctgatagaggagacaagaaaagaaagagaaagagtttgcagagttgaattccgaaagaggaatggcgaagcacgaggagcttcctatcccgattaacaataacctagaacccgtctatggcggaggttccgcactcgaagaagctcagcttcgtttcgataatttgaagtccaaattcgtcgaaatcttcggtcatcatcctcaaatcttcgctcgctcacctggaagagtg

SEQ ID NO: 70847 - DNA, 244 bp, Glycine max
  Clone ID: 700838560H1
tctatctattattttggagatttataattcgtccattttactcgacggaatttctatgaattagattcacaagaatcgggtaattagtttttcaatagaaaggaaagttaagcattttggtttcttattgtttgttagtctatttcatttggatttggtagtttgatcgtggaatttctttgtttctgtatttccggaatatgagtgtgcggcttgttttaatggatcctattgaaagtacaga

SEQ ID NO: 70848 - DNA, 132 bp, Glycine max
  Clone ID: 700838561H1
cgaagtgctccaacttgaggaagtggaagatcccctagtcggagacgacgagcttctcatcggagtccacgccacttcccttaacagagccgatacctttcagaggaaaggctcctaccctccccctaaggg

SEQ ID NO: 70849 - DNA, 250 bp, Glycine max
  Clone ID: 700838563H1
ggcctttcctgtgtaggtatcgtgctcctgaggtgctgcttcagtcttatctgtatacctctaaagttgacatgtgggcaatgggtgctataatggctgagcttttctctcttcgtcctcttttcccaggtgccagtgaagcggatgagatttacaaaatatgtggtgtgataggcaatccaacctttgaatcatgggcggatggactcaaacttgcaagggatattaactaccagtttccacagcttgc

SEQ ID NO: 70850 - DNA, 250 bp, Glycine max
  Clone ID: 700838565H1
acgaaattcagccacagaatatcaaagggagcgaagatgagtcaggagcagccaaggcgcccccaaggccaagaccccatcaaatacggcgacgtttttgacgtctacggtgaccttgcacagatgcccattgcaccggaagatgctgccatgatgcaaagcgcggaagctcgagtactcggaaaaacccaacccggcggagcttcttccgtcatgcaatccgccgccacaaggagatgaacaggctggt

SEQ ID NO: 70851 - DNA, 253 bp, Glycine max
  Clone ID: 700838566H1
agagaaccttctcctcgacgacgacggcaacctcaaggtcaccgacttcggcctcagcactttctccgagcacctccggcacgacggcctgctgcacactacgtgcggcacgccggcctatgtcgcgcccgaggtgattgggaaaagaggctacgacggcgccaaggccgatatttggtcttgtggcgtaatcctctacgtacttcttgctggttttttacccttccaggatgacaacctggtggccatgtac

SEQ ID NO: 70852 - DNA, 249 bp, Glycine max
  Clone ID: 700838567H1
aggctatcaaatggactggaatgcaggatttgcttatgcaaagaatggagtgcctattggtcctagagctaattcttattggctttacaatgtaccatggggcatgtacaaatcattgatatacataaaggaacgttatggaaacccaactgttattttatctgaaaatggcatggatgatccgggtaatgtgactcttcccaagggtttgcatgacaccacaaggataaactattacaaaggctattt

SEQ ID NO: 70853 - DNA, 252 bp, Glycine max
  Clone ID: 700838570H1
ctcgagccgaatcggctcgaggctagctagctagcaagcaagcacagagatggaggcaaagcgaggccatgccctcatgtgcttggcacgtgtttcactcttcctctgcgctctaaccctatccgctgctcacggaagcaccacggttcaagacatcgcgagaaagttgaaactcggggacaacgagcttctgcgcacggagaagaagttcaaggttttcatggagaattacgggaggagctactccacaga

SEQ ID NO: 70854 - DNA, 246 bp, Glycine max
  Clone ID: 700838573H1
gagcttcgtgtggctcctgaggaacaccctgtgcttctcaccgaggcacctcttaatcctaaggctaatcgtgagaaaatgactcagatcatgtttgagaccttcaacacccctgctatgtatgtcgctatccaggccgtgctttccctttatgctagtggccgtacaactggtattgttctggactctggagatggtgtcagtcacacggttcctatctacgaaggttatgccctcccacatgca

SEQ ID NO: 70855 - DNA, 243 bp, Glycine max
  Clone ID: 700838575H1
tttccaacgtctttttcctctttccaccactacgcattcttcgcgctttccactcacgatcttcacttcgatcgcgattcacctccctgatccctttctattttccgcagcttgccggatcgatctgtgagaggaattttgccattatttgggggtgactgaagtgggctatgatttgaatggagagaggatgccagagttgagaagtggagctagaaggtcgaaacggcttggagatcttca

SEQ ID NO: 70856 - DNA, 242 bp, Glycine max
  Clone ID: 700838576H1
gagagagattgtgaagtagaaatcggtgcaagaaattctccactttatctaaaaaaattcggtgagtttgtgaagacaaaaaatcactagctactcaaaaatggccacagtaggaaggaacgttgcagctcctttgctgtttcttaacttgatcatgtattttattgttcttggctttgctagttggtgcctcaacaggttcatcaatggccaaacttaccaccctagttttggtggaaatg

SEQ ID NO: 70857 - DNA, 243 bp, Glycine max
  Clone ID: 700838577H1
ctaagcttagaattagaaacaaagaaaagaagaaaggaaagaattgatcgttgaaaatgcagggaggaaagaaagcgggagagtccattaaggaaacagctacaaacattggtgcttctgccaaggctggcatggagaagaccaaggccactgtccaagagaaggcagaaagaatgacagcacgtgatccggtgcaaaaggagttggcaacccaaaagacagaggcaaagatgaaccaggcgg

SEQ ID NO: 70858 - DNA, 246 bp, Glycine max
  Clone ID: 700838578H1
gaaaaaataactgattagtctttctattataaaatagagtataggcattatttttttcttctaaaaaaataaaattaagaaattttcatggtaaccattcgtgcagatgaaattagtaaaattatccgtgaacgcattgagcaatataatacggaagtaaaaattgtaaatacgggtaccgtacttcaagtaggcgacggtattgctcgtatttatggtcttgatgaagtaatggcgggtgaatta

SEQ ID NO: 70859 - DNA, 257 bp, Glycine max
  Clone ID: 700838582H1
attcggctcgacgtaaaattattttcagattccttctgttaatgctctctctctttctctctcatgatttctattatcttctaatctcccttcagttcctctgaagcgcacaaccagctggtcttttgacgaaaagcttcttatacagtctctctataaggttctggcttttgtgtcaaaaacctatcccattgtgctatatttgcgggatgttgataggctgttatataaatcacaaaggatatataacttgttcc

SEQ ID NO: 70860 - DNA, 251 bp, Glycine max
  Clone ID: 700838583H1
ctattcctcgccttcccataactcatgggattaaatgcaatggtgtgtaattgattgaactagctttcaagtaactgggctttataattatttataaccttacttcttttcatagatctgtatgcatttatcattggaagctatgtgatctggactgctgttgctggagttagatactcgattgagcaaataagaaaaaggagatcttctgttttgtttggccaaatatggaagtggtgtggcattcttgt

SEQ ID NO: 70861 - DNA, 251 bp, Glycine max
  Clone ID: 700838584H1
cacacaactactacaagtacttccttacaatcaaaaccaacaacaactatggcaagttatcaaaagcactacgatgatcagggtcgcaaggttgacgagtatggcaacgttgagaagcaaaccgacgaatacggcaaccctgttcatgctgctagtgtcacctatgtagccaccagaactgctgctggtggttacagtgatgacattaataagcaacatgataccaccaatgcctacggcgtagacactgg

SEQ ID NO: 70862 - DNA, 246 bp, Glycine max
  Clone ID: 700838587H1
cggctcgagctcttctataaagggctccatcaggttggtttagtttgcaagattttggcagtaaagaagggaatgcaggaagtgctgaaaatggtgaaaagcaatgaacaagttgttcctggagccaaatattgtgtcacaggttccacagggtatatcggttcatggctagtggaggctcttcttgaaaggggatgcacggttcatgccactgttagagatcctgcaaagtcattgcaccttctg

SEQ ID NO: 70863 - DNA, 242 bp, Glycine max
  Clone ID: 700838591H1
caccaacaataagaacagaacaagagttaagaaacagagcatagagtgatttggtgggtggagagaggaacagaacagagcaacatgaagccaccaacgaaacccatttcgagccctggtcgaaccgagaagtttccaccaccgttgatgagattcttgagaaacaatgcctcaagcagaagcagaggaaggtcaagaaccaccaccgccatgtttctgagaaagaagaacaccaacaatat

SEQ ID NO: 70864 - DNA, 241 bp, Glycine max
  Clone ID: 700838592H1
attttgattctagcaagcagagcttttgtcaattttctattgaccttctcggtggaggaattttagtggacaaaactggagattggatcacacttatacaaaattctccaattagtaacttgttgagagttgctgcttggaagaaaggctgtttaatggttaagattgtgatgtctgggaatgcagcagtcaaaaggagtgattgggcctcattggtacaagtgtttttaacaaacagcaa

SEQ ID NO: 70865 - DNA, 246 bp, Glycine max
  Clone ID: 700838594H1
caagcaaataagagggctgaagaagaaagaagaaaagcagaaagtggtaggggtgttcatgtggataagtttgaagagaagaaggattcagtgctgaaagcagaactcgagagaagaacaagagaggtagagggaagagagtggaacaaagaggagaaacaaagaagttgtccaagagggaaagtagaggcagagaaagcaagaccaatggaagaaacaaaactggaagctaaaggaagagaaaaa

SEQ ID NO: 70866 - DNA, 250 bp, Glycine max
  Clone ID: 700838595H1
aaagaaaggaaataattgatctttgaaaatgcagggaggaaagaaagctggagagtccatcaaggaaacagctgcaaacattggtgcttctgccaaggctggcatggagaaaaccaaggccactgtccaggagaaggcagaaagaatgacggcacgtgatccgatgcaaaaggagttggcaacccagaagaaagaggcaaagatgagccaggcagagctggacaagcaggcggcgcgtcagcataacacg

SEQ ID NO: 70867 - DNA, 149 bp, Glycine max
  Clone ID: 700838601H1
gtccaacctacccctttttcttctcccaccaacttcaccgtcttcttcctcgatcatgtctcacttcaagggcaagtaccatgatgagcttattgccaatgctgcttacattggcactcctggaaagggtattcttgctgctgatgagt

SEQ ID NO: 70868 - DNA, 270 bp, Glycine max
  Clone ID: 700838602H1
gcggcttcccgtcatcgaataatgccgccggcggtattgcgccgccgttggaggtggacgggctgccggagaattttgattggagagagaaaggagctgtcaccgaagttaagttacagggtagatgtggatcatgctgggctttcagcaccacaggatctatagaaggagccaattttcttgccaccggaaagctcgtcagtcttagtgaacaacagctccttgactgtgacaacaagtgtgacataacagacaagacttcatgtgaca

SEQ ID NO: 70869 - DNA, 267 bp, Glycine max
  unsure (1)..(267): unsure at all n locations
  Clone ID: 700838603H1
aaacaaaacaaaacagtgtctttgattacgagagagagagaacaaaacaatcaacacaatggcttctgagcaaatgcctcgcagagagaacaacagcaatagggtgatagagagagaggttcacgttgagacacacagaaaagagtccctccctgataagggaagggttgtgatagagagtgagaagaaggagaaagagagagagttggcttctgatagagccaggtctgganatatagttaaggaggacaaagaggttgaagaagg

SEQ ID NO: 70870 - DNA, 267 bp, Glycine max
  Clone ID: 700838604H1
cacacaactactacaagtacttccttacaatcaaaaccaacaacaactatggcaagttatcaaaagcactacgatgatcagggtcgcaaggttgacgagtatggcaacgttgagaagcaaaccgacgaatacggcaaccctgttcatgctgctagtgtcacctatgtagccaccagaactgctgctggtggttacagtgatgacattaataagcaacatgataccaccaatgcctacggcgtagacactggtagacagcattctagt

SEQ ID NO: 70871 - DNA, 254 bp, Glycine max
  Clone ID: 700838606H1
gttcctcgatggtcatacaaatttattgacgaattggaacaactggagggaaaaaatgaagcagagaattatcaaattcgttctagaaaagccaaacgtgtagtaattttgactaataaatctaaattttttaagaagtacgatacttataatcctacaggagatactgataacgctgaaaaaaaaaaaaatgaattggctttaatacgttattcccaacaatcggattttcggcgggacataatcaaagggtc

SEQ ID NO: 70872 - DNA, 256 bp, Glycine max
  Clone ID: 700838610H1
tggaaacattggattataggttagctgaattgagttctaagcaggattatgcaaattatggattgtcatatctcatcgactatgtacacggaaaaagccagaaaaagcccgaattgttgcaggagcaactgaaactttcagggaagtcccctaatttgatcacatataaaggaactccaaatctaatgggtcttaaagacattgcagaaacattgtctggtttagacatgtctgcttcagatagtgtcatgccaga

SEQ ID NO: 70873 - DNA, 255 bp, Glycine max
  Clone ID: 700838612H1
tagagttaagaattggatgacgtttaacgaacctcgtgtggtggctgctcttggctatgataatggtttctttgcccctggaagatgctcaaaagaatatgggaattgtactgctggcaactcaggcactgagccttacattgttgcccacaatttgatattgtcgcatgcagcagctgttcaaagataccgagcgaagtaccaagaaaagcaaaagggaaggattgggatcctcttggattttgtttggtatga

SEQ ID NO: 70874 - DNA, 261 bp, Glycine max
  Clone ID: 700838613H1
tctcgagccgattcggctcgagagaaaacaaaccccaaactgtctaccattcactctctcgccaccggcaagaaagtcatcaactttggggttcccggtgccttcactcctacttgcagcttgaagcacgttcctggcttcattgagagagcagaagagctgaaagggaagggtgtggacgatataatctgtatcagtgtgaatgatccatttgtgatgaactcatgggccaaaacattcccagagaacaagcatgttaag

SEQ ID NO: 70875 - DNA, 256 bp, Glycine max
  Clone ID: 700838614H1
tgcgattatgctagttttgatggtttgattaccaagcaagttatgagcaagatggcagaaatgataaacaatctttgtggtggtgatgaaaaattgatgcgtgaaaggacacacctgctgttggcttgttgttcaaggatggcaatttgtaagaaagatgtttggagagttgaatgtggaatcccttctggatttccgctcacagttatttgtaatagcatttttaatgagatgctcattagatatagctatgaaa

SEQ ID NO: 70876 - DNA, 264 bp, Glycine max
  Clone ID: 700838616H1
cgtcgctccgcaccagtttcaccgcacgaatatcttgttgtttggagcgatccgagaaaaactctgtaaacatgttggtttaccaggacctccttacaggtgatgagcttctctctgactccttccgttacaaggaaattgagaatggaatgctgtgggaagttgaggggaagtgggttgttaaaggagcagttgatgtagacattggtgcagacccttctgctgagggtggaggagaagatgagggagttgatgatgcagctg

SEQ ID NO: 70877 - DNA, 148 bp, Glycine max
  Clone ID: 700838617H1
aaattatggaattctctgtaagagctgcggaactaacaactctattagaaagtagaattaccaacttttacactaattttcaagtggatgagatcggtcgagtggtctccgttggagatgggattgcacgtgtttatggattgaacga

SEQ ID NO: 70878 - DNA, 270 bp, Glycine max
  Clone ID: 700838618H1
acaagatctccatatctgttcccaaaagcttgtttgtaagaatggcttccggtgaacagaaattccctcctcaacaacaacaaacacagcctgggaaggagcatgctatgactccagtaccccaattcactagccctgactacaagccttcaaataaacttcaagggaagattgcattagtcactgggggtgattctgggattggacgagcggtgtgtaacttgtctgccttagaaggtgctaccgtggccttcacgtatgtgaaggggc

SEQ ID NO: 70879 - DNA, 124 bp, Glycine max
  Clone ID: 700838619H1
cggctcgagataatgatagattcattcccgtatcatactcttcagaaaatgttgttgaaggaaaagagcttcgaggatacttgcacaaggctagttaagtagtgactcatagtggatatactcg

SEQ ID NO: 70880 - DNA, 259 bp, Glycine max
  Clone ID: 700838621H1
gttgaatcaaacagtgaaagtaaaacattgtgcaattaatcatcaactgcaagtagccagtgcataagatcaatggcgtcaagacagcaattcaaggaagacagagccgaggcagctgcaaaactcgcagcgaaagacatcggcgacatcaacagaacaaacgagcgcgacgaggggtacgacttgcacgacgaagccaacttcaagcaagcacgagctgaagcagctgcaaagctggcggccaaggatctggaggacg

SEQ ID NO: 70881 - DNA, 253 bp, Glycine max
  Clone ID: 700838626H1
caagaagtagtgagaagaagggagagaatggaggaaaaggcaaaagctgagcagaagaagataggtatgaccgagacttggttgaagaagcaccgtcttctttacaatggagccactagacaccctcttattattagcattcgcgatggcaccatcaacactgcttccttcaaaacatggctcgcacaggattacttgttcgttcgggcgtttgtcccatttgtggctagtgtgctgataaaagcgtggaagg

SEQ ID NO: 70882 - DNA, 141 bp, Glycine max
  Clone ID: 700838631H1
aaaagatcatacatagtagtgttggtgggttgcaaagatgcttgggggtcttctccataggggtcataagataaaagggacagtggtgttgatgcgcaagaatgtgttggacgtgaatagcgtaaccagcgttgggggaat

SEQ ID NO: 70883 - DNA, 268 bp, Glycine max
  Clone ID: 700838634H1
ccgagattcattcttcaccaaaacttcgcaaagaaacactacacatccatggcaactgctggcgtgcaagaagttcgtgttccccctctaacttccacctctgagccaccttctctctttgacggaaccaccaggttgtacatcagttatatttgtccctatgcgcagcgtgtttggatcactcggaactataagggactacaagacaagatcaaactggttcctattgacctacaaaacaggcctgcttggtataaggagaaagtct

SEQ ID NO: 70884 - DNA, 233 bp, Glycine max
  Clone ID: 700837981H1
gtgcggtttccattgttggtgttgctgggtactgttttcctggcatcagtttgtgtctcattaaaggtgagagaggatgtgaataaccctttctatttgagaagctctaacatcttccaaactctctttgagaaccaaaacggtcgcattcgtctcctccagagattcaacaaacgctccccacaacttgagtaccttcgagactatcggattgtccagttctagtcaaaacc

SEQ ID NO: 70885 - DNA, 234 bp, Glycine max
  Clone ID: 700837982H1
cacacaactattacaagtacttccttacattcaaaaccaacaacaactatggcaagttatcaaatgcactacgatgatcatggtcgcaaggttgatgagtatggcaacgttgtgaagcaaaccgacgaatacggcaaccctgttcacgctgctagtgtcacttatgtagccaccagatctgctgctggtggttacagtgatgacatcaataagcaacatgtcaccaccaatgcc

SEQ ID NO: 70886 - DNA, 230 bp, Glycine max
  Clone ID: 700837983H1
gcgttgtccttgcttcacatttataagctcctcctcaattacaccgtgcctacttatcagcgcttcatcgttcggatcttttttatggtcccggtttatgcgttgatgtcattcttatcactttttcttccacagggttcaatcctttttaattcaatccgggaaatctatgaagcttgggttatttatattttcctatcactatttctcgaatgggtttgtggtcctgg

SEQ ID NO: 70887 - DNA, 231 bp, Glycine max
  Clone ID: 700837984H1
gaccccatcatatacggcgacgtttttgtcgtctacggtgacctttctcagatgcccattgctccggaagatgctgccttgatgcaaagcgcggtcatctcgagtactcggattaacccaacccggcgtatgttcttccgtcatgtaatccgccgccacaacgaatgaacaggctggtcttgtcggtcacctggacgtcaccgacttcaccggcgaccatcgcgtcacagt

SEQ ID NO: 70888 - DNA, 228 bp, Glycine max
  Clone ID: 700837985H1
gttctagatcgcgagcggccgcccgcgattaagaatttttctttataaaaatcattttgctatttctatactttttattaattttgtccctgaattcttcttgttctatttctttttcaaagtgtgccataacagaaaagacttcatgtgacaatgggtgtaatggaggtcttatgacaaatgcctactattatttgctcgattctggtgggttggtggaggagtctt

SEQ ID NO: 70889 - DNA, 230 bp, Glycine max
  Clone ID: 700837987H1
ttcacttttttccgagtttttattatcaccatctctctcgtgtccttgtctccatctccatcccttagtttcttcttcaaatggcagaagttgtagacatagacaaccctcatcacgaccaccatctttacctttcttcttctccaacacaacctccaacgatcaatttcccgcgagatctgttaagaaccttcgtgggagtgtacaacaacagcaatcaaaaacaataa

SEQ ID NO: 70890 - DNA, 231 bp, Glycine max
  Clone ID: 700837988H1
cactactcctttcggcggtggtagcagccgcggcaatggctatgctgggggaggacggtcgctgctacgaactggcatggaagcttgacacgtgtggcgtgtggcgaacttggctcggcgacgccatctacgccaacttcgcacccttcctctcttcctcttccgcctgggactccttcatcacctcctccactcacatccctctccaactcagagtccgcgccctcctct

SEQ ID NO: 70891 - DNA, 226 bp, Glycine max
  Clone ID: 700837989H1
cccgagaatgacaccggtagacatcattttggtcgtggttacgattgtgacactaacaagctacatgatgctactggtgtttatcccggaattgacattggtagagatcttgggactaccggtgtctatggcctaaacaccgtcagacatcatggacattctggggtgaatctcgggatagacacctataaccaacaacctgggactaccgttggctatgctggtg

SEQ ID NO: 70892 - DNA, 224 bp, Glycine max
  Clone ID: 700837990H1
ggagcttgctcagcaaattgaaaaggttatgcgggcactcggagtttatcttggtgtgaatgtgcacgcatgtgtgtgaggtaccagtgtttgtgaagaccaacgcatcctatcaagtggtgttcatgttgttgttggtattcctggtcgtgtatttgatatgctgcgcagacagtcacttcggccagactatatcaagatgtttgtattggacgaggctgatg

SEQ ID NO: 70893 - DNA, 223 bp, Glycine max
  Clone ID: 700837991H1
atttgcgctgtttggggattttcgccctgaacatggtcagagcgtcggacatcaggcgcttgaccccaccgccgttcacggcgtcacgcagttctccgatctcaccgatgacgagtttgagaagctctacactggcgtcaatggcggcttcccgtcttcgaataatgccgctggcggtattgcgctgccgttggaggtgtacgggctgccggacaattttgat

SEQ ID NO: 70894 - DNA, 227 bp, Glycine max
  Clone ID: 700837992H1
gctgaagatagggttaggtttaggcgatatggcgttcaacgccggctgcgagccatcaccttgttccccggccacatggccgccgccacacgcgccatccgccaccgcctcaaactcgccgacctcgtcatcgaagtccgcgtcgctcgcattcccttctcctccgccaacgccgatctccagcccctcctctccgccaaacgacgcgtcgtcgcactcaataaaaa

SEQ ID NO: 70895 - DNA, 230 bp, Glycine max
  Clone ID: 700837993H1
gtacttccttacaatcaaaaccaacaataactatggcaagttatctaaagcactacgatgatcagggtcgcaaggttgacgagtatggcaacggtgagaagcaaaccgatgaatacggcaaccctgctcatgctgctagtgttacctatgtagccacctgaactgctgctggtcgttacagtgatgacattaataagcaacttgataccaccaattcctacggcgtagac

SEQ ID NO: 70896 - DNA, 228 bp, Glycine max
  Clone ID: 700837994H1
gtttattactatataaagaaagaaattttgcaacgtaatgggttctcttatggcaggatgggactctctgaccttggttcctgaatcagctatgattgagaggaatcgatctctcaccaaagaggatattaatgctttctggtaaacaaagaaggaggccgagttagaacacctcaaagctctttccatattatctgagactattcgggtttgactctgaaattaaca

SEQ ID NO: 70897 - DNA, 228 bp, Glycine max
  Clone ID: 700837995H1
gaaagaactttcttataaccaaaaccaatcacaactatggcaagttttcagaagcactacgatgatcagggtcgcaaggtcgacgagtatggcaaggttgagaggcaaactgacgaatatggcaacctggttcatgccactagtgtcacttatgtagccaccaaaagtgttggtgtctacaatgatgacgctaataagcaacatgatattactggtatgtatcccgag

SEQ ID NO: 70898 - DNA, 189 bp, Glycine max
  Clone ID: 700837996H1
gaaacgacgtataactccatcatgaaatgttatgttgatattagaaagcatctgtatggaaacatcgtgcttagtggagggtctactatgtttccgtgaattgctgatcgtatgagcaaggaaattggtgctcttgcacccagcagcatgaaaatcaaggtggttgcacctcctgagataaagtacagt

SEQ ID NO: 70899 - DNA, 254 bp, Glycine max
  Clone ID: 700838003H1
ggcacaagttgaacttcgtgacgagcatgggaacccagttgaactaacagatgcatatgggaatccggtttggttaacggacgagaaaggcaacccggtgcacctcacggctgtggcaaccaatgcacacaaatctatgcttcagaatgacaccccacaagagcttcctcactccaagagttcaagctcgtctgaggatgaagggcatggagagaggatcaggaagggactgaaggataacatagaagaaaagt

SEQ ID NO: 70900 - DNA, 254 bp, Glycine max
  Clone ID: 700838006H1
gattgaacaaaccgaagatgaagaaattagttcagatgatgaaaaaagtttagatcgggtgcagccagtggataacaacagtgcatgttctcatgtgggtaaactgttgacaagtgcatctgttgattcattgtgtaaagtgatcaaagaacagtgtaatgttcctgcccttacatgtctcataaatgcttatagggaagcatgccacaatgattctgaagcaatcagtgtcagtggttgtgtctttactcatg

SEQ ID NO: 70901 - DNA, 253 bp, Glycine max
  Clone ID: 700838007H1
ggggtttgggattggagggattgacgctgcgtctcttcctcttctctttcgatccatccctcattcctaatcctccaatccaaccacctcagcctcacactcacatatacacatatctgaacgcgtatcgtccctcctatggcttcaaagcgcatcctcaaggagctcaaggacttgcagaaagacccagcaacttcttgcagcgctggtccagtagctgaggacatgttccattggcaagcaacaataatgg

SEQ ID NO: 70902 - DNA, 256 bp, Glycine max
  Clone ID: 700838008H1
agaaaacctaagcttagaattagaaacaaagagaagaagaaaggaaagaattgatcgttgaaaatgcagggaggaaagaaagcgggagagtccattaaggaaacagctacaaacattggtgcttctgccaaggctggcatggagaagaccaaggccactgtccaagagaaggcagaaagaatgacagcacgtgatccggtgcaaaaggagttggcaacccaaaagaaagaggcaaagatgaaccaggcggactgga

SEQ ID NO: 70903 - DNA, 251 bp, Glycine max
  Clone ID: 700838010H1
ctcgagccgctcgagccgattcggctcgaggccagttaaggttgcatacagcatattgaattgcttggactaggacattggtgctgactgggacaacgactatcaattggatcttggtctggttattgatgttcctgtcattggcatcttcaccattcctctctctcagaaaggagagatcaagctaccaaccctctctaccatgttcgcctaatcgcatccacaaagcttaggataaaataaatgcattg

SEQ ID NO: 70904 - DNA, 249 bp, Glycine max
  Clone ID: 700838012H1
ggcaagttcatgctagaggagggtgcagagatgcagtggaaggaagaaagagaagtgcatgtgatgggtggaccagtagaggagtttgcaaggttgatagtatcaggggcatgtagaggagatgcatatgtgaagtttcctagctggtatgatgtattcctactatacagggtgtttgctccaagagttcttaactgggcattcaggtttcttatttcgccacaagggacaagaagagcttcttcttat

SEQ ID NO: 70905 - DNA, 251 bp, Glycine max
  Clone ID: 700838015H1
tccgggtcgacccgttttcacccgcctccgcgctcgagaccctcacgacccgaatcctcgacgccgcgcacgtgtcctcaccgtccgtggatattaaggtcttgccttttagaaatgggagggtgctggcttcttcggagagtggtgacacgtggcgcctcgggtggatcgcgctggaggaagtgaagggtctattgggtgcggatttgagcgcggactcgttcgtttatttggggtcagactcggactca

SEQ ID NO: 70906 - DNA, 233 bp, Glycine max
  Clone ID: 700838016H1
ccctcaacaatctctttccgagattacaataaccttcgacgtgctccaaagcctccaccgccccgccaacttcctcgtgtttgggctgggccgcgattctctcatgtgggccagcctcaaggcccacggcaccacgctgttcctcgtggtggagactgaatggttcgggatcgtcacgaaggaggggtcctactacggggcccacacggtccgttaccggacagagctccgag

SEQ ID NO: 70907 - DNA, 257 bp, Glycine max
  Clone ID: 700838017H1
cacaactactacaagtacttccttacaatcaaaaccaacaacaactatggcaagttatcaaaagcactacgatgatcagggtcgcaaggttgacgagtatggcaacgttgagaagcaaaccgacgaatacggcaaccctgttcatgctgctagtgtcacctatgtagccaccagaactgctgctggtggttacagtgatgacattaataagcaacatgatactaccaatgcctacggcgtagacactggtagacagc

SEQ ID NO: 70908 - DNA, 257 bp, Glycine max
  Clone ID: 700838018H1
ggaaaacaaaaattaatttgaaaagcaagttgaaaaagaaagtagaagagtctccaccatgggtgaagaacttgctaagctttgttgaacttccaccaactgaagttatcctcagaagattgtttctctttggcttcatgggtggctggagtattatgaattctgctgaaactggacctgcttttcaggtggcaatctctttggctgcttgcatatattttctcaacgaaaagacaaagagcttggctagagcattc

SEQ ID NO: 70909 - DNA, 253 bp, Glycine max
  Clone ID: 700838020H1
cgtgttctcttcttcagcaactgtatatggttggccaaaggaagttccatgcacagaagagttccctctgtcagcaatgaacccatatggacgaactaagcttatcattgaagaaatttgtcgtgatgtccaccgtgcagagccagattggaaaataatattgttaagatacttcaacccagtcggtgcacaccctagcggttgtattggggaggatcccgcggaattccaaacaatctcatgccatttgttg

SEQ ID NO: 70910 - DNA, 254 bp, Glycine max
  Clone ID: 700838022H1
cagtaaacaacgagcatgaaactaatgacagcaacaacaacgtttgatgtctctgccacttgcttccgtgcccctcctccttcgtgctcaatgaatccatgccacaccagtttttcagttataaactccctgaatcctcacaagggacgacggataagcgttgctgttccacccaagtttccaaacttccggagggaagcatctctgcaggggatatttggaggctattagagtcccaacttcggtgcctgtgc

SEQ ID NO: 70911 - DNA, 254 bp, Glycine max
  Clone ID: 700838023H1
aaaacactcaagttaacttcaacacctttaattttctgaacgaaattcagccacagaatatcaaagggagcgaagatgagtcaggagcagccaaggcgcccccaaggccaagaccccatcaaatacggcgacgtttttgacgtctacggtgaccttgcacagatgcccattgcaccggaagatgctgccatgatgcaaagcgcggaagctcgagtactcggaaaaacccaacccggcggacttcttccgtcatg

SEQ ID NO: 70912 - DNA, 252 bp, Glycine max
  Clone ID: 700838026H1
gacattttggcagaattaacagatccaatgccctcttgttctgaaaaagaaaaagaaaacggttacacccaaaaaaaagtacatgcttacccatctgggcatgttataaaaacttgattttttacatcagtgcatcatcaaaaacctcttttcttaaggagaaaaaaaatagtgaatgaaaaaactaggaatttttctcccttggctgcttcccatcctctgagagaattcccagcaaccctaaaaagggaa

SEQ ID NO: 70913 - DNA, 248 bp, Glycine max
  Clone ID: 700838027H1
ggcacagcacagcgcaggcacgcgctcaacatctcaactttcccttcgatctcattctcaggtgttgttgaagcttcctgtgttggcttggtatccctgcaagttctgctgtagcagattccaaggtgaaggtgtcacgttaaagtttctttcatgtttgaacaggctactatccatttgggagcaactgagctgcttggagagtatttttcttcctctaggaaaaattacagaccctcaccacagag

SEQ ID NO: 70914 - DNA, 249 bp, Glycine max
  Clone ID: 700838028H1
ggaaacattggtagaagaaattgaagagagagagagagagagagagagagagagagagggttggattggttttcttcttccttttctctaaagagaatctaatctcaatcctcattacagatttcttcattcctctctgagtcttttgtgttttccccctttgacatcctcgttttcggcgaaacaaaaacaactaagattttgtgtttgttttgtgtttcttctccgtgttgttatttgactcggttg

SEQ ID NO: 70915 - DNA, 249 bp, Glycine max
  Clone ID: 700838029H1
tgaacacactagccagaaataaaaccgataagccgaaaaacattgagttctctctcaaattcaacaccttcagtatcgccatagattgtgaattcacagatttagtttcattgagtactgtgtggcgaagtttgtgtcttggattttgtggacatgggtgcttatgatcaagtttctcttaagccattggattcttctagaaagaggaaaagtaggagcagaggggatgggtccaaatctgtggctgag

SEQ ID NO: 70916 - DNA, 253 bp, Glycine max
  Clone ID: 700838031H1
ggccaatctagtctttcacaataaagtgataggtggaactgccattaaacgacttattagcagattaatagatcactttggaatggcatatacatcacatatcctggatcaagtaaagactctgggattccgtcaagctacggatacatccatttcattaggaattgatgaccttttaacaataccttctaaaggatggctagtccaagatgctgaacaacaaagttttattttggaacaacatcatcattat

SEQ ID NO: 70917 - DNA, 257 bp, Glycine max
  Clone ID: 700838032H1
ctcgagccgtgacgagtcacttttatatgagactgctgaaactgaatctgctataaaaggaagccgaaagcttgaccacacaaatgagctaagattttttgacaaagcagcagtgctagcacagtcagataaagtgaaggaatcaacaaacccttggagactttgcactgtaactcaagtggaagagctgaaatccattttaagaatacttcctgtatgggccactggcatcatattttccactgtctatggtcaaa

SEQ ID NO: 70918 - DNA, 252 bp, Glycine max
  Clone ID: 700838033H1
gaagaagcgttgaagccgttggagatcgagaacggtcttcgcctagtcccgcgcgtgaagctcaacctcacggtgtacccttccacgcccctcacactctgccacgcaatcgacgaatggtagatgaagcgcgcactcatcgacttcctccactcctcgcactccctcacgctccccgaggacgacgacctccacctcacgcgcctcaaggacctcaagaaacgcaagcgcgacgaccccgtcgccgccgga

SEQ ID NO: 70919 - DNA, 251 bp, Glycine max
  Clone ID: 700838035H1
aaatggcaacagtgagaacaccattgaattttgattctagcaagcagagcttttgtcaattttctattgaccttctcggtggaggaattttagtggacaaaactggagattggatcacacttatacaaaattctccaattagtaacttgttgagagttgctgcttggaagaaaggctgtttaatggttaagattgtgatgtctgggaatgcagcagtcaaaaggagtgattgggcctcattggtacaagtg

SEQ ID NO: 70920 - DNA, 89 bp, Glycine max
  Clone ID: 700838036H1
aaataattgaaaaatacattcaattatgtcttcgcgtatcaaatatgtgctgttcatatcgatgcgtacgatatgtgtccagcaattaa

SEQ ID NO: 70921 - DNA, 253 bp, Glycine max
  Clone ID: 700838037H1
actttccaatacaataatcactaactgaatattcgatcggagatgtctgctgccgccgaagaagctaacgctcccgccgtcgaaaagccggttgaggaggtgaaggcgccgaaccccgcgaaggagaagaaacctaaggctccgaaggaaaagaagccaaaacaggccaaaacagcttcacatcctccatattttcagatgattaaggaggctttgatcgctttgaacgagaaaggaggatcgagtccttatg

SEQ ID NO: 70922 - DNA, 244 bp, Glycine max
  Clone ID: 700838038H1
gcagaattctgggcctttgagatccgctgttggaacggttgagaacactgtaaccaccgttcttggtcctgtctgcaacaaattcaaggacttccctgatgatgtcctggtttatgttgacaaaaaggtggatgaagcttcccacaagttcgatgagcatgctccttcctttgccaagcaccttgcggatcaagccaagggtgtgattcagaaagtgacttgtgaggcagggaaagttgcaagt

SEQ ID NO: 70923 - DNA, 252 bp, Glycine max
  Clone ID: 700838039H1
cgatccgggcggaagacattgtcaggtggggagtttggctggggcggcacatctgttaaaagataacgcaggtgtcctaagatgagctcaacgagaacagaaatctcgtgtggaacaaaagggtaaaagctcgtttgattctgatttccagtacgaatacgaaccgtgaaagcgtggcctatcgatcctttagtccttcggaatttgaagctagaggtgtcagaaaagttaccacagggataactggcttgt

SEQ ID NO: 70924 - DNA, 253 bp, Glycine max
  Clone ID: 700838040H1
ctcgagccgattcttccaccaagttatgggtttccttgtgttgcttcttttctccctcttaggtctctcttctagttccagcatatcaactcatcgttccatattggaccttgacctaaccaagtttaccacacagaaacaggtgtcttcactgttccaactatggaagagtgagcatggacgtgtctaccataaccacgaagaagaggcaaagagacttgagattttcaagaataacttgaactatatcagg

SEQ ID NO: 70925 - DNA, 252 bp, Glycine max
  Clone ID: 700838041H1
aaaacagtaaagctaacttcaacacctttaattttctaaaagtaattcagcggctgaataccaagcggagaagatgagtcaggagcagccacggcgtcccaaaggccaaaaccccatcaaatacggcgacgtttttgtcgtctccggcgaccttgcacagaagcccgtcgcaccggaagatgctgccatgatgcaaagcgcggaaactcgagtgctcggacaaacccaacccggcggagagcttccgtcatg

SEQ ID NO: 70926 - DNA, 252 bp, Glycine max
  Clone ID: 700838042H1
agaacaaagaggagaaacaaagaagttgtccaagagggaaagtagaggcagagaaagcaagaccaatggaagaaacaaaactggaagctaaaggaagagaaaaagctgaaaccaaagagggtggtggtgaggaaaaaggaatgagaagagaagaaataggagaagaaaataaacaatccagcctggaagagatttttaagtacagagctgaagctcaacagaaagttaaggagagaaacgagagagcaaaac

SEQ ID NO: 70927 - DNA, 249 bp, Glycine max
  Clone ID: 700838043H1
tcctagtataccttaataaataatttaagatactatgatgagagcacggttcccattactgttgctgggacttgttttcctggcttcagtttctgtctcatttggcattgcttactgggaaaaagagaaccccaaacacaacaagtgtctccagagttgcaatagcgagagagactcgtacaggaaccaagcatgccacgctcgttgcaacctccttaaggtggagaaagaagaatgtgatgatggtga

SEQ ID NO: 70928 - DNA, 246 bp, Glycine max
  Clone ID: 700838044H1
cggctcgagcacacaactactacaagtacttccttacaatcaaaaccaagaacaactatggcaagttatcaaaagcactacgatgatcagggtcgcaaggttgacgagtatggcaacgttgagaagcaaaccgacgaatacggcaaccctgttcatgctgctagtgtcacctatgtagccaccagaactgctgctggtggttacagtgatgacattaataagcaacatgataccaccaatgcctac

SEQ ID NO: 70929 - DNA, 247 bp, Glycine max
  Clone ID: 700838045H1
aattaacctcctctctcactattccatcttcttaattactcatcactcttcttagaaactagtctaacaattaggttttgaagggcacacaaatatattccaaggttgtgtgaaaatgcgaatgagttgtaacggatgtcgtgttttgcgcaaagggtgtagcgaagattgtagcataagaccgtgtttgcaatggatcaagaacccggagtcgcaagctaatgccactgtgtttcttgctaagttc

SEQ ID NO: 70930 - DNA, 90 bp, Glycine max
  Clone ID: 700838046H1
aagttctagatcgcgagcggccccctttttgttttcatgtctataaaagaaatgatttgaattccattttaataagaatcccattttgta

SEQ ID NO: 70931 - DNA, 246 bp, Glycine max
  Clone ID: 700838047H1
ctcaaaatgttcttccattattgcaatctgcttttgatttgaatttcacaccccgtgagtttgatagctttgatgaagttcatggactctattcaggcggaattaagctgccaacagagataatcagcaagattagtccactacccgtgcttaaggaaatcttccgaactgatggtgaacaggcccttaagtttcctcctcctaaagtaattcaagtgagtaagtctgcatggatgactgatgaag

SEQ ID NO: 70932 - DNA, 253 bp, Glycine max
  Clone ID: 700838048H1
gaaacatctctaaatgtcctcatggaactaaatgtgctttgttcatcacgagaaatcttcagcaattcgatgatatccttgctttgagttctaagaggtggcattttttttactcagtggttcatctcgtgccagaaatcttaattctaaagagagaagaaccatatgtaattttgattgaggactctacaaaggcaaggagatttgtattattttttggggcccttttgtaatagtgctagcttgaagttta

SEQ ID NO: 70933 - DNA, 257 bp, Glycine max
  Clone ID: 700838049H1
ggcttcaaacatgatcaggaatccaaagaatccaccactaacaaagtctctgattatgccactgacactgcacagaaatccaaggattatgcaactgacactgctcagaaatcaaaggactatgcaggtgatgctgctcagaaatcaaaggactacgcaggtgatgctgctcagaaaaccaaagactatgccagtgacactgcacagacatcaaaggactatgctggtgatgctgctcagaaatcaaagggctatgt

SEQ ID NO: 70934 - DNA, 254 bp, Glycine max
  Clone ID: 700838050H1
cacgaaatgaattagcgttgccattctcatcctcctctgtctctctctctccaccattgccatggatccttacaagctccggccatccagcgccttcaattctcccttctggactacaaattctggtgctcctgtttggaacaacaactcctctttaaccgttggagctagaggtccaattctgcttgaggattatcatcttgtggagaagcttgcaaactttgacagggaacgtatcccagaacgtgttgtcc

SEQ ID NO: 70935 - DNA, 252 bp, Glycine max
  Clone ID: 700838051H1
cacaaaacaaaaagtttacgttacaaatcgcataataaccgtcctaagtttattgagagaattttgcaagtgtgagaaacatggcatctcgtcaaaacaacaagcaagagcttgatgaaagagcaaggcaaggagagactgttgtcccgggtggaactggtggcaagagcctggaggctcagcaacaccttgctgaaggaaggagcaagggagggcaaacaaggaaggaacagctgggtacagaagggtacc

SEQ ID NO: 70936 - DNA, 234 bp, Glycine max
  Clone ID: 700838052H1
gctctcaacgttgggggatccagtctcttcaatccctaaggttggatcagtagatataattagatcaattttcttttatccgctatttacagtgttcgtatattcgtgagtgcttctgatggagaaaagcatctaccggcggcgcatatttttggcttcattttgtgagagctacaaattttatttcagcttaaatgtgtgtattacttgtctatatccaagcattttcttata

SEQ ID NO: 70937 - DNA, 252 bp, Glycine max
  Clone ID: 700838054H1
caaagctcttggacaaccaggactgaaacgttcagtgagggttggggagacaggtttcagagaagttgcagcctaccttcttgaccatgatcattttgccaatgtaccctttactgcccttgtaaaggtcacacattctatttgtaatgtgaatgacagggtcaatggtagtatgcatcattacaaaaagcaaataagcaagattgcatctctgcagcagtttattcctcatgattttgatgcaagtgatca

SEQ ID NO: 70938 - DNA, 254 bp, Glycine max
  Clone ID: 700838056H1
gcctcacaaaagcaaagatcaaacaaaccaaggacgagaacacgatgttgcttgaacttgcacttggtttattggttttggctctgtttctgcacttgcgtcccacacccactgcaaaatcaaaagcacttcgccatctcccaaacccaccaagcccaaagcctcgtcttcccttcataggacaccttcatctcttaaaagacaaacttctccactacgcactcatcgacctctccaaaaaacatggtccctta

SEQ ID NO: 70939 - DNA, 249 bp, Glycine max
  Clone ID: 700838057H1
gtgccaacaaagaatctccgggtgcaaattctaggctactggccaccattgtagccggttcagtcctcgccggggagctatcgctcatgtctgctattgcagctggacaacttgttaagagccacatgaaatacaacagatctagcagggatatatctacaattgtccaatgaactggccacagtacacttaaacttgtgtcagagactaatattctaataagcaaaccatcagataaagacatatata

SEQ ID NO: 70940 - DNA, 249 bp, Glycine max
  Clone ID: 700838058H1
tggatttggaaaccagaacctagtggacaatattcggtaagaactgcctataacatgttgaaaggagtggatgttgaggaggataacatgtgggtgtttgaggagctatggatgatacgagttccacctaaattactattttcgcatggaggttattaaaggtgaggctacaaagacagacaaacttgaggaggagaagggtgacaatcaatgacacattatgcccattctgtgggaattttgaggaga

SEQ ID NO: 70941 - DNA, 250 bp, Glycine max
  Clone ID: 700838060H1
gtggttccagttcaacaaacaaccattcctcaaactcagttatgtgtgcagatagaaataatctagcaaatgaggaagcaagctcaagaagtatgcctagaaacattatagaatacccaatgtttgtgcctgcaaccaacttaagaaacgttgttcggaatccagctagaacttcaaataatgcaaatttaagtattccaggaaatgttggttcttcatcgcggacaggctcaaatccagctgtcaatcc

SEQ ID NO: 70942 - DNA, 228 bp, Glycine max
  Clone ID: 700838061H1
aaatatttttcattctaggtgatgtatcatgtatgtaccaaaatattttggtacgtaagtcttttaaaaagtttgcatctcctctttggttttccttagttctgaaagttatctcctaagaagacaatcatatgtactgtacgtagtgtgaagatatagtattgtatgctgcagaatatgattgtctaataaggtggactagctgtaataaaagatatttccaggttg

SEQ ID NO: 70943 - DNA, 246 bp, Glycine max
  Clone ID: 700838062H1
cacaactacaagaaagaacttccttataaccaaaaccaacaacaactatggcaagttatcagaagcactacgatgatcagggtcgcaaggtcgacgagtatggcaatgttgagaggcaaactgacgaatatggcaacccggttcatgccactagtgtcacttatgtagccaccaaaagtgttggtggctacaatgatgacgctaataagcaacatgatattactggtgtctatcccgagaaagaca

SEQ ID NO: 70944 - DNA, 251 bp, Glycine max
  Clone ID: 700838063H1
agagagatggcagaatgcaagaaatgcaaggaaagtaaacaatgaccaaaatttgcaggagacaatggacaaagagttggatactcataggctggagcatggccccaagaaaagaaagatcccagacggaaacaataatgaagatgatgatgatgtggaagatataaatgtgggagaggatgacatgatggatgatgaattagatgatgattctggtaggaggattgatgatacaactaagacggaagcag

SEQ ID NO: 70945 - DNA, 254 bp, Glycine max
  Clone ID: 700838065H1
cttaatatctttgcttttgaggccaatcacatctctgagtcagtctcagccagctcattcttcttctatcttcttctgctatatatgctcaacctttaaagggtatttctctctctctctctcaactagtttgagtttcattgtactttgatatcactgcagaagtacatgagactcttaaaagagggtatgctttaaagaccagaatcagaagctgattaaaggagagaacctttccaagacatggctatgtt

SEQ ID NO: 70946 - DNA, 232 bp, Glycine max
  Clone ID: 700838066H1
ggttagattgagcaggttcgggaggccgcaaataggatcagtggaaaggagaagattaggtgattttgtgttttatgaattctgtccactgttgagtggaatggtttgggatagaatggaataacaaatgtcattgttggactgattggaataggatgtataatgtgatgaaaatgaaatatatttcagtttgatgcttttaaaaagaaaaaaggtgtcaaaggaaagacaa

SEQ ID NO: 70947 - DNA, 250 bp, Glycine max
  Clone ID: 700838067H1
ctcgagccgctaatgtcttgagctggaagcttcggtttctctccattttctcttagggttttcactttcacccatttctcttctctttcgatctgcgcccaaagttagacattgctagggttttggagtagtggattagctcttttaggattaaggagtgtttctatcttcatggataaagacaaatctctaggtttgccacctccgtctggacgttattccggttactcgcccaccagaagtgttttca

SEQ ID NO: 70948 - DNA, 250 bp, Glycine max
  Clone ID: 700838068H1
tctctctcgtattgaatggctgcaaaaagctgatgtgcctaccatagcacagattgaagagttccattcgatgcagagaatgatgaatgctcctgattcaaatgataatattgatctactgttgagcattgatttgttgggtttacaaggagcaggtaaagcttttccaaataagattgtttttgatgataagcttgtgttggctaacacacaagaattctttgatggaaattttccagtggattcttgg

SEQ ID NO: 70949 - DNA, 251 bp, Glycine max
  Clone ID: 700838069H1
cttcatagttcagtgtgtcgtttaaaaatgtcgcagttgctggataaagccaagaacttcgtgtcggagaaggtaaatgatatggccaagccggagggaggtgtcactgacgtggacttcaagcgcgtgagcaaagataatgtcgagtacttggccaaggtctctgttcgtaacccttattcaacttccatacccatttgtgagatcaactactctttcaaaagcgcatccagggagatagcatcagggaa

SEQ ID NO: 70950 - DNA, 252 bp, Glycine max
  Clone ID: 700838072H1
gctcaacagaaagttaaggagagaaacgagagagcaaaacaagcagcagaagctgccaaagagagaaacaagcaggcaaataaagggaatgaagaaggcagaagagaaagagaaagtggtgggggtgttcatcatgaggctaagtttgaaactaaaggtgaaaaaaagaaggatttagtgggaagagagcggaacaaagaggagaaacaaagaagcagtccaagaggaaaagtagaggcagagaaagcaaga

SEQ ID NO: 70951 - DNA, 246 bp, Glycine max
  Clone ID: 700838074H1
cacacaactactacaagtacttccttacaatcaaaaccaacaacaactatggcaagttattaaaagcactacgatgatcagggtcgcaaggttgacgagtatggcaacgttgagaagcaaaccgacgaatacggcaaccctgttcatgctgctagtgtcacctatgtagccaccagaactgctgctggtggttacagtgatgacattaataagcaacatgataccaccaatgcctacggcgtagac

SEQ ID NO: 70952 - DNA, 247 bp, Glycine max
  Clone ID: 700838077H1
gtacaactcaaatttccattttcatacaagttacattttgttacctatactactacactctagttgttccaccactagcgtttgtggcaacaactttgatttgaggttctggtttttttgtataatcaacaagtatttgaggcttctatttgatactcatcgagtcttcattccaccgagtcagttcatttttgaacaaagtgatatcttctcattcttaagccgacaatctatactccacacttta

SEQ ID NO: 70953 - DNA, 248 bp, Glycine max
  Clone ID: 700838078H1
agagtgaaaaaaccttctcttttccttctctcaagtctcaagagatttcatcatggctccaaagaaggacaaggctccaccaccttcctccaagcccgccaaatctggcggtggcaagcagaagaagaagaagtggagcaagggaaagcaaaaggagaaggtgaataacatggtgctgtttgatcagggcacctatgataagctcctttctgaagctcccaaattcaagctcatcactccttccattc

SEQ ID NO: 70954 - DNA, 249 bp, Glycine max
  Clone ID: 700838079H1
cagagactgcgagatcttccctttctcttgcagaggctgctcagggaattcctccaccctcacagatcccttcctcttctcattcgcgctcgcgtctttgttgttatgatagcgagtgttatatacctcttcagccctattgacatcattcctgaagggatattaggagtagttggtttcttagatgatctcctaattgtgctcatctgcttcctacatgttgctgccctgtatagatcagtactctac

SEQ ID NO: 70955 - DNA, 235 bp, Glycine max
  Clone ID: 700838081H1
ccgagcttgaccctttctctgacctccttggcttcgataccaccaccagcaccaccaaccaaccaccccttccagacaaaaaagtggtgtcatcatgtgagaagaagaagaagaaaagtgtgagtgcagaaaagaagagtggtgggcgagctcggaagaacgtgtacagaggaatcaggcaaaggccgtggggcaagtgggccgcggaaataagggacccacataagggcgtccg

SEQ ID NO: 70956 - DNA, 250 bp, Glycine max
  Clone ID: 700838083H1
gaaacatcaggactaaaaagatatttgttggagggttgcctcccaccctgactgaagaaaaatttcgtctgtactttgagtcttatggacatgtaactgatgtagtagtcatgtatgaccagaatactgggcgtccacggggatttgggtttatttcatttgatactgaggaggcagttgatagggttttgcacaaatcatttcatgatttaaatggtaaacaagttgaggtaaagcgtgcacttcccaa

SEQ ID NO: 70957 - DNA, 249 bp, Glycine max
  Clone ID: 700838084H1
gcttcaactccaacaagatcaatgcatatcctagcgtggaccttgtgatggacaagcccaatggtcctgtttggagaatctctggtgaggacttgatggtgcaggcacaacctggggtcacgtgtttgggtgttatgaatggaggaatgcaacctagagctgaaattaccttaggggcacgtcagttggaagagaacctggtggtgttcgatcttgcaaggtcaagggttgggtttagcacctcatcac

SEQ ID NO: 70958 - DNA, 251 bp, Glycine max
  Clone ID: 700838085H1
gttgcagaccgagctagctagctagcaagcaagcacagagatggaggcaaagcgaggccatgccctcatgtgcttggcacgtgtttcactcttcctctgcgctctaaccctatccgctgctcacggaagcaccacggttcaagacatcgcgagaaagttgaaactcggggacaacgagcttctgcgcacggagaagaagttcaaggttttcatggagaattacgggaggagctactccacagaggaggagt

SEQ ID NO: 70959 - DNA, 247 bp, Glycine max
  Clone ID: 700838086H1
tgcttctcgacaaaaacgaccagctcggacgcccctttgtgttgattctcccgatcctccaagcctcgttccgagcctccctgcaacccggtttggatgattacgtggacgtttgcatggagagcgggtcgacacgtgtctgtggctccagcttcgggagctgcttatacgtccacgttggccatgacccgtatcagttgcttagagaagcaactaaagtcgttaggatgcatttggggacgttcaa

SEQ ID NO: 70960 - DNA, 248 bp, Glycine max
  Clone ID: 700838087H1
ctgctactcgctcatcccgtggaggtttcgctctctcagtttcttttccccaaattggtttttcatctaacaatttactttgcagaaccgtaaccctaaccccttcccctaccttgtaaccttcctttcgatccttcacctcgcaggtctgattttagttgattcggtgattcccagataatgggagaaacaaaggacgaagcatacgaggaagagcttctcgattacgaggaggaagacgaaaaggc

SEQ ID NO: 70961 - DNA, 251 bp, Glycine max
  Clone ID: 700838088H1
gccacatagagacacaatacagagtgagttgttgctccttcgccacaactctctgccaacatgggtatctccagagattctatgcacaagaggcgtgccactggtggcaagaagaaggcctggaggaaaaagagaaagtatgagcttggtcgccagcctgctaacactaagctgtcaagcaacaagacagtcaggaggatccgtgttagaggtggaaatgtgaaatggagggcattgagattggatactgg

SEQ ID NO: 70962 - DNA, 248 bp, Glycine max
  Clone ID: 700838093H1
gttgagattccctttgaagaaaagatggcatcccataggcaaagctatgaagctggtcaaactaagggccgaactgaggaaaagacgaaccagacgatgggcaatattggagagaaggctcaagctgcaaaggagaagacccaggaaatggcccaagctgcaaaggagaagacccaacaaacagcccaagctgccaaggacaagacttgcgacacttcccaagcggcaaaggagaagacccaacagaa

SEQ ID NO: 70963 - DNA, 247 bp, Glycine max
  Clone ID: 700838094H1
acattttctgatcgcatatttaaatctccactgcttgatcttctgatcaaatctgggcgaaatggcaaaaacaatgggaaagggtactacatttatgaaaagggtggcaagccaaaacctgatccttcaatactaccaatctatcgaggagtctagaagactttgcaatattatgcccaatggaaagcctatatctattactgaccaagagattgtggagatgatactattcccagtagttaatgag

SEQ ID NO: 70964 - DNA, 250 bp, Glycine max
  Clone ID: 700838095H1
cttaatttctcatctcatcatttctaattctagctcttttctcttgcactaacaatccaagatgaataccaacaacgacaccgaaaaaaaccaatcatttccagaagcacaaggagcatcatgatcatcatcttctccacccaatgttgggactgagaattggggaactcacataatgggcacccctgctgttccaagcagccacccagataacaaaaaagcagctttacaaagtggacaacctcaacca

SEQ ID NO: 70965 - DNA, 275 bp, Glycine max
  Clone ID: 700838101H1
cacaaaattgaactgtaattgtagtagtagacagtagcaccatgagccaggaacagctcaagaaacctcaaggggagcaggaccccatcaaatacggcgacgttttcaaagtctccgacgaactcgctttcaaacccatcgcgccaagagacgcagctctcatgcaagccacggagaaccaagcattgggccaaactcaaaaaggaggtcccgcctcggtgatgcaatccgccgcaaccgaaaacctccgcgccggcgtcgtgggccgccaagac

SEQ ID NO: 70966 - DNA, 271 bp, Glycine max
  Clone ID: 700838103H1
cggctcgagctcctttagtttactacatcaacagcaccgtcttactcgaagtatctgatttcaaatcttggattcgattccatcacttatagttctctcttctctttcttttcctttctttctccgccgaagatggcgccgcccacgccagcagttgaaggcgcccaggcgccgcaagggcggcagcaacagccgcaaggagggtttggcctcaccggaatcatacgcatggtcgttttctggtacttcgcttccaaattcttttccccca

SEQ ID NO: 70967 - DNA, 268 bp, Glycine max
  Clone ID: 700838104H1
gagaaaacaagaagtagtgagaagaagggagagaatggaggaaaaggcaaaagctgagcagaagaagataggtatgaccgagacttggttgaagaagcaccgtcttctttacaatggagccactagacaccctcttattattagcattcgcgatggcaccatcaacactgcttccttcaaaacatggctcgttagtaattcttcaccctttttttttaagtgattagtttaacttccttttcatatttagtacaattttgggtagcca

SEQ ID NO: 70968 - DNA, 264 bp, Glycine max
  Clone ID: 700838105H1
ggaatgaagaagctgatcttgcattcgcatctctcactgcttctcatttattgtcaggttttaggttccacaacaatagcttctctttccatctgtctttgcacaaatggctgcaatcttagctcggaaatcacttcttgctcttcgaacactccaactggctgtaagtggtcaagggctacacaacttccaaaactatggcctgccattaagtgcacagtcctactctaccaaaaaagaggatgaagcaagggagcaacttgc

SEQ ID NO: 70969 - DNA, 261 bp, Glycine max
  Clone ID: 700838106H1
agaaggtagatcatacatagtagtgttggtgggttgcaaagatgcttgggggtcttctccatatgggtcataagataaaagggacagtggtgttgatgcgcaagactgtgttggacgtgaatagcgtaaccagcgttgggggaattattggtcaaggtctcaacttagttggctcaacactcgatactcttactgccttcttgggacgatccgtgtctctccagcttattagtgctaccaaagctgatgccaacggaaaag

SEQ ID NO: 70970 - DNA, 265 bp, Glycine max
  Clone ID: 700838107H1
aacaaacagcccaagctgccaaggacaagacttgcgacacttcccaagcggcaaaggagaagacccaacagaatacaggagctgctcaacaaaagacctcagagatgggccagtccacgaaggaatcggcccagtcagggaaggacaacacccaagggttcctgcagcagacaggggagaaggtgaagggcgcagccaaggtgctacagaggctgtgaagcaaacccttggcttgggcgagcatgatcaagacaaccgcagaaat

SEQ ID NO: 70971 - DNA, 264 bp, Glycine max
  Clone ID: 700838108H1
tctcgagccgattcggctcgagtaacaactggcccgaaccggattgggtggggcggcaggagctcgagattgttatggggaacgagcacatttcgttcaccacgtcgaagattgggtctcttgttgatgttcagagcagtgctgaccccgagggtcttcgcatcttttactatcttgttcaggatttgaagtgctttgtcttctctcttatttcacttcacttcaagatcaagcgtatctaatgtgtttgcaataatatgagtt

SEQ ID NO: 70972 - DNA, 267 bp, Glycine max
  Clone ID: 700838111H1
catttccattttcctctataaacctctcctccctctctctctgactctctctctctctctctctagatcgcaccgcaccgcaccgatggaaacacaatgatccaaccctaacccaagcgcctcttacctccaagttttgtgattgaagctgcgatggaggaagagacctccgatgcaatgaaccttgatttgaatctgggcccaggcccagaacccgaaactgggcccataagcaatgaagctgtgaacttggacgattggataggg

SEQ ID NO: 70973 - DNA, 266 bp, Glycine max
  Clone ID: 700838112H1
cagtggttcttttccttctgagaagatcgaattgtgttttgcaaaaatgggagttccagagaaagaccctctttcccaattgagtttgcctcctggttttcggttttaccccaccgacgaggagcttctcgttcagtatctgtgccgcaaagtcgctggccaccatttctctcttccaatcattgccgaaattgacttgtacaagttcgacccatgggttcttccaagtaaagcgattttcggtgataaagagtggtactttttca

SEQ ID NO: 70974 - DNA, 266 bp, Glycine max
  Clone ID: 700838113H1
gcagcgcacggcgttggcgacagatgaaccacggcggcgctccggcgacgcggagggggagaaggtgttcaaggggagcgaggtgttcggtgacacgtcaccaaattacttgaagaccattttggccctggcgttgtggctcggaaccattcatttcaacgtcgcgttggtgctcttcgcaatcttcttcctctctctccacaaagcacttttgcttttcggtttgcttttcgtgctcatggtaattcctgttgatgaaaagagca

SEQ ID NO: 70975 - DNA, 224 bp, Glycine max
  Clone ID: 700838116H1
atctgtaacatcacctgtatcgagatgcgcgatcacgagcagccacaagaggccctttgtgcacctgagaagctggtgaagcaagtggctctggcaacgcagaaggcacaggttccacttgccggcgaaaacgcgctgccacggtacgacgagtatgcacatgagcagatcataagggcatcacaattggatgttgatggtgatctcggtaatagagatatgtg

SEQ ID NO: 70976 - DNA, 267 bp, Glycine max
  Clone ID: 700838117H1
aacttccttataaccaaaaccaacaacaactatggcaagttatcagaagcactacgatgatcagggtcgcaaggtcgacgagtatggcaatgttgagaggcaaactgacgaatatggcaacccggttcatgccactagtgtcacttatgtagccaccaaaagtgttggtggctacaatgatgacgctaataagcaacatgatattactggtgtctatcccgagaaagacaccggtagacatcattttggtcgtggttacgacggtga

SEQ ID NO: 70977 - DNA, 66 bp, Glycine max
  Clone ID: 700838118H1
ggtatgtggatcatgctgggctttcagcaccacaggatctatagaaggagccaatactcctcctct

SEQ ID NO: 70978 - DNA, 265 bp, Glycine max
  Clone ID: 700838119H1
ctcgagccgatttgctctcaagactgtgaattatggaatcctgcttgcacaaaagcaatgactatgtcatttaatccaaatccgtgttctgatgcatggagtttggaatttctgaagcgtaccggatttcattgtgatatcatttgtgtcactggatggactgccactccaatgcaggatgttcaggttacaattgattggtttatttcctctcaggaatgtgttcccaggacctattgtgttttaaatccacaaaatccttttg

SEQ ID NO: 70979 - DNA, 264 bp, Glycine max
  Clone ID: 700838120H1
gggtaatatataatgaatatgttcttactagtcggaattttattcgaactgtgacagatatacgtggagaatggttagtggatgtagccccacattactatgatttgtcgaattttccacaatgtgaagctaagcgtgttcttgagaggctttacaagaagcgagagaaggaaaaggaggaagccaggagtcgtaaatgaagtcccctaccatccatgcctttttttgcctttagattggaattggatatttagtctcctgtaa

SEQ ID NO: 70980 - DNA, 264 bp, Glycine max
  Clone ID: 700838122H1
atcacaatcacagaaacatgcccgtgagagtattggagaataccgcagcaccttcttctcaggtttcaggtgccaattcgggaaggagttcgtgccaatcttgtagtcttctaggcgttgggcagaaatcttagagaattttattagagatcaactctaatagccagaaatcagcaactctgacttgattgagaccattgagttggaaaatcttctgataaatgcctgcatcaccatgcactctgctgaagcaagaaaagagag

SEQ ID NO: 70981 - DNA, 262 bp, Glycine max
  Clone ID: 700838126H1
tgaatggcagaaccattgacggccgtgtggttaaagttaacggggtgaggactcgtgggggcaggtcaaattttggcagagaacgttattactatcataatgatgagaggaatggagattgggatcgcagtagggatcgagaccgagattatgatcatgatagtaatgatagggatggatataggaatcggagcagtgattggggtcgagaccgtgacaggtctcgagatcgtgatcaggacagggatagaaggtttgagca

SEQ ID NO: 70982 - DNA, 265 bp, Glycine max
  Clone ID: 700838127H1
acagcatcaagcaaccaacacaaactgatttctcatttcgtagcatcaaccgctaactatccagatactaattttcgctttggtttggttcaattctgtccgcagacatggttttcaggccaatgagtggtaattggttagcactgttaagaaacagttatggaggtaaagccgcgtacgcaacctcaacagcaccaaagatgaaagcgtatgcagctgcggctgattacggacacaagcaacaacatgggaagtcggccaaacg

SEQ ID NO: 70983 - DNA, 266 bp, Glycine max
  Clone ID: 700838128H1
aaaacctgcgtactggaatctataaagaaacaatccaattaatcaaaacgcacaacgaagatcgtatgaatacgattttgcacttctcgacaaatataatttgtttctttattctaagcggttattctattcttggtaatcaagaacttgttcttattaactctttggttcgagaatttatatataatttaagtgacacaataaaagctttttctattcttctattaactgatttatgtataggattccattcaacccatggttgg

SEQ ID NO: 70984 - DNA, 265 bp, Glycine max
  Clone ID: 700838129H1
ttctcatttcttcatcgttcgattcttctcctcctaaagatgcagatcttcgtgaaaactttgaccggtaagaccatcacccttgaggtggagtcctccgacaccatcgataacgtgaaagctaagattcaagacaaggaagggatcccacctgaccagcagagacttatctttgcgggtaaacagcttgaggatggtcgaacccttgccgactacaacatccaaaaggaatccactctccacctcgtgcttcgcctcaggggtg

SEQ ID NO: 70985 - DNA, 263 bp, Glycine max
  Clone ID: 700838130H1
aaaccaaaacactcaagttaacttcaacacctttaattttctgaacgaaattcagccacagaatatcaaagggagcgaagatgagtcaggagcagccaaggcgcccccaaggccaagaccccatcaaatacggcgacgtttttgacgtctacggtgaccttgcacagatgcccattgcaccggaagatgctgccatgatgcaaagcgcggaagctcgagtactcggaaaaacccaacccggcggagcttcttccgtcatgcaa

SEQ ID NO: 70986 - DNA, 262 bp, Glycine max
  Clone ID: 700838131H1
cttatccctctaatcactctagctgttgcaaatttctactatttttcaatggcttctgcagatgttgagttccgttgctttgttggtgggcttgcttgggtcaccggcaacgatgccctcgagaaagccttttcaatctacggcgacatcgttgaatcgaaggttatcaacgaccgtgagactggaaggtccagaggattcggatttgtgaccttcgcctcagagcagtcaatgaaagatccgatcgcaggaatgaacggcc

SEQ ID NO: 70987 - DNA, 266 bp, Glycine max
  Clone ID: 700838133H1
ggaagagctattattaattggatcctgcttttgaagtaaaatggagtctggagctggaggcctagtgtcgtcgtctgagaaagaaggagcctcgtatacctattgggttaggaaaataacggaagatgcagcgcctttgcctctgcctcgtaagctcaacccagaagatcttcccccttcccaatctcaatcttccacgcttgcttcagcttggaatcgcgctgggacatgggaggagaaaagtctaagcaattgggcaactccaa

SEQ ID NO: 70988 - DNA, 253 bp, Glycine max
  Clone ID: 700838134H1
ttcgagactaccggattgtccagtttcagtcaaaacccaacacaatccttctcccccaccatgctgacgccgatttcctcctctttgtccttaaggggagatccatacttaccttggtgaacaacgacgacagagactcctacaaccttcagcctggcgatgcccagagaatcccagctggaaccacttactatttggttaaccctcacgaccaccagagtctcagaataatcaaacttgccatacccgtcaa

SEQ ID NO: 70989 - DNA, 144 bp, Glycine max
  Clone ID: 700838135H1
gaacacttgatttggaataggggttatttggtagtgctagtgcctagtggaattctgtgttgagttctttgttctttatatttagttgagatgtgtgtcgtgttcttgagttgtggataaaaatctactgtctatgtgcattga

SEQ ID NO: 70990 - DNA, 260 bp, Glycine max
  Clone ID: 700838136H1
gccgaatctcaccctgagttgctcgaactggctgacaatgggagcttaattttggtctagatgaagcggttcggccctgtcccttattggaggaccgaattcttcgaaccggattccatttggttgattggaaccacccatgtttctgaggattccgccatggaggtgaacgcgtggtgcgtgctttgaggccagagaatgtcgttgttgagctctgcagaagcagtatcttgcatggtcattgaagcggacaaagctgt

SEQ ID NO: 70991 - DNA, 259 bp, Glycine max
  Clone ID: 700838137H1
gcttcacaagccaaatctaacttgtctctgttttctccgatctagtactactatcaatggccggaaaaggagatggtcctgctatcggaatcgatctcggcaccacctactcctgcgtcggagtgtggcagcacgaccgtgtcgaaatcatcgccaatgaccagggtaacagaaccacgccgtcttacgtcgctttcactgattccgagcgtttgatcggtgacgccgccaagaaccaggtcgccatgaaccccgtcaa

SEQ ID NO: 70992 - DNA, 262 bp, Glycine max
  Clone ID: 700838139H1
cctgaatatgcagcaaatatgtggaatgaagccttgaacaaacgacttggaactaaaggacttgacctttcagaagttttagtagaagttgaaaagcgtggatcatcttttgatgaactactgacaattcccgaacaggatgattggatctacagtgatggaaagtcgacttcttgcattgcttttatacttgagatgtacaaggaggcagggctgtttgatccggttgctagttctgttcaagtgacagagtttacgataa

SEQ ID NO: 70993 - DNA, 263 bp, Glycine max
  Clone ID: 700838141H1
gccgtttctattattgacaccaacagcttggagaaccagctcgaccagatgcctaggagattctatcttgctgggaaccaagagcaagagtttctaaaatatcagcaagagcaaggaggtcatcaaagccagaaaggaaagcatcagcaagaagaagaaaacgaaggaggcagcatattgagtggcttcaccctggaattcttggaacatgcattcagcgtggacaagcagatagcgaaaaacctacaaggagagaacgaagg

SEQ ID NO: 70994 - DNA, 260 bp, Glycine max
  Clone ID: 700838143H1
cgggggtcccagtcccgaacccgtcggctgtcggtggactgctcgagctgcttccgcggcgagagcgggtcgtcgcgtgccggtcgggggacggattgggaacgggcccttcggggcctcttcctcgggcgtcgaacagtcaactcagaactggtacggacaaggggaatccgactgtttaattaaaacaaagcattgcgatggtccctgcggatgttgacgcaatgtgatttctgcccagtgctctgaatgtcaaagtg

SEQ ID NO: 70995 - DNA, 263 bp, Glycine max
  Clone ID: 700838144H1
gattggtgaaaacatggtgaaaaaaccagcacagaaagtgcagcagcatcaaggtgaaggtggaggaggggtgctgaatgccattggtgaaaccatagcagagatagcagagacaactaaggtgattgttgctggagagggagaaaaggagataatagtaaaaacacatgaatttgaatatggagacttgaaacttgattagtgaattgctgcattgcatggatgttcatgacaagttggtttatggaaggaaatctatcatg

SEQ ID NO: 70996 - DNA, 263 bp, Glycine max
  Clone ID: 700838147H1
atttgagcatttttggaacagtggtggtgctagagttggggaagaaggggctctcggttggtccgcatggttggagaaagaggaggaaactaggcaaaaagttatgaatgatgagctctcgcgtgaaaatgaaggtggtggttggactggttggtcagaaccatggtctaaagataatgagggtattgtcaatgttgaaaatgaaaccatcaatgatgtggttatggaggatattcaagatgaagaggaatacaaagaagttg

SEQ ID NO: 70997 - DNA, 265 bp, Glycine max
  Clone ID: 700838148H1
ggaaatcagtccgcagtacctgcctgaaacatatagtctgcttactcataattgcaacaacttcagcaatgaggttgctcaatttttggttggtgcgtccattcctgaatatattctccagctgcccaatgaagtcatgagcagcccaatgggagctcttatattgcctatgatacagaatcttgagaccacactgatctcttgtggagctcctctagtaccattcttcacgcctgcaactactctgaatgtttcagctaacacc

SEQ ID NO: 70998 - DNA, 188 bp, Glycine max
  Clone ID: 700838149H1
gctccgatttccacatcgtgcggcactatcaattgatttaacaatctttgttccacttcggcatgaaaccctaattcactcgcttctcgatctcgttagagcaatctatcgacgctcgtctatcgcgctccatctgtcaaagaagatccgtcaagagcgttggttatacgatggattggaacaaggac

SEQ ID NO: 70999 - DNA, 261 bp, Glycine max
  Clone ID: 700838150H1
ctgcagaaaatcccagccttcctcaaccaggcattcggcagcaacaggacaacttctttcgcagtcaaggaatcactatggaaggaaacttctatgaagaggccaacatgcccaacaatcatcacatgtttgctagatatgaaagtcaattttaccggttcacagctttgaatgcaacaccctttgagagcaatcacaacaataacttccatttgatgtttgggtccccttgtgatttggcatcctttgatttcaaggagg

SEQ ID NO: 71000 - DNA, 259 bp, Glycine max
  Clone ID: 700838152H1
agcttagttgtcaagttggaatcaacccatattccatggaatggactggtttggccaataggttactgagtaagggcaatgatattctgtgttgcgattatgctagttttgatggtttgattaccaagcaagttatgagcaagatggcagaaatgataaacagtctttgtggtggtgatgaaaaattggtgcgtgaaaggacgcacctgctgttggcttgttgttcaaggatggcaatttataagaaagatgtttggag

SEQ ID NO: 71001 - DNA, 259 bp, Glycine max
  Clone ID: 700838153H1
tttcgaatagattatcctaagtctttgggaatagtgctgcaatggcttcaagtcaggaggaggtgacccttttgggagctactggaagcccatttgtgtgcagggttcatattgccctcaagttgaagggagttcaatacaaatatgtcgaagaaaatttgaggaacaagagtgaactgcttctcaaatccaacccagttcacaagaaggttccagtgtttattcacaatgagaagcccatagcagagtctcttgtgat

SEQ ID NO: 71002 - DNA, 253 bp, Glycine max
  Clone ID: 700838155H1
gctcctgggccaaatggaaagcagcggacctcaagtttggaatcaccgatcatgttgctgtcaggtcaccagagtgctatatataccatgaagttcaatccagcaggatcagtcattgcatctggatctcatgacagggaaattttcctctggaatgtgcatggggattgcaagaacttcatggttctgaaaggtcacaagaatgctgttttagatctccactggactactgatgggacacaaatagtctctg

SEQ ID NO: 71003 - DNA, 259 bp, Glycine max
  Clone ID: 700838156H1
gtgatgaaatttctataatgtgctgattttctgtgattattatcctaaatatcaccatctttcggctgagattgcagatcaaattgttcttttctatgaaaattttatcctagtctgtataaataaccttttctttttttattcaacagacaaactggcgtagaccaaagggtatagattcccgtgttaggagaaagttcaagggatgcactttgatgccaaacatcggttatggttctgacaagaagacccgccacta

SEQ ID NO: 71004 - DNA, 258 bp, Glycine max
  Clone ID: 700838157H1
gccaagtattggtagtcgttggatatgtagaataatagatcagtcgctacttgcaatattcgttttcaaattgagaaagctttttacctgttgataacgaatattgcaagttgcgattgatctatttttctacatatccaacaactaccaatacttggcacatcaatgcacccaatattcgttttcaacaggtaacacggtttttcactttgaaagttggatcgggttatgaaatgatgcatgcccctttaccgaaat

SEQ ID NO: 71005 - DNA, 262 bp, Glycine max
  Clone ID: 700838160H1
aaagaaaggaaataattgatctttgaaaatgcagggaggaaagaaagctggagagtccatcaaggaaacagctgcaaacattggtgcttctgccaaggctggcatggagaaaaccaaggccactgtccaggagaaggcagaaagaatgacggcacgtgatccgatgcaaaaggagttggcaacccagaagaaagaggcaaagatgagccaggcagagctggacaagcaggcggcgcgtcagcataacacggcggcgaacagg

SEQ ID NO: 71006 - DNA, 259 bp, Glycine max
  Clone ID: 700838161H1
cttggacttgcagggttgctatgttggagatcaaggtctagctgctattggacagtgttgcaaacaacttgaagatttgaatctgcgtttctgtgaaggcactagctgcttgtctttggagttattggctttatatagttttcagagatttactgataagggtttgtgtgctattgggaatggatgtaagaagttaaagaacttgactttaagtgattgctatttcctcagtgacaagggtttggaagtaattgctact

SEQ ID NO: 71007 - DNA, 262 bp, Glycine max
  Clone ID: 700838162H1
ctcgagccgattcggctcgagattgatcccaggggctctgtgaagtgatcagcagatagagcttgaacatttgcagcgaaaagggaaagaaagagaaaatcatgtcaacagcagaagctcctccttctttccaagaagcagcgcgatgcgttgtctgcaattgcagtttcaacactttcagaagaaggcaccactgtcgatcctgtgggagaacattgtgtaatgaacattcatcaaatcaaatggctttaccacaatttgg

SEQ ID NO: 71008 - DNA, 259 bp, Glycine max
  Clone ID: 700838163H1
attaataattcctttgtgattgttccaaatccaattatggcatttggactcaggacaaagagctttgggttcatagaaggagaggctcatgagtttgtgggtgcacttcaatggtggaaccagattgatgactcagatcaatggcagagaggcacttactatgccctttgtgccgcttatacgttggtctcctttgttgccctggtgcaactggtacgaattcaaaggagggtacctgagtatgggtggacaacgcaga

SEQ ID NO: 71009 - DNA, 266 bp, Glycine max
  Clone ID: 700838164H1
caataattccttcacttgcagaacttagttctctgttgcatcatcatcatcttcattagtgttagccctaaacttcaccttcaaccatgaccacagtgccaccacacagtgtccaagtgcacacaacaacacaccgctacgaagccggcgtcgtcccgccggctcgttttgaggcgccgcgttacgaagccggcatcaaggcgccctcttccatttaccattccgagagaggtccgacgacctctcaggttctcgcagttgtcgcc

SEQ ID NO: 71010 - DNA, 261 bp, Glycine max
  Clone ID: 700838165H1
caagaacccaaccggtgtcgctgctctctctctgttacttccctatcctcgtgtgtggttcgtactatgaagaggactatgccatggagtgacgacgatgagtcatcgtcttcacattcagattctgaacgtgatagtgaaactggaggggaaaactccaaaggtaaatctaggaagcagaaaactgagaaaagtggtgtaattgactttgaggctttgaagcgacacgggtatagaggtggaccttctgtcctaaaagta

SEQ ID NO: 71011 - DNA, 254 bp, Glycine max
  Clone ID: 700838166H1
cgttactttcatttgttgtgcaatcttacaagttccaaacttctctattttgttattatgtgttctcacttctcacacatacagatttttgccttttatattatcatggcttctaaggtggtttcggttttggttatagcgatgatgttgtttgccatgaactgtaactgcactagtgttggccacatgccttcaaccaaagaggaaggtcacgattttcaggagtctaaagccaagaccacacaaactgcgat

SEQ ID NO: 71012 - DNA, 259 bp, Glycine max
  Clone ID: 700838167H1
cgagaaagttgaaactcggggacaacgagcttctgcgcacggagaagaagttcaaggttttcatggagaattacgggaggagctactccacagaggaggagtatttgcgccgtttggggattttcgcccagaacatggtcagagcggcggagcatcaggcgctggaccccaccgccgtccacggcgtcacgcagttctccgatctcaccgaggacgagtttgagaagctctacactggcgtcaatggcggcttcccgtc

SEQ ID NO: 71013 - DNA, 182 bp, Glycine max
  Clone ID: 700838168H1
agaaaacctaagcttagaattagaaacaaagaaaagaagaaaggaaagaattgatcgttgaaaatgcagggaggaaagaaagcgggagagtccattaaggaaacagctacaaacattggtgcttctgccaaggctggcatggagaagaccaaggccactgtccaagagaaggcagaaagaat

SEQ ID NO: 71014 - DNA, 255 bp, Glycine max
  Clone ID: 700838169H1
agagttcagaacacaaaccctcgaaccgaacgtttttgagggttgatagagcacgatggttcagtacaattttaagaagattaccgtggtgccaaatgggaaggatgtggtcgacattatcctctctcgcacccagcgtcagacaccaaccgttgtgcacaaaggatatgcgatttcacggctgcgccaattctacatgcgcaaagtgaagtcttctcagcagaattttcacgacaagctctccaccataatcga

SEQ ID NO: 71015 - DNA, 257 bp, Glycine max
  Clone ID: 700838172H1
atgcaaattgctaacactattctactggaggttattttgaaagaggaaaacaaaattatagtagaacaaatggttcccttttctcggtattaatgacttaaactttgagggccaatgtgttgcacaaacatgaacaccatagtttcttgtcatgtattaaattctaatatagactaaggatgtgtttggtttatatgatggaaaaagaagagaaacttttgaaggtgagtagagtgtaaaaagtgtgggtcccacaa

SEQ ID NO: 71016 - DNA, 257 bp, Glycine max
  Clone ID: 700838173H1
cagtaagaagtctgtcactttgtcatgggaaggcagcaattgctctaccgtggaaatttcaggacttgatattggatgggggcaggaattcagaccaaatcggagaaaattaatatatctgtagaaattggcagtttggtcccgggctgttcaaagttgacctgactactgacatcttgccaaactgacctgctcaagggatgatatgatatgaagtctcatttcatattcaaaatctttttaactttagaataatc

SEQ ID NO: 71017 - DNA, 258 bp, Glycine max
  Clone ID: 700838174H1
gagagagcgagcagtttcagacacagagagaggggtttgggattggagggattgacgctgcgtctcttcctcttctctttcgatccatccctcattcctaatcctccaatccaaccacctcagcctcacactcacatatacacatatctgaacgcgtatcgtccctcctatggcttcaaagcgcatcctcaaggagctcaaggacttgcagaaagacccaccaacttcttgcagcgctggtccagtagctgaggacat

SEQ ID NO: 71018 - DNA, 257 bp, Glycine max
  Clone ID: 700838176H1
aactactacaagtacttccttacaatcaaaaccaacaacaactatggcaagttatcagaagcactacgatgatcagggtcgcaaggttgacgagtatggcaacgttgagaagcaaaccgacgaatacggcaaccctgttcatgctgctagtgtcacctatgtagccaccagaactgctgctggtggttacagtgatgacattaataagcaacatgataccaccaatgcctacggcgtagacactggtagacagcatt

SEQ ID NO: 71019 - DNA, 259 bp, Glycine max
  Clone ID: 700838178H1
gcttggaaaattagcctcacaaaagcaaagatcaaacaaaccaaggacgagaacacgatgttgcttgaacttgcacttggtttattggttttggctctgtttctgcacttgcgtcccacacccactgcaaaatcaaaagcacttcgccatctcccaaacccaccaagcccaaagcctcgtcttccgttcataggacaccttcatctcttaaaagacaaacttctccactacgcactcatcgacctctccaaaaaacatg

SEQ ID NO: 71020 - DNA, 258 bp, Glycine max
  Clone ID: 700838179H1
ctttggagatgaaatgagacttgatttgaggaagttgtggtagttgaaaaattatagaaaatattccagtgctttcttgatactttgagaggttctctgtaaattcttagtcctaatgagttttcggtttttgagatttttctcacccaactgccttttattggtctaaattgttttcaagctaatgtatggttcttaattgtagcttttggttttagaaaattttatacttagttccttcaatacttcctatctaca

SEQ ID NO: 71021 - DNA, 258 bp, Glycine max
  Clone ID: 700838181H1
tgtttattaaaaacacaggactctgctaagtggtaacacgatgtatagagtctgacacctgcccggtgctggaaggtcggaaggagaagtgttataagctttgaatggaagccccggtaaacggcggcagtaactctaactgtcctaaggtagcgaaattccttgtcgcataagtagcgacctgcacgaatggtgtaacgactgccccgctgtctccgacatggacccggtgaaattgaattctccgggaagatgcgg

SEQ ID NO: 71022 - DNA, 256 bp, Glycine max
  Clone ID: 700838182H1
ccgatgacggcatgactcagttttccattccataaaattcctttaccttaacttccgtagtagttcatcctcaaaaaaacctttcataacttcttttcttcctccttctacttcgggttgtgagtgtatacgtatcacgcatggcagctttccttcgacgctggattccacgatggaagattttatcttctccaccctgacgggatagcaaatctttcatgaaattgagaattgctgctgctaataaacaagcttc

SEQ ID NO: 71023 - DNA, 254 bp, Glycine max
  Clone ID: 700838183H1
ggaaaatttcccggtcacttgcagcaaagacggcattggctattaggtgtgatgctcttggagatagccaagataacaccatgggattggagaacagagccaagcttgaagcacgattgaggaaccttgaaggcaaagagttaggtcgttttgctggttctgccaagggaaagcccaagatagaagcatacgacaaggaccgaaagataggagctggaggactgataaccccggccaagacatataatccttca

SEQ ID NO: 71024 - DNA, 252 bp, Glycine max
  Clone ID: 700838184H1
tcactcatcatgagtggttgtctgaacctgacttctgtgcattgtgtttgtgctggccaagcacaccgtgctatcactactccctcatgcagctcattgagccagaggggttgatgatgtataaaaggacactttgatgaggaagtgcccttgaagggttttaaagttttaggggtcttctggataagtttatgttcaatgctgcatcatgtcatgttggttgtagaacagcttgaaccttggtgcttgagt

SEQ ID NO: 71025 - DNA, 255 bp, Glycine max
  Clone ID: 700838185H1
agaaaacctaagcttagaattagaaacaaagaaaagaagacaggaaagaattgatcgttgaaaatgcagggaggaaagaaagcgggagagtccattaaggaaacagctacaaacattggtgcttctgccaaggctggcatggagaagaccaaggccactgtccaagagaaggcagaaagaatgacagcacgtgatccggtgcaaaaggagttggcaacccaaaagaaagaggcaaagatgaaccaggcggactgg

SEQ ID NO: 71026 - DNA, 246 bp, Glycine max
  Clone ID: 700838187H1
gcttcttttggcaatgccagagttggtcacgctctctgaaaatgcagcaacagcgacagcagcagcaggcatgaagagcaacatacacaacaccactccttcaaatatcatcatcatttcacacttctcatccttcactctcttcttctctttcttcccttcactctctctttcgcttcatggctggtctcatcgatctcaacaacgccaccgaggacgatgaaacgccgtcgtctgggtcctcct

SEQ ID NO: 71027 - DNA, 256 bp, Glycine max
  Clone ID: 700838188H1
cacgcacgtctctctctctctctcgccatggctatggctatgcaaagcggaatcggagtctccaagatcctcatcatagcaggagcaggttacaccggcaccgtcctcatcaaaaacggaaaactctcggatttaatcggcgagcttcagttgctggtgaagggattggaaaaatctggggagcatgctgaaggtgaaggtgaatatgctgatgccatagctgctcaggtgcgtcgcctggcgaatgaagttcggc

SEQ ID NO: 71028 - DNA, 254 bp, Glycine max
  Clone ID: 700838189H1
tagttctagatcgcgagcggcctacttttttttgatgaatttgattctatagcccccaagagagggcatgacaatactggagtaactgatcgtgttgttaatcaatttctgactgagttagatggtgttgagattttaactggtgtatttgtgtttgctgcaaccagtagaccagatttacttgatgcagcactgttgagacctggtaggttagatcgtcttctgttctgtgactttccgtctttgcatgagag

SEQ ID NO: 71029 - DNA, 256 bp, Glycine max
  Clone ID: 700838190H1
atgcagcataggctcatcaaatctggagtagtggttgctcgtttctttgtggcactgcatgcaagacaagaaattaatgcagagttgaagaaggaagcagaattttttggtgatattgttatagtgccgtatttggataactatgatcttgttgtgttgaaaacagtggccatatgtgaatatggggtacatacggtttctgctaagtatgtcatgaaaggtgatgatgacacttttgttagagtggatgccgtta

SEQ ID NO: 71030 - DNA, 255 bp, Glycine max
  Clone ID: 700838191H1
tttttctctcacacactcaaccaaagacgaaggaagaagaagaattacaaagtaccaccaaacaggctgcgacgacgtcgttctttgcaacttccagttcttgttcttgatgaatatgacaccagtttgcccctttgtcaaagctgctcgccccgatgataacaatgcctctaagaaatctggcgaaaactctatgaaacatcaggctgagtctgagagtaaggtgaagaaagaggttaatgactcagctagtac

SEQ ID NO: 71031 - DNA, 255 bp, Glycine max
  Clone ID: 700838192H1
acaactactacaagtacttccttacaatcaaaaccaacaacaactatggcaagttatcaaaagcactacgatgatcagggtcgcaaggttgacgagtatggcaacgttgagaagcaaaccgacgaatacggcaaccctgttcatgctgctagtgtcacctatgtagccaccagaactgctgctggtggttacagtgatgacattaataagcaacatgataccaccaatgcctacggcgtagacactggtagacag

SEQ ID NO: 71032 - DNA, 256 bp, Glycine max
  Clone ID: 700838194H1
cagaattatatccgtcctttagtcgatctcaagccctattggaactttgaagtctctacgtgtttaacacatggtgatgaagctaatgatatcaggaacgaatagcaatgcagttgtgatgattcttatgtttcttctcatggtgtacaaaatacaatgtacttgtgaataaggcatatcccgtatgaatcctggagtcaccaccttccaatagttgattgagccctttgatctctttgactttttgcttggtggt

SEQ ID NO: 71033 - DNA, 258 bp, Glycine max
  Clone ID: 700838195H1
caggggtttcgcggcccgagaccaagtcaaaccgagacggtgacactggctgagtggaatttccgccgccattcgaagctacagcgatggccatagccgccaccatttccgttcctctcacatcccccacccgccgcactctcgcctccgtcaatagcctctctccccattctcccagatccactttgcccacaccgcaacgcactttcaaataccctaattcgcgcctcgtcgcgtcctctatgagcaccgaaaccg

SEQ ID NO: 71034 - DNA, 181 bp, Glycine max
  Clone ID: 700838196H1
gcatcgaacccgtcgtagcagaaaaacttgtcaccatggtttcttccgacaaggatccacgagaggatgtccttcaagcctggtacatggatgatagtgatgaagatcaaagactcccccaccacaaagaacccaaggagtttgtctcgttggaccaacttgctgaacttggagtccttag

SEQ ID NO: 71035 - DNA, 261 bp, Glycine max
  Clone ID: 700838201H1
cctctctctccttggcggcagctggggcaaccaagctctgtgtgcaacgacgccgtttcgacctcctttcttcactctttggcgagcaagcaagcaagtaacaatggcgactcgcgacggcggcatgaagtcgacgcaataaacggcgttaagatgtacacgatagcgtcgcagcaaccctcactcgcttcctggctcccctcctccaagaagcagaactctcatcgcaacgtcaaaagttacacgcagaacctgcaactt

SEQ ID NO: 71036 - DNA, 257 bp, Glycine max
  Clone ID: 700838202H1
atctgcagttgtcagcacttaagcaggaatttgaagaggcaaagcaatccatgttagaatcagagaagaaactaaatttcaaagaagaaacagctgctgctgccatggcagccagagatgcagcagaaaagtctttaagttagcagacttgaggtcatctagactaagagacagagtagaggagcttactcatcagctcgaagagtttgagaacagggaagattcaaggagccataatcggcctagatatgtatgtt

SEQ ID NO: 71037 - DNA, 254 bp, Glycine max
  Clone ID: 700838203H1
agacattgtcatggacagcttggctgtacatggccttggcctagtgcacccaaagaaggttttcaatttctacaacgagctccatgcttacttagcttcttgtggagtagatggagtgaaggttgatgtgcagacattattgagacccttggtgcgggacatggtggccgagtgtcacttactcgcagctatcatcacgcgcttgaggcttccattgctagcaattttactgataacggatgcattgcgtgtat

SEQ ID NO: 71038 - DNA, 254 bp, Glycine max
  Clone ID: 700838204H1
gaagaatcccagaacaagccccccagcgagcagtccactaccgaactcatcacgagcgcgaagctggtggcggaggcggcgcagtcggctctgaagagcgacagcgtcaaagtggacaaggccaaggtggctgacgctgccggcgatcttctcgacgcggcggggaagtatggaaaacttgatgacaaacaaggcatagggcaatatgttgacaaggctgctgattatctgcataattaccagggtgataatac

SEQ ID NO: 71039 - DNA, 247 bp, Glycine max
  Clone ID: 700838205H1
agaagacggagaaggtgaagtctgaggcagttcagataattgaagcgtttgaggttctgccaaagctcgtggttttcgatctcgattacactctctggcctttctactgtgagtgtcgatcgaagcgcgagttccttctctgtatccccacgccaaaggcatattgttagctctcaaagagaaaggcatcgacattgccatcgcttctcgctcgccaacggcagacatcgcaaccgctttcctcaac

SEQ ID NO: 71040 - DNA, 250 bp, Glycine max
  Clone ID: 700838206H1
cggctcgagcggctcgaggttggaatcaacccatactccatggaatggactggtttggccaatagattactgagtaagggcaacgatattctgtgttgcgattatgctagttttgatggtttgattaccaacaagttatgagcaagatggcagaaatgataaacagtctttgtggtggtgatgaaaaattgatgcgtgaaaggacacatttgctgttggcttgttgttcaaggatggcaatttgtaagaa

SEQ ID NO: 71041 - DNA, 253 bp, Glycine max
  Clone ID: 700838207H1
aaaagtgttccacttgagtgaaaagtagtgtgttaagaactaaacaatttttcaatggcgtccaagaaacaagaggagcgagctgatgcagctgcgaaagttgctgccaaagaactcgaacaagtcaacagagaagaagagaccgtgatttcggtgttgttgctgaacaacaacaacaacatcatcaggaagatcaacagaaacgtggtgtaatcgggtccatgtttaaggcggtgcaagacacctacgagaa

SEQ ID NO: 71042 - DNA, 256 bp, Glycine max
  Clone ID: 700838208H1
agctcgagccgctcgagccgattcggctcgagtgaagattgaagaacagtcgtcggctcctagttcgcccttcgatgctgcgccatcaccgtgcccatctcaaagcgattttaacctaaccgcgttctttttttcttcagaaatcgagcataaggatttgaggattgaagtattgaacaccaaatcctttatactttgactgtccaggttgggcaagaagggagggaaaaaggagaaacacaaaaatgtttttcca

SEQ ID NO: 71043 - DNA, 258 bp, Glycine max
  Clone ID: 700838209H1
agaagagtaacaccaccaacaacaagaagaagaaagaacaacaaggacaacctagttgggtgttcgaagacgaggtggacgatgatttggtttcggagttcaaagatctacccatgaagttccaacaaacactgatcccagacctggaacgaatctccacaacctcaaaagcctacataacaaaagccaacaaagagattcagagagggttcaaaccctacgttggcaacaagtacgcacccaccatcaccactttat

SEQ ID NO: 71044 - DNA, 252 bp, Glycine max
  Clone ID: 700838210H1
cagaactgctgctggtggttacagtgatgacattaataagcaacatgataccaccaatgcctacggcgtagacactggtagacagcattctagtggtggctacgatggtgacactaataaacatcatggaactctggtggctataatgatgacaccaatagacatcatggaactaccggtgtctatggtatagacaccgataggcaacaacatgggactactggtggctatgccggtgacactggtaggcaa

SEQ ID NO: 71045 - DNA, 250 bp, Glycine max
  Clone ID: 700838211H1
caattattgattagagaatagtaccaaaactacattaggatatgcatctaagttttgtctacattgaaattggagaaacttgatttttgattccattgcttgttgatgtgcgtgtttggtttctctttgggcaattgattctgagttcgtaattgattttgaatacattttcaaatgtttggtttcacgctggagaagaatttatgattgattctgggttgaagcaactttgagtagtttctgcatggat

SEQ ID NO: 71046 - DNA, 250 bp, Glycine max
  Clone ID: 700838212H1
gttgtggtcaatgcgaaagggaagcttgataatgcggtcaagttgatggagtctattattgatgccgagaaagctagggtttctcagaggactcctcacttataatggacgctcaacatggttttatgatgatgataaactggggatgatcgtaaaaatattatttgtgagctctgcttgccagtgacgagcttgatgctcatttcctacgactgatgtcatcatgggaagacatgttgggggtaatggt

SEQ ID NO: 71047 - DNA, 254 bp, Glycine max
  Clone ID: 700838213H1
ctcgagccgaatcggctcgagaaatgctcttgttcctctaggagttcaaccaactgccagctctgtttctcagcagaatgcccttgttctttttgatatgttttctaatggaaataatgcacctacatctgtaattcccagccaccccatccagctaatgttgctggccaaaccagtccatatgctccccaatttcaacaacagcaaacagtcacatctcaaggtggattttaccccaatggaaatgccccaaa

SEQ ID NO: 71048 - DNA, 252 bp, Glycine max
  Clone ID: 700838214H1
gcagatgtatcaaatggaaggtttacttttgaatctctgacagcaccaacaggcaaccgactacattttccagcatacgacatgttcttaaaagaaatggacaagtgcatacgacatttgcagaaacatgcacaccaaatggggttgaactggctgaggatgaatatatattacatgtagatggaacagccagcacacagagagtagttcggcacattggaacaacaagttggcctggtaggcttacactga

SEQ ID NO: 71049 - DNA, 229 bp, Glycine max
  Clone ID: 700838215H1
ttcgagcgagagcggacagctgatgggttcggcaccagcggcggcagagattagcacaattggaacacaaagaagggcgagtccaacgttggtagcgagagagttggtgggaggccgaagcttgtgttgcaacctcggacagtgtccgtgagcgatgaaggggttgatggcaataatgcggggaagcctaaaggtgttaatccgttcggagaggcgaggccgagggagc

SEQ ID NO: 71050 - DNA, 266 bp, Glycine max
  Clone ID: 700838216H1
ggctaaagcgggaactggattcgctgaaggacgaaaagaccaaaattgagcacaaaatctctgcgcttgaagctcaactcagagagattaatctccaaaacgacgccgcacctcccaatgcttcttcttcttcatcgtaccccaccaacggattgacccaggacatgattcacagatacagtcgccacctatgtgctcccttcctttggtgttcaagggcaggcaaatctattgaagtcgtcaatcttagttgtgggagctggagg

SEQ ID NO: 71051 - DNA, 267 bp, Glycine max
  Clone ID: 700838217H1
ttcggctcgagagagaatcttgtgcagcaacgcagtttgtgagtgagttgggatttttctatggttttcctgagctgtgttttattctctttatctctctctctgccctctcatcttcgagctccgatggcgagcctgtggcggcggcgaccggcatgacggaaaacgccaccgattacgacggcgtcgagttctggtccaaccccgagcgcaccggctggctcaccaagcagggcgagtacatcaagacctggcgccgccgctggt

SEQ ID NO: 71052 - DNA, 255 bp, Glycine max
  Clone ID: 700838218H1
ggtggatcgggatagcaggaaagagaacctcactgaacggacaagaaatatctacacgcacttgtgcggacctttctcaagcatacctgtacaccacaagcccacatctgttcagtggagatgcagaagaggattcattcgtgttagaagcaaggttaaaattccattgtatggctgcgactgctatgcatatgcacttttgtcttctggtattgtggatcttgttgttgagtctggtctgaagccatacgattt

SEQ ID NO: 71053 - DNA, 247 bp, Glycine max
  Clone ID: 700838219H1
gttccgggcatgccccaggctaaggttgtcactccgaagctgtccaatggactaaaattgacaatgaaggatttagcggtggataagatcgtcagtaacggagttggactggtgccaccacacctggctcacttttgtacgaggggctccactcccgtttggaatctgcgggtattgacggtgttaaggttgacgttatacacttgctcgagatgctatccgaggaatacggtggccgtgttgagct

SEQ ID NO: 71054 - DNA, 179 bp, Glycine max
  Clone ID: 700838220H1
gtttaaacctaattctcatttcttcatcgttcgattcttctcctcctaaagatgcagatcttcgtgaaaactttgaccggtaagaccatcatccttgaggtggagtcctccgacactatcgataacgtgaagcttagattcaagacaaggaatggatcccacctgaccagcagagactt

SEQ ID NO: 71055 - DNA, 249 bp, Glycine max
  Clone ID: 700838221H1
gccatgttcttaaccagaagcgcgctttttcgcttttcaaagtctctcccttatgccccttcactctcccttaaaccctccatggtcaccttctcctctactcccaattcaggctggagaaatgcagcagaggaggaagaagagacggaagaaccaattggacgtatgattctgccgaggcaagacgcgaggcagatgaaatgtctgagagtgccaaagaaacgatgaatgaaggctatgacagggcca

SEQ ID NO: 71056 - DNA, 252 bp, Glycine max
  Clone ID: 700838222H1
gaaaatttgaagagtttgtttattgtgaaaaaaagaaaaatgcaggcagcaaagaaagccatagagacctttaaggaaaccgcagccaacattggcgcctctgccaagtctggcttggagaaaaccaaggcactatccaagagaagaatgagaagatgaatgcagaagatcaaactcaaatggatatggctaccaagaggaaagaagagaagatcaaccaggctgagatggagaagcagcaggcccgtaagt

SEQ ID NO: 71057 - DNA, 249 bp, Glycine max
  Clone ID: 700838223H1
attgatttatgctagtagaaagagtgagactgatgttgacaagcagttgccagatcacaaagactcttctagtagagttatgaatactttggttgctcttaaatcatctcagcttgtggcgtcaatctctctagcatagaaattacccttgatgatctattgaatgcagacacggctgtgtcttgctttatgaggttgtgtggagaagctactgaagatctccaccttgatgctctgctggctattttg

SEQ ID NO: 71058 - DNA, 249 bp, Glycine max
  Clone ID: 700838224H1
atttggctgatgacaccatcaattttgaggcttttccccacaagctggtgcagtttggagagattcaggaaaaagttgtattgaaattttcacaagaggaatttcttacagcttggtcaactcaggtgcgcctgcaacaactctgttggctgatgggtgtccatatttgtatgctatggtgcatgatagttcagtgtctacaataccaggtgattttgtcattggtgttaagttgacaaccataaacaa

SEQ ID NO: 71059 - DNA, 250 bp, Glycine max
  Clone ID: 700838225H1
atcaattaaacaccatgagccaggaaaagccagagagacctcaagcggagaaagaccccatcaaatacggcgacgagagaagatgcagaaggagtgattggagctgagcttaggaacaacttggacatgaaacaacccctggaaaagggggtgatgcatgaagatctcaagtttccatccagtatagttaagtagtaccacaccctgtgctgaggcatccatggcgatagtgtttatatatattcgggaa

SEQ ID NO: 71060 - DNA, 253 bp, Glycine max
  Clone ID: 700838226H1
caaatacggcgacgttttcaaagtctccgacgatctcgctttcaaacccatcgcgccaagagacgcagctctcatgcaagccacggagtaccaagcattgggtcaaactcaaaaacgatgtcacgcatacgggcttcaatccgccgcaaccgataacctccgcgccggcgtcgtgggtagccaagacatctccgacgtggcgatgaatgaacgcgtgacgtggactgataccaagtgcgctgccatcgcgtca

SEQ ID NO: 71061 - DNA, 249 bp, Glycine max
  Clone ID: 700838227H1
gcatgctctttcaattcccaattgaaattcccccaaagccacctttttttttattcaataaatcaacacccaattttcaaaattccaacttgaaaattgtaatcaattttctttccatttgtcaaaccatacaatcaaccaacctcgttgcttcttgtgatcactctttgaaccaccctcatggatattgatgagtgggagtttctctctgatgatggctaccttgatttcaatgaagagggtgggaag

SEQ ID NO: 71062 - DNA, 248 bp, Glycine max
  Clone ID: 700838229H1
attctttcaggccaaggcaatgcaggatcccgaaattcaaaacatccttcaagaccctgttatgagacaggtttgcttcctttttgattgaatgttggtatgtattgtggtagtgaaacaagagtgaaattgcttataagttggatgcgtactgtctatgcaggtattgattgatttccaagaaaatcccaaggctgcacaggaacacacgaagaatccaatggtgatgaacaagatccaaaagctgg

SEQ ID NO: 71063 - DNA, 249 bp, Glycine max
  Clone ID: 700838230H1
gactgtttaattacaacaaagcattgcgatggtccctgcggatgttgacgcaatgtgatttctgcccagtgctctgaatgtcaaagtgaagaaattcaaccaagcgcgggtaaacggcgggagtaactaagactctcttaaggtagccaaatgcctcgtcatctaattagtgacgcgcatgaatggattaacgagattcccactgtccctgtctactatccagcgaaaccacagccaagggaacgggct

SEQ ID NO: 71064 - DNA, 251 bp, Glycine max
  Clone ID: 700838231H1
ctctctcactttgtgactgtagcaggcagctcaggtgttccttgttaagatctgtggtttggttttcgggaggaaacaaaaagaggaaaaatgaatagctacagctactatgggtaccaagagaagaacacttgacaaactgtgaggagacgaacatggaatcagtgatttgccccaaacctcgccgattgggtctcataaaccactcttccatcaacacgcaaatcagaccctcaaggcacccaatcatc

SEQ ID NO: 71065 - DNA, 251 bp, Glycine max
  Clone ID: 700838233H1
cccaacaccaaattagagagaacagtagtgggtatgggagctgagaggaaatggcttttcactctattcagtgcagtattcctatctctcatgcttcttttgatgtcctctttctctgcctttagtacccaaagtttaccatcctaggaataggtacctcctccatcttgggagggatgccagggatgaggagaggcaggctctggttgctgccgtgagggcggtgacggtgattcgcactttcgggaatg

SEQ ID NO: 71066 - DNA, 249 bp, Glycine max
  Clone ID: 700838234H1
attaccattactgaggctaggcagatgagttgataatgggactgtcctgtcttctattagcagcaagaaaaggaaggacttttttctttatgggaaagatgaagaatgttgtttggctattaatcctcctctgatcggagtccagatttggtaatgcacccaagtgaatcacactggttgaatgacttcagaggggtgatgaagaatgtttgtggaccatttacagctgcaaaaactgtttatgtggac

SEQ ID NO: 71067 - DNA, 250 bp, Glycine max
  Clone ID: 700838235H1
ctcgagccgtctagatcgcgggcggccgctcgggatctagaacgctacctcctggccggcatcaactacaagggcttcaccgtgaagcagttccaggagctccggaagacgctcccggaaacaaggaactgatcgtggcgaagaacacactcgtctacaaggcggtggagggcacgccctgggagaccctgaagccctgcatgaagggcatgaacgtatggctcttcgtccacaccgaggagatcccttc

SEQ ID NO: 71068 - DNA, 250 bp, Glycine max
  Clone ID: 700838236H1
gactgagttagtaaacacgctcgctcggtcttcttttccaatggcgatttccgatgagcctgaaactgtagccactgctctcaaccactcttccctgcgccgccgtcccaccgccgctggcctcttcattcgcccgagacgaccaccgccagttccggtgatgacttggccaaggattccggttccgacgactccatcagcagcgacgccgccaattcgctaccgcaacatagacaagacactgatttct

SEQ ID NO: 71069 - DNA, 248 bp, Glycine max
  Clone ID: 700838237H1
cattaagcatatgcaggttggatttcccttgctttttctttggtatgcttctggttattgtataatcttgaagtcatgtttaccccttctttttttccctcttctcccttggcaaacaggtaaatgattcttacatgaagtctttggtttctcaccgaagagaaagtatcttaataccaacgaacacagaatgtctggtggtgaaaaggtaagctgtccgtgattgtgcccaattatcttgactttgt

SEQ ID NO: 71070 - DNA, 249 bp, Glycine max
  Clone ID: 700838239H1
ctgctcgtagggtttctccacctagagggaaatggctcccaaaacgcctagtacgggtctgtttgttggactgaacaagggtcacgtcgtcaccaagaaggaattgcctccacgcccctcagatcgtaggggaaaacaagcaagagggtgcactttgtgaggtacctcataagagaggtagccggttttgcaccctatgaaaagcgtataactgagttgctgaaggttgggaaggataagagggcactg

SEQ ID NO: 71071 - DNA, 251 bp, Glycine max
  Clone ID: 700838240H1
ggcaaagcgaggccatgccctcatgtgcttggcacgtgtttcactcttcctctgcgctctaaccctatccgctgctcacggaagcaccacggttcaagacatcgcgagaaagttgaaactcggggacacgagcttctgcgcacggagaagaagttcaaggttttcatggagaattacgggaggagctactccacagaggaggagtatttgcgccgtttggggattttcgcccagaacatggtcagagcggc

SEQ ID NO: 71072 - DNA, 176 bp, Glycine max
  Clone ID: 700838241H1
gaaaaaaaaaagattcgatagaaactaagaaaataaacaaattgattcgccgagaaagaggagagagagggattcgaaccctcgatagttctttgttccgaactataccggttttcaagaccggggctacaaccactcagcaatctctccataagctaattgatgttttatcttta

SEQ ID NO: 71073 - DNA, 249 bp, Glycine max
  Clone ID: 700838242H1
aaccaacaacaactatggcaagttatcaaaagcactacgatgatcagggtcgcaaggttgacgagtatggcaacgttgagaagcaaaccgacgaatacggcaaccctgttcatgctgctagtgtcacctatgtagccaccagaactgctgctggtggttacagtgatgacattaataagcaacatgataccaccaatgcctacggcgtagacactggtagacagcattctagtggtggctacgatggtg

SEQ ID NO: 71074 - DNA, 251 bp, Glycine max
  Clone ID: 700838243H1
ccgctcgataacacactctgacacaacataccacaacaccaatcgtcaattacaacaacaacaatatcgaagctgcacaaattaatatccaacactctcaagctttcgagtttcaaactctgggcgctgaattggttcatttttctaagagttatatatacttttattgaaattgttgcggttcaagtctgaactacaacattaagtttgcggaggctggtgcttttctgatttgccagtcaaattattaa

SEQ ID NO: 71075 - DNA, 247 bp, Glycine max
  Clone ID: 700838244H1
atttgtgattccaatttccacatattattagatctctccatggagtgggagatgaggcccggcggcatgttcgttcagagacgcgaggcagcggcggataacggcggcggcggcaacggcaacatgacacgacggtgttgatcactgtcgtccacgcttcctcccactacgacctccacctccctaccaactccactttctgggatgttaagagtctgcttgtacatagaactggtttacagcctga

SEQ ID NO: 71076 - DNA, 248 bp, Glycine max
  Clone ID: 700838246H1
agcaaaccgacgaatacggcaaccctgttcatgctgctagtgtcacctatgtagccaccagaactgctgctggtggttacagtgatgacattaataagcaacatgataccaccaatgcctacggcgtagacactggtagacagcattctagtggtggctacgatggtgacactaataaacatcatggaactactggtggctataatgatgacaccaatagacatcatggaactaccggtgtctatggt

SEQ ID NO: 71077 - DNA, 279 bp, Glycine max
  Clone ID: 700838247H1
acgtatctcggaatcgggatctggctcgaggagaaataaagaaaccgagaaaagacagcgatgcaaccaacgctccctctcctccttgtacgcttttacacacatccctaccttcttcatcctcgttcgacaatcttttgaacaaacccttctttcttctcatcatcgccttttcttttccaccgccactttttttttttttcaattcgcttcatttctggcaatctgcctctgtaacccacccattatttgacctcccggaccaaaaccctttttttt

SEQ ID NO: 71078 - DNA, 269 bp, Glycine max
  Clone ID: 700838248H1
tcggaatccagctcgagcacacaactactacaagtacttccttacaatcaaaaccaacaacaactatggcaagttatcaaaagcactacgatgatcagggtcgcaaggttgacgagtatggcaacgttgagaagcaaaccgacgaatacggcaaccctgttcatgctgctagtgtcacctatgtagccaccagaactgctgctggtggttacagtgatgacattagtaagcaacatgataccaccaatgcctacggcgtagacactggt

SEQ ID NO: 71079 - DNA, 243 bp, Glycine max
  Clone ID: 700838249H1
gaaaaagaaacaaaaatggctgaatcaaaattattggaccgtggaagttggaagaaacgcgattatctgatcaagcttctcctaatcggcgactcttccgttggaaaatcctgcttgcttctcagattgttgttgtggatcgggacttagcagtgagacaatctcggagaatggacaccattggattgggcttgatatttcagcatcaattcctatttattttgaatttttatatatttgttg

SEQ ID NO: 71080 - DNA, 250 bp, Glycine max
  Clone ID: 700838250H1
aacaaacatggctttacagaacattggtgctgcaaacagtgatgatgccttctacaggtataagatgcctaagatgattaccaaaattgagggcagaggtaatggcatcaaaactaatgttgtcaatatggttgacattgcaaaggcattggcaaggcctgcgtcttacacgaccaagtattttggttgtgaacttggggcccagtcgaaatttgatgagaagaccggaacttctcacgtcaatggagca

SEQ ID NO: 71081 - DNA, 246 bp, Glycine max
  Clone ID: 700838251H1
gggttctgcagacgtgaaatctgagccgttggattgccagaaccatcgcgagaatcaggaaacgccgtggttgagtccgtgtcacaggacaaatcaaagggtgtgcaactgacacgcggcgacggctaatcgaatgaaacattttagattagatacgtagtgctgtagggaatccgaaaccggcacgcggagacgtcacgtgcgtcgtttaaccgtttgggaccgattcccagaagtttctcagaa

SEQ ID NO: 71082 - DNA, 246 bp, Glycine max
  Clone ID: 700838252H1
ctcgagccgattcggctcgagctacaagtacttccttacaatcactaccaacaacaactatggcaagttatcaaaagcaatacgatgatcagggtcgcaaggttgacgagtatggcaacgttgagagcaaaccgacgaatacggcaaccctgttcatgctgctagtgtcacctatgtagccaccagaactgctgctggtggttacagtgatgacattaataagcaacatgataccaccaatgccta

SEQ ID NO: 71083 - DNA, 246 bp, Glycine max
  Clone ID: 700838253H1
gacatttctcacctgacatgtgcagatttccttcgatcccctggagttcagacgcctgtaattgttcgtttctcaactgtcattcatgagcgtggtagccctgaaaccttgagggaccctcgaggtttgccgtgaagttttacaccagagagggtaactttgaccttgttggaaacaaccttcccgtcttctttgtacgtgacggcatgaaatttccagatatggttcatgctcttaaacccaatc

SEQ ID NO: 71084 - DNA, 245 bp, Glycine max
  Clone ID: 700838254H1
gaaattatatcaattagagtgttggatacccatcgttttagttgctaagttgatatatttttactgtagtttagggactaattggaaggatttttcaatacaatgaaatgcgggggatagtgatcttgtgaactttgattactgtcatgagccttttctttaaagttgcttcatgttttcaaactatgttaggaattgtagttcatatatctgctttacaatacgatatgctcacttttaaggaa

SEQ ID NO: 71085 - DNA, 248 bp, Glycine max
  Clone ID: 700838255H1
attttcacaagaggaatttcttacagcttggtcaactcaggtgcgtcctgcaacaactctgttggctgatgggtgtccatatttgtatgctatggtgcatgatagttcagtgtctacaataccaggcgattttgtcattggtgttaagttgacaaccataaacaatatgtgtgcatatgggctcaatcctggtatttcaggttctcgtcttttgggcaccattcctcagtctatttcacagcaaactg

SEQ ID NO: 71086 - DNA, 248 bp, Glycine max
  Clone ID: 700838256H1
aaataaaatcaccatgtctatcatcccaaacttgttcggtggtagacgaagcaacgtcttcgacccattctctctggacgtatgggaccctttcgaggggtttcctttttccacaggtcacgtgccttctctggtggggaaagcagtgccatagccaacactcgcgtggactggaaggagactccggcggctcacgtgttcaacgttgatcttcccgggttgaagaaggaggaagtgaaggttgaagt

SEQ ID NO: 71087 - DNA, 247 bp, Glycine max
  Clone ID: 700838257H1
ccaagcagtgggaggaggctcgggactctgaccgcgtgcctgttgaagaatgagccggcgactcataggcagtggcttggttaagggaaaccaccggagccgtagcgaaagcgagtcttcacagggcattgtcactgcttatggacccgaacctgggtgatctatccatgaccaggatgaagcttgggtgaaactaagtggaggtccgaaccgactgatgttgaagaatcagcggatgagttgtggt

SEQ ID NO: 71088 - DNA, 245 bp, Glycine max
  Clone ID: 700838258H1
ggctcagccggaggtagggtccagcggctggaagagcaccgcacgtcgcgtggtgtccggtgcgcccccggcggcccttgaaaatccggaggaccgagtgcctcccacgcccggtcgtactcataacgcatcaggtctccaaggtgaacagcctctggtcgatggaacaatgtaggcaagggaagtcggcaaaatggatccgtaacctcgggaaaaggattggctctgagggctgggcacggggg

SEQ ID NO: 71089 - DNA, 246 bp, Glycine max
  Clone ID: 700838259H1
ggctcgagcaaaagctgagcagaagaagataggtatgaccgagacttggttgaagaagcaccgtcttctttacaatggagccactagacaccctcttattattagcattcgcgatggcaccatcacactgcttccttcaaaacatggctcgcacaggattacttgttcgttcgggcgtttgtcccatttgtggctagtgtgctgataaaagcgtggaaggaatcagattgcagtggtgacatggaa

SEQ ID NO: 71090 - DNA, 245 bp, Glycine max
  Clone ID: 700838261H1
tctcgagccgaatcggctcgagcgacaagcaaacgaaaagtaaaactatcaatcgttggaatctctcaacttatcgcttcatcctgatttgggggtttccgtttcaatggacgacggcgagctggattctcgaaccatgaagtgttttcgagtccgaacatgggggagcttccgagcagcggttcaatggacagtttcttcgacgagcttctcaaggacacgcacgcgtgcacccacacccacac

SEQ ID NO: 71091 - DNA, 249 bp, Glycine max
  Clone ID: 700838262H1
gcgagaaggaggctgaagaaaagttgcaagaaattcaggtagctgctgggtcagctaatgctgacaaatatgaaccgaaagctgtctggaaagaaatattgtgccctactcctcctgttagaagaatgcttataactggttgtggaattcagtgtttccagcagattacaggcatagatacaactgtatattatagccccacaatttttaagaatgctgggatcactggtaactctgagcttcttgcag

SEQ ID NO: 71092 - DNA, 248 bp, Glycine max; identical to SEQ ID NO: 68356
  Clone ID: 700838263H1

SEQ ID NO: 71093 - DNA, 246 bp, Glycine max
  Clone ID: 700838265H1
aagaaacccaggagttgaggtcataatggcatgatctcctgatatcagttttggacaaaggtggacttttttctgcccccagaattgttgtttcaccaggtttctcagccactgtagcgtgttctaagacgtgccgaagagaattcaactgaaattcttttaatatttaattactgtactagatgagacctaagttgtagtacgctccatgatacaacaccatgttcttgtttcttaacaatgagg

SEQ ID NO: 71094 - DNA, 248 bp, Glycine max
  Clone ID: 700838266H1
gtccaaagcagcgataatcggcttgccgaagccgcagaaggcatccttcgctgacgccagcagccgccgaaaccaccggcctccgggaaacgccaggctgttcccgaagcggacgcagtcggtccgcggaaaattggaaaactccgtcgccgaaccgtcgtcgccgaaggtctcgtgcatagggacagtgagatccaagcgtgacagaaatcggagactacgaactcgccagatatcaatctcctcca

SEQ ID NO: 71095 - DNA, 245 bp, Glycine max
  Clone ID: 700838267H1
gttcacaacaacaacaaccccagcatgtgcaagtccacgcaaccacaacacacaccccacaacaccatggcggggaaggtggcagcggcattctgaacctcatcccggagatgtccctcacgggttcccaactcctagctctcctcgccggcgttccccttggtgcaatgctgctcctcctctccggcatctcgctcatcgccagcctcttggggctggcggtggcgacgccgctcttcatcttc

SEQ ID NO: 71096 - DNA, 242 bp, Glycine max
  Clone ID: 700838268H1
cttagaaagaaaaaaacttaaatcaaaatacttaatagcatggcgatacatttatacaaaacttctaccccaagcacacgcaatggagccgtagacagtcaagtaaaatccaatccacgaaatatttgatctatggacagcatcgttgtggtaaaggccgtaatgccagaggaatcattaccgcagggcatagagggggaggtcataagcgtctataccgtaaaattgattttcgacggaat

SEQ ID NO: 71097 - DNA, 241 bp, Glycine max
  Clone ID: 700838269H1
tgcggatgttgacgcaatgtgatttctgcccagtgctctgaatgtcaaagtgaagaaattcaaccaagcgcgggtaaacggcgggagtaactatgactctcttaaggtagccaaatgcctcgtcatctaattagtgacgcgcatgaatggattaacgagattcccactgtccctgtctactatccagcgaaaccacagccaagggaacgggcttggcggaatcagcggggaaagaagaccc

SEQ ID NO: 71098 - DNA, 244 bp, Glycine max
  Clone ID: 700838270H1
ggcttatggtggatacctaggcacccagagacgaggaagggcgtagtaagcgacgaaatgcttcggggagttgaaaataagcgtagatccggggattcccgatataggtcaacctttcgaactgctgctgaatccacgggcaggcaagagacaacctggtgaactgaaacatcttagtagccagaggacaagacagcataagcgattcccgtagtagcggcgagcgaaatgggagcagcctaaa

SEQ ID NO: 71099 - DNA, 242 bp, Glycine max
  Clone ID: 700838271H1
agcgtaccggatttcattgtgatatcatttgtgtcactggatggactgccactccaatgcaggatgttcaggttacaattgattggtttatttcctctcaggaatgtgttcccaggacttatgtgttttaaatccacaaaatccttttgtgttgaataggtggatggggaaactgactttcccccagggcacttcccgaagtgttaagagaatgcctctttctatagggggaggagctggtg

SEQ ID NO: 71100 - DNA, 244 bp, Glycine max
  Clone ID: 700838272H1
agatcggcaacgatctctctccctctccccgcttcgcctaccaccgcgctggtccacgcaaaaacatctactttgagccttccattgttcgcgttgccattgtcacctgcgggggtctctgtccggccttaacaccgtcatccgagagcttgtcgtgggcctgtggcaactctatggcgtccgtcatattttcggcatcaccgccggctacagggggttttactcctctgtcccactccccctc

SEQ ID NO: 71101 - DNA, 245 bp, Glycine max
  Clone ID: 700838273H1
ttcaccctcggttacaagacggttctcaaatcacttaggagctccaaagggacattgattatcattgctaacaactgcccccctttgaggaaatcagagattgaatactatgctatgttggccaggttggagttcatcattacaatgggaacaatgtggatttgggcactgcatgtggaaaatattacaaagtgtgctgccttagcattattgatcctggtgattctgatatcatcaagacacta

SEQ ID NO: 71102 - DNA, 244 bp, Glycine max
  Clone ID: 700838274H1
gagaaacaaagaaaggaaataattgatctttgaaaatgcagggaggaaagaaagctggagagtccatcaaggaaacagctgcaaacattggtgcttctgccaaggctggcatggagaaaaccaagccactgtccaggagaaggcagaaagaatgacggcacgtgatccgatgcaaaaggagttggcaacccagaagaaagaggcaaagatgagccaggcagagctggacaagcaggcggcgcgt

SEQ ID NO: 71103 - DNA, 242 bp, Glycine max
  Clone ID: 700838275H1
ctgactttcccccagggcacttcccgaagtgtaaagagaatgcctctttctatagggggaggagctggtgcaaagaatgctattctcatgaatatgccaaatgctgttctttcaatgtggagatattttgttggagatctcgtctttgaagtttctaagatgacttctccctacattaaatgtacagtctctttcttcatagcatttggaaatttggctgatgacaccatcaattttgaggc

SEQ ID NO: 71104 - DNA, 243 bp, Glycine max
  unsure (1)..(243): unsure at all n locations
  Clone ID: 700838276H1
aagaacttcgtgtcggagaaggtaaatgatatggccaagccggagggangtgtcactgacgtggacttcaagcgcgtgagcaaagataatgtcgagtacttggccaaggtctctgttcgtaaccttattcaacttccatacccatttgtgagatcaactactctttcaaaagcgcatccagggagatagcatcagggaaaattccagacccaggatcgttgaaggcaaaggacacaacaatgg

SEQ ID NO: 71105 - DNA, 246 bp, Glycine max
  Clone ID: 700837713H1
tcaaagccagacagacaaacatgtccgagaatattgagtccaattctccttcgctttccctctttatctgaaaggtatggagtgttttgacttctggaagagataatggtgcagtgcctagacggattaaagcatttgtgtgctgctctggtaaattgttgtgatgccgattcgtcaaagcaacctacaggtttagaaaatccagaagttcttgcaagagaaacagtgtttagtgtaagtgagatt

SEQ ID NO: 71106 - DNA, 243 bp, Glycine max
  Clone ID: 700837714H1
cggctcgagcaaaacagtaaagctaacttcaacacctttaattttctaaaagtaattcagcggctgaataccaagcggagaagatgagtcaggagcagccacggcgtcccaaaggccaaaaccccatcaaatacggcgacgtttttgtcgtctccggcgaccttgcacagaagcccgtcgcgccggaagatgctgccatgatgcaaagcgcggaaactcgagtgctcggacaaacccaacccg

SEQ ID NO: 71107 - DNA, 249 bp, Glycine max
  Clone ID: 700837716H1
tctacacgaatcggctcgaggttaacactcttcttcatcgtcgtcgcaatggcacgtgtgatccgtgcgcacgtaagggagcaggctcggtcttcaagtcccacacgcaccaccgcaagggccctgcacgcttccggagcctggacttcggggagcgcaacggctacctcaagggcgtggtcaccgacgtcatccatgaccctggccgcggcgcgccgctcgccaaggtcgccttccgccaccctttca

SEQ ID NO: 71108 - DNA, 85 bp, Glycine max
  Clone ID: 700837717H1
ggaaattaggcatgaccctctttgagcatgctctgcctatttgaaaatttccacacctcttttaattgtcgtaatgatgtgtgaa

SEQ ID NO: 71109 - DNA, 247 bp, Glycine max
  Clone ID: 700837718H1
acgcggagaagaagccggcagagaaggccccagcggagaagaagccgaagcgaacgaagaagatatcgaaggaaggaggaagcgagaagaagaagaagagaacaaagaagagcgttgagacctacaagatctacatcttcaaggtgttgaagcaagtgcaccccgacatcgggatctccagcaaggctatggggatcatgaacagtttcataaacgacatcttcgagaagctcgcccaggagtcatc

SEQ ID NO: 71110 - DNA, 243 bp, Glycine max
  Clone ID: 700837719H1
cacaactacaagaaagaacttccttataaccaaaaccaacaacaactatggcaagttatcagaagcactacgatgatcagggtcgcaaggtcgacgagtatggcaatgttgagaggcaaactgacgaatatggcaacccggttcatgccactagtgtcacttatgtagccaccaaaagtgttggtggctacaatgatgacgctaataagcaacatgatattactggtgtctatcccgagaaag

SEQ ID NO: 71111 - DNA, 244 bp, Glycine max
  Clone ID: 700837720H1
gctgaagaaaacctaagcttagaattagaaacaaagaaaagaagaaaggaaagaattgatcgttgaaaatgcagggaggaaagaaagcgggagagtccattaaggaaacagctacaaacattggtgcttctgccaaggctggcatggagaagaccaaggccactgtccaagagaaggcagaaagaatgacagcacgtgatccggtgcaaaaggagttggcaacccaaaagaaagaggcaaagat

SEQ ID NO: 71112 - DNA, 239 bp, Glycine max
  Clone ID: 700837721H1
ctggaggtttcgctctctcagtttcttttccccaaattgtttttcatctaacaatttactttgcagaaccctaaccctagccccttcgcctaccttgtaaccttcctttcgatccttcatctcgcagacaatgggtgaaactaaggacgaagcatacgaggaagagcttctcgattacgaggaggaagacgacaaggcccccgactccgccggagctaaagtcaacggcgaactaccaa

SEQ ID NO: 71113 - DNA, 244 bp, Glycine max
  Clone ID: 700837722H1
acggaagttaacactgaagattttgttttgtctctatctgttagtgttggaaattggtgggtagcaacagcatttggatttgtttttggaggagtcaaggtcagacggcaatggttgaaatgaagaatgtgacatataatatatgtagttctcttctcatctttttattttttcccattctaatagctgttgagtctgatcgagtgagtactgctgctgcttcttttgcaccgaatctttggtt

SEQ ID NO: 71114 - DNA, 238 bp, Glycine max
  Clone ID: 700837723H1
ctctctctctaacccaagacagtctctttctcttcgaagcaagacggtagctttccgacccggaaaacgccctctcctcctgggactcctctgccgccaacccatgccggtggcgcggcgtcacctgtgaccctctcaccgacaccattactgacgttagcctcccctccgtctgcctctccggcccctttcccgtcatcctctgccggatcgtctccctaagcaccctcaacgtcag

SEQ ID NO: 71115 - DNA, 247 bp, Glycine max
  Clone ID: 700837724H1
cttcctcgaagcgtgttgatgcggcagagtcccctaccgtacccgcacccacaagcttggcggtgttcgacatcaacaccatcgaggagccatggctgaagcacctcaacaacaccatcgaggagccatggctgaagcacctcaacaacaccacccctctcccccaagacaataataaaccctccctccccgcccctattctccacaaactcaacttgctcgacgccaccgatgccccccaatcctg

SEQ ID NO: 71116 - DNA, 241 bp, Glycine max
  Clone ID: 700837725H1
tagccttggccgacaggtccgggtaatctttgaaatttcatcgtgatggggatagatcattgcaattgttggtcttcaacgaggaattcctagtaagcgcgagtcatcagctcgcgttgactacgtccctgccctttgtacacaccgcccgtcgctcctaccgattgaatggtccggtgaagtgttcggattgcggcgacgtgagcggttcgctgcccgcgacgttgtgagaagtccactg

SEQ ID NO: 71117 - DNA, 240 bp, Glycine max
  Clone ID: 700837726H1
attcaaaccttgctctatactacacagtacacacactagaagaataatggcttccatcctccactactttttagccctctctctttcttgctcttttcttttcttcttatccgactcagtcacccctacaaaaccaataaaccttgttgttctacccgttcaaaatgatggttccacagggctccattgggccaacctccaaaaaagaacccctctaatgcaagtaccagtcctggtgga

SEQ ID NO: 71118 - DNA, 242 bp, Glycine max
  Clone ID: 700837727H1
tagaaagggttgacggacagagaacccaccttttgttgtattgcagatccatccgctctgccaccaggtgaatggaaggaagtggcggtggcggtgcttcaccgtctgcaccggtgaagcagtatttgcacgatttctcgaagctgtttcagtactatctggataaatccactccacattccacgtacagatggattgggactttcgtgatagcatccatctacgttttgcgcgttggatat

SEQ ID NO: 71119 - DNA, 242 bp, Glycine max
  Clone ID: 700837728H1
agaaaacctaagcttagaattagaaacaaagaaaagaagaaaggaaagaattgatcgttgaaaatgcagggaggaaagaaagcgggagagtccattaaggaaacagctacaaacattggtgcttctgccaaggctggcatggagaagaccaaggccactgtccaagagaaggcagaaagaatgacagcacgtgatccggtgcaaaaggagttggcaacccaaaagaaagaggcaaagatgaa

SEQ ID NO: 71120 - DNA, 240 bp, Glycine max
  Clone ID: 700837729H1
caaggagcaggtaaagcttttccaaacaagattgtttttgatgataagcttgtgttggctaacacacaagaattctttgatggaaattttccagtggattcttggttaccaatttttgtgaattgtctttatcctgtaagtcaattaccttcagaagctgtcgttgtaaatgttacatgtggtagtggacgtggtggtttacccaccactgcttggattagttctgcagttaacaatcgc

SEQ ID NO: 71121 - DNA, 245 bp, Glycine max
  Clone ID: 700837730H1
ggacctcatattatagatatcaatgtccagcctactgaggatgatactgttcttcaaacccgcaagcctaatgctcccattgagcctttgaatcaaatggttgatgaggaaccaaggttggagctggaaaacgaattccctataaatgaagctacatttgttgcccctgttgcctcagccccagctgcaacctctgtggcatcttcatcagtgccttgtcctataattgatctgtctgaaacaac

SEQ ID NO: 71122 - DNA, 246 bp, Glycine max
  Clone ID: 700837731H1
cttctctcttcaaccctagcttagggtttatgctctaaaaccctcccttttcaggtttattgggagagaaaaatgctcgtattgtttgaaacacccgcgggttttgccctgtttaaagtgctggatgaaggcaagctttctaaagttgaggacttgtggaagaacttttccagtgcagatactgctagacaggtggtcaagttgaaagcattttctaaatttgagaacacttcagaagctctagag

SEQ ID NO: 71123 - DNA, 97 bp, Glycine max
  Clone ID: 700837733H1
aattcaataaaggaaattaggcatgaccctcttgttgagtatgctctgcctatttgaaaatttccacacctcttttaattgtcgtaatgatgtgtga

SEQ ID NO: 71124 - DNA, 243 bp, Glycine max
  Clone ID: 700837734H1
cagaaagtagaggcagagaaagcaagatcaatggagaaaactagagatgaagctaaaggaagagaacaagctgaaaccaaaggtcaaaccaagaagggtggtggtgaagaacagggaacaagaagagaagaaataggagaagacaataaacaatccagcctcgaagagatttctaaatgcagagctgaagctgaagagaaagttaaggagagaaaggagagatcaaaacaagcagcaggtaat

SEQ ID NO: 71125 - DNA, 241 bp, Glycine max
  Clone ID: 700837736H1
cgatatcttcctcagttctgtggatatcaacgaaggagctcttcttctaccacactccaattcaaaggccatagtgatactagtgattaatgaaggagatgcaaacattgaacttgttggcattaaagaacaacaacagaagcagaaacaggaagaggaacctttggaagtgcaaaggtacagagctgaattgtctgaagacgatgtatttgtaattccagcagcttatccatttgtcgtc

SEQ ID NO: 71126 - DNA, 241 bp, Glycine max
  Clone ID: 700837738H1
gctgaagaaaacctaagcttagaattagaaacaaagaaaagaagaaaggaaagaattgatcgttgaaaatgcagggaggaaagaaagcgggagagtccattaaggacacagctacaaacattggtgcttctgccaaggctggcatggagaagaccaaggccactgtccaagagaaggcagaaagaatgacagcacgtgatccggtgcaaaaggagttggcaacccaaaagatagaggcaaa

SEQ ID NO: 71127 - DNA, 242 bp, Glycine max
  Clone ID: 700837739H1
ggaaatcggtcgtctataccgaataaggaagacggtgatgcagatgctgagggacagaaattttctggttggtgacttcgagatcaacatgtccaagcacgagttcaagtccaagtacggcgaacacatgaagcgcgaggacctcgtcatcaacaaatccaagaaggacaactccggcgaccagatctacgttttcttccccgacgaacccaaggtcggcgtcaagaccatgaagacctaca

SEQ ID NO: 71128 - DNA, 245 bp, Glycine max
  Clone ID: 700837740H1
attagcttagggattacttctgccattactcaaggtaaaccttttacaattttcaggaaaaatatcaattaaggcttaaagtgctacaggagagtttgagagaaacttctaacagtattaatcgcggcacctcagagggaagatgtgttagcaatgggccttctcgacgtcaatccctaggtggagctgatagcatctcgaaactacacatctaatgggtttgtgacgagatcaccgtccactca

SEQ ID NO: 71129 - DNA, 243 bp, Glycine max
  Clone ID: 700837742H1
agaacagagggcctagggccaagggtggcaaaaaccaaaaaggttttgcaccaactattctggcagtcaaagggcagactttgcctgcaactttaggcacagatgaagagaaagacaagactagtaccattctggaatgtgatcaatataacaaagctgattttccagaagaatatactgatgccaaattttttgtcatcaagtcttacagcgaggatgatatccataagagtattaagtata

SEQ ID NO: 71130 - DNA, 240 bp, Glycine max
  Clone ID: 700837744H1
gaacaaaacaagattctttagttatatatgtaaaaaaaaatggtttatttataagaatacatattccattctatatcaaaacaaaatataaaaatttggaatagattctatgaaatctcaaaaaatcccgctattcaattattcattaaacatatgaatattagtgcatattattttatcgattagattaaatagattatctatatatatagatagatatctatttgaattgcttcattc

SEQ ID NO: 71131 - DNA, 244 bp, Glycine max
  Clone ID: 700837745H1
agttgcagaccgagctagctagctagcaagcaagcacagagatggaggcaaagcgaggccatgccctcatgtgcttggcacgtgtttcactcttcctctgcgctctaaccctatccgctgctcacggaagcaccacggttcaagacatcgcgagaaagttgaaactcggggacaacgagcttctgcgcacggagaagtagttcaaggttttcatggagaattacgggaggagctactccacaga

SEQ ID NO: 71132 - DNA, 241 bp, Glycine max
  Clone ID: 700837746H1
gcgtctctctctcacctcaacaaactcctctgcatgccgccgctcaactcttcaccctctacttcgccaccgcgcagcagcgtcggagtttcgaccaaatctgtcggaaggccgaggatggtcgccgatttcgcgaggccggtggggcgtgtccgagcggtgacgagcgacgacgagtggggcccggagaaggaggaggaggcatacggcggaggagtggcggtggaggagaaaccgacgg

SEQ ID NO: 71133 - DNA, 246 bp, Glycine max
  Clone ID: 700837748H1
aagcaatattatgcaacctgtttttctcttattgccgggataattctttttggtggcctccttgcacctagcttggagcttaagcttggactagggggcacatcttatgcagattttattgaaagtgtgcatctgcctatgcagctgagtcaggttgatcccatagtggcatcattctctggaggagcagttggagtaatctcggcattaatggtggttgagataaacaatgtaaaacagcaggag

SEQ ID NO: 71134 - DNA, 241 bp, Glycine max
  Clone ID: 700837749H1
gtgattgattgtgacgaaatctgacaatgaagcgtggagcattgttgtcagtgcttgcctgcgccttcgcggcggtgatctgggcagcgaacggcgacgacaacctcgtcccgcctcgccgggaagtgtacggcaatgggcgaatattcgacatcagtcatcggtaccaacccgagatgccggaatgggaatcgaatgacggcatagggcagttcctgtggcttcccaagagcatgaagaa

SEQ ID NO: 71135 - DNA, 239 bp, Glycine max
  Clone ID: 700837750H1
gttaaatttcactaaaatagtttcattagcacccgaggtattataagacgaaactgtgctatggatacattatttttttgtgaaatagattaattaatctattttatctaacatatatcccttttgtagtaattattagaatttgtagtaattattataagtattagaagcagcaattcttatttatttcagattaatacttgataacctaaacaatatatctatatatagaatataga

SEQ ID NO: 71136 - DNA, 240 bp, Glycine max
  Clone ID: 700837751H1
cttatcaccccaatgacccattcgtaacaactttactttatttagtattcctttttttatatttagtattcctaaaaaaaaaatgcaatataataaaaataaatcatttttaacacgataagctaattcttacgtttccacactaaagttagatctatgattttattatttctccattttatgcccattggtgttccaagagtaccctttcgaagccctggggaagaagatgcatcttgg

SEQ ID NO: 71137 - DNA, 240 bp, Glycine max; identical to SEQ ID NO: 66570
  Clone ID: 700837752H1

SEQ ID NO: 71138 - DNA, 105 bp, Glycine max
  Clone ID: 700837754H1
cgagaactgtaagagtctcaaatatctagttgatgagtgtccttttgcatttgtgaactagtatgtaatattttattcacttaaataaagcgcattactatgtgc

SEQ ID NO: 71139 - DNA, 241 bp, Glycine max
  Clone ID: 700837755H1
gcggcggcgagttcgcgcggcggctccacctcgcgcgtgtcgtgggctcgttcgctgagcctgatggacacgcgcacagcagccgctcccacttcgactccgagtcgacggagttctccgacacggtggacttccaccacttcctggcgcacgccgcgccaacgatctccgtctcttctccttctccgacctgaaatccgccacgcgcgccttcagccgcgccctcctcgtcggcgaggga

SEQ ID NO: 71140 - DNA, 235 bp, Glycine max
  Clone ID: 700837756H1
tggagttttgcctttacatttgggtgaaagatgaagttgacattcttgacgctctcttcaaggccgaaagatcatattggggttttcccatttctctttagcttacttaaaatgtgtacaaaatcttacttcaattggtggagtgattcaatcttgaaggattcttgggtcgcgtatgcatttggactatgaacagaatggaatggaacaattatattcagttctctttgattcc

SEQ ID NO: 71141 - DNA, 239 bp, Glycine max
  Clone ID: 700837757H1
atagaacatgagcatataaatggataccctttatattatctatctttatattatctataaagggtaaagatatccgatgtgaatctatttgtttagttttctatcggtatgtatataggtgaataatccaacatgcctttttgtgaagtaaaaaaactaccctcgatccatgcctcaaaagggttgataataagtataaaaaatcaatgtattcgtgataaaacccttctgcgtttttt

SEQ ID NO: 71142 - DNA, 238 bp, Glycine max
  Clone ID: 700837758H1
tctcgagcgaatcggctcagaatttccatggcttctgcgagatgttgaataccgatgctttgttggtgggctcgcttgggccactgacaactacgatctggagaaagccttctctcagtacggtgacgtcgttgaatcgaagattatcaacgatcgtgagactggaagatccaggggatttggatttgttaccttcgcctccgaggattcaatgagggatgcgatcgaagggatgaac

SEQ ID NO: 71143 - DNA, 238 bp, Glycine max
  Clone ID: 700837759H1
aaagagagaaatttgagaatggctaatctcattggctttaatcttgaaactaaacctgaaagcagagaaatgctatcaaggtcatcacttcttgctgaactggcatccaagggtgtgatgtcttgtgtgactcaggaagtgaaggacatttaccatcttttggaacatgagttttatccctctgatcttgcattaaaagcgctgcccttaataactaaaatctctaagttagggggta

SEQ ID NO: 71144 - DNA, 240 bp, Glycine max
  Clone ID: 700837760H1
aaacaattcaattcaatctgcctcgatcatggagaggaaaacatttgggtttttgttcttgctcctccttgtcttagcttctgatgtgacggtgaagagagcagaggcgaaagattgcttgacaaggaggcacgggttccagggtagatgcttattcgacaggcaatgtgcacatgtgtgcaggagcgatggtttcatcggtggtcagtgccgaggccctcttcgcaaatgcttttgcag

SEQ ID NO: 71145 - DNA, 239 bp, Glycine max
  Clone ID: 700837761H1
tttcacctatttttctctctctctctctctctctctcgcatcacaatttcatcaaaaccttttaagtcttcatagttttccttctttctttctttgtgaaaaaacaaaaagtccaaaccatggctcagaaaaccgagaaagaagaaaccgacttcaaggttcccgaaacgattacgctttgcgttaacaactgcggcgtcaccggaaaccctgctacgaataacatgtgtcagaagtgc

SEQ ID NO: 71146 - DNA, 244 bp, Glycine max
  Clone ID: 700837762H1
cacgaactactccgaagccgctcacgttatccacacaacaacactcccaaaaccctaaccaaccatggcttcttccaccttcaccgcaatgtccgcttgcaagctttcctcctccgccgccatctcctccttccccacccaccgccgcaccaacgccgtccttctgtccagacgcagccgcgccgccagggtctccgccatggccaaggagttgcacttcaacaaagacggcaccgcaattagg

SEQ ID NO: 71147 - DNA, 283 bp, Glycine max
  Clone ID: 700837764H1
cgatacgtaagctacgctcttcatctggctcgagcttctcatgaatatgccaaatgctgttctttcaatgtggagatattttgttggagatctcgtctttgaagtttctaagatgacttctccctacattaaatgtacagtctctttcttcatagcatttggaaatttggctgatgacaccatcaattttgaggcttttccccacaagctggtgcagtttggagagattcaggaaaaagttgtattgaaattttcacaagaggaatttcttacagcttggtca

SEQ ID NO: 71148 - DNA, 241 bp, Glycine max
  Clone ID: 700837766H1
gcacgggggtcccagtcccgaacccgtcggctgtcggtggactgctcgagctgcttccgcggcgagatcgggtcgtcgcgtgccggtcgggggacggattgggaacgggcccttcggggcctcttccccgggcgtcgaacagtcaactcagaactcggtacggacaatgtgaatccgactgtttaattaaaacaaagcattgcgatggtccctgcggatgttgacgcaatgtgatttctgc

SEQ ID NO: 71149 - DNA, 236 bp, Glycine max
  Clone ID: 700837767H1
gacactccttcttctccgcttcctcttcgatcatcgcttcagaatgccgccgaagttcgacccctcccagatcgtcgacgtcttcgtacgcgtcaccggcggttaggtcggcgcggcgagttccctcgccccgaagatcggtcccctcggtctctcccccaagaagatcggagaagatatcgccaaggaaaccgccaaggactggaagggcctccgcgtcagcgtcaagctcaccg

SEQ ID NO: 71150 - DNA, 237 bp, Glycine max
  Clone ID: 700837769H1
tcagtacccatttttgtactaagaagcatttgttacatttatgtaaccaaaggaaaatcaaaagtacgcaggaggtgaagctcggtggcgaaatcaacatgcaacgcagtgaaagcatgcgactaaaggagaagaaggtgaaggatttgatggttgacaagaagaggctagtggaggtgccgtacatggcgtccctggcccacacaatgactacactggtggcgaacaaagttgtgg

SEQ ID NO: 71151 - DNA, 235 bp, Glycine max
  Clone ID: 700837770H1
attcgtagacgccaagaaccctaacaggagaatgcagtggacctggataatttgtgaggatatttaacatcgtgtacattgtgctcctttaattattttcatcagttggtgttgtgatggatggtgataatggtcttaacatacgtaattggggttactatgaacccgctacgtcgtttaatagccacctggggctgcagctgatgtcatccttgccggaaaaacctttaattgg

SEQ ID NO: 71152 - DNA, 240 bp, Glycine max
  Clone ID: 700837772H1
caagcaacatgatgctactggtgtttatcccggaatagacattggtagagatcatgggactaccggtgtttatggcctaaacaccgacagacatcatggaacttctggggtgaatcccgggatagacacccataaccaacaacatgggactaccgttggttatgctggtgacactggaaggcagcatgggaatacaggtggcctttactatggtaccgacaccgcggacacaggaaccgg

SEQ ID NO: 71153 - DNA, 195 bp, Glycine max
  unsure (1)..(195): unsure at all n locations
  Clone ID: 700837773H1
attagattagacaattagaaaaaaatattgagacaattatgaattccattgagtttcccttacttgatcaaacaaccaaaaattcagttatttcaactacattaaatgatctttcaaattggtcaagattatccagtttatggccgcttctctatggtactagttgttgcttcattgaanttgcttcattaatag

SEQ ID NO: 71154 - DNA, 238 bp, Glycine max
  Clone ID: 700837774H1
gaatttacagcttgcagaggaaaatcttcaaaaggaacctcgtatcatggaacttaggaatcaatgtagaataattcggacaaccgagttagctgctgctaaggagaaactaaatgagcttgagaagcagaaagaagacatgttgaaattgaattccgcagcatcccttctccaaaggattcaagagtctgtgaataagaccgacgaggaatctgaaaacttgcaccacaatctcctt

SEQ ID NO: 71155 - DNA, 234 bp, Glycine max
  Clone ID: 700837775H1
ggcggcttcccgtcatcgaataatgccgccggcggtattgcgccgccgttggaggtggacgggctgccggagaattttgattggagagagaaaggagctgtcaccgaagttaagttacagggtagatgtggatcatgctgggctttcagcaccacaggatctatagaaggagccaattttcttgccaccggaaagctcgtcagtcttagtgaacaacagctccttgactgtgac

SEQ ID NO: 71156 - DNA, 238 bp, Glycine max
  Clone ID: 700837777H1
gaagaatcgcagacagtgttccgcttcttcatcgaacttgccggttgtcattgacctctctttctttccctttcctttttctccatctctcgcaactcttcacctcaccgcgtcattcgcacgctgagacagcaacctccgaacactgaatcgtgattcgcagtgtatgacgagcgcttcggagctatttcactccagaaggcatcgattgggacgaatgctctcgatctagggctcg

SEQ ID NO: 71157 - DNA, 240 bp, Glycine max
  Clone ID: 700837778H1
aacataacaatgtcgttgattccaagtttcttcggcaccgggcgaagaaccaacgtcttcgaccccttctccctcgacgtgtgggacccattccatggcttccccggcaccaccgccctctccgcaccgcgctccgagacggcggccttcgccaacacgcgcatcgactggaaggagacggcggaggcgcacgtgttcaaggcagacctgccggggctgaagaaggaagaggtgaaggtg

SEQ ID NO: 71158 - DNA, 241 bp, Glycine max
  Clone ID: 700837779H1
ctcgagcgatgttttgtgggtggctcctgaggacaaggcgagtttatggtcacaacttcattatgtttcgtgcaataatctggaaatgcaagaagcttatcttgtcaatctcgtaaatgtgttacgagaactgtatttgcacagtccagaggaagctcgccaactgagaaggaaagctctctctcgtattgaatggctgcaaaattgctgatgtgcctaccatagcgcaaattgaagagtt

SEQ ID NO: 71159 - DNA, 246 bp, Glycine max
  Clone ID: 700837780H1
ttctgaggctcccctcacctctctctccgaaatccccaaattgcctgacaatgctagaaaccctaggcacgttcgatttgatgctctcccatttgcaatcaagggcgagcgcattcggttcttgcacgcaaggctggtactaccgctgcatcggcctcgatccctgaattcatcattctttctcgcaccatctttttctattccgattcgatttgttgttgttgttgttgttgttgtgtttttgtt

SEQ ID NO: 71160 - DNA, 217 bp, Glycine max
  Clone ID: 700837781H1
gatgaggaagagcagccacagtgcgtggagacagacaaaggttgccaacgccaaagcaagaggagcagaaatggcattgatgagaccatttgcacaatgagacttcgccagaacattggtcagaattcatcacctgacatctacaacgctcacgctggtagcatcacaaccgccaccagccttgacttcccagccctctggcttctcaaactcagtg

SEQ ID NO: 71161 - DNA, 233 bp, Glycine max
  Clone ID: 700837782H1
cacaactactacaagtacttccttacaatcacaaccaacaacaactatggcaagttatcaaaagcactacgatgatcagggtcgcaaggttgacgagtatggcaacgttgagaagcaaaccgacgaatacggcaaccctgttcatgctgctagtgtcacctatgtagccaccagaactgctgctggtggttacagtgatgagattcataagcaacatgataccaccaatggct

SEQ ID NO: 71162 - DNA, 230 bp, Glycine max
  Clone ID: 700837783H1
ggcagatgctttcgcaccagctgtagcttctggtttgatatgcggggatggaatatggactcttcctgcttcaattcttgctcttgctggtgttaagccaccaatttgtatgaagttcttgtcaagagcagcagatgcgagggtcgatactttcttagggaattaaggactagtttgaaaattggacttggctataaacttgtgcagccgtagttgaacaaaacaacata

SEQ ID NO: 71163 - DNA, 87 bp, Glycine max
  Clone ID: 700837784H1
gtaacatattccctcataacacaacaatgagtcgcaagagagacaggcatccctactttttccgcgacgacgctgccaagtgccggc

SEQ ID NO: 71164 - DNA, 233 bp, Glycine max
  Clone ID: 700837785H1
tgaaaatgcagggaggaaagaaagcgggagagtccattaaggaaacagctacaaacattggtgcttctgccaaggctggcatggagaagaccaaggccactgtccaagagaaggcagaaagaatgacagcacgtgatccggtgcaaaaggagttggcaacccaaaagagagaggcaaagatgaaccaggcggactggacaagcaggcggcgcgtcacataacacggcggccaa

SEQ ID NO: 71165 - DNA, 239 bp, Glycine max
  Clone ID: 700837786H1
tacacacacacacacacactaagaataatggcttctatcctccactactttttagccctctctctttctttctctttccttttcttcttatccgactccgtccccattccccaacaccacactaaccctacaaaacctataaaccttctggttctacccgttcaaaatgatgcttccacagggctccattgggccaacctccaaaaaaggacccctctaatgcaagtaccagtcctggt

SEQ ID NO: 71166 - DNA, 93 bp, Glycine max
  Clone ID: 700837787H1
ctgaatgctacatacgaggcaatacaatcaagtaccttcgagtacctgatgcggctcctgatagagttcaggacgaaaccaagagccgtgcag

SEQ ID NO: 71167 - DNA, 237 bp, Glycine max
  Clone ID: 700837788H1
tgtcattggtgttaagttgacaaccataaacaatatgtgtgtatatgggctcaatcctggtatttcaggttctcgtcttttgggcaccattcctcagtccatttcacagcaaactgtttggaatcaaatggcaacagtgagaacaccattgaattttgattctagcaagcagagcttttgtcaattttctattgaccttctcggtggaggaattttagtggacaaaactggagattg

SEQ ID NO: 71168 - DNA, 233 bp, Glycine max
  Clone ID: 700837790H1
ctcgagcgtgcccattacgcttcgagaagccccttctggttcccaccctcgtgggccctacacttgacgtgtcctgcttcaagcttcttgatgggtctctctgcttggatggtgtgggcagacgggggtttccacagaaaccccatggctctgttgctttacttcactcagctcctcttcacggtgctgtgggacccccttgtctttgcccttggggcaacacggctaggctt

SEQ ID NO: 71169 - DNA, 102 bp, Glycine max
  Clone ID: 700837791H1
actgtacgtagtgtgaagatatagtattgtatgctgcagaatatgattgtctaataaggtggactagctgtaataaaagatatttccaggttgaaaacaaaa

SEQ ID NO: 71170 - DNA, 160 bp, Glycine max
  Clone ID: 700837792H1
gattgctgagagtgcttgaactagtggaatgcgtggttgaggttggcgacgaggaaatggattggatatcgtgttttccggagagtgatgctcagacacatttggaatctcttgtttttgactgcgtggagtgttccgttaatttcgatgctttggagag

SEQ ID NO: 71171 - DNA, 237 bp, Glycine max
  Clone ID: 700837793H1
gacacactctctttctttcttgttattctctttctctttcatcatttggcttaaaacacacacacaaaaggtggccaaaatgagcagtgtctgtgccaagcagcacaagttttacccctctcaccaactcctttctccaaagaaaaccctcagagaaattgacatccctccaaggaagctcctcactcgccgtgccgccgcatgcgtcggcggcaccgacgtgtactcctccgagga

SEQ ID NO: 71172 - DNA, 242 bp, Glycine max
  Clone ID: 700837795H1
acaaaattgaactgtaattgtagtagtagacagtagcaccatgagccaggaacagctcaagaaacctcaaggggagcaggaccccatcaaatacggcgacgttttcaaagtctccgacgaactcgctttcaaacccatcgcgccaagagacgcagctctcatgcaagccacggagaaccaagcattgggccaaactcaaaaaggaggtcccgcctcggtgatgcaatccgccgcaaccgaaa

SEQ ID NO: 71173 - DNA, 235 bp, Glycine max
  Clone ID: 700837801H1
agagtgacagctccagccatgaggcagccacagcaagaagaagatgatgatgatgaggtagagcagccacagtgtgtggagacagacaaaggttgccaacgccaaagcaaaaggagcagaaatggcattgatgagaccatttgcacaatgatacttcgccaaaacattggtcagaattcatcacctgacatctacaaccctcaagctggtagcatcacaaccgccaccagccttg

SEQ ID NO: 71174 - DNA, 231 bp, Glycine max
  Clone ID: 700837802H1
acctccttatatgctcatgcaaacgaggcaaatgcattctggtctgtcttcattgcatctgctgtgatgggtcttgtaatgcttggtcaacgctggcagctggaaagagctttacaacttaaatcgcaaatcagtattaatgatgaggcgaggagcagggtgcttgctcccatttatcgactcaaagatgtgattgttggtggcgaccgttgtggctccttgttcagggga

SEQ ID NO: 71175 - DNA, 82 bp, Glycine max
  Clone ID: 700837803H1
gtgttctcctttcattaaggttctgttgtgtttgttgggcttcgttactgtacttttgtttcattattatgccgccgtcttc

SEQ ID NO: 71176 - DNA, 231 bp, Glycine max
  Clone ID: 700837804H1
ctttgtacgggaagaactcaatcttgtccatttccctttttgttatctctcttcgacctcttcaccttccattcgaccaccctcttatcacagctcgcgttaacttaagccttctccgttgagtgtttctccaggtgtggtttgattttcagtttctgattctgaagaaataaaaaagcttgatggctttgctcttctgtgtgaaaaatgttggaaggtgttgcgaaattc

SEQ ID NO: 71177 - DNA, 231 bp, Glycine max
  Clone ID: 700837805H1
ttttattgacactggaacaaattacactgaagtgcaagctagcaatgtcgacggaaccagcagcaagagaatcattggattcagattccatgaagcccatctacatccttttccaaaccctaatcgggcacaagcgcgccatctcggtcgtgaaattctcctcaaacgggctgctcctggcctcctccgccgccgtcaagaccctccgtacgtacggcttcacgaactcgg

SEQ ID NO: 71178 - DNA, 228 bp, Glycine max
  Clone ID: 700837807H1
ctcatcgaaccggatattggagttttacttgtcaaactctcagcgggatccatgtttgcacctcatgtgaatccaatatcagatgcgtataccatagtgctgagtggttatcgtgaactgcatatagggtatccatacggaagcaaagcaatgaaaactaaaatcaaacaatgggacgtgtttgttgtgccaagatacttccccttctgtcaagtagcatcaagggat

SEQ ID NO: 71179 - DNA, 82 bp, Glycine max
  Clone ID: 700837808H1
attctaacttatgttgtcggagttaatgaaggggactacattcatgagatctctaactttataagcaacgcttcctgcacca

SEQ ID NO: 71180 - DNA, 234 bp, Glycine max
  Clone ID: 700837809H1
agagctgagagagcttcgaatcgatactcagaagtagaaagatacacaaatcacaatcgttatggctaggtacgtccgagcaatcaccttgttctcccctgtcggccatctctttcaggtcgagtacgccctcgaagctgtccgcaagggttacgccgccgtcttggtccgcggttccgacaatgttgtcctcggcgtctagaagaaatccaccgccaaactctaagactccag

SEQ ID NO: 71181 - DNA, 230 bp, Glycine max
  Clone ID: 700837810H1
cttctacaaaaatccatggccaatacttgcctcaccagtttactgctacaaaaactctatacccttcatctggcagccatgatcagttaaaaccagaattgtctttctctactgtacctaaaaccccctacccttcttctaccaaaattaatgatcaccacttgccacaacactccagtgcaagtgcaacaaatgctcaatatccttcagctagaagtcattatcagttt

SEQ ID NO: 71182 - DNA, 229 bp, Glycine max
  Clone ID: 700837812H1
ggtatgtgggttgctgcggcaataaaaccattcatcaaataccaattccacagacactctacttatcttccgtttcttctgatggttaaccaagcttcattctccttttcttcttccgtgtcttctgttcacgcgcttctcaagcgcgtgggcacgcacaacggaagctttctttgcgacgaggccctcggctgcttcatgattcgcctcacgaacaaattcaacagcg

SEQ ID NO: 71183 - DNA, 230 bp, Glycine max
  unsure (1)..(230): unsure at all n locations
  Clone ID: 700837813H1
agttntgtcggcagtgcattgattagtaacatgatacgatgttttaagacccaagatgaatcatggagccatgaggttgccatattagtgaaaccattgtaagtgcaaaactcgattcttcctgaaatgcctgggcttataactgattttctgatttctcttgatgatcggtttctgtattttgtaaactggcttcttggggatataatgcagtataacatcgaggacgt

SEQ ID NO: 71184 - DNA, 232 bp, Glycine max
  Clone ID: 700837814H1
ctcgtgaacatgctctgctttcattcacccttggtgtgaatcagatgatttgctgctttaacaaaatggatgttactacacccaagtattccaaggccagttatgatgaaattgtgaaggaagtctcttcctacttgaagaaagtaggttacaaccctgattagattccttttgttcctatctctggttttgagggagacaacatgatttagaggtccacaaaccttgactg

SEQ ID NO: 71185 - DNA, 235 bp, Glycine max
  Clone ID: 700837815H1
atgaataaatggcgcaagacttggcattggatttggaggagtttcgccgcctccacagtatcgccaaaagaccttgaaccctctctcttctctcctccgaatttcgtaacctcgtaaagttatcgtcagaggaagcttttgcgcagattctggcgccgatttcgaccggaactaaagtggcgccttcacctgcgctgaattatgcggcacttgcgtcgttcagttgggaccagga

SEQ ID NO: 71186 - DNA, 234 bp, Glycine max
  Clone ID: 700837816H1
gggaaatgcttgatatcaggccaggcgaggccttggctgtgatcttccccttgcaactctatcacacagctgatgtgagtgttcatgttagcaacccaagggttggacttttgagcttggtaaggttactttctcccaaggtgaccacatttgtggagcaggaatcaaacacaaacacaaccccttttttcaacaggttcattgaaaccttggattactacttggcaatctttg

SEQ ID NO: 71187 - DNA, 122 bp, Glycine max
  Clone ID: 700837818H1
aaatggaactcgaatcttttgtgcaattgcccgggaattcagacagttaaatttcattaaaatagtttcattagcacccgaggtattataagacgaaactgtgctatggattcattattttt

SEQ ID NO: 71188 - DNA, 230 bp, Glycine max
  Clone ID: 700837819H1
atgagaaacaaagaaaggaaataattgatctttgaaaatgcagggaggaaagaaagctggagagtccatcatggaaacagctgcaaacattggtgcttttgccaaggctggcatggagaaaatcaaggccactgttcaggagaaggctgaaagaatgacggcacgtgatccgatgcaaaaggatttggcaacccagtagaaagaggcaaagatgagccaggcagagctgg

SEQ ID NO: 71189 - DNA, 228 bp, Glycine max
  Clone ID: 700837820H1
gtattggtcaacaattattttgtagccaaggccctcctgctatcattccttcccagcctggatttggctatcaacaacaacttatgcctggtatgaggccaggtgcagcttctgtgccgaatcttttcgtgccaatggttcagcagggacaacagggactgcgtcccggtggaaggcgtccatgtgcagttcagctgtcccagcagccagttcctatgatgccacagc

SEQ ID NO: 71190 - DNA, 230 bp, Glycine max
  Clone ID: 700837821H1
acacaacctaagcttagaatttgaaacaaagaaaagaagtaaggaaagaattgatctttgaaaatgcagggttgaaagaaagcggtagagtccattaagcaaacagctacatacattggtgcttctgccaaggctggcatggagaagtccaaggccactgtccaagagaaggcagaaagaatgtcagcacgtgatccggtgcaaaaggtgttggcaacccttaagagaga

SEQ ID NO: 71191 - DNA, 230 bp, Glycine max
  Clone ID: 700837824H1
ctctcgggttattttctctctcttggattccattcctgcgtcttacatcagagccaattgaagcggcggcgactgcaacggcaacctttctcgcaccaccttcggctttcctccgaagaccctctctactcgccttctgttccaatcttcgcttctccactatgttaagcacttctgtagctatttccaagcatggttatgggagacactttgttggaacttgaaggggt

SEQ ID NO: 71192 - DNA, 191 bp, Glycine max
  Clone ID: 700837825H1
ctcatagattaagccatgcatgtgtaagtatgaactaattcagactgtgaaactgcgtatggctcattaaattagttatagtttgtttgatggtatcttctactcggataatcgtagtaattctagagctaatacgtgcaacaaacctcgacttctggaatggatgcatttattagataaaaggtcaacac

SEQ ID NO: 71193 - DNA, 229 bp, Glycine max
  Clone ID: 700837826H1
aaatacctaagcttagaattagtaacaaagaaaagaagaaaggaaagaattgatcgttgaaaatgcagggaggaaagaaagcgggtgagtccattaaggaaacagctacaaatattggtgcttctgccaaggctggtatggagaagaccaaggccactgttcaagagaaggctgaaagaatgatagcacgtgatccggtgcaaaaggagttggcaacccattagaaaga

SEQ ID NO: 71194 - DNA, 228 bp, Glycine max
  Clone ID: 700837827H1
ctcgagccgcgactcataggcagtggcttggttaagggataccaccggagccgtagtgaaaccgagtcttcacagggcaattgtcactgcttatggacccgaacctgggtgttctatccatgaccaggatgaagcttgggtgaaacttagtggaggtccgaaccgactgatgttgaagaatcagcggatgagttgtggttaggggtgtaatgccactcgaacccagag

SEQ ID NO: 71195 - DNA, 229 bp, Glycine max
  unsure (1)..(229): unsure at all n locations
  Clone ID: 700837828H1
aaangcaggagaggtttagcggctcagtgaaaaaaaatcttattctagtaagtcatttgtccgttgctggtcatcaatctccggtctcgattcccggttctcccgggcctattcccttaaagcttgttacggtattctcactccgatcgccccaatgaagggcaatctctatcccttctaactttattctgggatttcttattggcattggattttacatgtgagctaa

SEQ ID NO: 71196 - DNA, 230 bp, Glycine max
  Clone ID: 700837829H1
aagttaacctaagcttagaatttgaaacaaagaaaagaagtaaggaaagaattgatctttgaaaatgcagggaggaaagaaagcggtagagtccattaagtaaacagctacaaacattggtgctgctgccaaggctggcatggagaagaccaaggccactgtccaagagaaggcagaaagaatgacagcacgtgatctggtgcaaaaggagttggcaacccaaaagaaag

SEQ ID NO: 71197 - DNA, 233 bp, Glycine max
  Clone ID: 700837830H1
attcttcccaaacatgtttctctctctctctctctctcttgatacctgaaaagcaagtagctaaggaaaacaataacatcatcacataaactcacaaaggtaaaacaaacaaacaaacaaaatgtcttctccaagcatgcggcgagaaatggacttgatgaaactgatgatgattgactacaaggtggagatgattaatgatggaatgcacgagttttatgtgcacttccatg

SEQ ID NO: 71198 - DNA, 233 bp, Glycine max
  Clone ID: 700837831H1
tggaattggaagtattcttgttgtagcagctcattttggagtaataaccatgggtgctgacattgacattagggtagtccgtgatggacgtggtcccaactgtaatgtttggattaattttaagctgtatggattgcctatgcctgttggtcttctaagagctgacaacaaccttcctccctggcgttctacgctgaaataggtatttgatgccataatatgtgatcctcctt

SEQ ID NO: 71199 - DNA, 234 bp, Glycine max
  Clone ID: 700837832H1
cgtaactgttgcggatgcttcggatgttgaagattctcctaagtacggcgtgacgtcagtatgcggcaggagaagagacatggaagattccgtttcggtgcggccttccttcactcaaggcttccattactttggcgttctcgacggtcactgttgctctcatgtcgcgactatgtgcaaggagcggttacacgagatcgcgaatgaagagattgacagcgcgcgcgagaattt

SEQ ID NO: 71200 - DNA, 234 bp, Glycine max
  Clone ID: 700837833H1
gcataaccctaaattcaattttttccatttccgatcttgtccccggactgcaaatggggagcaggagggacgtggcgcccgccatatacaacaccaacgtcttcgcggcgctcggcagcttgaactagaagaagaagcccgagaaggactaggaccagggcccgtccaagtccatggcccaggacaacaagaaggacgttcttttaggcccctgcgcctctcacttccaagtca

SEQ ID NO: 71201 - DNA, 231 bp, Glycine max
  Clone ID: 700837834H1
attgaactgtaattgtagtaggagacagtagcaccatgtgccaggaacagctcaagaaacctcaaggggagtaggaccccatcaaatacggcgacgttttcaaagtctccgtcgaactcgcttccaaacccatcgctccaagagacgctgctctcatgcaatccacggagaatcaagcattgggccaaactcaaaaaggaggtcccgcctcggtgatgcaatccgccgcaa

SEQ ID NO: 71202 - DNA, 227 bp, Glycine max
  Clone ID: 700837835H1
cgcattcgtggaattgctgtgggcaatgaagttttgggtggcggtgactattctttgtggggagttcttctgggcgctgttaataatatttacaatgctaccgtgaaacttcatctagatctactggttcagatttctactgcaatctcgtttgcagtgttttcgcagtcctaccctcccttctctgattgatgttgcctatgctgttttggaggatgttggatttg

SEQ ID NO: 71203 - DNA, 98 bp, Glycine max
  Clone ID: 700837836H1
gtcctgcacggggcccgctctttcgcgatccgggcccgtgagtccgacccgagatacgagcccacggagctccttctaacggttattgatacactcat

SEQ ID NO: 71204 - DNA, 228 bp, Glycine max
  Clone ID: 700837838H1
atgatggaagcataacagcgtagtgatccaaagaagaataaggatgcaggagaactactcataccaatcgtatccagattccggcgagtcctcaccactatccagagagatagacttcgacatccctcctccatgggacgaccaaagctacaaagccaatttcatgtgcagctacggcggcatgatcctccctcgttcccacgacaattagctctcctacgtcgccgg

SEQ ID NO: 71205 - DNA, 229 bp, Glycine max
  Clone ID: 700837839H1
aggagggcaaacaaggaaggatcagctgggtacagaagtgtaccaggaaatgggatgcaaaggagggttgatcactgtggacaattcaggagaagaacttgctcaagaggtaggcattggcatcgatgagtccaagttcaggactgttaataacaagaaccagaatcagatcgaagaccaggttaagtgataatgtaacacccttcactagcatgtgtagtgtgttctt

SEQ ID NO: 71206 - DNA, 81 bp, Glycine max
  Clone ID: 700837840H1
cactaaagcaatgactatgtcacttaatccaaatccgtgttctgatgcatggagtttggaatttctgaagcgtaccggatt

SEQ ID NO: 71207 - DNA, 231 bp, Glycine max
  Clone ID: 700837841H1
tagcaaaccaaccagacattgtcatggacagcttggctgtacatggccttggcctattgcacccaaagaaggttttcaatttctacaacgagctccatgcttacttagcttcttgtggagtagataggagtgaaggttgatgtgcagatcattattgagatccttggtgcgggacatggtggccgagtgtcacttactcgcagctatcttcacgcgcttgaggcttccatt

SEQ ID NO: 71208 - DNA, 230 bp, Glycine max
  unsure (1)..(230): unsure at all n locations
  Clone ID: 700837842H1
aaactccataaaatggagccttgcaaagcttcaccattancgtgggtcttgatcttctttcttaccatttctttgtggggagtttaggtatcaagtgatgagcaccaccaccatggcaaatctaaagagggacctgtggtggaaagggatcaaaggaggtcattacttgtcactgaatttggtgagatcactgcctttgacatcaagtaaggacaaaaggaactacccta

SEQ ID NO: 71209 - DNA, 228 bp, Glycine max
  Clone ID: 700837843H1
agtaagctctctctcgtattgtatggctgcaaaaagctgatgtgcctaccatagcacagattgaagagttctattcgatgcagatgatgatgaatgctcctgattcaaatgataatattgatctactgttgagcattgatttgttgtgtttacaaggagcaggtaaagcttttccaaacaagattgtttttgatgataagcttgtgttggctaatacacaagaattct

SEQ ID NO: 71210 - DNA, 189 bp, Glycine max
  Clone ID: 700837844H1
catttttgtactaagaagcatgtgttacatttatgtaatcaaaggaaaatcaaaagtacgcaggaggtgaatctcggtggcgaattcaacatgcaacgtagtgaaagcatgcgactaaaggagaagaaggtgaagtatttgatggttgacaagaagaggttagtggaggtgccgtacatggcgtccctg

SEQ ID NO: 71211 - DNA, 231 bp, Glycine max
  Clone ID: 700837845H1
cgtcgtttctacaatggcggatctgaaactctctgagagccgcgatctgacccgcatagagcgcgtgggcgttcactcccacattcgcggccttggccttgactcctccctggagccgcgcgtcgtctcggacggtatggttgggcataccgccgcccgttaggccgccggtgtgatcctccagatgataaaagatggcaaaatcgccggccgtgcagttctcctggccgg

SEQ ID NO: 71212 - DNA, 229 bp, Glycine max
  Clone ID: 700837846H1
cagcttacactctatttaagataggatgacaagtatgaattctcagagccaagcagtattcagggtttggtgaagaattactcacagtttgtttccttccccatctacacatggcaagaaaagtcaagaactgtggaggtggaagagtaggaagaacccatagaaggggaggaaccaaaagaatagggtgagaaaatgaaggtgaaaatgactaaaactgtgaagtatt

SEQ ID NO: 71213 - DNA, 231 bp, Glycine max
  unsure (1)..(231): unsure at all n locations
  Clone ID: 700837847H1
agaanctcctccttgccatgcttcatatacctgtctctactcctggaaaatttgaggtatttttcgggcctggaggacgagacccataatcggtcctctctgcattcagctggaatgtgctgcatctgcgctccaatccccaaaaggatagttagaaaggttttttaatcaatagaacgagggaagtattttcaaaataagcagagaacgggtgcgtgcgttggcccccac

SEQ ID NO: 71214 - DNA, 230 bp, Glycine max
  Clone ID: 700837849H1
aaaactttaagcagatgtctaatgttttgtgggtggctgctgaggacaaggcgagtttatggtcacaacttcattatgtttcgtgcaataacctggaattgcaagaagcttatcttgtcaatttcgtaaatgtgtcacgagaattgtatttgcacagtccagaggaagctcgccaattgagaatgaaagctctctctcgtattgaatggctacaaaaagctgatgtgcct

SEQ ID NO: 71215 - DNA, 228 bp, Glycine max
  Clone ID: 700837850H1
aaaggattctacccgccgctcgatgggaattgcgctttaaggcgtctcgtagggttaatccgcctcacgatggtcaccaacggtacgtgcctttgggcggccgaggccccctactgctggtttgcaaacggacgtcgggcgcacgcttcgcttctagctcggattctgacttagaggcgttcagtcataatccaacgcacggtagcttcgcgccactggctttacaac

SEQ ID NO: 71216 - DNA, 191 bp, Glycine max
  Clone ID: 700837851H1
gtagcgtagaggaagagtgtgaaagaaagatcgttctcgatgacagaggggaactgtgacaaaactctgtgaaagatcgcagacgcattcaatgaccttgcaaacgttttcaccgattctctgagcgcagaagcagaggtcaaggttgctcccttctctcatgcctgctctctcgtctcccttctcttcgg

SEQ ID NO: 71217 - DNA, 226 bp, Glycine max
  Clone ID: 700837853H1
agattttgtttctttgtgtgtgtatggtgatgataacttaattagtgttcatgattatgtcaagccttattttagtggttcttaattgaaaagctttctagctggtcattatatcaccattactgatggtattgacaaaactagtgcaactttgcaatttagaaagttagcagattgtgattttcttaagagacactttaagcagttgtctaatgttttgtgggtg

SEQ ID NO: 71218 - DNA, 188 bp, Glycine max
  Clone ID: 700837854H1
aatagttcagtgtgtcgtttgaaaatgtcgcagttgctggataaagccaagaacttcgtgtcggagaaggtaaatgatatggtcaagccggagggagttgtcactgacgtggacttcaactgatgtgagaaagataatgtcgagtacttggccaaggtctctgttcgtaacccttattcaacttccat

SEQ ID NO: 71219 - DNA, 188 bp, Glycine max
  unsure (1)..(188): unsure at all n locations
  Clone ID: 700837855H1
gttgctggaagagcaccgcatgtcgcgtggtgtccggttcgcccccggcggcccttgaaaatccggaggatcgagtgcctcccacgcccggtcgtactcataaccgcatctagtctccaaggtgaacagcctcttgtcgatggaactatgtagngcaatgaagtcggcaatatggatccgttacctcg

SEQ ID NO: 71220 - DNA, 229 bp, Glycine max
  Clone ID: 700837856H1
cctaaacccttcatcttcgcctagcgcttcccaattccgctgcttttttcttttcccttttctccgcaacatcaacgtttactcttctccactcacaatcgccactccttctacgaagccgttccaggttgcagcgccgtttaccaatacgtgctcaagttccagcgtccatcgaccattcggtggagcccgcacctcgagaacaccgttagtttcatcggcaccgtcg

SEQ ID NO: 71221 - DNA, 230 bp, Glycine max
  Clone ID: 700837857H1
attaaaaactcaatatcaaattctttgtcccacaaaagatggggttcactcccacatgtactgcaacatgctttctcataatagtacctctggttgtgttatggtgttggaagctactaaagttggtgtggctgatgccaaagagattggagagagcattaagggcacagggccttcaggggtatccctacagcctcttgattggggacactaaggaaatgtacacagtg

SEQ ID NO: 71222 - DNA, 190 bp, Glycine max
  Clone ID: 700837858H1
agcgggtaacattgcaggacttgttgattgtaaagatgctcctaaaccagataagtagcctgtagaggatttaaagctaattcatgagtggaaatgcagtgtaaggaaggtaataaaaattactctggaaaggctttctctaagatctgacaccgaacttaagctttctgtggcacgaaaaatgaaagat

SEQ ID NO: 71223 - DNA, 227 bp, Glycine max
  unsure (1)..(227): unsure at all n locations
  Clone ID: 700837859H1
aanaaaagttagggttcacaacttttccttttcctttttcttgcgaatctgaatctaataatcaatcatctattcattattcatcatgtagtcggcgaagaaaatcacgctgaagagttcggtcggcgaggctttcgaggtggaggtggcggtggcgcttgagtcgcagattataaagcacatgatcgaggacgtctgcgccgacagcggcatccctctgccgaacg

SEQ ID NO: 71224 - DNA, 228 bp, Glycine max
  unsure (1)..(228): unsure at all n locations
  Clone ID: 700837860H1
acntaagtgagaaacaaagataggaaataattgatcttcgaaaatgcagggaggatagaaagctggagagtccatcaaggaaactgctgcaaacattgttgcttctgccaatgctggcatggtgaaaaccaaggtcactgtccaggtgaaggcagaaagtatgacggcacgtgatccgatgctaaaggagttggctacccagaagaatgaggcaaagatgagccaggc

SEQ ID NO: 71225 - DNA, 228 bp, Glycine max
  Clone ID: 700837861H1
tttagaagctagtgatcaatcttcaacacagagctgagtgtgttgctctgtgaattcaccttcttcttccattggaggaccatttcctcctggaatagtaatactaccacacttttctttttccacttctctaagttgctaagttaattgctccttcatgttttcactcttcgttctcgcgtgcccgtgtcacggtaactcgtggtgtagtgttcgaaaatgactgtc

SEQ ID NO: 71226 - DNA, 229 bp, Glycine max
  Clone ID: 700837862H1
agtcggtgaaagccaattatctggttgagtcgtgtggaggcaaggtaccaaagtctccaaaagtcaacaggtagatccggttgctttgatccgtttcgttctctattgggtcgtaccctcttttttagtttccaatagcctctctctctgcttttgctagtgattgtcttctgacaggaacttaaacaatgaagattgcaaagggcaatggagcagcgaggccctcaaa

SEQ ID NO: 71227 - DNA, 231 bp, Glycine max
  Clone ID: 700837863H1
aaagataatgcacccattaatttgcagcttaagcattggctgcgatggtgggattgccgggctttttgtgtttggtggagccttggcccttgcgggtttcatggcagttggttcttttgcgagctaaaaacataaggcaaagggcacccatgatgatcacctacctaagcctatacctaaaccctaacaattgttattggaggaacacgggtgtaagactgatcatgaaga

SEQ ID NO: 71228 - DNA, 234 bp, Glycine max
  unsure (1)..(234): unsure at all n locations
  Clone ID: 700837864H1
atganaaacaaagaaaggaaatatttgatctttgaaaatgttgggaggaaagaaagcttgagagtccatcaaggtaacagctgcaaacattggtgcttctgccaaggctggcattgagaaaaccattgccactgtccatgagaaggcagatagaatgacggcacgtgatccgatgcaaaaggagttggcaacccagaagttagaggcaaagatgagccaggcagtgctggacaa

SEQ ID NO: 71229 - DNA, 231 bp, Glycine max
  Clone ID: 700837865H1
atccttatggagaacaagactccaacaatccgtatggtgcccctccatccccacctggattttggatttctgccctacgtgtgacgcaaggtgtggttcacttttttggtcgaatatcaatattcatagaccagaccacacaggcttcccatttgttcatgactgcacttctccagctgtttgcccgctctggaattttgtatggagagccagctagatttgtgttgcggt

SEQ ID NO: 71230 - DNA, 232 bp, Glycine max
  Clone ID: 700837866H1
tctcatttcccttgaaaaggaagcgtgaagcgttttctctctgcattaatttgtttctgcagtctgcaactacttcttcttcatttcttcacaccaatcatgtaccgctttgcaacctccctcgcctccaaagctagaattgctaggagcagcactcaatagattggaagttgggtcagttggtacaggaattatgttgccaaagacattaagtttggtgtggaggcccggg

SEQ ID NO: 71231 - DNA, 187 bp, Glycine max
  Clone ID: 700837868H1
tcacaattgttgataaaggtcttggtaacccggttgttctttggtttctggagtatgttcgagatgaatttaaaaagctagttagaaaaggttcaataggaattttgctaaacatgaattcaatttacattcaggaaaaactggttcctgtcattcgtggtctgatcacttcattggagattgtttc

SEQ ID NO: 71232 - DNA, 187 bp, Glycine max
  Clone ID: 700837869H1
tccaaacgaagcagaaagatctcatagaagttctcgtcctcttctctctatcttgaatcttcttctcttctcagaaacgcgcgttgctcggataagtttgtgctgcgcctactcactggttctttgcttaatatggcggctgagaagtcaaacattgcaaaagatgtgactgaattaattggcaaaa

SEQ ID NO: 71233 - DNA, 67 bp, Glycine max
  Clone ID: 700837870H1
agagtttgatcctggctcacaaggaacgctagctatatgcttaacacatgcaagtcgaacgttgttt

SEQ ID NO: 71234 - DNA, 131 bp, Glycine max
  Clone ID: 700837871H1
ggcgttttcatcggctgcgtcgtcaatcacgccgtcatcgacggcacctccttctggaatttcttcaacaccttcgctcagctttctagaggagccattaactgcatccgcaatataccggttttccaccg

SEQ ID NO: 71235 - DNA, 190 bp, Glycine max
  Clone ID: 700837872H1
aatgaatgctacaagcagaatttctgccttgatagattaatattctgatgatgatgaagattttcaaatattagaacctgaactagaggcataccaatttggtcttgagtatgatgtgagacaaacagccttggtagaagaaccggcacatgaaattgccttttcttccttttcgggcaatttgcgccga

SEQ ID NO: 71236 - DNA, 228 bp, Glycine max
  Clone ID: 700837873H1
cagtgttagagtttgaagcatcaagagatgggtttttgcttataccaggccaaccatatcccttcaggagtagtgttgatggttagacatggcagcatgtgtacttgaatgcactaacaagtttggatgttactctccattcttatacacgtactgaacaagaatggaagcttgctcaatgcactgttgaagctgcttccaatggactatatactgcaactaatgagc

SEQ ID NO: 71237 - DNA, 226 bp, Glycine max
  Clone ID: 700837874H1
atgtatttcgtttgttgttttatctaacaaacttctctatatcgtttactttttgaacacaccttacacactactttatttgattctttcatataaatatcatggcttcgagggtggtttctgttttggtgatagcgatgatgttgtttgccatgaattgtaactgcactagtgttggccacatgccttcaactaaagaggaaggtcacgattttcatgaggctaa

SEQ ID NO: 71238 - DNA, 228 bp, Glycine max
  unsure (1)..(228): unsure at all n locations
  Clone ID: 700837877H1
ctcgagccgattcggctcgagaaaacaatcaacaatagcttgctacctactcctgttgctatgagaaccgttgatgtagatgcgttgcaagcaagatttagagactccaacaataaaagccatgcttaacacctnccatgcctccatactctcatcaaaccagtgtggttctagccttgtgtaaacaatagatgcacctttacctctcgtatggtccctcataaggcg

SEQ ID NO: 71239 - DNA, 229 bp, Glycine max
  Clone ID: 700837878H1
aaagaaaggaaataattgatttttgaaaatgcagggagtaaagaaagctggagagtccatcaaggaaacagctgcaaacattggtgcttctgccaaggctggcatggagataaccaaggccattgtccaggagaaggcagaaagaatgacggcacgtgatccgatgcaaaatgagttggcaatccagaagaaagaggcaaagatgagccaggcagagctggacaagcag

SEQ ID NO: 71240 - DNA, 230 bp, Glycine max
  Clone ID: 700837879H1
gttggaatgaagttatggatgtaatgttcacagttcacttgctgcagtcatgttcttagaggaaataaatgtaaaacttcgtaaattgattttgtactttaaatcattatatagtatcataactaacatctgttattcaggacggacatccacctttgggttggcaagatactgcagcatatcttgttttacctattcttcttgtcgttcctcaatacgtttcaatggaa

SEQ ID NO: 71241 - DNA, 133 bp, Glycine max
  Clone ID: 700837880H1
cggttcgagtagctagcaagcacgcacagagatggaggctaagcgaggccatgccctcatgtgattggcacgtgtttcactcttcctctgcgctctaaccctatccgctgctcacggaagcaccacggttcaa

SEQ ID NO: 71242 - DNA, 189 bp, Glycine max
  Clone ID: 700837881H1
tacttgtactgttctattacttcatactaagttctctaaatgagttccaaggctttgcttgtactacttttgttcttggccattatacttctgatctcctctgaagttgcacccgatgatgcatacgagaatcttgacaaaatagatgggaagcctagtgcagatggggtcgatgaaagcaagtattgg

SEQ ID NO: 71243 - DNA, 80 bp, Glycine max
  Clone ID: 700837882H1
tgagaaacaaagaaaggaattaattgatctttgaaaatgcagggaggaaagaaatctggagagtccatcaaggaaacagc

SEQ ID NO: 71244 - DNA, 226 bp, Glycine max
  Clone ID: 700837883H1
tgcaaaggattctacccgctgctcgatgggaattgcgcttcaaggcgtctcgtatggctaatccgcctctcgagggtcaccaacggcacgtgccttttgggggccgaggctccctactgctggtcggcaaacgtacggcgggcgcccgcgtcgcttctagcccggattctgacttagaggcgttcagtcataatccaacgcacggttgcttcgcgccactggcttt

SEQ ID NO: 71245 - DNA, 227 bp, Glycine max
  Clone ID: 700837884H1
aaattattaacacttccttagttcaatatggggaagtccttcactctctctctctcttccctttgcttgctactcttgtcgattgcatgctttgctattagctccagccagctcaacgagtgccaactcaactacctcaacgcgttggaacccgaccaccgcgttgagtccgaaggtggtttgattcaaacattgaactctcaacaccctgagctgtaatgcgccgg

SEQ ID NO: 71246 - DNA, 226 bp, Glycine max
  Clone ID: 700837885H1
tgttagcagattgtgattttctcaagagaaactttaatcagatgtctaatgttttgtgggtggctcctgtagacaaggcgagtttatggtcacaacttcattatgttttgtgtaataatctggaaatgcaagatgcttatcttgtcaatctcgtaaatgtgttacgagatctgtttttgctcattccagaggatgctcgccaattgagaaggaaagctctctctcg

SEQ ID NO: 71247 - DNA, 99 bp, Glycine max
  Clone ID: 700837886H1
ctggaagggaatttcattttcagatcttatgtatgtcactagacggaatatggaaaaagctgttgcagttttaaccaaaaagttgcagcatgcctcaga

SEQ ID NO: 71248 - DNA, 129 bp, Glycine max
  Clone ID: 700837887H1
taacaaccaacctcttcagcgatctttgattagtactaagctaaaccatttcttattccctcaaaatcataacctttttcttcctagctatttcccttttcaaatcatgccacctaacattaccaccgt

SEQ ID NO: 71249 - DNA, 119 bp, Glycine max
  Clone ID: 700837888H1
ctagtagtggcagagaaagtcagagaaacagaaactgttaggggaagggttggtcctgaaaatgaaggtgcaagaacaaccgctgttataacttgcacgttggaaaaacgtggtggtac

SEQ ID NO: 71250 - DNA, 188 bp, Glycine max
  Clone ID: 700837889H1
aacaactactacaagtacttccttacaatcaaaaccaacaacaactatggcaagttatcaaaagcactactatgatcagggtctcaaggttgacgagtatggcaacgttgagaagcaaacctacgaatacggcaaccctgttcatgctgctagtgtcacctatgtagccaccagaactgctgctggtg

SEQ ID NO: 71251 - DNA, 78 bp, Glycine max
  Clone ID: 700837890H1
tgttgattccaagtttcttcggcaccgggcgaagaatcaacgtcttcgaccccttctccctcgacgtgttggacccat

SEQ ID NO: 71252 - DNA, 181 bp, Glycine max
  Clone ID: 700837891H1
tgactttacatattaacgatcgggaatcgtcgaggtgtttattcaaataggtataatccacggaattgctgaaattttagaattcttaaaaatgaatgaattcgagataataactataagtatacgaaaaaaatagaaccctttttttgtaattcctttgatgcaattggagcttatcaat

SEQ ID NO: 71253 - DNA, 225 bp, Glycine max
  Clone ID: 700837892H1
tcgaaacgctcttcgttatcttttctcagactccgcggcgtagatccgaggagttcgggaaatcctaacccatcatctcaactcaagtcatggctgtacttgcacctgagggatcacagttcgatgctcgtcaatatgattctaaaatgagtgacttactttcatctgatggacaggacttcttcacatcctatgacgaggtttatgatagttttgtcgctatgg

SEQ ID NO: 71254 - DNA, 95 bp, Glycine max
  Clone ID: 700837893H1
cgaagaacaagagagacagtcgaggcagagaaagcaatatcaatggagaaaactcgagatgaagctaaaggaagagaacaagctgtaaccaaagg

SEQ ID NO: 71255 - DNA, 231 bp, Glycine max
  Clone ID: 700837894H1
aaacctaaaaaggatgtggagaatcaaggacaggatggtaccctgagctctggcaagcagactgcggatgtaaatactgtagtgactgaggtgaagatacctgggaaggtagttcctaagaataagataaaaacacctgtctctaataagcaagaagaaactgcggattctaataaaacagatacaccgtctgacaaaaaggatgaagggagtgttgtggcagttcaagca

SEQ ID NO: 71256 - DNA, 71 bp, Glycine max
  Clone ID: 700837895H1
atcgcaatctcattagtcatctctctctctctctctctgaggcaatgcccttttctttctgcaacgtcctt

SEQ ID NO: 71257 - DNA, 131 bp, Glycine max
  Clone ID: 700837896H1
acaggccctactgatgctggccactataacaactggccagaagacactcaatttttccgcaaagaaggtggtggatgggatggttcatatggtgagtttttcctcacttggtactctcagatgctgttgga

SEQ ID NO: 71258 - DNA, 242 bp, Glycine max
  Clone ID: 700837901H1
tcacagattgaagagttcctttcgatgcagaggatgatgaatgctcctgattcaattgataatattgatctactgttgagcattgatttgttgggtttacaagtagcaggcaaagctttttcaaacaagattgttttcgatgataagcttgtgtcggctaacacacaagatttctttgatggaaatcttccagtggattcttggttaccaattttcgtgaattgtctttaccctgtaagtca

SEQ ID NO: 71259 - DNA, 224 bp, Glycine max
  Clone ID: 700837902H1
tttgggctttcagcaccataggatctatagaaggagcaattttcttgccaccgttaagctcgtcagtctctgtgaacaacagctccttgactgtgacaacatttgtgacataacagaatagacttcatgtgacaatgggtgtaatggaggtcttatgacaaatgcctacaattatttgctcgattctggtgggttggaggaggagtcttcatttccctacactg

SEQ ID NO: 71260 - DNA, 233 bp, Glycine max
  Clone ID: 700837903H1
cagcacttgggaaagttaagaaaattgtttttcttactagagttgatccttttccagtagctttactgtttgttctttttggttttaagaatgaaattctgagttctaacgccacttaccccatgctgacgctacttcttgagaactgttagagtctcaaatatctggttgatgagtgtctttttgcatttgtgatttagtatgtgatattttattcacttagacaaagcgca

SEQ ID NO: 71261 - DNA, 240 bp, Glycine max
  Clone ID: 700837904H1
ttagctcgagccgaccccctctctcccttccaaatttccatttcctctttcctcctttaggttatggatccattggggaaacgccctgctgccgaggacgattccctaatttccgattgtcagagcggggtttccgttggagacacgccgccgtcgttcgtcgaaaacgccgacctcgtccggaccagattcgttcgtggcctcgtcgcgcactgcttcaaacccgagcttctggcagtt

SEQ ID NO: 71262 - DNA, 239 bp, Glycine max
  Clone ID: 700837905H1
ctgagcggagagagagagataggttttgacgcaacacattttcactgagaaaggatctctatctaccaaggtctagaataaaacccttctctctggtaagtgagtaagagaatggcttcatatcggaaacttcacattttcgaggaggtggcacagcacgaccagaccatggattgctggctcatcatttctggcaaggtggaaaccctctttcactattctgaacactagtagaatca

SEQ ID NO: 71263 - DNA, 232 bp, Glycine max
  Clone ID: 700837906H1
tgggaagcaaggctttaaggcggagcgaatccgtaaagattgcctcagttcggattgttctctgcatctcgggaacatgaagctggaatcgctagtattcgcggatcagcatgccgcggtgaatatgtactcgggccctgtacacaccgcccgtcacaccctgtgaattggtttcgcctgaagcatcggacctatgatcacccatgtcttctgtgtaccaccagtgccacaa

SEQ ID NO: 71264 - DNA, 231 bp, Glycine max
  Clone ID: 700837907H1
gcgcttgaggcttttattgctagcaattttactgataacggatgcattgtgtgtatgtgtcacaattctgatggactttatcgtgctaagcagacttctattgtgagagcttcttatgatttttacccttgtgatcctgcttcccataccatccatatttcttctgttgcatacaactcactattccttggtgaattcatgcaacttgactgggacatgtctcatagttta

SEQ ID NO: 71265 - DNA, 232 bp, Glycine max
  Clone ID: 700837909H1
ggaaataattgatccttgaaaatgcagggaggtaagaaagctggagagttcatcaaggaaacagctccaaacattggtgcttctgccaaggctggcatggagaaaaccaaggcctctgtccaggagaaggcagaaagaatgacggcacgtgatccgatgcaaaaggagttggcaaccctgaagaaagaggcatagatgagccaggcagagctggacaagcacgcggcgcgtc

SEQ ID NO: 71266 - DNA, 228 bp, Glycine max
  Clone ID: 700837911H1
tttcaggaagaaacaagtgcaatggacatccgtacctatggctatcctacaccagcagtgaaaaatattgagtcttactattatgtgccagagggattggatattcggggaagatatgatgcagagacttcaaaaatcctcacaatagatgctttgaaattcgttgctgacttgcaccgtgagttcaggattcatatcaagtattcattagagtgcagcgagaagcaa

SEQ ID NO: 71267 - DNA, 230 bp, Glycine max
  Clone ID: 700837912H1
gcggctgaatacctagcggagaagatgagtcatgagcagccacggcgtctcaaaggccaaaaccccttcaaatacggcgacgtttttgtcgtctccggcgaccttgcacagaagcccgtcgcaccggaagttgctgccatgatgcaaagcgcggaaactcgattgctcggacaaacctaacccggcggagatccttccgtcatgcactctgccgccaccacgaatgaaca

SEQ ID NO: 71268 - DNA, 231 bp, Glycine max
  Clone ID: 700837913H1
gaacctaagtgagtaacaaagaaaggaaataattgatctttgaaaatgcgcggaggaaagaaagctcgagagtccatcaaggcaacagctgcaaacattggtgcttctgccaagtctggcatggagaaaaccaaggccactgtccaggagaaggcagaaagactgacggcacgtgatccgatgcaaaaggagttggcaacccagatcatagaggcaaagacgagccaggca

SEQ ID NO: 71269 - DNA, 230 bp, Glycine max
  Clone ID: 700837914H1
ctgctgttcaggctgcgatcttgagcggcgaatgagacgagaaggttcatgatttattgctgctggctgttacaccactcattctcggtcttgaaatgtctggtggtgtcatgtctgtgctgattccgcggaacacaactattcccccgaagaaggagcagtttttctcaacctattctgataaccagccctgggtgttgatccatgtgtttgaaggagcacgggctaga

SEQ ID NO: 71270 - DNA, 232 bp, Glycine max
  Clone ID: 700837915H1
aaccttgttctcttcttgtggttcatttctcttttccagatgccacttgtcgttcttcaccctcactattttctcaggaaattcccatctaaccagttccagaccataatccctcactctcccaacatgattcctaataagtctcatcggacttcccgaaactgtaagaagcggcccgttccaagcccacaatgcgttgtcagccctgcccggctcacattctccccgaaac

SEQ ID NO: 71271 - DNA, 240 bp, Glycine max
  Clone ID: 700837917H1
tggagagagattgtgaagtagaaatcggtgcaagaaattctccactttatctaaattaattcggtgagtttttgaagacaaaaaatccctagctactcaaaaattgccacagtaggaaggttcgttgcagctcctttgttgtttcttaacttgttcatgtattttattgttcttggctttgctagttggtgcctcaacagtgtcatcaatggccttacttaccaccctatttttggtgga

SEQ ID NO: 71272 - DNA, 234 bp, Glycine max
  Clone ID: 700837920H1
gttgccaacgccaatgcaaaaggagcagaaatgtcattgatgagaccatttgcacaatgagacttcgttaaaacattggtcataattcatcacctgacttctacaaccctcaagctggtagcatcacaaccgccaccagccttgactttccagccctctggcttctcaaactcagtgccctgtatggatcactctgcaagaatgctattttcgtgccacactacgccctgaacg

SEQ ID NO: 71273 - DNA, 233 bp, Glycine max
  Clone ID: 700837921H1
gcacgtcgcgtggtctccggtgcgccccggcgcccttgaaaatccggtcgaccgagtgcctcccacgcccggtcgtactcttaaccgcatcaggttgccaaggtgaacagcctctggtcgatggaacaatgtaggcaagggaagttggcaaaatggatccgtaacctcgggaaaagtattggctctgaggtctgggcacgggggtcccagtcccgaacccgtcggctgtcggt

SEQ ID NO: 71274 - DNA, 236 bp, Glycine max
  Clone ID: 700837922H1
caaactcgttgtgtctgcagctgcacagatttccctcttctctgtgcctctgcgagaacgcgcgtttggtttcaattcaattgcgggaggtaaagctaagaaggaaaaggggatgccccatcagcagcagaagcacatgccctacctaggcggaatatcgttccacaaatcaaagggtcagcacattctcaagaaccccttgctcgtcgattccattgtgcagaaggccggcgtca

SEQ ID NO: 71275 - DNA, 233 bp, Glycine max
  Clone ID: 700837923H1
aaaattccacttgtcatggctggccgtagacctggtgatgctgaaattgtttatgcatcaacaaagtaagcggaaagagagtttaaatggaaggcaatatatggcattgatgagatgtgccgcgatcaatcgaattgggctagcaaatacccttatggctatggagatcaggaggattccaccgtttaactatatatatatatagttttctctttgggttcctttccgaactc

SEQ ID NO: 71276 - DNA, 233 bp, Glycine max
  Clone ID: 700837924H1
cggctcgagcacaattacaagaaagaacttcctcataaccaaaaccaacatcaactatggcaagttatcagaagcactacgatgatcagggtcgcaaggtcgacgagtatggcaatgttgagaggcaaactcacgaatatggcaaccttgttcatgccactagcgtcacttatgtagctaccaaaagtgttggtggctacaatgatgacgctaataagcaacatgatattact

SEQ ID NO: 71277 - DNA, 232 bp, Glycine max
  Clone ID: 700837925H1
cacacaactactacaagtacttccttacaatccaaaccaacaacaactatggcaagttatcaaaagtactacgatgatcagggtcgcaaggttgacgtgtatggcaacgttgagtagcaaaccgacgaatacggcaaccctgttcatgctgctagtgtcacctatgtagccaccagaactgctgctggtggttacagtgatgacattaataagcaacatgctaccaccaatg

SEQ ID NO: 71278 - DNA, 229 bp, Glycine max
  Clone ID: 700837927H1
gtgaaaatcatgtccgtcctgttcttggaggtaatgacacctttccttttcctcgtagggggagatctggtagaaaaccatcaaggaaagatcctactagtgagagtaggagtaatgatgtttatctttcaagagatgaggctttcggacacttgaagtcatctgactttcttacttatggactaaaattcgtatctcaaaatgttcttccattattgcaatctgcttt

SEQ ID NO: 71279 - DNA, 230 bp, Glycine max
  Clone ID: 700837928H1
gtgtttttgacttcctcggtaagaaaaaggatgaagaagacaagcctcatcctcaggaggaggtcttcgccaccgagtttctaaaagtcactgtcttagaccaaggagagaactagcacagcctcttagttaagcttcaccgatctcacagcagctctagctcttcaagtgaggaggtaggagaagatggatagaaaaggaagaattagaagaaggaaaacaaagggctg

SEQ ID NO: 71280 - DNA, 231 bp, Glycine max
  Clone ID: 700837929H1
ctacaagtacttctttacaatcaaaaccaacatcaactatggcaagttatcaaaagcactacgatgctcagggtcgcaaggttgacgagtatggcaacgttgagaagcaaaccgacgaatacggcaaccctgttcatgctgctagtgtcacctatgtagccaccagaactgctgctgttggttacagtgatcacattaataagcatcatgataccaccactgcctacggcg

SEQ ID NO: 71281 - DNA, 230 bp, Glycine max
  Clone ID: 700837930H1
cagtttttgatattctcttgggaatttctcaacattttgaaattgctggcaatactcttatgccagctttttctgttccactggctactgccagattgtctgaaaatgcggaatcctctgcatgatctgtaatttgtgttttctttcgtttgttcgtttgtctaattcaataaaggtaattagacatgactctcttgttgagtatgctctgtctatttgcaaatttccac

SEQ ID NO: 71282 - DNA, 233 bp, Glycine max
  Clone ID: 700837931H1
atttcatgcacttatgattttcatttggaaaatgctcattggtgcgaattcgtacttatacaaatattttgataaccactcaccacctttgatcaaaggctttgtttttaaaatttcttatttaaaatcatccgattagatttaagcttttgttttcgtacagctcgtgcaattaattttcgcacaatatagtattactgtttttcatttattccaggtaatggcaaaccaag

SEQ ID NO: 71283 - DNA, 151 bp, Glycine max
  Clone ID: 700837932H1
tgaattagttcattctctttgcgcagttccctacctcccctttcaagatgcagatcttcgtcaagaccctctccggaaagaccatcacccttgaggtggaaatctctgacaccatcgactacgtcaaggccaagatccaggacaaggaagg

SEQ ID NO: 71284 - DNA, 143 bp, Glycine max
  Clone ID: 700837934H1
gcgaaacgtagttctgttatccgtagcggcacggtgcgttcataacccctgattgtcattgcgcaaagaagtaaaaccgcaacttccctttcgtctctgttctcacctgcagaacataacgcgtcgtctcatttctctccgca

SEQ ID NO: 71285 - DNA, 234 bp, Glycine max
  Clone ID: 700837935H1
ctcgagccgattctgctcagggttatttattcatttagaaagaccattgcggttacccatagtcttatagtgtcatactgctacacaaaacaatggggtcccttatggcaggattggactctacccacatcgatcctcaatcagccatacttaaaaggaaccgctcactcaccaaggcttaaattgatgcttactggaaatcaaagatgaagatagaggaagcacaccttagag

SEQ ID NO: 71286 - DNA, 219 bp, Glycine max
  Clone ID: 700837936H1
cacaactactacacgtacttccttacaatcattaccaacaacaactatgttaagttatcaaaagcactacgatgatcagggccgcaaggttgacgagtatggcaacgttgagatgcaaaccgacgaatactgcaaccctgttcatgctgctagtgtcacctatttagccaccagaactgttgctggtggttactgtgatgacattaataagcaacatga

SEQ ID NO: 71287 - DNA, 230 bp, Glycine max
  Clone ID: 700837937H1
cttcgccctcgtttactgcaccgctggcatctcagggggacacataaatccggcggtgacatttgtgctgtttttggcgtcgaagttgtcgttgctcagggcgattttctacatcgtgatgcaatgctttggtgctatttgtggcgctggcgtggtgaagggtttcgaggggaaaatcaaatacggtgcgttgaatggtggtgctactttgttgccctcggttacaccaa

SEQ ID NO: 71288 - DNA, 232 bp, Glycine max
  Clone ID: 700837938H1
taaaaatctctccaacccaaaaaaacgtcatcgtggggccaacgacaccgacaagtcaatatcggttcccattttttcatctcactccttcgatttcaaatacagcttcgactcctcattcgagacccgtcccatgtcgggtctctcattcgggtcatcgctaacacactccaaccctacccgaagcattcactccgcaactttctcgggaaacgaatccctcagcctctta

SEQ ID NO: 71289 - DNA, 231 bp, Glycine max
  Clone ID: 700837939H1
gaggaaatcttctccaaggaactagatgggtcaattatgttcgtggatcattctcatgcacctagcttatggactaaattccttcaactgaagaaggatgacaaagagcaacagctgaagaaaatgatgcaagaccaagaggaggttgaggaggagaagcatacaagtaggtcatggtggaagctcttggataccgtatttgggatggtgaatgagaagacagagaacaaa

SEQ ID NO: 71290 - DNA, 231 bp, Glycine max
  Clone ID: 700837940H1
cttctgggtgggtccactgattggggcagctctagcagcactggtctacgaatatgttgtgatctcaactgaaccccctcctcaacaccaacctttggctcctgaagattactagttgcttccactagttgtatcaaaatatgagtgttattaatagctttctgtgtatctaaatataagggtatgcttgtgttttcttttgtttttgcaaccacccttctgcttgagtgg

SEQ ID NO: 71291 - DNA, 230 bp, Glycine max
  Clone ID: 700837941H1
ctcgaaggatgtcttggcattgatgacgactgcctcgatgttgatcttttaaaacaagggtgcatgacattaaagaaacttgatatctcaggttgccaaaacataagtcacgttgggttatcaaagcttacaagcatttctggaggtttagagaaactcatttcagcagatggttcccctgtcactctttctcttgctgatggtctgaataaactttcagtgttgcaatc

SEQ ID NO: 71292 - DNA, 226 bp, Glycine max
  Clone ID: 700837942H1
tctgagtattccgatcgctccctgagagatctcgtcgcggcggttgtcgaagaagattgcaagttgaagttcaacatcgcgaatcccaccactggatgccagaagaagctctagatcgacgacgatctgaaactgcgagcatttcgggacaagaggatctcacaggaggtcatcggagatgcactcggttaggaatttaagcgctatgtcttcaaaactaccggag

SEQ ID NO: 71293 - DNA, 229 bp, Glycine max
  Clone ID: 700837945H1
acaagtacttctttacaatcaaaaccaacatcaactatggcaagttatcaaaagcactacgatgttcagggtcgcaaggttgacgagtatggcaacgttgagaagcaaaccgtcgaatacggcaaccctgttcatgctgctagtgtcacctatgtagccaccagaactgctgctgttggttacagtgatgacattaataagcaccatgataccaccaatgcctacggcg

SEQ ID NO: 71294 - DNA, 229 bp, Glycine max
  Clone ID: 700837946H1
ggtcgatggaataatgtaggcaagggaagtcggcaaaatggatccgttacctcgggaaaaggattggctctgagggctgtcgcacgggggtcccaggcccgaacccgtcggctgtcggtggactgctcgagctgcttccgcggcgtgagcgggtcgtcgcgtgccggtcgggggattgattgggaacgggcccttcggggccttttccccgggcgtcgcacagtcaact

SEQ ID NO: 71295 - DNA, 226 bp, Glycine max
  Clone ID: 700837947H1
tggagaatagactactcacagattatggcattgaacctgacccctttcccttgactggaattccttcaactacctactcatttggaaagtacgaggagagatgggcgggaagtaattatgtgtcttagaatgtgtgttgtcctgtcacatgatgaactcgatacctttgtccagaatgactctagtatttcatttgtatttcttatagtctcttctttcagtttct

SEQ ID NO: 71296 - DNA, 216 bp, Glycine max
  Clone ID: 700837948H1
gtgacgaaaggaatgaagaagaagaagcgttctttcggagagttcgaagatgtcgggcgttaccaataacaacgaggaagactagaagccaaccgaatcgggagcacacatcaaccttaaggttaaggggctggatgggaatgaagttcttttcaggatcaagataagcactcaattgatgaagcttatgaattcttactgtgaccgttagtcggg

SEQ ID NO: 71297 - DNA, 236 bp, Glycine max
  Clone ID: 700837949H1
ggaaagtgcagctgtattgtattcaaaagctgctcgtctgttagttttccttctagtggagggaccattcctgattcttaattctccattttcactgataaactcggaccgttacttgcttcggaattacattgatattcttaataacatgcaaggttattcaatgtcccaacgaatgactctactgaaatgtgattactgtcaaggtatccttaaggaaaagtcttagcaatggt

SEQ ID NO: 71298 - DNA, 233 bp, Glycine max
  Clone ID: 700837950H1
attcaatctgccttgatcatggagaggaaaacttttgggtttttgttctggctcctccttgtcttatcttctggtaagatatatatttatagttccgtgttattcatttggggtacataattaaattatttttcacgtatggtattttattttttaacttaatattaattgtttttttattaatactttaattattttttttaatcttatattgatattattttttcatttat

SEQ ID NO: 71299 - DNA, 148 bp, Glycine max
  Clone ID: 700837951H1
tggctacacttcggccctcgtacggtgcttccttcagtttccgccgccgatcgcgactgccgcggcgctcttttctcgcctcctccgctcgcggccgtcttcctccctctccctcctttttcctcctcgttttctctcctctcctctc

SEQ ID NO: 71300 - DNA, 232 bp, Glycine max
  Clone ID: 700837952H1
gaaagagagagatatggctttcacgatttcctgatctcaatctgctttgacagatagagagaaggtgaatcttgacaacttagttgacaaggagtgtgcaaccacatagggtatgatatcgagccagctttagttgaagtcttctttgtcatccaaagcgtcttctcatcaaagcatgtacaaacatgcaattcttcgacgtatcatgcaacgcaggtttactaacaaagcc

SEQ ID NO: 71301 - DNA, 231 bp, Glycine max
  Clone ID: 700837954H1
gaacagctcaagtaacctcaaggggagcagtaccccatcaaatacggttacgttttcaaagtcttcgacgaactcgctttcaaacccatcgcgccacgagacgcagctctcatgcaagccacggagaaccaagcattgggccaaattcaaaaaggaggtcccgcctcggtgatgcaatccgccgcaaccgataacctccgcgccggcgtcgtgggccgcccagacatctcc

SEQ ID NO: 71302 - DNA, 230 bp, Glycine max
  Clone ID: 700837955H1
taggtattgtacctggtaacgttctggatttgcaagtcaagggaatcttgattggaatgttgttcggaacgttgattcatactatagtgctaattctaatcacctacaaaactaattgggacgagcagtttaccattgctcagaatcgtattagcaggtgttcgaaggtggacagtcctgatcatgaaaatgaagtagaaagaataaacgttagctaatcagtttcagtg

SEQ ID NO: 71303 - DNA, 233 bp, Glycine max
  Clone ID: 700837956H1
cttagcaccatttagatatgctactgtctattgatgttcagatgcaactatagttctaggagcagttggcaaggctgtgatagttgaacactgtgatcgagttcatgtaattttagcagcaaaacgtatctgtattgctaattgctgtgaatgtgttttctctttgggggtgaatctgcaaccacttatttttggtgataaccataagctgcaggtggtcccctataatactt

SEQ ID NO: 71304 - DNA, 235 bp, Glycine max
  unsure (1)..(235): unsure at all n locations
  Clone ID: 700837957H1
tccgaactcgagcgattcggctcgagttcaagtgccgcgaaaaccgctacggngaaaactgcgcaagtgtcagagaaggccaaagactacactcttcaggctgcggagaaggccaagtgtgcgggtggcacaacggcgagttacgtcggatagaaagcggtgcagtccaaggatgtcgccgtggagagtgggaagagtgcggctgggtatgctgccaaggtggctgctgatttga

SEQ ID NO: 71305 - DNA, 228 bp, Glycine max
  Clone ID: 700837958H1
ccatcctgaatatcagtttaatgcaaatccgggacattgataaagctatctaaatcaagattcaaatgtgtactattctttaaatgtttagaaagaaatatctgtgattgtcttcaactacagggtttcttaaccctccccactccactttcgaaaaaaagaaaatgaaaaaactaattaggaggccctaatgtgtaattcataactcaaactttcagaagaaaattt

SEQ ID NO: 71306 - DNA, 227 bp, Glycine max
  Clone ID: 700837959H1
cgccaatgctcctcagagagttgccctcctaacaccatcatatggttcagcatcttttgatgctccaaaaccttttggtagttcaaaaccttctcatcctgctaactttgagcagagtgccccttctcattatgacaacagggtcctagttggcacagctcctcctgccccaagttccacatatgacattcaggtactatccctacaaaaagtacacagtacttccg

SEQ ID NO: 71307 - DNA, 233 bp, Glycine max
  Clone ID: 700837960H1
ctctgttctctcttttgttctgtttcgcgtattgtcttcatacaggaccttgaacaatgaagattgcaaagggcaagggcgcagcaagggcctcataagaatcactgaagctcgttgatgaccgaaagtttggaaagcggaaggtttccggtaagcctggtagaagtagtgcaccaaagaaggagaagatggccaagaaagactccaacaagcctaaactaccacccagtgtt

SEQ ID NO: 71308 - DNA, 229 bp, Glycine max
  Clone ID: 700837961H1
ctccaaacccacctttctatcttttccatctgagcattatttgatactctctctgcagcaacgcttttttcctcattctcttaaacactttctcttttctccttcgtttgatctgcattaaaattgcataaatatataaaaaatgaagaagtttgtactctagttagatttgcatgatgacaaggataagcagaaggccttgaaaacagtttcaactccttcaggaatt

SEQ ID NO: 71309 - DNA, 229 bp, Glycine max
  Clone ID: 700837962H1
gtaagactaagttctcatcttagattccattttgtctcttcattgcctccaaaataactttattttctctgaattattgtctacagcaactttgattaattctccttcgtatcaagtcttcctcatcttcaccacctttttatatctatgtgtctaagaatataaactaaaaaacctaggcgagtgaaagtaaaaaaaatgtcaggtgtgtctctagccgtgtctggtc

SEQ ID NO: 71310 - DNA, 232 bp, Glycine max
  Clone ID: 700837963H1
ctagggtttatctagggtttcgttccttcctctctgcaacaacaatggtgaaacctgggcgaggtcgtcgctctccctccggttccgtttccggctcctcctctcgctcctctcccccctccgactctcattcctcctctcgctcgcgctccctttctcggtcccgttctccctcgccctccagatcctcttccccctcctcctcttcttcctcccgaagctcccgcagccg

SEQ ID NO: 71311 - DNA, 206 bp, Glycine max
  Clone ID: 700837964H1
ctgcttcaaactcctatggtagaggctacctgctgaaccagggctctagctttggaggcacttctatttccaatcttaatgataggaggtttgcttcttttgaaaatagcaggcggcaagggaggccaactgcttctctttgcaattgtattggtactcttgatttccttagtgagcagatccgaggaccaagggcctcgaagttg

SEQ ID NO: 71312 - DNA, 112 bp, Glycine max
  Clone ID: 700837965H1
caagagaaggctcaggagcgaaatgagagagtctcaaaagcagctaacgcagttgccagagagagtcacaagcagacaacatctggctaagctgtcatgcgagtgaagggtc

SEQ ID NO: 71313 - DNA, 232 bp, Glycine max
  Clone ID: 700837966H1
caagagttgattgaaatggctgaagcacaactacgagaccagcatggtaaccctgtcccactcaccgatcaatacggtattccggttatcttaactgacgagcgcggtaatctcgtccaactcactggtctcgctaccaccgctaccggcacagcaggttcttggtttgggtcctattgtaccggtgcttatggtggtggtgcaattgcaaccaccgttgtcgatcttttgg

SEQ ID NO: 71314 - DNA, 232 bp, Glycine max
  Clone ID: 700837967H1
ggaaataatttatctttgaaaatgcagggcggaaagaaagctggagtttccatcaaggaaacatctgcaaacattggtgcttctgccaaggctggcatggagaaaaccaaggccactgtccaggagaatgcagaaagaatgacggtacgtgatccgatgcataaggagttggcaacccagaagaaagaggctaagatgagccaggtagagctggacaagccggcggcgcgtc

SEQ ID NO: 71315 - DNA, 230 bp, Glycine max
  Clone ID: 700837968H1
gctgcaaacattgatgatgccttctacagctataagatgcctaagatgattaccaaaattgattgcagaggtaatggcttcaaaactaatgttgccaatatggttgacattccaaaggcattggcaatgcctgcgtcttacacgtccaagtattttggttctgaacttggggcccactcgaaatttgatgcgaagaccggaacttctcacgtcaatggtgcacatgatac

SEQ ID NO: 71316 - DNA, 232 bp, Glycine max
  Clone ID: 700837969H1
acctcaaccttcttgaggctcagagaaatgagctcaattccagggttaggatgctgcgcgaataattacagcttttgttggaaccaggctcttaggttggtgaagttgtcttagtcatgggcaagaacaaagtccttgtcaaggtccacccagaaggaatatatgtcgttgatattgacaaaagtattgccattacaaagattgctccatccactagtcttgcacttcgcat

SEQ ID NO: 71317 - DNA, 232 bp, Glycine max
  Clone ID: 700837970H1
tcttcctcctagagaagtaaacaaccctcacattcaccacagcagttcacacagacaaagactaccttgtttgtctcctatcaaaacctttcaatctggcgttcgaaaacttagacaaccctgtccgtgaaatcaagcccaagaataggagaatcatgggtgctggaggccctgatgatgaggacaacatcaggtggccaccgtggctgaagcctctgctaaaagaaagttt

SEQ ID NO: 71318 - DNA, 228 bp, Glycine max
  Clone ID: 700837971H1
ctcgagccgtttcttccaccaagttatttgtttccttgtgttgctccttttctccctctacattctctcttctagtttcagcatatcaactcagcgttccatattggactctgacctaaccaagttcaccacacagaaacaggtgtcttcactgttcctactatggaagagtgaccatggacgtgtcttccataaccacgaattagaggcaaagagacttgagatttt

SEQ ID NO: 71319 - DNA, 227 bp, Glycine max
  Clone ID: 700837972H1
actctgttgcctgatgggtgtccatatttgtatgctatggtgcattatagttcagtgtctattataccaggtgatttcttcattggtgttaatgtgacaaccataaacattatgtgtgcatatggtctcaatcctggtatttcaggttctcgtctttttggcaccattcctcattctatttcacagctaactgtttggaatcaaatggcaacagtttgaacaccatt

SEQ ID NO: 71320 - DNA, 226 bp, Glycine max
  Clone ID: 700837973H1
tgcccctcccgtgagttgcatagtttcttatggtgtcatgagcttcactcttgatgctgcttaagaattgggtgtctcacagttgctgtttttgacccctagtgcatgttggttcatgtgctatgtccaatttggacaactctttgaaaagggcctattacccctcaaagactcgagttgtatcacgtatggttatttggttactacaatcgatttgataccggga

SEQ ID NO: 71321 - DNA, 227 bp, Glycine max
  Clone ID: 700837974H1
gttgcagatcgagctagctagctagcacgcaagcacagagatgtgtggcaaagcgaggccattccctcatgtgcttgtcacgtgtttcactctgcctctgcgctctaaccctatccgctgctcacgtaagcaccacggttcatgacatcgcgagaaagttgaaactcggggactacgagcttctgcgtacggagaagaagttcaaggttttcatggcgaattacggg

SEQ ID NO: 71322 - DNA, 227 bp, Glycine max
  unsure (1)..(227): unsure at all n locations
  Clone ID: 700837975H1
gaagtttgcagaactctacgagacccttgtgctggaaaatttaccggagagctttcagagttctttcccgtcattaccttttccatccttgtctgaacggggagactttgacttgaaggaatgantagagtcaccatatttcttcaactgatcaccatcttctgccttctcgtatgcttggactgtcttctagggcttattgataacatttcatgttatgtctgtga

SEQ ID NO: 71323 - DNA, 226 bp, Glycine max
  Clone ID: 700837978H1
gtctctcttcaccacgccaccgcgccgccgtgccacctcgccacttcgccgccacccttagtcggccattatgttagttggttgggtgtgtgctttccttttggtgctttcttggtctgtggaggttattgacgcaagtgctggtgatgctgatccgttctataggggttgtataacacaatgtcaataaactggatgcattgggcaaagatgctctccaaactgt

SEQ ID NO: 71324 - DNA, 229 bp, Glycine max
  Clone ID: 700837979H1
gtggaagcatttgcagaccgagctagcttgctagcaagcaagcacatagatggaggcaaagcgtggccatgccctcatttgcttggcacgtgttccactcttcctctgcgctctaaccctatccgcttctcacggaagcaccactgttcaagacatcgcgtgaaagttgaaactctgggacaacaagcttctgcgcacggagatgaagttcaaggttttcatggagaat

SEQ ID NO: 71325 - DNA, 201 bp, Glycine max
  Clone ID: 700837980H1
ctggattagattatcaaattcctactgccttcgatccttttgctgatccaaatgctgatgactctggtgctgggtcaaatgagtatgtgcatattcgcgttcagcagcgaaatggtaggaaaagcctgtcaaccgttcagggatttaaaaaagaattcagccataacaagatacttatagacgttaagaattagttctgtt

SEQ ID NO: 71326 - DNA, 241 bp, Glycine max
  Clone ID: 700837407H1
cagaatataggaatataagaactaagatggattggatcggagcgtaccgcggaggccagagaagcagggactggtgcgacccttcatcaccattcactgatttgtgggaccctcgtcgtgtcggtgacgctgatgatatcacctcctctctcgcccatgctcacgttgactggcgtgagactgataaagctcatatcttccgtgctgatcttccaggggtgaagaaagaggatctgaaggt

SEQ ID NO: 71327 - DNA, 242 bp, Glycine max
  Clone ID: 700837408H1
cgtgacaaatctccacttcaatatgcgtgacatggtgtaccttttggttcatacaaatgaagtaaagctgaaggactggcagagaactaaaattgaaatgatgcaaaaagctaaagctaataaggaatttgaggcaaaagaatcacatggggatcctcaaatatcttcaagggggagttcacctgattcctcacttggtacaaaaagtagtggactggaaatagactcaaaccagaataagt

SEQ ID NO: 71328 - DNA, 246 bp, Glycine max
  Clone ID: 700837409H1
actgcttcccctggcaaccttcttcttagttctctccgcttcttatctccagattgctggggcgaaagcacaaccgttgactagtctcaagcttaactctccgatccttcaggagtctattgctaaagagatcaatgaaaatcctgaggcaggatgggaggctgctataaatcctcatttctccaattatacagttgaacaatttaagcgccttcttggagtcaaaccaacgcctaagaaggaact

SEQ ID NO: 71329 - DNA, 243 bp, Glycine max
  Clone ID: 700837411H1
cgagaggtgaatgcaagtttgatccagagaaaatagcagttaagatcacaaatttcaccaatatccctgctgatgagaaccaaattgccgcatatttagtaaaaaatggtccacttgctatgggcgtgaatgcaattttcatgcaaacatacattggtggtgtctcatgccctctcatatgtagcaagaaaaggctgaaccatggtgtgttacttgtgggatatggtgcaaaaggcttctcaa

SEQ ID NO: 71330 - DNA, 241 bp, Glycine max
  Clone ID: 700837412H1
tatgaatctaatgatttactttcattttcttgaccgagttagtgtatctaataagtgtttgatattcactttgcttcttgtctatttaattatttcaattgatcatcctgagatggaaatatagagactgtcttttgtcaataatttattatgtatacagcttttgatgcatccaggaattttttgctttcaggtcgtagttgggcctgagtttgttgttcctccatattcaaatgtatct

SEQ ID NO: 71331 - DNA, 239 bp, Glycine max
  Clone ID: 700837413H1
gccgacaattacgggaggttatgtgggtccctccacttttatatacacaacaacaacacacatactagtcatttgttgttgttgtgtttgtgtttgtgttctctcctttcattaacgttgtgttgggtttgctagtgtacttggttttcattatggcgtcttcttcagcctctcgtgagggacactacagaggagttaggaagcgaccatggggacgctacgctgcagaaataagagat

SEQ ID NO: 71332 - DNA, 241 bp, Glycine max
  Clone ID: 700837414H1
ggaaaccgcagccaacattggcgcctctgccaagtctggcttggagaaaaccaaggccactatccaagagaagaatgagaagatgaatgcagaagatcaaactcaaatggatatggctaccaagaggaaagaagagaagatcaaccaggctgagatggagaagcagcaggcccgtaagtactacgccgctgcaaaacaatacgccatggctgagcacatggcaaagggcaaccacgacacc

SEQ ID NO: 71333 - DNA, 239 bp, Glycine max
  Clone ID: 700837415H1
ctctccgcaagaatgcaatgttcgtgccacactacaacctgaacgcgaacagcataatatacgcattgaatggacgggcattgatacaagtggtgaattgcaacggtgagagagtgtttgatggagagctgcaagagggacgggtgctgatcgtgccacaaaactttgtggtggctgcaagatcacagagtgacaacttcgagtatgtgtcattcaagaccaatgatacactcatgatc

SEQ ID NO: 71334 - DNA, 241 bp, Glycine max
  Clone ID: 700837416H1
catcaaagaaaggggtagtagcagcttcgaaagcttaataatttgtatatttccagaacatcatagtattcgcagcagcaaactaacaaattactcatatcatataataagatggcccgttctctctcgcaagccaaacgtattagtgtccttgttactcaatctatctccctaattcccgttcatcggcgaggttacgcagtggcatccgatgtatcggtaagagttggattgggtaata

SEQ ID NO: 71335 - DNA, 244 bp, Glycine max
  Clone ID: 700837417H1
ctcgagcggctcgagtgcagaccgagctagctagctagcaagcaagcacagagatggaggcaaagcgaggccatgccctcatgtgcttggcacgtgtttcactcttcctctgcgctctaaccctatccgctgctcacggaagcaccacggttcaagacatcgcgagatagttgaaactcggggacaacgagcttctgcgcacggagaagaagttcaaggttttcatggagaattacgggaggag

SEQ ID NO: 71336 - DNA, 229 bp, Glycine max
  Clone ID: 700837418H1
aacttcttaatgctttcatttcgcaaaccccccttggacggattggagacgcagaggaagtgtcttcattggtggcattcctctgcttacctgcagcctcttacataacaggacagaccatttgtgttgatggtggattaacagtgaatggtctctatataaattagagaagtactaccaacacactctctaacacacttctcttgacacatattctaccataagttac

SEQ ID NO: 71337 - DNA, 241 bp, Glycine max
  Clone ID: 700837419H1
ctctctctctctctcgattatttccctttgatgagtgttgaacggccaagatggtaaacgaagacgagtgggtgcgagcggcgatggcggacgacaccgtcgtggtggagcttctgctacgcctcaagcaaggtaccgtttcacacaaatctcaccaccagcttatacctttctcctggggtgtcaaacagccgcgctcaagatcaaggcttagcgccgccgtctctcgctgcgacgccgc

SEQ ID NO: 71338 - DNA, 240 bp, Glycine max
  Clone ID: 700837420H1
aactatggcaagttatcagaagcactacgatgatcagggtcgcaaggtcgacgagtatggcaatgttgagaggcaaactgacgaatatggcaacccggttcatgccactagtgtcacttatgtagctaccaaaagtgttggtggctacaatgatgacgctaataagcaacatgatattactggtgtctatcccgagaaagacaccggtagacatcattttggtcgtggttacgacggtga

SEQ ID NO: 71339 - DNA, 243 bp, Glycine max
  Clone ID: 700837421H1
cgcggcttcaaccttgtagttattctctttcttcttttttagctatccctctcttgaaaaatctagatctcgttcttccttgatctacgttacgcttttagtgaccggatctgtatggatctgaaccagatctacacgccgatggtggttttggcctggtctttcatagatctgatgcatggaggctcagatctactgtacagaggtgtgcgattcatatactgtagataatcgatgagaaga

SEQ ID NO: 71340 - DNA, 243 bp, Glycine max
  Clone ID: 700837422H1
cagagaaatggctttcacgatttccagatctcaatctgctttgacagatagagagaaggagaatcttgacaacttagttgacaaggagtgtgcaaccacagagggtatgatatcgagccagctcaagttgacgtcttctttgtcatccaaagcgtcttctcatcaaagcatggacaaacatgcaatccttcgacgtatcaggcaacgcaggtttaataacaaagccaaaaccgctctggaagc

SEQ ID NO: 71341 - DNA, 241 bp, Glycine max
  Clone ID: 700837424H1
ctcgagcgaatcggctcagaaagaatcaaagaaaggggccgtggctgcttcgcaagcttaataatttgtttatttccagaacatcatagttttcgcagcagcaaactaacaaattactcatatcatataataagatggcccgttctctctcgcaagccaaacgtattggtgtccttgttgctcaatctatctccctaattcccgttcatcggcgaggttacgcagtggcatccgatgtatc

SEQ ID NO: 71342 - DNA, 244 bp, Glycine max
  Clone ID: 700837425H1
aaagagagaggagagagagtgcacagaaacgcaaacactcacttctctttttctacgtttttcatcccaacttttcttttccctcaaccattgcttctgtttgatcaaagtcaaaacacacccaaaaagaccaccattcgcaacctcttctctccctttcaacacaacacaagtgacttttcgcttgctcaaacaagaaccagttccttaaacacgcggggatcgaggaaaaaacaaacagcat

SEQ ID NO: 71343 - DNA, 238 bp, Glycine max
  Clone ID: 700837429H1
gcggcttcaaccttgtagttattctctttcttctgttttagctatccctctcttgaaaaatctagatctcgttcttccttgatctacgttacgcttttagtgaccggatctgtatggatctgaaccagatctacacgccgatggtggttttggcctggtctttcatagatctgatgcatggaggctcagatctactgtacagaggtgtgcgattcatatactgtagataatcgatgag

SEQ ID NO: 71344 - DNA, 238 bp, Glycine max
  Clone ID: 700837430H1
ccccaccgccgtccacggcgtcacgcagttctccgatctcaccgaggacgagtttgagaagctctacactggcgtcaatggcggcttcccgtcatcgaataatgccgccggcggtattgcgccgccgttggaggtggacgggctgccggagaattttgattggagagagaaaggagctgtcaccgaagttaagttacagggtagatgtggatcatgctgggctttcagcaccacagga

SEQ ID NO: 71345 - DNA, 240 bp, Glycine max
  Clone ID: 700837432H1
cattttgatgagtacgattatcgggtgaaacttctacagaaaaagcaatggagagaggagttgagaaggatgagagagatgaagaaaaaaggtaacacaaaagaagatgactatggttacatggaagaagatgatcaagagaatggaagtccagcagcagtgccagttccattgcctgatatggccatgccaccatcctttgacagtgacaatccagcctatagataccgtttcttagag

SEQ ID NO: 71346 - DNA, 247 bp, Glycine max
  Clone ID: 700837433H1
agttagcagattgtgattttcttaagagaaactttaagcagatgtctaatgttttgtgggtggctcctgaggacaaggcaagtttatggtcacaacttcattatgtttcgtgtaataatctggaaatgcaagaagcttatcttgtcaatctcgtaaatgtgttacgagaattgtatttgcacagtccagaggaagctcgccaattgagaaggaaagctctctctcgtattgaatggctgcaaaaagc

SEQ ID NO: 71347 - DNA, 245 bp, Glycine max
  Clone ID: 700837434H1
agaaagctatgaaacaagtctgcggtagtttaaaacttgaattggcacaatatcgcgaagtcgccgcctttgctcaatttggctcagaccttgatgctgcgactcaggcattactcaatagaggtgcaaggcttacagaagtactgaaacaacctcaatatgcaccagttccaattgaaaaacaaattctagtcatttatgcagctgtcaatggattctgtgatcgaatgccattagataaaatt

SEQ ID NO: 71348 - DNA, 240 bp, Glycine max
  Clone ID: 700837435H1
gtgttggtgggttgcaaagatgcttgggggtcttctccataggggtcataagataaaagggacagtggtgttgatgcgcaagaatgtgttggacgtgaatagcgtaaccagcgttgggggaattattggtcaaggtctcgacttagttggctcaacactcgatactcttactgccttcttgggccgatccgtgtctctccagcttattagtgctaccaaagctgatgccaacggaaaagg

SEQ ID NO: 71349 - DNA, 242 bp, Glycine max
  Clone ID: 700837436H1
cggctcgagtttgaaaatgcagggaggaaagaaagctggagagtccatcaaggaaacagctgcaaacattggtgcttctgccaaggctggcatggagaaaaccaaggccactgtccaggagaaggcagaaagaatgacggcacgtgatccgatgcaaaaggagttggcaacccagaagaaagaggcaaagatgagccaggcagagctggacaagcaggcggcgcgtcagcataacacggcgg

SEQ ID NO: 71350 - DNA, 242 bp, Glycine max
  Clone ID: 700837437H1
gaaataattgatctttgaaaatgcagggaggaaagaaagctggagagtccatcaaggaaacagctgcaaacattggtgcttctgccaaggctggcatggagaaaaccaaggccactgtccaggagaaggcagaaagaatgacggcacgtgatccgatgcaaaaggagttggcaacccagaagatagaggcaaagatgagccaggcagagctggacaagcaggcggcgcgtcagcataacacg

SEQ ID NO: 71351 - DNA, 241 bp, Glycine max
  Clone ID: 700837438H1
gcaacgcagtggaagtatgcaactaaaggagaagaaggtgagggatttgatggtggacaagaagaggctagtggaggtgccgtacatggcgtcgctggcccacacaatgactacactggtagcgaacaaggttgtggcggtgccgttggctgcgccgccggggaaatggatcggagccggaggttccatgatcgtggagtctgataagcaaaccggagacgtacggaagcactacataggg

SEQ ID NO: 71352 - DNA, 241 bp, Glycine max
  Clone ID: 700837439H1
actcgtgaacatgctctgctttcattcacccttggtgtgaaacagatgatttgctgctgtaacaaaatggatgctactacacccaagtattccaaggccaggtatgatgaaattgtgaaggaagtctcttcctacttgaagaaagtaggatacaaccctgacaagattccttttgttcctatctctggttttgagggagacaacatgattgagaggtccacaaaccttgactggtacaagg

SEQ ID NO: 71353 - DNA, 240 bp, Glycine max
  Clone ID: 700837440H1
cttctaaagatggctggagaggtaaaatgccacaagtatagtcgacgacgcccttccgatggatggacttttacagtagagaaattgggatccagtggaaaacgtgggggtggtggtggctggaaatttgcaagcatgccagatggatcaagccgaccactgaatgagatggagacaatgtatgtgaagcgagagactccacgccggcgacgcaggatccttccttgattacttgatttg

SEQ ID NO: 71354 - DNA, 243 bp, Glycine max
  Clone ID: 700837441H1
agtgcacttgtacaatgcattgctgacccaacattcagttaaaacttttggaacctgttaatattttatacgcctctgagcatcatctacatgagataaatgccatttatccttagtgtttttgttttcatttgttgaataaaggaagtgctgctttgtgttccacgggaacaatggagaggtacaagttaattaaggaagttggtgatgggacttttgggagtgtttggagagctattaata

SEQ ID NO: 71355 - DNA, 241 bp, Glycine max
  Clone ID: 700837442H1
agagaaagccatggagaatggtgaaacctctaatgaagatttattaagcatacttttggaatcaaatcacaaggaaatccagggacatggaaacagtagggctgttggaatgaccaagcaagaagtaattgaggaatgcaagctattttacctggcagggcaagagaccacttcatctctgctggtttggacaatggtcttattggctaggtatccagaatggcaagcacgagcaagggac

SEQ ID NO: 71356 - DNA, 238 bp, Glycine max
  Clone ID: 700837444H1
agcttagttgtcaagttggaatcaacccatactccatggaatggactggtttggccaataggttactgagtaagggcaacgatattctgtgttgcgattatgctagttttgatggtttgattaccaagcaagttatgagcaagatggcagaaatgataaacagtctttgtggtggtgatgaaaaattgatgcgtgaaaggacacacctgctgttggcttgttgttcaaggatggcaat

SEQ ID NO: 71357 - DNA, 236 bp, Glycine max
  Clone ID: 700837446H1
gttcatttcctctgttttttcttcaaatccattgtttcgtggaaatcccgaaatttaaccatgcttctccgaaccgccgcctccgccgcttctgcttcgtccctctccctcttcagccctacctccgaacctctccgttcggttcccgctggtggattggtggttcgcgccgcgaaaggatccacgaaccaccgcgccctaaccggcgtgatctttgaaccgttcgaagaggtgaa

SEQ ID NO: 71358 - DNA, 235 bp, Glycine max
  Clone ID: 700837447H1
agcgttttccttttctttttaattttgtctttggttaagcttaagcaacaaccgtcaccaagcacacgcgcagacgcaagctctttaaacggtggagaacgtgaactgaaccacttcagagttcaaacccagattttgcaacaaaataagcacgccacaactcacctccactttgcttgagggttatattctattctatataaggggaagctcaacttcttcctccttgtcgcat

SEQ ID NO: 71359 - DNA, 174 bp, Glycine max
  Clone ID: 700837448H1
gtcgcaaggttgacgagtatggcaacgttgagaatcataccgacgtatacgggaaccctgttcatgctgctagtgtcacctatgtagccatcagatctgctgcttggtggtacagtgctgaccataataagcaacatgataccacccaatgcctaaggcgtagacacctggtag

SEQ ID NO: 71360 - DNA, 243 bp, Glycine max
  Clone ID: 700837449H1
agctggttctccccgaaatgcgttgaggcgcagagttgactagacatctaggggtaaagcactgtttcggtgcgggccgcgagagcgtaccaaatcgaggcaaactctgaatactagatatgacctcaaaataacaagggtcaaggtcggccagtgagacgatgggggataagcttcatcgtcgagagggaaacagcccggatcaccagctaaggcccctaaatgaccgctcagtgataaagg

SEQ ID NO: 71361 - DNA, 242 bp, Glycine max
  Clone ID: 700837450H1
ttctcgtgcgcgtcagattccgaggggacagtttttgtcgccggcggacacgacaatgagaagaacgcgctgcggtctgcgctggcctacgatgtttcctcggaccggtgggttgtgcttcccgacatggcggcggacgcgacgagtgcaagggcgttttcagccgcgggaggtttgtcgccgtcggcggttacccgacggagacgcagggaaggttcgtgaagagtgcggaggcgttcgat

SEQ ID NO: 71362 - DNA, 239 bp, Glycine max
  Clone ID: 700837453H1
cttgccttcccatatctattgcagtttattcgtgagtacactggcaaagtcgatgaactagtgaaggacaaaattgaagcacaaaatgaagtgaaggctaaagagcaagaagaaaaggatgtagttgcacaacagaacatgtatgctcaattgttgcctcttgctttgcctgcaccaccaatgcctggaatgggaggctttgctcctccccctccaatgggtggactagggatccccca

SEQ ID NO: 71363 - DNA, 239 bp, Glycine max
  Clone ID: 700837454H1
tcgggattttactctcacgagattagagattgaagatggtgtctgacgcgagcaagaagaaggctgcgcagaagaaggcggcggcagcggccaagagaggaggcaaagcagcagctgcttcgtcgaaaacgacgtcgtcggagaaggccgccgacaagcttgccaacggaattggggaaattcagatatccgatcgaacctgcaccggtgtcctctgctcgcatcctctttccagggat

SEQ ID NO: 71364 - DNA, 237 bp, Glycine max
  Clone ID: 700837455H1
atcgttttcctttctcccgagtgttctcctttcttgcttccttctccggccatctttatcctgatggcgtcgtctctgggaattgcttgcggtggaaacaacgccaaattagggatcccaaagcagcggtgtggttcggttcttcagccgccgtgctccctcgctatgaggcgctcgacggcgagggtggggaggatcacggcggcgatggccacggccacggcggtgatgaccacg

SEQ ID NO: 71365 - DNA, 240 bp, Glycine max
  Clone ID: 700837457H1
acgattatgcaactgacactgctcagaaatcaaaggactatgcaggtgatgctgctcagaaatcaaaggactacgcaggtgatgctgctcagaaaaccaaagactatgccagtgacactgcacagacatcaaaggactatgctggtgatgctgctcagaaatcaaagggctatgttggtgatgctgcacaaaagaccaaagaatatgttggtgatgcagcacagaagacaaaggattatg

SEQ ID NO: 71366 - DNA, 239 bp, Glycine max
  Clone ID: 700837459H1
attagcttcttctcctcacgcccgctcatgagccaccatcgcaacaaccacgctgcgctcactgtttcaaccggcgatgcgaatcccgatgactgtcaccaaccggtcgatgctcccctttccgcagcagaacagattagggttagggtttcatcggaggacaacgcggcacccgcatcctccaccgccgatcgcttcgaccgcatcaacaaccacgccgcgtcgagcagaacgtctga

SEQ ID NO: 71367 - DNA, 235 bp, Glycine max
  Clone ID: 700837460H1
cggatgcattgcgtgtatgtgtcacaacactgatggactttatagtgctaagcagactgctattgtgagagcttctgatgatttttaccctcgtgatcctgcttcccataccatccatatttcttctgttgcatacaactcactattccttggagaattcatgcaacctgactgggacatgtttcatagtttacacccagcagcagattatcatgctgcagctcgtgcaattggt

SEQ ID NO: 71368 - DNA, 234 bp, Glycine max
  Clone ID: 700837461H1
tttgccttcccatatctattgcagtttattcgtgagtacactggcaaagtcgatgaactagtgaaggacaaaattgaagcacaaaatgaagtgaaggctaaagagcaagaagaaaaggatgtagttgcacaacagaacatgtatgctcaattgttgcctcttgctttgcctgcaccaccaatgcctggaatgggaggctttgctcctccccctccaatgggtggactggggatg

SEQ ID NO: 71369 - DNA, 239 bp, Glycine max
  Clone ID: 700837464H1
caaaacattgcccttgttctttcaaagttaccaaacacaagtacacaacacaacagcaacatatggcgtctgaacaattggctcgcagagagaacaccaccaccgagaaggagattcacgttgagaaacacagggttcccaagatggccacccacttcgagcaccttgcggagaagctaaagaatctgacatcaccgctgggaaggatactccgcagggtagcatagaagccttgcaag

SEQ ID NO: 71370 - DNA, 236 bp, Glycine max
  Clone ID: 700837468H1
gcttaagcttatccctccccacttgttgcctctgccgtatgttatagccaaaagggtgtgtgagagagagaaacataaacacaaccaaccatcaagggaagttagagagagagttgagttgtgttgagagagatagagagatagaggagaagatgaacggtggtgaatcttacggtgctattgagacacaatacataaggaggcatcacaaacatgaaccaagggaaaaccagtgc

SEQ ID NO: 71371 - DNA, 238 bp, Glycine max
  Clone ID: 700837469H1
atctgcgtgtgtttgtgaattgttgttgagatctgaatcaaaatcagaaacgataatggctacaccggaccacctcttcaacctccgcaacaacttctacctcggcgcttaccaagccgccatcaacagcagcgacgttgccaacctctcccaagaagataccctcgagcgcgacaccctcgtccaccgctgctacatcgccctcggccagctccagttcgtcatctccgagatccac

SEQ ID NO: 71372 - DNA, 238 bp, Glycine max; identical to SEQ ID NO: 70309
  Clone ID: 700837470H1

SEQ ID NO: 71373 - DNA, 237 bp, Glycine max
  Clone ID: 700837471H1
gattcccgaagtgccttcctcctcctcctccttcttcccctctaatcggatccaaatccaaatccaaatccagttcaaagaagatgcaatacaagaacctggggcgatctggcctgaaggtgagccagctctcctacggcgcgtgggtgagcttcgggaaccagctggacgtgaaggaggcgaaggccctcctacagtgctgccgcgaccacggcgtcaacttcttcgacaacgccg

SEQ ID NO: 71374 - DNA, 237 bp, Glycine max
  Clone ID: 700837472H1
atcttcttatggtggactaggaggaggaatgtatggatcatcttatggtggggggatgtatggtaacagtatgtacaggggaggatatggtggcatgtatgggtcatccgggatgtacgggggtggaatgtataacagtggcttagggggtccaatgggtggttatggcatgggtggtggtccttatggagaacaagaccccaacaatccgtatggtgcccctccatccccacctgg

SEQ ID NO: 71375 - DNA, 239 bp, Glycine max
  Clone ID: 700837473H1
ccgatctctttattgtcttcttcttctctcttcctggttttcgttggagaatcctgaaagccgtttgattttaatcaaagggtcatcaggattcggacaccaatatctcgaatcactcctctgttgtcttggaagaagaccaagcaaaggaaacgaagaaaaacatcaatttttgcaagcaacaatcttctatcttcttcttctgccccttttcttctcttctcttgtcttaaaacaca

SEQ ID NO: 71376 - DNA, 235 bp, Glycine max
  Clone ID: 700837475H1
cgaagtgaagctggagattcaagatggcagagttcttcagataagcggagagaggaatgttgaaaaagaagacaagaatgatacgtggcatcgcgtggagcgaacagtggcaagttggtgaggaggtttagattgccggagaatgctaaagtggaccaagtgaaggcttccatggaaaatggggttctcactgtaactgttcctaaggaagagattaagaagcctgatgttaagg

SEQ ID NO: 71377 - DNA, 233 bp, Glycine max
  Clone ID: 700837477H1
aggacttcaaagttctgttagatatacagtgttattctgctttcgatcgctctattattcatttgctaagaccttagagaagacagaggatgggtaccctgcttccagatgaaaaatcagagaatccaaatgctttggaacaacttcaacaccaaaaagatgtggatgcaggcgctctctttgtcctcaaatccaaaggttcttggatgcattgtgggtaccacttgacaact

SEQ ID NO: 71378 - DNA, 235 bp, Glycine max
  Clone ID: 700837478H1
tgaagatgctctcaaaatagacctctccaagaatattgagcagagtgttgaacctgctgccacaggtccatggggagcacaactttatgacaaagccataatctatgattcaactgatttatcagagacagttgtactggagtttccagagcttacgagttccacgagacgtgatcattggcttgcactagtcagagaaataatgtttctccaccagtttttatcaaagtaccag

SEQ ID NO: 71379 - DNA, 236 bp, Glycine max
  unsure (1)..(236): unsure at all n locations
  Clone ID: 700837480H1
aaaattaaaacgaattcgaatgagtacctgcagcctggcccaagggagaatctcctacgatgctttataaagcgcaaccgttccagacaaacatagaattaatatctcagtttaaccaatacactagctgaagatgggaagttccttcttgctgcacgcaaatgcagacgtccaacctgcacagattatatgntctctcttgatgcagatgatatgtcaaagggaagcaactccta

SEQ ID NO: 71380 - DNA, 241 bp, Glycine max
  Clone ID: 700837481H1
cgttgccattctcatcctcctctgtctctctctctccaccattgccatggatccttacaagctccggccatccagcgccttcaattctcccttctggactacaaattctggtgctcctgtttggaacaacaactcctctttaaccgttggagctagaggtccaattctgcttgaggattatcatcttgtggagaagcttgcaaactttgacagggaacgtatcccagaacgtgttgtccat

SEQ ID NO: 71381 - DNA, 238 bp, Glycine max
  Clone ID: 700837482H1
aaaagatcatacatagtagtgttggtgggttgcaaagatgcttgggggtcttctccataggggtcataagataaaagggacagtggtgttgatgcgcaagaatgtgttggacgtgaatagcgtaaccagcgttgggggaattattggtcaaggtctcgacttagttggctcaacactcgatactcttactgccttcttgggccgatccgtgtctctccagcttattagtgctaccaaa

SEQ ID NO: 71382 - DNA, 237 bp, Glycine max
  Clone ID: 700837483H1
caagaggtcgagtttcacagcagcaatggtgtacgtcaaggctcagaaatcaaaagcctacttcaagagatatcaagtcaagttcaagagaagaagagagggaaaaaccgattaccgtgccaggattcggttgattaatcaggacaagaacaaatataacactccgaaataccgatttgttgttcgctttagcaacaaggacattgttgcacaaataatatctgctagcattgctgg

SEQ ID NO: 71383 - DNA, 236 bp, Glycine max
  Clone ID: 700837484H1
acactttccaatacaataatcactaactgaatattcgatcggagatgtctgccgccgccgaagaagctaacgctcccgccgtcgaaaagccggttgaggaggtgaaggcgccgaaccccgcgaaggagaagaaacctaaggctccgaaggaaaagaagccaaaacaggccaaaacagcttcacatcctccatattttcagatgattaaggaggctttgatcgctttgaacgagaaa

SEQ ID NO: 71384 - DNA, 233 bp, Glycine max
  Clone ID: 700837485H1
ctctcttccatctctgtttctctctctagattctcgctccgaattcgttccttcgtttgttcctttttcgcattcgtcttcgcgcggatccgagtgcgtcaattcgaatttcgaaagcctagggtttctggaaagcatggttgccgactagggttttccgcggatctagggtttcgcgggttctgagggcttcgggtgtcgaattaggagggggatttgatggtacgcgttgg

SEQ ID NO: 71385 - DNA, 234 bp, Glycine max
  Clone ID: 700837487H1
atcgtgtaatggaattttgcaacaacaatgatcttcagctgattgttcgtgcacatgaatgtgtgatggatggctttgagcgttttgcccagggacatttgatcacacttttctctgctacaaactactgtggtatttgttactagcttctacattgcacctccacagataattctcccttctaaattttggcactttattgtgtcaatagatacgtcaccagaacgtcatatt

SEQ ID NO: 71386 - DNA, 236 bp, Glycine max
  Clone ID: 700837489H1
atccgctgctcacggaagcaccacggttcaagacatcgcgagaaagttgaaactcggggacaacgagcttctgcgcacggagaagaagttcaaggttttcatggagaattacgggaggagctactccacagaggaggagtatttgcgccgtttggggattttcgcccagaacatggtcagagcggcggacatcaggcgctggaccccaccgccgtccacggcgtcacgcagttctc

SEQ ID NO: 71387 - DNA, 230 bp, Glycine max
  Clone ID: 700837490H1
tcgaggaatcggctcggattcgaacccagacagagacatagcctctttctaccgtttggagaaacaaacacctcgtttcaatcattgatcctttcctgttagatacgaattactcttccaatttcatcatggccaaaacctccttcaagcttcagcatcctttggaaagaaggcaggctgaagcttctcgcattagagagaaatatcctgatagaatacctgtgattgtg

SEQ ID NO: 71388 - DNA, 235 bp, Glycine max
  Clone ID: 700837491H1
ttcaaaccttgctctatactacactgtacacacactagaagaataatggcttccatcctccactactttttagccctctctctttcttgctcttttcttttcttcttatccgactcagtcacccctacaaaaccaataaaccttgttgttctacccgttcaaaatgatggttccacagggctccattgggccaacctccaaaaaagaacccctctaatgcaagtaccagtcctgg

SEQ ID NO: 71389 - DNA, 233 bp, Glycine max
  Clone ID: 700837492H1
aaaattgcacttcccaaaaacacagttggaggaaccattctgcgtagtgatctattggcaaattttttgacagagggcaattttagagcaagtgttgatttgcagcgcactcatcgtattaaaggaatgattaaaatggtggccacagttggtattcctgagaatacaggtatagcattggcctgtgctatgaatagttcttttagggggcgtgccagttctgatatttacac

SEQ ID NO: 71390 - DNA, 232 bp, Glycine max
  Clone ID: 700837493H1
cggaaaggagtgaacattaaagctggtgtgatcacggagtggaaggatattccagttgagcttttgatgcaaattttgtcacttgtggatgatcaaacggttatcatagcttctgaagtgtgtcgtgggtggagagaggcaatttgctttggccttactcggttatcactctcatggtgtagcaagaacatgaataacttggtcctatccctttctcctaaattcacaaaac

SEQ ID NO: 71391 - DNA, 231 bp, Glycine max
  Clone ID: 700837494H1
ctcaaatcctctgagagaaaaaaaaattagggttttgcatatcgggtcagacagactcagacatgggaggaggcaatgcccagaagtcaaagatggctcgcgagaagaacctcgagaagcagagggctgccgctaagggaagccagttggattcaaacaagaaagccatgtctattcagtgcaaggtgtgcatgcaaacatttatatgcaccacatcagaagtgaagtgca

SEQ ID NO: 71392 - DNA, 235 bp, Glycine max
  Clone ID: 700837496H1
aaaacagtaaagctaacttcaacacctttaattttctaaaagtaattcagcggctgaataccaagcggagaagatgagtcaggagcagccacggcgtcccaaaggccaaaaccccatcaaatacggcgacgtttttgtcgtctccggcgaccttgcacagaagcccgtcgcaccggaagatgctgccatgatgcaaagcgcggaaactcgagtgctcggacaaacccacccggcg

SEQ ID NO: 71393 - DNA, 216 bp, Glycine max
  Clone ID: 700837502H1
gttgcagaccgagctagctagctagcaagcaagcacagagatggaggcaaagcgaggccatgccctcatgtgcttggcacgtgtttcactcttcctctgcgctctaaccctatccgctgctcacggaagcaccacggttcaagacatcgcgagaaagttgaaactcggggacaacgagcttctgcgcacggagaagaagttcaaggttttcatgga

SEQ ID NO: 71394 - DNA, 227 bp, Glycine max
  Clone ID: 700837503H1
cgatattctgtgttgcgattatgctagttttgatggtttgattaccaagcaagttatgagcaagatggcagaaatgataaacagtctttgtggtggtgatgaaaaattgatgcgtgaaaggacacacctgctgttggcttgttgttcaaggatggcaatttgtaagaaagatgtttggagagttgaatgtggaatcccttctggatttccgctcacagttatttgta

SEQ ID NO: 71395 - DNA, 227 bp, Glycine max
  Clone ID: 700837504H1
gtttgttgttcaatctaacaaacttctctatatcgtttactttttcaacacaccttacacatccctttatttgtgccacacatataaatatcatggcttcgagggtggtttcggttttggtgatagcgatgatgttgtttgccatgaactgtaactgcactagtgttggccacatgccttcaaccaaagaggaaggtcacgattttcaggaggctaaagccaagaca

SEQ ID NO: 71396 - DNA, 224 bp, Glycine max
  Clone ID: 700837508H1
gctttttgatgttgaggatccgagatctaagtttccacagaatatacgacacgttttggatatatctcaagcactagaagtggcaagacatgatattcagtacttagattggcgagctcggcaagatgtgctaacaatcatgcacctccatgaaaaggtggtcgaagttcttaatcctctagctcgcgaatataaatcaattggcaccctgaaaaaggagctag

SEQ ID NO: 71397 - DNA, 224 bp, Glycine max
  Clone ID: 700837509H1
ctcgagcgaatcggctcagaccgagtgcctcccacgccaggtcgtactcataaacgcatcaggtctccaagacgaacagcctctggtcgatggaacaatgtaggcaagggaagtcggcaaaatggatccgtaacctcgggaaaaggattggctctgagggctgggcacgggggtcccagtcccgaacccgtcggctgtcggtggactgctcgagctgcttccgc

SEQ ID NO: 71398 - DNA, 225 bp, Glycine max
  Clone ID: 700837510H1
cttttcttctctccacacaatttctctctcctctctctctatacaaatccttctttctttcttctcttcgctgctcactgtagccatggctttcagagtaggaggagcgggagggggaaatgcctcttctggcatgggtgttgctgagcatagtgtaaacaccttcctggaattgcagaggaagaaagttcatcgctatgtgatttttaaaattgatgagaaaaa

SEQ ID NO: 71399 - DNA, 223 bp, Glycine max
  Clone ID: 700837511H1
aaagaaacttaatgaagccgaaaaggcaaagaaagaactagaacaacaggaatattttgatccaaagttggctgatgaggagagagaaaaaggaaacgaattcttcaagcagcagaagtatcctgaggctgtgaagcattacacagagtctatacgaagaaatccaaaagatcctagggcttatagtaacagagcagcatgctacactaaactgggggcaatg

SEQ ID NO: 71400 - DNA, 225 bp, Glycine max
  Clone ID: 700837513H1
gccatctctctctctcccatcacattctccgcttcttccactgaaatcccacataaatgtcactctcacttcactcgcctctctcccccaatccctctaattctactgactcagctccgctacggtgagatctggaagctagggtttgaacttcaggctcccaattagggttggattccagcgtgtgatgagaaccaggagattcaggtgttgcattggaagtgg

SEQ ID NO: 71401 - DNA, 227 bp, Glycine max
  Clone ID: 700837514H1
atttcgtttgttgttcaatctaacaaacttctctatatcgtttactttttcaacacaccttacacacaactttatttgagcctttcatataaatatcatggcttcgagggtggtttcggttttggtgatagcgatgatgttgtttgccatgaactgtaactgcactagtgttggccacatgccttcaaccaaagaggaaggtcacgattttcaggaggctaaagcca

SEQ ID NO: 71402 - DNA, 225 bp, Glycine max
  Clone ID: 700837518H1
gttttagcgcagttcttctagatttaaggaagatgggtaaggaaaaggttcacatcagtattgtggtcattggccatgtcgactctgggaaatccactaccactggtcacctgatttacaagcttggaggcattgacaagcgtgttattgagaggtttgagaaggaagctgctcagatgaacaagaggtctttcaagtatgcctgggtgctggacaaacttaagg

SEQ ID NO: 71403 - DNA, 227 bp, Glycine max
  Clone ID: 700837519H1
ccaaatccgtacccaacggaagttttggatttggattgttgtgctctaaaccataatctctgcttcttctactttcttgttccttcttcagcttggattttttgtgaaacaaaaaagggttattgttgagaaaccctaaacctatcctaaaccatggcgcataggttgctgagagaccacgaagcagacggttgggagcgctccgatttccccatcatctgcgaatc

SEQ ID NO: 71404 - DNA, 224 bp, Glycine max
  Clone ID: 700837521H1
tttcagaagctagtgatcaatcatcaacacagagctgagtgtgttgctctgtgaatccaccttcttcttccattggaggaccatttcctcctggaatagaaatactaccacacttttcttttttcacttctctaagttgctaagttaattgctccttcattttttcactcttcgttctcgcgtacccgtgtcacggtaactcgtggtgaagtgttcgaaaatga

SEQ ID NO: 71405 - DNA, 224 bp, Glycine max
  Clone ID: 700837522H1
aacagaaaagaggaagccgatgcagcaaaacaattttttgctggtgattcttgcagtgatcacatagcccttctcaaagcttttgaaggatggaaggaggcaaagcgaagtgggaacgataagcagttttgttgggataatttcctttcccctgcaaccttgcggttgattgacaatatgagaatgcagtttctcaatttattatctgacattggatttgttga

SEQ ID NO: 71406 - DNA, 223 bp, Glycine max
  Clone ID: 700837523H1
tctttatatggaaatgaaagaatctggagtaattaatgaacaaaatattgcagaatcaaaagtagctctagtatatggtcaaatgaatgaaccgcccggagctcgtatgagagttggtttaactgccctgactatggcggaatattttcgagatgtcaatgaacaagatgtacttctatttatcgacaatatctttcgcttcgtccaagcaggatctgaagta

SEQ ID NO: 71407 - DNA, 224 bp, Glycine max
  Clone ID: 700837524H1
attttcttcatccttctctgttctcctagaacttgattacttgaacattccctatgacagatgaggtggttcttctggatttctggccaagtccatttgggatgagggtcaggattgcacttgctgaaaagggtatcgaatatgagtacaaagaagaggacttgaggaacaagagtcttcttctcttacaaatgaacccggttcacaagaagattccggttctc

SEQ ID NO: 71408 - DNA, 225 bp, Glycine max
  Clone ID: 700837525H1
gaccgagctagctagctagcaagcaagcacagagatggaggcaaagcgcggccatgccctcatgtgcttggcacgtgtttcactcttcctctgcgctctaaccctatccgctgctcacggaagcaccacggttcaagacatcgcgagaaagttgaaactcggggacaacgagcttctgcgcacggagaagaagttcaaggttttcatggagaattacgggaggag

SEQ ID NO: 71409 - DNA, 224 bp, Glycine max
  Clone ID: 700837526H1
atagagatgaagctaaaggaagagaacaagctgaaaccaaaggtcaaaccaagaagggtggtggtgaggaacagggaagaagaagagaagaaataggagaagaaaataaacaatccagcctcgaagagatttctaaatgcagagctgaagctgaagagaaagttaaggagagaaaggagagatcaaaacaagcagcaagtaatgaagctgccaaagagagaaac

SEQ ID NO: 71410 - DNA, 223 bp, Glycine max
  Clone ID: 700837527H1
ctacaaacattggtgcttctgccaaggctggcatggagaagaccaaggccactgtccaagagaaggcagaaagaatgacagcacgtgatccggtgcaaaaggagttggcaacccaaaagaaagaggcaaagatgaaccaggcggagctggacaagcaggcggcgcgtcagcataacacggcggccaaacagtccgccaccacggctgggcacatgggacatgg

SEQ ID NO: 71411 - DNA, 220 bp, Glycine max
  Clone ID: 700837528H1
ctcgagcgttcagaagctagtgatcaatcatcaacacagagctgagtgtgttgctctgtgaatccaccttcttcttccattggaggaccatttcctcctggaatagaaatactaccacacttttcttttttcacttctctaagttgctaagttaattgctccttcattttttcactcttcgttctcgcgtacccgtgtcacggtaactcgtggtgaagtg

SEQ ID NO: 71412 - DNA, 224 bp, Glycine max
  Clone ID: 700837530H1
tggaaataattgatctttgaaaatgcagggaggaaagaaagctggagagtccatcaaggaaacagctgcaaacattggtgcttctgccaaggctggcatggagaaaaccaaggccactgtccaggagaaggcagaaagaatgacggcacgtgatccgatgcaaaaggagttggcaacccagaagaaagaggcaaagatgagccaggcagagctggacaagcagg

SEQ ID NO: 71413 - DNA, 227 bp, Glycine max
  Clone ID: 700837531H1
cacatccatcagaaacatacacaatattctctttcaaatggcgcagaacaacaaaatcaccgagacgagttcgggaacgaccagagggcctatgatgtccgccaccgcgatctcgcggtggcggaaccagttcggaagccgaactgccatagaccccgtggcgaactacgcttacgggaacatagggagtggcgggtacggagcgccacccacaggagaaccgtatg

SEQ ID NO: 71414 - DNA, 231 bp, Glycine max
  Clone ID: 700837532H1
acctatgctattccatttcagggtgcttttggaaatattggctctatttagtttgagaaaatatttttctgttttagtttcatgatttcactaattactaataattatatatgttggagatgaggagaagaacgcaaacacactctagagagaaaatgagaggaatggtagaaaatcttattgatcacacaatcacttgtgttctctgtgttagtcataggtatttatacg

SEQ ID NO: 71415 - DNA, 229 bp, Glycine max
  Clone ID: 700837533H1
ccttgctctatactacacagtacacacactagaagaataatggcttccatcctccactactttttagccctctctctttcttgctcttttcttttcttcttatccgactcagtcacccctacaaaaccaataaaccttgttgttctacccgttcaaaatgatggttccacagggctccattgggccaacctccaaaaaagaacccctctaatgcaagtaccagtcctgg

SEQ ID NO: 71416 - DNA, 226 bp, Glycine max
  Clone ID: 700837534H1
caagtctagacttcagaacctcattcatcagtgaaatactgaaatgaataagtgctcctcagattctctgaagattttataatttaatttaattacattagttttaggctatcttgttttgcttcacctgaattagttttgcatctaattgaaattttctcattgattatgtgttcaaattcaaatgtgtgctcagagaattggttgtctatatcactgcgcatct

SEQ ID NO: 71417 - DNA, 226 bp, Glycine max
  Clone ID: 700837535H1
ctgtttatggctctgctgcattgagcagtgcacagcaggtcccttcattgagtaccaagggttctgcatcatcagctttagatggtcgtggaggctatgctttgggtgtctctgattcacctaagtttgcatctggagattatgtctcgtcctcaagccatggatatggtcacaaatctgatcaattgtatggtgacaaaggtttggaatattctggaatagatag

SEQ ID NO: 71418 - DNA, 225 bp, Glycine max
  Clone ID: 700837536H1
cgaaagtgtccaccattagtgcggccaaaacggagatatcatcaatggatgcttctatcaaaagtagctcatcgagagatgctgatcgctccggtgatttttcaatcagcaatgctagtgatttggagactgaatgggttgaacaggatgaacctggggtttacattacgatcagagcattgccaggtggtgcaagagagctcaaacgagtcaggttcagccgag

SEQ ID NO: 71419 - DNA, 224 bp, Glycine max
  Clone ID: 700837537H1
gacagagccggcggttcccgtggcggtttgagaatggccgacaagtacaacctgaagaaccccgccgtgaagcggatcctccaggaggttaaggagatgcagtccaacccttccgacgatttcatgagcctccctctcgaggaaaatatatttgagtggcaatttgcgattagagggcctcgtgatacggaatttgagggtggtatttatcatggaaggatcca

SEQ ID NO: 71420 - DNA, 75 bp, Glycine max
  Clone ID: 700837538H1
cttgattttcttggccacataaagagttatatttatatatactagagtttgctttttgccaagtgatcattccga

SEQ ID NO: 71421 - DNA, 223 bp, Glycine max
  Clone ID: 700837540H1
gtaaagatggtgtgaaccgtttgcttgcttcgtgtacgtatattctcactcggaggcaccgtcgtgagcttttctctttggttcattttgctgaaacctctttgacctttccaataaatcatttgtttcaccctgtcaatgagaggaaccattggaagaaagatcccaaaccccgatttttccaatgccactagaaaaatgctagttccattctctatatctt

SEQ ID NO: 71422 - DNA, 223 bp, Glycine max
  Clone ID: 700837541H1
ccaaaaggggctccttttgggtcctaatgctccttcttttaacccaaagacggttaaggagttgattgcgaaggacatagaagttgagcgtttggggaagctgcgtgatgaggctgtttcgtctggggtttctgatttgagtttgaccgagattgagtcgaggattgtgaaggtgaaaaaggaaattgatgatctctttggtggggagggaaaggagaacaaa

SEQ ID NO: 71423 - DNA, 221 bp, Glycine max
  Clone ID: 700837542H1
tgatgattgatcaatcatcattaaaacctaatgctatgttgcttgatgaagatgatgccagtagcttaacccggatagcacttggcattgattgctttctggctttaaagatgacattattgctgccttacaaaacattacagttgcagtgcctgggtgcagttgaggatagcacaagacaaggcatccctcaaacaaggagcaaagattatgagttatta

SEQ ID NO: 71424 - DNA, 222 bp, Glycine max
  Clone ID: 700837543H1
tctttataaaatagcatttccaatagattttccgacagaaatggtttgtcaggaatttccgacggatagcaaaaattcatcggttaaaatttcttacgatcattttttcgacaaatttcgacagtcgaaaatacgctttttttttttgtagagttgcaaaccatcaaatttcacaacactattgtaatcgtttttgcttaattgttcccttcacttgttttt

SEQ ID NO: 71425 - DNA, 218 bp, Glycine max
  Clone ID: 700837544H1
agcatttagtgacaatgctctggcttaccttgccagcttctgcagaaaactgaaagttctaaatctttgtggatgtgttagagctgcatccgatactgcattacaggctattggacaatactgcaatcagctacaatctttgaaccttggatggtgtgataatgttggcgatgttggagtgactactttagcatatgggtgtcctgatcttaggatag

SEQ ID NO: 71426 - DNA, 225 bp, Glycine max
  Clone ID: 700837545H1
ataaccgcacaaaacaaaaacaaaacaaaacagtgtctttgattacgagagagagagaacaaaacaatcaacacaatggcttctgagcaaatgcctcgcagagagaacaacagcaatagggtgatagagagagaggttcacgttgagacacacagaaaagagtccctccctgataagggaagggttgtgatagagagtgagaagaaggagaaagagagagagttg

SEQ ID NO: 71427 - DNA, 228 bp, Glycine max
  Clone ID: 700837546H1
tggaaagccatggaggttgtttcgcagcctctgtgcacaattcttacccccacgcgcaaacactcatcttctcattccacaacaaatccccaatccttctaaacattttcccttcttatcctttcgcgccaccactctctccacttcttcgcgtttttctcctccacctcttttgttcgcgacgccggaaaaccaattgagcatcggggaaggagagaacaccgatgc

SEQ ID NO: 71428 - DNA, 226 bp, Glycine max
  Clone ID: 700837547H1
cgaggatccagtgggctcatggctcccacaacgaccccaagagttgcgccccctcaaattggaagagatcaaccgtcgattcaattaccagcaatggagaatacctttgtcgggttcttttggaaatgaagtttctactgtgcttggtggaggtctcgtaccaggttctttaactttagttggtggtgatcctggtattgggaaaagtacactgctgttgcagttg

SEQ ID NO: 71429 - DNA, 229 bp, Glycine max
  Clone ID: 700837548H1
atagaaagagagagaagaagaaaagaagaacaaagatgcaatcctcaaaggagaagatgaaaaacatggcaagtgctgccaaggaacaagtcgacatctataaagccaaaatagacgagaaggcagagaaagcaacggcaagaacagaagaggagagggtgatagcccatgagcacgcaaaggcaaaggaagctggagcaaagatggagctgcatgaagctaaagcaag

SEQ ID NO: 71430 - DNA, 223 bp, Glycine max
  Clone ID: 700837549H1
gcagattatcatgctgcagctcgtgcaattggtggatgtcctatttatgttagtgacaagccaggcaatcacaattttgatcttcttaagaagctggttctcccggatggttcggttctccgtgctcagttacctggcaggccaactcgtgattctctatttgtggatccagccagagataggactagcttgctcaaaatatggaacctgaacaaatgctctg

SEQ ID NO: 71431 - DNA, 220 bp, Glycine max
  Clone ID: 700837550H1
acaacacggcagttaagttattagaatctgtgttgtgttgtgttgtgttgagcagagagagagagtgagggataagaagagaatagggttagggttagggttagggttagggtttgattgaggatgccgaagaacaagggaaagggaggtaagaacaggaagaggggaaagaacgaggcggacgacgagaagcgggagctggtgttcaaggaggacgggc

SEQ ID NO: 71432 - DNA, 51 bp, Glycine max
  Clone ID: 700837551H1
gtttcagatgctttcattttaaaaataaaattaggcatataatttcctagc

SEQ ID NO: 71433 - DNA, 221 bp, Glycine max
  Clone ID: 700837553H1
ctttatttgagcctttcatataaatatcatggcttcgagggaggtttcggttttggtgatagcgatgatgttgtttgccatgaactgtaactgcactagtgttggccacatgccttcaaccaaagaggaaggtcacgattttcaggaggctaaagccaagacaacacaaactgcgaacaaggccatggaaactggtaaagatgggaaagaagccgcagagt

SEQ ID NO: 71434 - DNA, 220 bp, Glycine max
  Clone ID: 700837554H1
ctgactctgatattcctccacttcctgctcgtctggtcactgatgaagacctgaaacagttctatgaagcaatgaagatatccgatgtgcctaaggctgaggtaaaatctagtggagtaaagagaaagggtggatatattgggggccttgatactcaacattacggcaggggaaaacgtgcaagagaggtacgttcctatgaagagcaatggacagagga

SEQ ID NO: 71435 - DNA, 221 bp, Glycine max
  Clone ID: 700837555H1
gaggaattttagtggacaaaactggagattggatcacacttatacaaaattctccaattagtaacttgttgagagttgctgcttggaagaaaggctgtttaatggttaagattgtgatgtctggaaatgcagcagtcaaaaggagtgattgggcctcattggtacaagtctttttaacaaacagcaacagtacagagcattttgatgcttgtaagtggaca

SEQ ID NO: 71436 - DNA, 218 bp, Glycine max
  Clone ID: 700837557H1
ttagaattgaggaacatttgatatatcatctcacatgagtttgttttcttgtttcttagatgagggttgctggtttgtcttgtgtttccatgcgttgagtctgaaaatgatttttatgtcctttggttttaccagatgatatctgcaagagatccaggatttctttcatgagcttgatctatctagtttcttagttgatgactatttatctaggtaac

SEQ ID NO: 71437 - DNA, 219 bp, Glycine max
  Clone ID: 700837559H1
atcttttcttcctttccccgtttgtttcccttcttctctcagggtttgagattataaagacttggtggaagggtaagctaaagttgaagagttgaggggaatacaagaagagaaggaggttgaggtactcaataaagttttgatttgtttgaatcggggggcttgatgccaatgttggatacagttgtatgtgctagaaacagtcaacagtggcttcat

SEQ ID NO: 71438 - DNA, 222 bp, Glycine max
  Clone ID: 700837560H1
tattttttcatgcagaaacgagggatcatctaattaaaccagctttcatcagggtgtgggtgatttattgtaagctttttcttattatcttcgattgtgtttacacgtgtgtgttaaaggtggcgaatcctaaagagaagggaaatgaggttgatgacaataaggaattgatattattccatgaagggataatgaacaaccctacattgtcaaggctatttc

SEQ ID NO: 71439 - DNA, 220 bp, Glycine max
  Clone ID: 700837561H1
ctcaggtgcgtcctgcaacaactctgttggctgatgggtgtacatatttgtatgctatggtgcatgatagttcagtgtctacaataccaggtgattttatcattggtgttaagttgacaaccataaacaatatgtgtgcatatgggctcaatcctggtatttcaggttctcgtcttttgggcaccattcctcagtctatttcacagcaaactgtttggaa

SEQ ID NO: 71440 - DNA, 219 bp, Glycine max
  Clone ID: 700837562H1
ctttgttcactcttcttctcttgcggctagggttttagcgacttcttctagatttaaggaagatgggtaaggaaaaggttcacatcagtattgtggtcattggccatgtcgactctgggaaatccactaccactggtcacctgatttacaagcttggaggcattgacaagcgtgttattgagaggtttgagaaggaagctgctgagatgaacaagaggt

SEQ ID NO: 71441 - DNA, 228 bp, Glycine max
  Clone ID: 700837564H1
gagctgagaaaacccccaaccccaacctcaaccttaacctctcctcactttcttttcaaccagaactatgattaagctttttaaagtaaaggaaaaacagagagaactggcagaaaatgcgagtggcggaccacccgttaagaagcaaagtgccggcgagttgcgtcttcacaaagatataagcgagctgaatctaccaaaatcatgtaccatgcaattccccaatgg

SEQ ID NO: 71442 - DNA, 225 bp, Glycine max
  Clone ID: 700837567H1
attctctttctctttcatcatttggcttaaaacacacacacaaaaggtggccaaaatgagcagtgtctgtgccaagcagcacaagttttacccctctcaccaactcctttctccaaagaaaaccctcagagaaattgacatccctccaaggaagctcctcactcgccgtgccgccgcatgcgtcggcggcaccgacgtgtactcctccgaggagaccatgctgca

SEQ ID NO: 71443 - DNA, 222 bp, Glycine max
  Clone ID: 700837568H1
gtggaaccccgtgaagaacgagaggtccttgagcggatgatagccaaaatgtgtttacttgcagttccatcttccctcccctgttaattcaccaaacaaataccaaattgcatcacggattagttgatccctcctttgaaaacaaaacgatgccgattttcaaaaccccgttcaacggctactccgtaaagttcagccccttctacgagaaccgcctggccg

SEQ ID NO: 71444 - DNA, 220 bp, Glycine max
  Clone ID: 700837570H1
cactcactcactcactcactcactcactcgcaagcaaaaagaaagaatcccaggcgaggagaaagatggaggggaaggagcaggatgtgtcgttgggagcgaacaagttccccgagagacagccgattgggacggcggcgcagagccaagacgacggcaaggactaccaggagccggcgccggcgccgctggttgacccgacggagtttacgtcatggtc

SEQ ID NO: 71445 - DNA, 72 bp, Glycine max
  Clone ID: 700837571H1
gataaatttgggttccaggaagagaacaaatttgattctcttaacttgagcatgttgaacctggactctaaa

SEQ ID NO: 71446 - DNA, 219 bp, Glycine max
  Clone ID: 700837572H1
gtaataaatggagtgctgcacccaaaacgggcttcattgacatcacaatttctaaagatttctatcgaatatacagtggtctccaaattggatacttggaagaatctgcccaagtgccatcaaatagtcatgaaaggctgggagattcaattgcttgggggggctgcactataatttatttgcttgggcagcagctgcattttgagctgtttgactttt

SEQ ID NO: 71447 - DNA, 216 bp, Glycine max
  Clone ID: 700837574H1
gaagaacctcactgaagaattaaggagagaaaaatcaacatcaaagttataacgatgaagcccattgacgataaacaagagacagtgacgatcagagcggtgagccacgacgaggaagggagaaagagggtggaaaaaatagagctcaacactcacaacatccacactataaagtacgtcgagaagaagctcatcaacaagggtgtgcagcgcaag

SEQ ID NO: 71448 - DNA, 218 bp, Glycine max
  Clone ID: 700837575H1
ggcttatggtggatacctaggcacccagagacgaggaagggcgtagtaagcgacgaaatgcttcggggagttgaaaataagcgtagatccggggattcccgatataggtcaacctttcgaactgctgctgaatccacgggcaggcaagagacaacctggtgaactgaaacatcttagtagccagaggaaaagaaagcaaaagcgattcccgtagtagc

SEQ ID NO: 71449 - DNA, 219 bp, Glycine max
  Clone ID: 700837577H1
gcgaggagaaagatggaggggaaggagcaggatgtgtcgttgggagcgaacaagttccccgagagacagccgattgggacggcggcgcagagccaagacgacggcaaggactaccaggagccggcgccggcgccgctggttgacccgacggagtttacgtcatggtcgttttacagagcagggatagcagagtttgtggccacttttctgtttctctac

SEQ ID NO: 71450 - DNA, 221 bp, Glycine max
  Clone ID: 700837578H1
cattaaagaacaacaacagaagcagaaacaggaagaggaacctttggaagtgcaaaggtacagagctgaattgtctgaagacgatgtatttgtaattccagcagcttatccatttgtcgtcaacgctacctcaaacctcaatttccttgacttttggtatcaatgctgagaacaaccagaggaacttccttgcaggcgagaaagacaatgtggtaaggcag

SEQ ID NO: 71451 - DNA, 226 bp, Glycine max
  Clone ID: 700837580H1
tctccctcaatacaattttcatcctattcctcagatcagataaagaagatgcagaagggtagagaagttcgagacaataacatttttgaaccaagacggtttgaagattttggcgactttggatttcatagaagtaggatgccaagtctttttggtggcagggatccatttgatgatccctttttcacagacccgtttgatagcttgtttggtccaagttctgcat

SEQ ID NO: 71452 - DNA, 221 bp, Glycine max
  Clone ID: 700837582H1
gacagcatcaagcaaccaacacaaactgatttctcatttcgtagcatcaaccgctaactatccagatactaattttcgctttggtttggttcaattctgtccgcagacatggttttcaggccaatgagtggtaattggttagcactgttaagaaacagttatggaggtaaagccgcgtacgcaacctcaacagcaccaaagatgaaagcgtatgcagctgc

SEQ ID NO: 71453 - DNA, 222 bp, Glycine max
  Clone ID: 700837583H1
agattgtggaatttgtgatcacacaacataagcatatatatagaaagatgtcaggggcacaaggagcacaaccaaaggagtcaaaaacagcaacaacatatgagtcagtagaaggaggagagaaccgaacaaggactgacttgctttcaagggaggatcaaggctgcattcaagtggaaaaacttcaggagaaggtccatgatcctgctggcaaaggtggtc

SEQ ID NO: 71454 - DNA, 217 bp, Glycine max
  Clone ID: 700837584H1
gtttccttcaaggggtggtcatggcattggtggaagcatgcttgtagggcctaatgacccccgttggtttggtggtattggtggagatcctgcttttcctggaggattgccgagagccagaaagaaacgaggttagcgagacaacctcggcgtagttgtggccttacctcaacccccctccccaaaaactattctttcaaaacgacgacggtgttag

SEQ ID NO: 71455 - DNA, 217 bp, Glycine max
  Clone ID: 700837585H1
cttctgccaaaaccaatgccaccacccattctctagtttctaccacactctatttcaacaaccatgtcactatacgacgccgctttcgtcgacacagagctctccaaacgcacttccatcttcggcctccgcctctgggtcgtcatcggcatcctcgtcggatccctcatcgtcatcaccctcttcctcctctccctctgcctcacctcccgccgcc

SEQ ID NO: 71456 - DNA, 218 bp, Glycine max
  Clone ID: 700837586H1
tcaatttttttatcttcatttgcgtgcttctgcttttttgttagagataaaaagagcatgtgatattgtacattgaataaaattgtaacttgtttgtgatggaaatcttcaggttgtgttggctgctcagttgttttgttggactggacagtttattggtcatggcgtgtttgaggtaagggattgatgccattacaatatgcataatgcagaggttt

SEQ ID NO: 71457 - DNA, 218 bp, Glycine max
  Clone ID: 700837587H1
gactggctttcctttggttgatgcaggaatgagagaactttggcaaactggctggattcacaacagaataagagtaatagtttccagttttgctgtgaaaatgttgcttctaccctggaaatggggaatgaaatatttctgggacacacttcttgatgctgaccttgaaagtgatatcttgggttggcagtatatctcaggaggcttaccagatggcc

SEQ ID NO: 71458 - DNA, 219 bp, Glycine max
  Clone ID: 700837588H1
gctgaatttccatcagccaaacctccaattggtgtcttttttgcagcagttgctcctcgcctgcagcctagattttattcgatctcctcatctccaagaatggtgccaaacagaattcatgttacctgtgcattagtacatgagaaaatgcccaccggaaggattcacaaaggagtgtgttcaacatggatgaagaattctgtaccattggagaaaagc

SEQ ID NO: 71459 - DNA, 210 bp, Glycine max
  Clone ID: 700837589H1
gtgctaagtgcaaaccacgccagaatttcattatttccattaactcccgattcggcttaaattggaacaccaccaattttcgtgggaaccaacaaaacaaaaaaagggtccaattttttgaaaattattaccatcattcatattcatcaacgacccctcttctgtgcccacttccaaatcttctcctctcgctatgggttgcggctcctc

SEQ ID NO: 71460 - DNA, 217 bp, Glycine max
  Clone ID: 700837591H1
atcacacacaactacaagaaagaacttccttataaccaaaaccaacaacaactatggcaagttatcagaagcactacgatgatcagggtcgcaaggtcgacgagtatggcaatgttgagaggcaaactgacgaatatggcaacccggttcatgccactagtgtcacttatgtagccaccaaaagtgttggtggctacaatgatgacgctaataagca

SEQ ID NO: 71461 - DNA, 219 bp, Glycine max
  Clone ID: 700837593H1
cgtgcattgaaaaggaagaagcgcatctggtttggtcccatatgatggccaggttcatctccaacaagacgaagacccacttactccgtcactccgaatcggcgaagggggtgatagtgtgccatcgccaccaatcctcggaagcaacgaaggcgaagtgggtggagatcgatggagtgaagctgttggaggagcacgtccagcgtgttatggtgaaga

SEQ ID NO: 71462 - DNA, 219 bp, Glycine max
  Clone ID: 700837594H1
gagtaatcgagaaagagaagaagcatatatatcaaaatggctgcagagatggagagggagtcattgataactgaagctcctaatgcaccagttactgcacagagaagggtcagaaatgacttagaaaattctctaccaaaaccatacttgccaagagcattgaaagctcctgatacgggtcacccaaatggaacagcaggccacaggcaccacaactta

SEQ ID NO: 71463 - DNA, 223 bp, Glycine max
  Clone ID: 700837595H1
tctctctctccattccgtgttttcagctccggtaacctctccttctccgccgccgttgctatctccgccgtgaccttccatccctcaacgccccacagatcttcaatttgattgcttgggtcaacaatttctgtcattctcaatcatggcaactagacttcagtttgaaaataattgtgaagttggagtcttctctaaactcaccaatgcttactgtttggtt

SEQ ID NO: 71464 - DNA, 225 bp, Glycine max
  Clone ID: 700837596H1
ccgagctagctagctagcaagcaagcacagagatggaggcaaagcgaggccatgccctcatgtgcttggcacgtgtttcactcttcctctgcgctctaaccctatccgctgctcacggaagcaccacggttcaagacatcgcgagaaagttgaaactcggggacaacgagcttctgcgcacggagaagaagttcaaggttttcatggagaattacgggaggagct

SEQ ID NO: 71465 - DNA, 255 bp, Glycine max
  Clone ID: 700837601H1
attaccacacgaagtgatgtagcgttgccattctcatcctcttctttctctctctaccattgccatggatccctacaagcaccggccatccagcgccttcaattctcccttctggactacaaattctggtgctcctatttggaacaacaactcctctttaaccgttggagctagaggtccaattctgctggaggattatcatcttgtggagaagcttgcaaattttgatagggaacgtatcccagaacgtgttgt

SEQ ID NO: 71466 - DNA, 253 bp, Glycine max
  Clone ID: 700837602H1
tgattaatcagttccgtgatttatgctttgcaaagtatcttgagacatttcaggatatatgggaagcaatatctgagatgctgttgcacccgcattcatggatacgcaacagatcagttcgccttgtagccctatactttgcacgtgcaacagatgttagcagagaaactaatggaagctccttaagaagttattttattatgagtccaagtagactatttttaatagccacttctctttgctgccaactaaa

SEQ ID NO: 71467 - DNA, 248 bp, Glycine max
  Clone ID: 700837604H1
atccaaggctttaaaaagtggtctgacatttggaagctttgatactttaggcccaagtgaaaagtccaacagtgaaactgatggtgacaataatgcttctcctgcccttgaattgagtgacgaagctgcaacttcaagcaatcaaagtgcatccttgactgcacaaggagatcatcttgattatccacattcttcatcttatttgattgaaaaggcaccagctacaaatggcaatcctataactggta

SEQ ID NO: 71468 - DNA, 248 bp, Glycine max
  Clone ID: 700837605H1
agaacctaagtgagaaacaaagaaaggaaataattgatctttgaaaatgcagggaggaaagaaagctggagagtccatcaaggaaacagctgcaaacattggtgcttctgccaaggctggcatggagaaaaccaaggccactgtccaggagaaggcagaaagaatgacggcacgtgatccgatgcaaaaggagttggcaacccagaagaaagaggcaaagatgagccaggcagagctggacaagcagg

SEQ ID NO: 71469 - DNA, 247 bp, Glycine max
  Clone ID: 700837607H1
cttagaaagaaaaaaacttaaatcaaaatacttaatagcatggcgatacatttatacaaaacttctaccccaagcacacgcaatggagccgtagacagtcaagtaaaatccaatccacgaaatcatttgatctatggacagcatcgttgtggtaaaggccgtaatgccagaggaatcattaccgcaggcatagagggggaggtcataagcgtctataccgtaaaattgattttcgacggaatgaaaa

SEQ ID NO: 71470 - DNA, 248 bp, Glycine max
  Clone ID: 700837608H1
cacacacaactactacaagtacttccttacaatcaaaaccaacaacaactatggcaagttatcaaaagcactacgatgatcagggtcgcaaggttgacgagtatggcaacgttgagaagcaaaccgacgaatacggcaaccctgttcatgctgctagtgtcacctatgtagccaccagaactgctgctggtggttacagtgatgacattaataagcaacatgataccaccaatgcctacggcgtagac

SEQ ID NO: 71471 - DNA, 245 bp, Glycine max
  Clone ID: 700837610H1
tttacaccggagcttaggcccacagtatcattgtcgtcttcaagcgttcatacttcatagtatcctctctctctctctctgcaactgcaagagatgatggagatggaggaagcagagacgatagatctatacgagcttcaatattcagacttatcttcaccttcaacttcatccatagtcgattccattatggaagccctaggacccactggcccaggcctcctcgccgtcaccaacgtccccaa

SEQ ID NO: 71472 - DNA, 245 bp, Glycine max
  Clone ID: 700837611H1
atcaccctctctaaaacaatcccatattctcttgtctatttgattgcccttgtgttccctttacaatttaaatttcttttacttgttttaatcattttccattcacaacacatatcatcatcaacatgcctgaggctcctggagactccaccaaagactatgttcttgaagagaagaacaagaaaattttggacttcatagaggatgtgaccaacaacgcagatgaagtccagaagaaggttctc

SEQ ID NO: 71473 - DNA, 245 bp, Glycine max
  Clone ID: 700837612H1
tgtgaattatggaatcctgcttgcacaaaagcaatgactatgtcatttaatccaaatccgtgttctgatgcatggagtttggaatttctgaagcgtaccggatttcattgtgatatcatttgtgtcactggatggactgccactccaatgcaggatgttcaggttacaattgattggtttatttcctctcaggaatgtgttcccaggacctattgtgttttaaatccacaaaatccttttgtgtt

SEQ ID NO: 71474 - DNA, 247 bp, Glycine max
  Clone ID: 700837613H1
gaaagaggcaaagatgaaccaggcggagctggacaagcaggcggcgcgtcagcataacacggcggccaaacagtccgccaccacggctgggcacatgggacatggccaccacaccaccggaaccgggactggaaccgccacgtattccaccaccggggaatatggtcagcccatgggggcccaccagacgtcggcaatgcctggccatggaaccgggcagcccacgggccatgtcaccgaagagtgg

SEQ ID NO: 71475 - DNA, 246 bp, Glycine max
  Clone ID: 700837614H1
ggatttgaaaaaatccttagataatgttgcaattgaagtagataccaaaggaagctctctcctagaacaaaatgaaggaggtgcagatgaagattaccaatctattgtctggtctcatgaagaaatgagcatgggaagttactgcagtgatggggaacaagacatgggggatgttgacatggatgactcggattccaaaacctttgacatggagtgggaggaggagcggttgcacggattcgatca

SEQ ID NO: 71476 - DNA, 249 bp, Glycine max
  Clone ID: 700837615H1
ttcaaaccttgctctatactacacagtacacacactagaagaataatggcttccatcctccactactttttagccctctctctttcttgctcttttcttttcttcttatccgactcagtcacccctacaaaaccaataaaccttgttgttctacccgttcaaaatgatggttccacagggctccattgggccaacctccaaaaaagaacccctctaatgcaagtaccagtcctggtggacctcaatgga

SEQ ID NO: 71477 - DNA, 248 bp, Glycine max
  Clone ID: 700837618H1
ctacattgtctgcattgctgggaagtaggttgggaatcacgacagtggtatcgaccgattctattcggcacatgatgagaagttttgctaatgagaaagaaaaccccttgttgtgggcttctacgtaccatgcaggggagtgtttggaccctgttgctgttgcagaagcaaaggctagaaggaaagcaaaaaagctggctggtgtgtcacattcagtttccaaggaagatgtaactgagggtcacaat

SEQ ID NO: 71478 - DNA, 246 bp, Glycine max
  Clone ID: 700837621H1
aaacagaaaaaatcaccctagaacctggagacatgatacacataccagcaggcacaccactgtacatcgttaacagagatgagaatgagaagctcctccttgccatgctccatatacctgtctctactcctggaaaatttgaggaatttttcgggcctggaggacgagacccagaatcggtcctctcagcattcagctggaatgtgctgcaactgcgctccaaaccccaaaaggaaagttagaaag

SEQ ID NO: 71479 - DNA, 246 bp, Glycine max
  Clone ID: 700837622H1
gaaaatagcagttaagatcacaaatttcaccaatatccctgctgatgagaaccaaattgccgcatatttagtaaaaaatggtccacttgctatgggcgtgaatgcaattttcatgcaaacatacattggtggtgtctcatgccctctcatatgtagcaagaaaaggctgaaccatggtgtgttacttgtgggatatggtgcaaaaggcttctcaattcttaggcttggcaacaaaccatactggat

SEQ ID NO: 71480 - DNA, 244 bp, Glycine max
  Clone ID: 700837623H1
ggttgctatgaggtttcatcagtaccaggtggtgggaagggctcttcctaccgaatccgatgagcatcctaagatctaccgcatgaaactctgggcaactaacgaggtccgtgccaaatccaagttctggtattttttgagaaaattgaagaaggttaagaaaagcaatgggcaagtgctagccataaatgagatttttgagaggaatcctaccaagattaagaattatggaatttggctgcgg

SEQ ID NO: 71481 - DNA, 245 bp, Glycine max
  Clone ID: 700837624H1
gcaagttttggtggctctaacatagatccaactgcctgggaggataaaaaatgcaaaggggaatcaaggtttccagctcaggtagtagaatataggactttgaaatggaggagaccatgtatgagctgtatctgtacatcaatgaatacaacagaggatttgtgcctcctcttccttgtaggtaagaatccgtgtcaggaatctctgcaaggcattggaagaggattctatcaggccagtgttgc

SEQ ID NO: 71482 - DNA, 243 bp, Glycine max
  Clone ID: 700837625H1
gaccgagctagctagctagcaagcaagcacagagatggaggcaaaacgaggccatgccctcatgtgcttggcacgtgtttcactcttcctctgcgctctaaccctatccgctgctcacggaagcaccacggttcaagacatcgcgagaaagttgaaactcggggacaacgagcttctgcgcacggagaagaagttcaaggttttcatggagaattacgggaggagctactccacagaggagga

SEQ ID NO: 71483 - DNA, 245 bp, Glycine max
  Clone ID: 700837627H1
cttcttcttctcactcttcaccaatggccaaagagcgagcgaagaaactctacgtagccctactcggaaactacgccgccgaactcaaactcctcctcaccagtctcctcctcctctgtgccgtcgccactctcctccagttcctcccttcccgcttcaccatctccgcctccgacctccgcgtctgcatttcacgcgtcactcaaactacccaaactatccctaactcaactaatgcgacgtca

SEQ ID NO: 71484 - DNA, 243 bp, Glycine max
  Clone ID: 700837628H1
caagaaccacaacctttggaagcttatgatcttgtctctgatctttctgtggatggcaagggtatcccctgggacaaacaagatcctggggaagaggctatcgaatcactctcagcagaactcaagctttatgggaagagaggagtctataaagataccaagttgcaggaacaaggtggaaagatatttgaaagagatgggatactatacaactgtgccttctctgtttgtgaccaagggcga

SEQ ID NO: 71485 - DNA, 244 bp, Glycine max
  Clone ID: 700837629H1
ctcattcgctaatttcaccaatttctattttcataactttctctgcagtctcttcacctttatgttaatgatgttatgtgtttagagagaaagagaacaagcatagttgagcttgattgtgttcttcaacattagaacaagaaaagaaagacaacaacatggaaggaggaggagtagaagttgatgcctctgctttcagagaatgcttgtctctgtcatggaaaaatccttacgttcttcgcct

SEQ ID NO: 71486 - DNA, 247 bp, Glycine max
  Clone ID: 700837630H1
ccttgaaccattagaccaaccaggaccccaacacaccactgtcaaattgtttgttgtcaatccacaaacaaagttagaaccagaaacaattacctcaaaggaaactccttctgtaacattactcaccgagaattgcccatttccaccccaacacacaaccgaaccattcgactctctaatcgcacaaccatgctcagcaccaagtgccaacccagaatactcaaaagccccaccttgaggaatatca

SEQ ID NO: 71487 - DNA, 247 bp, Glycine max
  Clone ID: 700837631H1
atctcttccttctctctcctcatttccaaagttcccaactttcctaacccgaggtcagaatcatcattcatcattcatataataataacaataattcctttctaattaattgtttttgttttcaatttcttattacaaattctttcaattgtgcaatttggaattgaaatttgaacagatctggtgaattgaattgaaattgaaattgttgtcgtggttgctgctgctgcactgcaaggaatgccgc

SEQ ID NO: 71488 - DNA, 252 bp, Glycine max
  Clone ID: 700837632H1
ccttgctctatactacacagtacacacactagaagaataatggcttccatcctccactactttttagccctctctctttcttgctcttttcttttcttcttatccgactcagtcacccctacaaaaccaataaaccttgttgttctacccgttcaaaatgatggttccacagggctccattgggccaacctccaaaaaagaacccctctaatgcaagtaccagtcctggtggacctcaatggaaatcacttg

SEQ ID NO: 71489 - DNA, 243 bp, Glycine max
  Clone ID: 700837633H1
ttaatctagggaccatggataatgttggcacaattcaggtatgttccctaaatgaaacgatgactgactcaaaagggggagggattatgagattacgtacacttggatgaggataagacagtcggtgtccttttactgggtttgtattagcagtttcgggtgctactgcactttgggcaaaaccaatcctcctcagggacagctgttagtggaggatcgcagcaatcgatatgggtaccgatt

SEQ ID NO: 71490 - DNA, 251 bp, Glycine max
  Clone ID: 700837634H1
ctcaccccttccccttcctcctcattttcccccacaccactcatctcaacaagtggcgacattccctcatcaacaacaacctcaccaaatctcattccaccaaccaacggcgatctttcccattcatcgttaatcccattctccccattatcattgttactactcaaattgttattattattactattaaccctagacactacctgaagctcaattctggaagtttcggaatccgaaaccccggcgacgat

SEQ ID NO: 71491 - DNA, 249 bp, Glycine max
  Clone ID: 700837635H1
agcccgcgaatatttactcttttattagcaataaaaatatacagataaatgaagaggtgaaagaaagagagaaaaaaaatcaatgatatagaattctaatatgtaaaggtctatgggttatctcataaaaggtagtgtaataaagcatcaatctaaatcaattcatatctatttatatatgaattaatttataacgtaaacaaattaagagctctgaatcaataaaaactgagaatattgattcacgaa

SEQ ID NO: 71492 - DNA, 248 bp, Glycine max
  Clone ID: 700837636H1
agggctaccgctgagtttaagcatatcaaacgaagagagcggaacaaagaggagaaacaaagaagcagtccaagaggaaaagtagaggcagagaaagcaagaccaatggaagaaacaaaggtggaagctaaaggaagagaaaaagatgtaaccaaagagggtggtgttgaggaacaaggaagaggaagaaaagaaaatgaacaatctagcttgaaagacatttccaagtacagagctgaagctcaaca

SEQ ID NO: 71493 - DNA, 236 bp, Glycine max
  Clone ID: 700837637H1
gcgcctcaacggaaacgggcttttgcggctacggtggagcatgcaggagcgacgtcgtccagccaggggatggtgagaggaagcggaggggacatagttcaagttgaaggcggtcacattgtgcgctccacagggcgtgacgaacgtcacagcaaagtgttcaccgccagaggctctcgtgacggacgggtgggctccccggagcacaccggcatcctgttctacgacgtactgga

SEQ ID NO: 71494 - DNA, 245 bp, Glycine max
  Clone ID: 700837638H1
agatatatacatatatacgagagagtgagtaatcgagaaagagaagaagcatatatatcaaaatggctgcagagatggagagggagtcattgataactgaagctcctaatgcaccagttactgcacagagaagggtcagaaatgacttagaaaattctctaccaaaaccatacttgccaagagcattgaaagctcctgatacgggtcacccaaatggaacagcaggccacaggcaccacaactta

SEQ ID NO: 71495 - DNA, 245 bp, Glycine max
  Clone ID: 700837639H1
agaagacttgggttatttgcaacaaacagtggaaacattggattataggttggctgaattgagttctaagcaggattatgcaaattatggattgtcatatctcatcgactatgtacacggaaaaagccagaaaaagcctgaattgttgcaggagcaactgaaactttcagggaagtcccctaatttgatcacatataaaggaactccaaatctaatgggtcttaaagacattgcggaaacattgt

SEQ ID NO: 71496 - DNA, 243 bp, Glycine max
  Clone ID: 700837641H1
aaaaaataccaaccatggcaaccatttctactgatcaaccaagaggatcctactcctatggaacctcctatggagcaccctatggaaccacctatgagaccaacagcagcattaacaaccctccttcacgccaaaccgtgaagttcataactgctgcaactattggcatcacactcttactcctgtctgggttgaccctcacaggcactgtcataggtttgatcattgcaacccctcttcttg

SEQ ID NO: 71497 - DNA, 244 bp, Glycine max
  Clone ID: 700837643H1
gggcaatattggagagaaggctcaagctgcaaaggagaagacccaggaaatggcccaagctgcaaaggagaagacccaacaaacagcccaagctgccaaggacaagacttgcgacacttcccaagcggcaaaggagaagacccaacagaatacaggagctgctcaacaaaagacctcagagatgggccagtccacgaaggaatcggcccagtcagggaaggacaacacccaagggttcctgcag

SEQ ID NO: 71498 - DNA, 242 bp, Glycine max
  Clone ID: 700837644H1
cacaactactacaagtacttccttacaatcaaaaccaacaacaactatggcaagttatcaaaagcactacgatgatcagggtcgcaaggttgacgagtatggcaacgttgagaagcaaaccgacgaatacggcaaccctgttcatgctgctagtgtcacctatgtagccaccagaactgctgctggtggttacagtgatgacattaataagcaacatgataccaccaatgcctacggcgtag

SEQ ID NO: 71499 - DNA, 244 bp, Glycine max
  Clone ID: 700837645H1
gttgaggttacatggaaatcaaagctcaaagctcagtttccaagccccaacgagtactcatcttttatgggagacttctcaactgcaactggaattgctacattcataatgatgcttctaagtcaatttatatttgacaaatatgggtggggagttgctgccaagatcacccccaccgtcctgcttttgacaggagttggtttcttttctcttatattatttggtggcccaattgctcctgtta

SEQ ID NO: 71500 - DNA, 245 bp, Glycine max
  Clone ID: 700837647H1
cgagcggccgcccttttttcggctcgagttccaaataaggatttatagtactttttaaatagttatttattattattattattattattattatttagtttgattcagtgagacacattcatgcagtcaatactcaatacttataaccgtataatgaagatctgatggctaatatcttaaacgtgtgcttctgatatgatccatcgtccatcgtccatcgtccatcgtcctccaacggttacgaa

SEQ ID NO: 71501 - DNA, 249 bp, Glycine max
  Clone ID: 700837648H1
attgccttggatgttgccagagggatggagtatctccatactctggctcaccaaagcttcattcacagagatcttaagccgtcaaatatcttgcttgctgatgatttcaaagcaaaagtctccgattttgggttggtaaaacttgctcctgaaggggaaaaagcatctgtagtgacccggcttgcagggacgtttggatatttggcgccagaatatgcagtgacaggaaaaatcactaccaaagcagat

SEQ ID NO: 71502 - DNA, 250 bp, Glycine max
  Clone ID: 700837650H1
ctacattgtctgcattgctaggaagtaggtttgggatcacggcagtggtatcgaccgattctattcggcacatgatgagaagttttgctagtgagaaatagagccccttgttgtgggcttctacgtaccatgcaggggagtgtttggaccctgttgctgttgcagaagcaaaggctagaaggaaagcaaaaaagctggctggtgtgtcacattcagtttccgaggaagatgtgactgatggtcacaattc

SEQ ID NO: 71503 - DNA, 235 bp, Glycine max
  Clone ID: 700837651H1
ccactggaggtttcgctctctcagtttcttttccccaaattgtttttcatctaacaatttactttgcagaaccctaaccctagccccttcgcctaccttgtaaccttcctttcgatccttcatctcgcagacaatgggtgaaactaaggacgaagcatacgaggaagagcttctcgattacgaggaggaagacgacaaggcccccgactccgccggagctaaagtcaacggcgaa

SEQ ID NO: 71504 - DNA, 244 bp, Glycine max
  Clone ID: 700837653H1
gaacaagggattctcttcatccaagttcgctagtaggacatattgtaatggcaacagtggaagcatcccatgaagctatggctacggtggccaacaaggcaccaatcactgctgagagaaaggtccctgaggacttggacagcaaactccccaaaccatatttgcctagagctttgagtgcccctgacacagagaatgtgaatggcacgtggggccacaaacacaacgacatgtccgttcttca

SEQ ID NO: 71505 - DNA, 243 bp, Glycine max
  Clone ID: 700837654H1
gtcaaagtgaagaaattcaaccaagcgcgggtaaacggcgggagtaactatgactctcttaaggtagccaaatgcctcgtcatctaattagtgacgcgcatgaatggattaacgagattcccactgtccctgtctactatccagcgaaaccacagccaagggaacgggcttggcggaatcagcggggaaagaagaccctgttgagcttgactctagtccgactttgtgaaatgacttgagagg

SEQ ID NO: 71506 - DNA, 241 bp, Glycine max
  Clone ID: 700837656H1
attactgtcatccagattgatgaagctgctctaagagaaggtttacctctgaggaagtctgaggaggctttctatctaaactgggctgttcactcatttaggattaccaactgtggtgtggaggacactactcagattcacactcacatgtgctactccaacttcaatgacatcattcactcaatcatagacatggatgctgatgtgatcaccattgagaactctagatcagacgagaagt

SEQ ID NO: 71507 - DNA, 241 bp, Glycine max
  Clone ID: 700837658H1
aaccacctcgattctcttcttcggaggttgctaccgaattccctttctctctcattttctatgctaacgtagagatccagaaaccatttccgaaaccacatccctatttccctctgtttccgcgattaagatggagggaaaaactgaggatgaagtggtggatattgagagtgcttctagtggttcttccaatgatgattcagatgatgaggaatctttagttcctgaaatagatgatgga

SEQ ID NO: 71508 - DNA, 242 bp, Glycine max
  Clone ID: 700837659H1
agctgtcccagattttaacatgggagccatggaaaacaagagcttgaatattttcaattcaaagcttgtattggcctctccagaaactgcaactgatgcagattatgctgcaatattgggagttattggccatgagtatttccacaactggactggcaacagagtgacatgtcgcgattggttccagcttagcctgaaggaaggtctcactgtttttcgtgatcaggaattttcatctgaca

SEQ ID NO: 71509 - DNA, 241 bp, Glycine max
  Clone ID: 700837660H1
atctcctcttctcttccggccatggcctccttgctccgctctctccgccgccgtgatgtcgcttccgcctccctctccgcctatcgctcggtaccatgtccacctcttctatgcttccttctttttctttattttgaatatacttgtgctggttactccatgttacctaggttttctcgatttgatcctattatgccttaatccagttatgtcttgcttttgttcggattttggctcgagt

SEQ ID NO: 71510 - DNA, 245 bp, Glycine max
  Clone ID: 700837663H1
gaagatatgttgcaactgcggtgacttcagttcatgaaatggagaatggtttcaatatatggtctttcaatggcaagcatctatatcggattctgaaggatcacttctttcagttcttatggagaccaaggccaccatctttcttgactccggagaaagaggaagagattgcaaagaacttgaagaaatacagcaagaaatacgaggcagaagatcaagatgtttccttgctgctgagtgaacag

SEQ ID NO: 71511 - DNA, 249 bp, Glycine max
  Clone ID: 700837664H1
cacacttcttcgccgtttcagctgaagagccatccgcaggtaagcaatggttaagcataataatgttatccccaatgggcacttccggaaacactggcaaaactatgtgaagacttggtttaatcaaccagcccgaaagaccagaagacggttggaagaaggctgtcaagattttccccaggcctactgctggatctctcaggcctattgttcatggccagactctgaaatacaacatgaaagtcagag

SEQ ID NO: 71512 - DNA, 247 bp, Glycine max
  Clone ID: 700837666H1
gttacagggtagatgtggatcatgctgggctttcagcaccacaggatctatagaaggaagccaattttcgtgccaacggaaagctcgtcagtcttagtgaacaacagctccttgactgtgacaacaaatgtgacataacagaaaagacttcatgtgacaatgggtgtaatggaggtcttatgacaaatgcctacgattatttgctcgagtctggtgggttggaggaggagtcttcatatccctacac

SEQ ID NO: 71513 - DNA, 246 bp, Glycine max
  Clone ID: 700837667H1
gtgagagcttctgatgatttttaccctcgtgatcctgcttcccataccatccatatttcgttctgttgcatacaactcactattccttggagaattcatgcaacctgactgggacatgtttcatagtttacacccagcagcagattatcatgctgcagctcgtgcaattggtggatgtcctatttatgttagtgacaagccaggcaatcacaattttgatcttcttaagaagctggttctcccgga

SEQ ID NO: 71514 - DNA, 246 bp, Glycine max
  Clone ID: 700837668H1
gggctacgcgctgagtataagcatatcaaacgaagagagcggaacagagaggagaaacaaggaagcagtccaagaggaaaagtagatgcagagaaagcaagaccaatgggagaaacaaaggtggaagctaaaggaagagaaaaagatgtaaccaaagagggtggtgttgaggaacaaggaagatgaagataagaaaatggacaatctagcttgaaagacatttccaggtacagagctgaagctcaa

SEQ ID NO: 71515 - DNA, 243 bp, Glycine max
  Clone ID: 700837669H1
aaacagaggatatatccacgacttgacccggtggtcattatgctagtaattgatcgggagaatgaccgtgcccttttgagcaaacaatcgagatttgtacctagaatgtggagctgcttagcaggttttatagagccaggagaaagcttggaggaggctgtaagaagagaaacgtgggaggagactggtattgaagtgggagaagttgtatatcatagctctcagccatggcctgttggaccg

SEQ ID NO: 71516 - DNA, 244 bp, Glycine max
  Clone ID: 700837670H1
cggctcgagcggctcgaggcagtggcagagattctaaaccttggaggcccgccaagcttaagtgggacggaaactgccgccatgccgttcgaattcccaaaactggacttgtttgcagcacaagctcaagtgcaacgtcagattcctttgccttttctccgacaacagaaaggaggaacaagccagaaaagcattagaaggtgcactaagtgggaagaaaaatgaatttgacaaatgggacaag

SEQ ID NO: 71517 - DNA, 241 bp, Glycine max
  Clone ID: 700837671H1
ggagcttgttgatgtcaagcttggccaagaatatgagcttgttgttacaactcatgccggactttataggtacagagtgggagatatactaaaggtatcaggattcaagaacaaggcccctcaattcagctttgtttgtagaaaaaatgttgccctgagcatagattccgacaagactgacgaggttgagcttcagaacgcaatgaaaaatgcagtgacacacttggagccatttgatgca

SEQ ID NO: 71518 - DNA, 244 bp, Glycine max
  Clone ID: 700837672H1
gggcaccgaagaagagcgataatacgaggtactacgaaatcctcggcgtctcgaagaacgcttcgcaggatgatctgaagaaggcttacaagaaagccggcaatcagaattcaccccgacaaaggcggttgtcccgagaagtttaaagagctggcacaagcatatgagggtcttagtgaccctgagaagcgtgagatatatgatcagtatggtgaagatgcgcttaaggaaggaatgggtggtg

SEQ ID NO: 71519 - DNA, 239 bp, Glycine max
  Clone ID: 700837674H1
taatgatgacaccaatagacatcatggaactaccggtgtctatggtatagacaccgataggcaacaacatgggactactggtggctatgccggtgacactggtaggcaacatgggaacatcggtggcccttactatggaaccaacaccgcagacaccggtactggtcccagaagtggaaccacgggcggcaccggttatggaggcactggtggcactgattatggaacaactggtggca

SEQ ID NO: 71520 - DNA, 239 bp, Glycine max
  Clone ID: 700837675H1
ggttattaacagagtcataaaagaccaaagttttctattctctgtagctcacatgggctaagaatatctgactttggggtggaaagtatggttggcaaggagagtttgagaactgaggtcttgaacttgagctttgagaagcttatgatggttgaatgtggtggaaatagtgggaaatgagtgaacattaaagctggtgtgatcacggagtggaaggatattccagttgagcttttgat

SEQ ID NO: 71521 - DNA, 236 bp, Glycine max
  Clone ID: 700837676H1
gaaatttccatacacttgtcaaggttgtggaaatgaaaatgcaacaactatggtcaggttttggttggaagtgagagttggacaactaaatgaaattgctaactttactttatgggatcgtgagtgcaatgcactcattaatgaaagtgcaagtgagattaaacaacagatgattgctcaggaaggtgaatttgatccaaaggacattccgaaggctattgataggatactgggca

SEQ ID NO: 71522 - DNA, 243 bp, Glycine max
  Clone ID: 700837678H1
ttttgaaattgctggtaatactcttatgccagctttttctgttccacaggctactgccagatcttctgaaaatgcggaatcctctgcatgatctggaatttgtgttttctttcgcttgttcgtttgtttaattcaataaaggaaattaggcatgaccctcttgttgagtatgctctgcctatttgagaatttccacacctcttttaattgtcgtaatgatgtgtgaagtgtgtgttattttaa

SEQ ID NO: 71523 - DNA, 245 bp, Glycine max
  Clone ID: 700837679H1
ggattagggcttccattaccaacaccaacaccatcaccatcaccatctatggcttgctcaagcgcccaaatacacggcctcggaaccccttccttttcccgaaccctatttttaggtcagaggctaaataccaaggccgcctttatcaaggtcaagtccgcacccactcccaggaggctccgccctctcagagtcgttaatgagaaagtcgtcggtatcgatttgggaaccaccaactccgccgt

SEQ ID NO: 71524 - DNA, 247 bp, Glycine max
  Clone ID: 700837680H1
tttgaacattcacccaatttgcagagttccaagttatatacatacactgcataattaagagaaaatgtctctgattccaagtttcttcggtggccgaaggagcagtgttttcgaccctttctccctcgatgtgtgggagccctttaaggattttccatttcccagttctctttctgctgaaaattcagcctttgtgagcacacgagtggattggaaggagacaccagaagcacacgtgttcaaggct

SEQ ID NO: 71525 - DNA, 246 bp, Glycine max
  Clone ID: 700837681H1
aaaagcaaagatcaaacaaaccaaggacgagaacacgatgttgcttgaacttgcacttggtttattggttttggctctgtttctgcacttgcgtcccacacccactgcaaaatcaaaagcacttcgccatctcccaaacccaccaagcccaaagcctcgtcttcccttcataggacaccttcatctcttaaaagacaaacttctccactacgcactcatcgacctctccaaaaaacatggtccctt

SEQ ID NO: 71526 - DNA, 245 bp, Glycine max
  Clone ID: 700837682H1
taaggatataacatacaattgttagtagttgttctgtttttaaagaaggcattaatttcctgctcatttataacaataccttctgccactcatgtataaaatataaagtatttattgatttcttctatgaattattttcccccttatttccctttttatatatacttgcagattggttgttatgcagggaaatattctgtataggtttccatctttgcagaggacagcttctcaaaagagtaaga

SEQ ID NO: 71527 - DNA, 242 bp, Glycine max
  Clone ID: 700837683H1
agcggggaaagctaccgttgcgtgcggccacaatgggagggtcgcgagttcaagtcaacaaacctcacaagtcccgtttttcatccaaatcttctcgcaaccttcataaaacctctgtcaaggacagactcgcaatcgcaaaatcagagcgcaatgtcggcaaaggagctcgtgcagctcgaattcagagaaataaaatgatacgtgatcagaaaagagctgctgttttgaaagaaaaaaga

SEQ ID NO: 71528 - DNA, 241 bp, Glycine max
  Clone ID: 700837685H1
catcctcctctgtctctctctctccaccattgccatggatccttacaagctccggccatccagcgccttcaattctcccttctggactacaaattctggtgctcctgtttggaacaacaactcctctttaaccgttggagctagaggtccaattctgcttgaggattatcatcttgtggagaagcttgcaaactttgacagggaacgtatcccagaacgtgttgtccatgccaggggagct

SEQ ID NO: 71529 - DNA, 239 bp, Glycine max
  Clone ID: 700837686H1
gcggctcacgatgatgatgccttcgcctttttcgttactggggaatccaagagccctcgatccgcggcagagcttttcgacggcggaaagatcaagccgctgagcgaggatgaatcctcggagtctgctaaaagcccacttctccctgccaaacgatcttccatagcccaaggcaagaaggccattcgcgaagcttctcgacgagaaagaagaaagaagagggagatttaagtgaagaa

SEQ ID NO: 71530 - DNA, 238 bp, Glycine max
  Clone ID: 700837688H1
gaactgggcaatggaaagccaaagttctattcaactccagagataattgctttctgccgaaaatggcgccttccaacaaatcatgtgtggttgttttcaacaagaaaatcagcagcttctttcttcgctgcctatgatgccttatgtgaggagggtactgcaacttctgtatgcaaggctcttgatgaaattgcagacatctctgtaccaggttcgaaagaccatgtaaaagcccaag

SEQ ID NO: 71531 - DNA, 235 bp, Glycine max
  Clone ID: 700837689H1
gctttatcatatcataataggtgagcagccgagatctgttgccggtggcatcaaggaaagtaagagtttagagtttgaactctgtttatccaatgcacaaagcgtagatctctgtgttataatggaatacaggaaaatcaaagacgaggtcagtcttttttcgcatatttcttcaattaatagtacgattttgatgcattgttgttgtaggatgaagttagggatgcgggcgttg

SEQ ID NO: 71532 - DNA, 240 bp, Glycine max
  Clone ID: 700837691H1
agaaacaaagaacccaaagacctagccgtgacagcccagatacaagagatgaagcagaagaaacgcactattccagagaaagcagagatccaaaaatgaattcatcacaaaagatatcaaaacatttccctgttagtaagcgaaaaggttcacctgcaaaatatcgtcacgaggagttctctcctgaaagggtgtcaggtcatccagcttctgaacatcattatgataacaatgattgga

SEQ ID NO: 71533 - DNA, 228 bp, Glycine max
  Clone ID: 700837692H1
gcgacaccagatgatggagacgacggcgaacgagaacgctgtcgttgcgccaatcgcggcgttgttgttggtggtgctactcgcggcgagtgtggtggtggaggctcaggagaactcggacgtgaagacgctggtgaagcacatgcacgggaagaagtactgcgacaaaggatgggaatgtaagggctggtcgatttgctgttgtagcctcactattactgattattt

SEQ ID NO: 71534 - DNA, 239 bp, Glycine max
  Clone ID: 700837693H1
ggcattgctagtattcaggggttgcctatagcttcttttgagaaagatgatgctgaacgcttactgttcttctatcaagactgtgagaaagataggtgtacaaacaaaaataatataatttttagcagtccccctggttggttgaaaccaccccctcctactaggaaaaggtgtgaaccaagacaagaggctagccctggtcttcatgaaggtgtctttgcagggcagggtggtgtttg

SEQ ID NO: 71535 - DNA, 241 bp, Glycine max
  Clone ID: 700837694H1
catgctccttaaggtaaacaggaggatagtttagcattttagtgcatcttttgttgcatggacaacaagttatgaacagtgagaacgttgtggatggctagttgctttctccagccaaacaacacaatcacaatatgaacctatagttagtcatacgcatatcttttcatttacctgtaaagagtatagtattcaaaaacagtggtaatgtaagagttgtatggtatggtataggaactat

SEQ ID NO: 71536 - DNA, 248 bp, Glycine max
  Clone ID: 700837701H1
cttcattttctttcaggaactggctaaacaatcgtctacaatatttggatgaatgatagtgagataattcagtctcccagcaagtttacaatcgtctgcaatatttccctgccctctgggtttggtaaggatttgagaagattttgtggaacctggaggattcggccctacagggacagttaatgaacctacataggaatacaacgtgaatctattaatacaaggttttatcttcaatggagaacaaa

SEQ ID NO: 71537 - DNA, 248 bp, Glycine max
  Clone ID: 700837702H1
cgaaggggaagacaagggagccattgtgacagtgaaaggaggtctgagcgtgataaaaccacccacggacgagcagcaacaaagaccccaggaagaggaagaagaagaagaggatgagaagccacagtgcaagggtaaagacaaacactgccaacgcccccgaggaagccaaagcaaaagcagaagaaatggcattgacgagaccatatgcaccatgagacttcgccacaacattggccagacttcat

SEQ ID NO: 71538 - DNA, 241 bp, Glycine max
  Clone ID: 700837703H1
ctcgagcgaatcggctcaggcgagaaaccacgtttctactcttgaggttaaatcattattattattgagtattgagcatggaggcgccatctctcaccaaacccaacgacccaacaaaaccttccaacacttccagcacccttagtctggagggggggccgggcgaacgagcccactccgaaaaatgtttgcggtggcgtccatcgccgtcggcatacagtacgggtgggctctgcagctg

SEQ ID NO: 71539 - DNA, 243 bp, Glycine max
  Clone ID: 700837704H1
cttccaaagtcatccataggcttcctgttccttatttaggtgacgaattgcatcacacaggctggaattcatgcagctcttgccatggagacccctcagcagaccgacgatttctcatcgtacctgcactcgtatcaggtcgagtatatgtggttgatgtgaaaacaaatccaagggctccatctttgcacaaagttgtcgagcctgccgatatcatacagaagactggattagcttatccac

SEQ ID NO: 71540 - DNA, 244 bp, Glycine max
  Clone ID: 700837705H1
atttgcatctcataaaacacagagctgagaaaggaagaaaaaaagcgtttgtgagtgtgagagagtcataacaatggttgtggaagatgcccaaaaatcagccatcacggaggaccaaaaccctagcagggtcgccaacgacaacaacgacgacgaagatctcgaagagggggagatccccgacgacggtgacgacggcgcctccgccacatcaaagcctccgtccgccctcgtccgcaacccc

SEQ ID NO: 71541 - DNA, 239 bp, Glycine max
  Clone ID: 700837706H1
cccaactcgtgcatttgaagaaagacaaaaaggggttggtttttggttttggttttggtttggttaactccctcttcctcttctactctcacccatggtctccgaatccgaactcatcggccgcctccgcgagtttctccggagctccgacctcaacaccaccacaaccgccaccgtccgccgccagttggaggccgatttcggaatcgatttatccgaccgaaaggcattcattaggg

SEQ ID NO: 71542 - DNA, 242 bp, Glycine max
  Clone ID: 700837707H1
cggagttgcccggggtctctctctcgtgtggtgtgtggtgtttgctgtgctctccttttcgttatgccttttattattacctatctgtcgctccactccgtattacgactctggatcagagggatacatcagaggattcgctccaactcctatcgaataaggtattatctgtcaatttacattggaaagggttaggatattcaattttacataattgcagataaaatcaacgatagctatag

SEQ ID NO: 71543 - DNA, 245 bp, Glycine max
  Clone ID: 700837709H1
cagcaaaggacacaattggtagtgtagaccacattactacaccacttgctgaaaaggccaaagctgctggtagcaccactgctcagtatgttggggagaaagcagcacaagccaaagatgctactgtgcaaactggcaagagtgctgcaaaagttgcctcagatttgagggacaaggctttggccacagggtggagtgctgcacattattctactgagataactgtggagggaaccaaggctgca

SEQ ID NO: 71544 - DNA, 244 bp, Glycine max
  Clone ID: 700837710H1
ggaacctggaaacttccacgaggttttcggtgaaaaccaaatttggggctttgcatcgcaagatttacccactccaatcaaaattcttctgccttcccctaccaattctttctctcaaccgatttatctgagtgaggggtttggccaatgacgagtggttttggtgaatcaacgagagcgtctgcaccgagcccatcatgctcggggaacagttcaaacgatgccggtgattttgaatgcaaca

SEQ ID NO: 71545 - DNA, 242 bp, Glycine max
  Clone ID: 700837711H1
gagggtgaaaatgaaaagcaaaaactgggggaaggaccccaaatctcaagaatggagccggtaacacatggtgcctatggtggtggaatgtacggtacggagaaagggcaaccggagaagccaacaaagccaccggcaagtgagagccagagtgctgatggccccgttgataaggacgctatcaagcccaaacacaaccctcccccttcaaccggagacagagatttagatatcactggcca

SEQ ID NO: 71546 - DNA, 242 bp, Glycine max
  Clone ID: 700837712H1
caaaattgaactgtaattgtagtagtagacagtagcaccatgagccaggaacagctcaagaaacctcaaggggagcaggaccccatcaaatacggcgacgttttcaaagtctccgacgaactcgctttcaaacccatcgcgccaagagacgcagctctcatgcaagccacggagaaccaagcattgggccaaactcaaaaaggaggtcccgcctcggtgatgcaatccgccgcaaccgaaaa

SEQ ID NO: 71547 - DNA, 242 bp, Glycine max
  Clone ID: 700837115H1
gcagaccgagctagctagctagcaagcaagcacagagatggaggcaaagcgacgccatgccctcatgtgcttggcacgtgtttcactcttcctctgcgctctaaccctatccgctgctcacggaagcaccacggttcaagacatcgcgagaaagttgaaactcggggacaacgagcttctgcgcacggagaagaagttcaaggttttcatggagaattacgggaggagctactccacagagg

SEQ ID NO: 71548 - DNA, 77 bp, Glycine max
  Clone ID: 700837116H1
ttctcgagctcaaaacggacaacaactatggcaagttatcagaagcactacgatgatcagggtcgcaaggtctgacg

SEQ ID NO: 71549 - DNA, 255 bp, Glycine max
  Clone ID: 700837117H1
cataaatagaaaaaggagcatgttgattatatagaaagtaaagggcaacaatcatttttgtttaccatgggtaaggacaccatcgctgacataataacctatataagaaatgctgacatgaataaaaaaggaatggttcaaataccatttactaacataacagaaaacattgtaaaaatacttttacgcgagggttttgttgaaaacgtcagaaaacatagagaaaacgataaatattttttagttttaactcta

SEQ ID NO: 71550 - DNA, 62 bp, Glycine max
  Clone ID: 700837120H1
cgctttcatctggaagtagcctattacttgccttgggcagtgtctctcaccaagattggtct

SEQ ID NO: 71551 - DNA, 248 bp, Glycine max
  Clone ID: 700837122H1
attctctccattgtctttgaacactcatcaccatggccaagcttgttctttccctttgtttccttcttttcagtggctgcttcgctctgagagagcaggcacagcaaaatgagtgccagatccaaaagctgaatgccctcaaaccggataaccgtatagagtcggaaggtgggttcattgagacctggaaccctaacaacaagccattccagtgtgccggtgttgccctctctcgctgcacccttaac

SEQ ID NO: 71552 - DNA, 237 bp, Glycine max
  Clone ID: 700837123H1
tagggcacaggagcattcggaattgacgtaaatacccttctataaagaaagtaaaaaaaagggaagagaggacgtgttgttattgattgaggggttttggttggttgatttaatttgattttcttaagtttttaaacctttttaggttaatttatgtaaatacagcgagggtggggttcgatttttagatgctgttgtttgatgatgaatttataaaagatccagttacttgtttct

SEQ ID NO: 71553 - DNA, 247 bp, Glycine max
  Clone ID: 700837124H1
caggacatcccagaagtgtttgataaaattaaagtttaaaccatcaggcccagggcatttgtcccctccacagccccacactgcttctttaatctcttgatcagagaaaggggtaatcagctggtcactttgcccttgagagatagttttaaagtgaaccccatctaaagtaggtctagattgcagttgttcagagaatctattctggaaaaactaaaaaggcttgatttctcatcatgttcgagaa

SEQ ID NO: 71554 - DNA, 245 bp, Glycine max
  Clone ID: 700837125H1
gttggaccgcggtttactccactcagctcgagtcaggcctcacccaaagactcaccccttacggtgtcgctgatttcagcccatccctctctccctctggtctctggaccgctgtcgcttcctacgggcctcacggttgggccggtgaagtagaagatctcaccactgacatctacgtcttcctcactcacgacggaactcaccgattcaaaatcgttgagcacggtggctggcccacctgggtc

SEQ ID NO: 71555 - DNA, 242 bp, Glycine max
  Clone ID: 700837126H1
gggtaaggtggaggatgttgacgaagagaaggagaaggaagaaaaaaaagaaaaagaagattaaggaagtgtcacatgaatgcgtccttggtgaacaagcagaagcccatttggatgagaaagcctgaggagatcacaaaggaggagtattctgctttctacaagagtctcaccaatgactgggaagagcatttggctgtcaagcacttctcagttgagggacagttggagtttaaggctat

SEQ ID NO: 71556 - DNA, 244 bp, Glycine max
  Clone ID: 700837127H1
tgaagaattaaggagagaaaaatcaacatcaaagttataacgatgaagcccattgacgataaacaagagacagtgacgatcagagcggtgagccacgacgaggaagggagaaagagggtggaaaaaatagagctcaacactcacaacatccacactataaagtacgtcgagaagaagctcatcaacaagggtgtgcagcgcaaggaccgccacccagccgacggcatcagaatcggccggccac

SEQ ID NO: 71557 - DNA, 243 bp, Glycine max
  Clone ID: 700837128H1
gcttgttgtacacatttcatcacttagctcataaggttcctaatgcgacaaatagtttatgtggatacaaaattgttactggccagccatctgataggcttggagaggacttttcagagcattataatgattttactgagagattgaataatgttgaggagttcacccgggctacaatcaagaaattaactcaaggaatggatgaaaacaacaaatctatggccggtgctaaaactgatgaag

SEQ ID NO: 71558 - DNA, 241 bp, Glycine max
  Clone ID: 700837129H1
ggataatcaagaagaagctgcagtggaaggaagggttcagagaggcaggggaatccgcgtattgctctgtcaagaaagcgttctcttccatggtttttatcatcagggagcttcacagtttcactatgcagatgagggagtttttgttctacgaagatctgcaagggattctcgaaagggttcccacgaaatgcacgcgtccttcgtgtggctgttccagcaagttttctctcacactccg

SEQ ID NO: 71559 - DNA, 242 bp, Glycine max
  Clone ID: 700837130H1
atgagaggtagaaagggtgctgagaaaacaacaagtctcagtagatggcttgttatgaggatgaaaatggatggcctcaatgcttctatatgccacacctcttgggccacctctttgggttgtcctgctgcaggtgagtacgagtatattgaagtgataacagaggatgatgagaattatgccaaacctatgaggctgatagtggatatagactttaggtcccaatttgaagttgcgaggcc

SEQ ID NO: 71560 - DNA, 241 bp, Glycine max
  Clone ID: 700837131H1
acttcactctctctcttcatcacagttcaatctatactcaaagtctatagaagatgaggaagaattgcaacttggagcttcgccttttccctccttccctctccgatcttcgccccatgtaagctggtcttctctctcttctctttttcattaaggtcatactttgtgatgcgtcttgatatatttgtctatatattaatttgcacaagcttgtactttggattgaattcatggtatctga

SEQ ID NO: 71561 - DNA, 247 bp, Glycine max
  Clone ID: 700837132H1
ctgggtcaagtagagcagcagagaagagagaaaacggcactgcagccgtagaaggaaaaccgaccatggtgcacgtctccttttacaggaactatggtaagacgtttaagaagccccgccgtccgtacgagaaggagcgtctagacgcggagctgaagctggtgggggagtacgggctgcggtgcaagagggagctgtggagggtgcagtacgcgctcagccgcatccgcaacaacgcgcggaatct

SEQ ID NO: 71562 - DNA, 250 bp, Glycine max
  Clone ID: 700837134H1
atcatcaggaagatcaacaaaaacgtggtgtaatcgggtccatgtttaaggcggtgcaagacacctacgagaacgccaaggaagctgtcgttggcaagaaagaagctactaataacgcgtacagtaatacagaggttattcacgatgttaacattcagcccgatgacgtgtcggcaacgggggaagtaagggacatatcagccacaaagactcatgatatctacgattctgccacggacaacaacaacaa

SEQ ID NO: 71563 - DNA, 243 bp, Glycine max
  Clone ID: 700837135H1
ctcaggtgcgtcctgcaacaactctgttggctgatgggtgtccatatttgtatgctatggtgcatgatagttcagtgtctacaataccaggtgattttgtcattggtgttaagttgacaaccataaacaatatgtgtgcatatgggcttaatcctggtatttcaggttctcgtcttttgggcaccattcctcagtccatttcacagcaaactgtttggcatcaaatggcaacagtgagaacac

SEQ ID NO: 71564 - DNA, 247 bp, Glycine max
  Clone ID: 700837136H1
ccttgctctatactacacagtacacacactagaagaataatggcttccatcctccactactttttagccctctctctttcttgctcttttcttttcttcttatccgactcagtcacccctacaaaaccaataaaccttgttgttctacccgttcaaaatgatggttccacagggctccattgggccaacctccaaaaaagaacccctctaatgcaagtaccagtcctggtggacctcaatggaaatc

SEQ ID NO: 71565 - DNA, 246 bp, Glycine max
  Clone ID: 700837137H1
cgaccaagtattttggttgtgaacttggggcccagtcaaaatttgatgagaagaccggcacttctcacgtcaatggagcacatgatactgttaagcttgctggccttcttgagaacttcattaagaaatatgttcagtgttatggttgtggaaatcctgaaactgagatcataatcactaagaaccaaatgatccagctgaaatgcgctgcttgtggttttgtgtctgatgttgatatgagagaca

SEQ ID NO: 71566 - DNA, 247 bp, Glycine max
  Clone ID: 700837138H1
gaatttccattcattctatgtagtttcctcttttgtattctcttctttttccttgaagcaaagtgaacttgtggtgtatctttccaattgaagtgaaagagtaaggatgtcaagtgggacaacatactggtgttacacatgcaggcagccaatctggcttgaagggagggaagccatttgcccctactgtgacggaggctttgtgcaagaacttaatgagctgcgaggagttgcgcgccaacacggc

SEQ ID NO: 71567 - DNA, 241 bp, Glycine max
  Clone ID: 700837139H1
ctcaaagcaacacaagaacactctcttgaacattcatggatccagtgagcgtgtggggtaacacgcccttggcgacggtggatcccgagatcactgacctcatcgagaaggagaagcaccgccaatgccgcggcatcgagctcatcgcctccgagaacttcacctccttcgcagtcatcgaggccctcggcagcgccctcaccaacaaatactccgagggcatgcacggtaaccgctacta

SEQ ID NO: 71568 - DNA, 246 bp, Glycine max
  Clone ID: 700837140H1
ggggagccggctcaccttcggctcagacttccgggtgggacatcgactgtcatgtggcgtccggctccgtcgggtcggggtgctccgccttcttcaggccgcggctcggggtttccgcgccgtcgatcgaggtctacgtcgccggctgctgctccggcgtgcctgtgattctgagcaagacgattcagatgagtccgaggaggagagtgccgcggcacgccacgctggatgctatacctgaagatg

SEQ ID NO: 71569 - DNA, 245 bp, Glycine max
  Clone ID: 700837142H1
ctttcttagagatgctggtaatgggggagtttttgttggtcatgttgcttcagcgttcacaacttcaagtgtgcttgaggcccaaagtagaaagcctaacagatatgaagtttcccaatacagatatcgcaatgtgccaataaagcgcagagcatgggttgaaggccagatgtctttcgatcagtctgtagtagcaattatgtctaaatgcaaagccagcatgagaatgggaaacactgatgctc

SEQ ID NO: 71570 - DNA, 246 bp, Glycine max
  Clone ID: 700837143H1
cagagaatacctttctttaatgaaaaaggtaaatatgtaagtacagatccacttgatatcaatgacttgtcatctctaaattacattggaacaaaactattagaaagttttaaaaggaaaacagctattttagaaaaagagaattcggctctttctcagaaattacagaagctggaacaggaaagaggtataatagcccagcggagagtagaagaaggaaataataccgaagataataatacatta

SEQ ID NO: 71571 - DNA, 244 bp, Glycine max
  Clone ID: 700837144H1
tgcggaattgagaactggatcatagggctgcttcagcctgtcattgataatctcaagaagcctgattacgtgcagagggttgaaattaagcagttctcattaggggatgaacccttgtctgttaggaacgttgagcgcaggacttctcgcagagtcaacgatttgcagtaccagataggccttaggtatacaggtggtgctcgcatgctgttaatgctttctctgaaatttggcatcattccaa

SEQ ID NO: 71572 - DNA, 242 bp, Glycine max
  Clone ID: 700837146H1
cttaaatgtgctatattttatcttaaatgtgctatattttattttagaaaacaaaaaatgaaaaattactcgatttttatttctccaaaatgatcaattttataagattgaatcgactaaaaaatgaaatgaatcatttcatattgatagtattgctatgcttagtgtgcgactcgttagttttttagaacggttccaatttaacaaatttataaaccggttcatcgtataaatgaattaaa

SEQ ID NO: 71573 - DNA, 244 bp, Glycine max
  Clone ID: 700837147H1
aaccttctccaaagtctctctgctcttgttggtgtcactttctttctcctatgcaacttctggcttcaaccatgagcatgcttacccaccacaatcacaagcagagatgctcacaagaaaccttaacctattcccaaaggacccagttaccattattaaaggtgattttgatagttttgtaccaggaaagatagtggagaagaagttctcgcttcttggtcattctgggccttctattcaacac

SEQ ID NO: 71574 - DNA, 242 bp, Glycine max
  Clone ID: 700837148H1
atcaaaaagagtctcaacccaatcatcgctcggtcaagaagaggaaaatgaagtgattactgaaagttcagcatttgttaagggggaaccggcaccagaattcagtagtaaccccccaaaagttgattctgaagttgaggtccttcatgagaaggtcagcaaacaaatcattaaggaaggtcatggccagaaaccttccaaatattcaacttgcttcttccattacagggcgtgggctgaga

SEQ ID NO: 71575 - DNA, 247 bp, Glycine max
  Clone ID: 700837150H1
ggcggggctacccgctgagtttaagcatatcaataagcggaggaaaaagaagagaagaaacaggagaagaaaaacaatccagcctggaggagatttctaagcacagagctgaagctcaacaaaaagcaatgagttcaattgaaggtgctaaggagagatacgagagagcaaaacaagaagcaagtaaagcttccaaagagagaaacattcaagcaaataagagggctgaagaagacagaagaaaagc

SEQ ID NO: 71576 - DNA, 249 bp, Glycine max
  Clone ID: 700837151H1
tctgcacaagaactcgccggagaaaaaaaaaaaagaatgatcgacagagggaaaacgtcggtcgccgtcgtgtactccgacggaaaccgcgagatcaatgtcggcacggtcgtggtggaccccacgctcaactttaagagcctcgtcacgctcctcagccagcagatcgggatctcgccgcaccagttatccgtctacctcgcctccgtcggcaccgaccgcaagattccggtcacgtccaagcccaac

SEQ ID NO: 71577 - DNA, 247 bp, Glycine max
  Clone ID: 700837152H1
gcagaccgagctagctagctagcaagcaagcacagagatggaggcaaagcgaggccatgccctcatgtgcttggcacgtgtttcactcttcctctgcgctctaacccatatccgctgctcacggaagcaccacggttcaagacatcgcgagaaagttgaaactcggggacaacgagcttctgcgcacggagaagaagttcaaggttttcatggagaattacgggaggagctactccacagaggagga

SEQ ID NO: 71578 - DNA, 250 bp, Glycine max
  Clone ID: 700837154H1
attctctccattgtctttgagcactcatcatcatggccaagcgtgttctttccctttgtttccttcttttcagtggctgcttcgctctgagagagcaggcagagcaaaatgagtgccagcatccaaaagctgaatgccctcaaaccggataaccgtatagagtcggaaggtgggttcattgagacctggaaccctaacaacaagccattccagtgtgccggtgttgccctctctcgctgcacccttaacc

SEQ ID NO: 71579 - DNA, 248 bp, Glycine max
  Clone ID: 700837156H1
caagacatcccagaagtgtttgataaaattaaagtttaaaccatcaggcccagggcatttgtcccctccacagccccacactgcttctttaatctcttgatcagagaaaggggtaatcagctggtcactttgcccttgagagatagttttaaagtgaaccccatctaaagtaggtctagattgcagttgttcagagaatctattctggaaaaactcaaaaaggcttgatttctcatcatgttcgagaa

SEQ ID NO: 71580 - DNA, 243 bp, Glycine max
  Clone ID: 700837158H1
attttgatcctgttcatgccaggacaagggatctggagagacattttgattcctatgggaaaatattaaatataaggatcagaaggaattttgcttttattcagtttgaatcccaagaggacgctactagagctttggaggccaccaacctgagcaagtttatggaccgtgttatcactgtggagtatgccattagagatgatgatgacagagacagaaggaatggatacagtcctgatagaa

SEQ ID NO: 71581 - DNA, 241 bp, Glycine max
  Clone ID: 700837160H1
ataagggttcctctttccttctctagcacaatttacaatctcaatggctggaatttgctgtggtgttgttggagaaggtgacactccggctccactcgagcccactcctcgcccctccaggcgccggagtttggacatcttacctttaaaatatatcgccgacatgcccatgccgccgccggaggctttacggaagcgtcccaagctcaacctcagggactgcgataacgcaattgaaaat

SEQ ID NO: 71582 - DNA, 239 bp, Glycine max
  Clone ID: 700837161H1
cacaaacgcattagtttgtttaattcgtcactctccgttcgaatctcagaagaaacccagctctagcttcgatggcggtggcgggcggcgccgctcctctcggctcgtcggtgatctcgctggtgaaccggctccaggacatcttcagccgtgtggggagccactccgccatcgacctcccacaggttgcggtggtcggcagccagagcagcggcaagtccagcgtcctcgaagccctc

SEQ ID NO: 71583 - DNA, 241 bp, Glycine max
  Clone ID: 700837162H1
aaaacactcaagttaacttcaacacctttaattttctgaacgaaattcagccacagaatatcaaagggagcgaagatgagtcaggagcagccaaggcgcccccaaggccaagaccccatcaaatacggcgacgtttttgacgtctacggtgaccttgcacagatgcccattgcaccggaagatgctgccatgatgcaaagcgcggaagctcgagtactcggaaaaacccaacccggcggag

SEQ ID NO: 71584 - DNA, 265 bp, Glycine max
  Clone ID: 700837163H1
tctcagttcggctcgctcgagaaaagcttcatcatcatcttcttcttctctgcatcatcacaatggctgaagtacgttcacaacaacaacaaccccagcatgtgcaagtccacgcaaccacaacacacaccccacaacaccatggcggggaaggtggcagcggcattctgaacctcatcccggagatgtccctcacgggttcccaactcctagctctcctcgccggcgttccccttggtgcaatgctgctcctcctctccggcat

SEQ ID NO: 71585 - DNA, 242 bp, Glycine max
  Clone ID: 700837164H1
cggcggcgggagcgaatggatctcgtgacggtgcttgacgttagtaacagcatgagcggcgcagactttcacatgctaaagcgcgccatgcgtttggttatatcgtcactcggcccggctgaccggctcgccgtcgtggcttcctcggctaattccaaacggttgttacctctgaggagcatgacggctcagggacaacgcgcggcgcggcgcgtcgtggatcggctcgtgtgtgaccatgg

SEQ ID NO: 71586 - DNA, 203 bp, Glycine max
  Clone ID: 700837165H1
gaagaatatttccagctcttgaacatggaccatggccaattcgaactgaattcatttgcagaatctttattagattaaaagaatatcaacaaagatttgttcagttcatgaagatcacattgcttacatataaactttgttgatagatcatatgtaaatatatctgtaaatgatctctgagttatgagatcttttttgtcttt

SEQ ID NO: 71587 - DNA, 247 bp, Glycine max
  Clone ID: 700837166H1
ccgaggaccgagtgcctcccacgcccggtcgtactcataaccgcatcaggtctccaaggtgaacagcctctggtcgatggaacaatgtaggcaagggaagtcggcaaaatggatccgtaacctcgggaaaaggattggctctgagggctgggcacgggggtcccagtcccgaacccgtcggctgtcggtggactgctcgagctgcttccgcggcgagagcgggtcgtcgcgtgccggtcgggggacg

SEQ ID NO: 71588 - DNA, 251 bp, Glycine max
  Clone ID: 700837167H1
ctcttcctccctttctcacagcaatggccgccgcagcacgccctctcgtcaccgtgcaggccctcgacggtgacatggcaaccgatgcctccgccaccgttcccatccctgacgtcatgaaggcctctatccgccccgacatcgtcaatttcgtacactcgaacatctccaagaacagccgccagccatacgccgtcagtcgtcgcgctggtcaccagacctccgccgaatcctggggtaccggccgagcc

SEQ ID NO: 71589 - DNA, 249 bp, Glycine max
  Clone ID: 700837168H1
ttttgatctggaagtaacctttttctttccttgggcagtatctctcaacaagattgatctgtttggattttggtctatgatggcctttttattgattttgacgattggatttctctatgaatggaaaaggggtgctttggattgggagtaatcactagtgatagggcaaaatagggaggaaggacaaaggaaagagcgatgcctacattaaatcaattgattcgtcatggtagagaagaaaaacggcgc

SEQ ID NO: 71590 - DNA, 247 bp, Glycine max
  Clone ID: 700837169H1
gctatacaggagtcaactagggttagccaagatatgggagtagaggctcctatacccatcagtgtgaagttaggagatttcaacagtctttttcgtaaaattgtaacggctgctgatcatcctcatttaagcattccagaaactgaagctggaagaagccgcaagcagtaccacaggcttattaatcgatctcttatggctgtttcagttggagctgcggtggtcgtagttgggctggcagcttata

SEQ ID NO: 71591 - DNA, 247 bp, Glycine max
  Clone ID: 700837170H1
attctctccattgtctttgaacactcatcaccatggccaagcttgttctttccctttgtttccttcttttcagtggctgcttcgctctgagagagcaggcacagcaaaatgagtgccagatccaaaagctgaatgccctcaaaccggataaccgtatagagtcggaaggtgggttcattgagacctggaaccctaacaacaagccattccagtgtgccggtgttgccctctctcgctgcacccttaa

SEQ ID NO: 71592 - DNA, 247 bp, Glycine max
  Clone ID: 700837171H1
gcaggaaaaatggtttcgctgaaactgcagaagcggctcgcagccagcgtcctcaagtgtggcagaggaaaggtttggcttgaccccaatgaagtcaacgaaatctccatggctaattctcgccaaaacataaggaagctggttaaggatgggtttattatcaggaagcccaccaagattcactctcgctcacgtgcccgccgaatgaaggaagccaagaggaaaggacgtcactctggatatggta

SEQ ID NO: 71593 - DNA, 244 bp, Glycine max
  Clone ID: 700837172H1
atcttcttatggtggactaggaggaggaatgtatggatcatcttatggtggggggatgtatggtaacagtatgtacaggggaggatatggtggcatgtatgggtcatccgggatgtacgggggtggaatgtataacagtggcttagggggtccaatgggtggttatggcatgggtggtggtccttatggagaacaagaccccaacaatccgtatggtgcccctccatccccacctggattttgg

SEQ ID NO: 71594 - DNA, 235 bp, Glycine max
  Clone ID: 700837173H1
aaaggaaataattgatctttgaaaatgcagggaggaaagaaagctggagagtccatcaaggaaacagctgcaaacattggtgcttctgccaaggctggcatggagaaaaccaaggccactgtccaggagaaggcagaaagaatgacggcacgtgatccgatgcaaaaggagttggcaacccagaagaaagaggcaaagatgagccaggcagagctggacaagcaggcggcgcgtc

SEQ ID NO: 71595 - DNA, 243 bp, Glycine max
  Clone ID: 700837174H1
gaaaatttgaagagtttgtttattgtgaaaaaaagaaaaatgcaggcagcaaagaaagccatagagacctttaaggaaaccgcagccaacattggcgcctctgccaagtctggcttggagaaaaccaaggccactatccaagagaagaatgagaagatgaatgcagaagatcaaactcaaatggatatggctaccaagaggaaagaagagaagatcaaccaggctgagatggagaagcagcag

SEQ ID NO: 71596 - DNA, 244 bp, Glycine max
  Clone ID: 700837175H1
ctcgagctctgcgagatcttcattcgccgattttaaaagatgagtaagcttcagagtgatgctttgcgtgaagccatttcaggaatcatggccgattccaaggagaagaatcgcaaatttgtggagaccatcgaactccaaatcgggttgaaaaactacgatccacagaaggacaagcgtttcagtggctctgtcaagctgccccacatccctcgccccaagatgaaaatttgcatgcttggtg

SEQ ID NO: 71597 - DNA, 246 bp, Glycine max
  Clone ID: 700837176H1
gcggccgagggcaaactgacgaatatggcaacccggttcatgccactagtgtcacttatgtagccaccaaaagtgttggtggctacaatgatgacgctaataagcaacatgatattactggtgtctatcccgagaaagacaccggtagacatcattttggtcgtagttacgacggtgacactaacaagcaacatgatgctactggtgtttatcccggaatagacattggtagagatcatgggacta

SEQ ID NO: 71598 - DNA, 237 bp, Glycine max
  Clone ID: 700837178H1
ctacactggcgtcaatggcggcttcccgtcatcgaataataccgccggcggtattgcgccgccgttggaggtggacgggctgccggagaattttgattggagagagaaaggagctgtcaccgaagttaagttacagggtagatgtggatcatgctgggctttcagcaccacaggatctatagaaggagccaattttcttgccaccggaaagctcgtcagtcttagtgaacaacagct

SEQ ID NO: 71599 - DNA, 236 bp, Glycine max
  Clone ID: 700837179H1
ctctctctctctctaaggcctaagctaccaggagctccctatctacagtgtttccctctctttctctctctctctctgcaaaagctacgaagctgtgttctgatccttcaaattagatctgcttctgattccactttaaaccgccctcgcttcatcaagatctatttttttaattcaattctctcaggatcactctcttgcacctgcttctggttgtatgctttttttggggagtt

SEQ ID NO: 71600 - DNA, 245 bp, Glycine max
  Clone ID: 700837180H1
tgttcaacaagtccaagaaccaacctaccttttgcaatctcaattcaatggcgtcctctctcattgcgaacgcttcctctcctcttccctcctctccaggtccctccttcgccccgccgcttccgcttcccaccgctctttcaacaccaacgccatgcgccagtatgacaaccgcgccgacgaccacagcaccgacatcgatcgtcactccgaacgctctttccctagcactgcgcgccgcgacg

SEQ ID NO: 71601 - DNA, 248 bp, Glycine max
  Clone ID: 700837182H1
gcgattcagactctaaccaaaacaatcttcctattctcagtgatcgctgcctctccctttcccctctttccaaagatgctgcgatggggctggtgctgagtgctgcaacgggcagaggatggaccacgggttcagggatggaaggcccctctgttcctgcagttggtagggatagcgaatctgggacggggaacatctccactttcccatggtctctcttcacaaaatcccctaggagaaggatgctg

SEQ ID NO: 71602 - DNA, 250 bp, Glycine max
  Clone ID: 700837183H1
atgttcttatgtggttatgaatgtgcttcttttaggaaaagcaaaagggaaggattgggatcctcttggattttgtttggtatgagcctcttacaagatcaaaggctgacaattttgcagctcaaagagccagagactttcatattggatggtaaaaatctttagcatttgttaactgaggatcctatattgcaagtacaagtctttagttatgaatgtgaattttcccctgcaaagactttcacacgct

SEQ ID NO: 71603 - DNA, 250 bp, Glycine max
  Clone ID: 700837185H1
gtggtacactgtcaatgtttgaggtcgatggcaaaaagaacaaggtttatgggcagaacctttgttatttggccaagttatttcttgatcacaagaccctctattatgatgtagacctgtttctgttctatgttttgtgtgaatgtgatgatcgaggatgtcacatggttggctatttctccaaggaaaaacattctgaggaatcttacaatttggcatgtatcctcaccctaccaccttaccaaaggaa

SEQ ID NO: 71604 - DNA, 243 bp, Glycine max
  Clone ID: 700837186H1
cttgagagaaaagtagtgtattaagactacaaattttcaatttttcaatggcgtcgaggcaacaaaaagaggatcgagctgaggcagctgagaaagttgctgcgaaagaactcgaacaactcaaccgagaaaaagaccgtgatttcagtgttggtgttgcagaccaacaccaacaagaagaacatcagttagatcaacaaaagcgtggtgtaatcggatccatgttcaaggcggtgcaagaca

SEQ ID NO: 71605 - DNA, 243 bp, Glycine max
  Clone ID: 700837187H1
atcggaaccacattcctgggaattgatcttcccaatagaggtatgtggtcctaataatggttttgaaatgtggagttctgagtgggcaaatcaaacttcatggcatttgagtttccttattgacaatcccaaacagtctacagtttttgatattctcttgggaatttctcaagattttgaaattgctggtaatactcttatgccagctttttctgttccacaggctactgccagatcttctga

SEQ ID NO: 71606 - DNA, 244 bp, Glycine max
  Clone ID: 700837188H1
taagagggcagccaacaagaagcaaaacactgaaacaaaagcaaaaaagagctgtgagacagtgatggctcacggtgcttacagcaagcggcgcgtgagcgaacgcgtcgatccaactccaagcctctgggcatcgccaagaagcccaagcccaagcccaagccctccgtttacctcaaaaaccagattcgatcccttgagcgcatgctccgcaagaatctgcctcccgaggtgcgagacgcgc

SEQ ID NO: 71607 - DNA, 242 bp, Glycine max
  Clone ID: 700837189H1
gtggaagctgagatggatttggaggccaaaagggaagctcaaaatcaggaatcgaaggagtggccatcagcaaaatccaccactgagagcattcaaagaggacaaggacaacaagaacagcatgagcaaggagaaaaatgggaacatggtgcacaaaggactaataagccacatgaaagcaacattgtggaaacctttgaggaaaacctaggtgggattggggaaaaaagggaaaaacacca

SEQ ID NO: 71608 - DNA, 240 bp, Glycine max
  Clone ID: 700837190H1
atctgcccgtcctgctcctcgtgcagcacctcgtcctgctccagttcaccatgctcctcctccagcccctgctcagagcggtggcggatctatgcttggtggcattggttcaaccatagctcaaggtatggcttttggcactggaagtgcagtggcacacagggctgtggatgctgtcatgggtcctcgtaccattcaacatgaagcagtagtcacggaggctgctgctgctgcccctgc

SEQ ID NO: 71609 - DNA, 240 bp, Glycine max
  Clone ID: 700837191H1
gtaagctaaatcgtctagttacagagaagtgggttgatgggtgggatgatcctcgtttgatgacactagctggtttgcggcgtagaggcatgaccccaactgcaatcaatgcttttgtccgaggaattggaataactagaagtgatggcactttgatttctgtggaacgccttgaatatcatgttagggaagaattgaacaaaacagcacctcgtgcaatggttgtcctacatccactca

SEQ ID NO: 71610 - DNA, 233 bp, Glycine max
  Clone ID: 700837192H1
atcaaccacagagtggatgtgggggtcatgttgaggatgtcagacgccaagtgaatgaagctgttcaatctcgccataaaattgacaagatgtatagtgtttttactggacagccattagagaaggtgcaacagtacacagagagggaccgttttctgtctgtttctgaggctttggagtttggtcttattgatggtgtcctggaaactgagtattgaatacagtttatttgc

SEQ ID NO: 71611 - DNA, 235 bp, Glycine max
  Clone ID: 700837193H1
gcgtaatttacgtgtgctcctttattcagttcctcttctcacactggtcaagatagtctatcttgatcatgggtttcaattctgtctatagaaacttgcaggagatatttccgcagttgatcccaggctactgagggctgtagctattgaacacccaaaggatgctgatctagcagctggaatagttcttgcggaagtcatcccgttcatgtccaaaaaactacctgctgcaatt

SEQ ID NO: 71612 - DNA, 240 bp, Glycine max
  Clone ID: 700837194H1
gcagaccgagctagctagctagcaagcaagcacagagatggaggcaaagcgaggccatgccctcatgtgcttggcacgtgtttcactcttcctctgcgctctaaccctatccgctgctcacggaagcaccacggttcaagacatcgcgagaacgttgaaactcggggacaacgagcttctgcgcacggagaagaagttcaaggttttcatggagaattacgggaggagctactccacaga

SEQ ID NO: 71613 - DNA, 227 bp, Glycine max
  Clone ID: 700837195H1
caaagctggttccagcccattatttgggtatgacttttggtaccaaccacgtcacaataccatgattagcacatcatggggtgctctagtgcttttacaaaaggttttaacttacagcatctctctgatggattatacgggaggcatctccatgtatatagctggcctgggggcgaactgagacaaacaatggaccttggtgattcagggcttatacccttagagat

SEQ ID NO: 71614 - DNA, 235 bp, Glycine max
  Clone ID: 700837196H1
cggcggcgggatccgatggatctcgtgacggtgcttgacgttaataacagcatgagcggcgcgaactttcacatgctaaagcgcgccatgcgtttggttatatcgtcactcggcccggctgaccggctcgccgtcgtggcttcctcggctaattccaaacggttgttacctctgaggagaatgacggctcagggacaacgcgcggcgcggcgcgtcgtggatcggctcgtgtgtg

SEQ ID NO: 71615 - DNA, 253 bp, Glycine max
  Clone ID: 700837201H1
ctgaactttgcttctctctctcttctacgtctccttcctctcaaacggaaaacgaccgcaacagcagatttgaagggagtacgcaattgatggatggatattctggtaaaagagccattgatggggtggtagtccctagaaaggggatgggccttgcatttagagatactgctaatgctagagatcgaaatggtcaggtgtgcagccgcattacttgcagcagcagagtcaatactcctaaaggcactcaaat

SEQ ID NO: 71616 - DNA, 247 bp, Glycine max
  Clone ID: 700837202H1
ctcgagcgaatcggctcgagtagttgcccaacgccgcgaccaccagatagttaagcttttttcttcaactcacgagaagagcgtccatggagaatgcagacatccctgagaatgccaacgagcattgcccaggtcctcagtctgaatctgctggaaaatctgatgcatgtgaagggtgcccgaatcaacaaatttgtgccactgcccccaaaggacctgaccctgatctggttgccattgcagaaag

SEQ ID NO: 71617 - DNA, 248 bp, Glycine max
  Clone ID: 700837204H1
tgcacctattgcaagtctgaagagagcaacctgtgtgagcttctcaggatcaacactgacagaggagtgatgctcagtgatggcaaaacaaggttctccaaaaatggacaacctatttaccacttcgttggaacctccactttcagtgaatacactgttctccatgaaggatgtgtcgccaagatcaaccctgctgcccctcttgacaaagttgctgttgtcagttatggattctgcacaggttttgg

SEQ ID NO: 71618 - DNA, 244 bp, Glycine max
  Clone ID: 700837205H1
tctctctagaattttgtttttctctctctctctcccatctctcggaaaatttttcagagcttcctaaagcctttagaattctctggaacctttttgttcgtccgccgaggatcgcaattcctcgaaatcgtcgtcactcgtcgcttagttcggttctaactgcatgaactggttcgggaagctggattcatcatcgtcgaacttgaactgcaatcacttcgttacttgtctgttcatttttatc

SEQ ID NO: 71619 - DNA, 244 bp, Glycine max
  Clone ID: 700837208H1
tcaggtgcctagggatgctgcttatgtacagtggccaagtgctgcagtaatgtatgcacattcatatgaccaatttagacaagctgttttccaggctccatttggtcaacgcccattgagtttcgattattcgcagaattactagatgacgtttgggaagcagttttccatttggctgcataagttattttagctattaaggatttcagagttagatataatttttctgtactgttatagatcc

SEQ ID NO: 71620 - DNA, 240 bp, Glycine max
  Clone ID: 700837210H1
ctcgcaagcaaaaagaaagaatcccaggcgaggagaaagatggaggggcaggagcaggatgtgtcgttgggagcgaactaattccccgagagacagccgattgggacggcggcgcagagccaagacgacggcaaagactaccaggagccggcgccggcgccgctggttgacccgacggagttgacgtcatggtcgtgttacagcgcagggatagcagagtttgtggccacttttctgtgt

SEQ ID NO: 71621 - DNA, 261 bp, Glycine max
  Clone ID: 700837211H1
gctcgaaattcggcgcgaatctcaagtctcaagagatgtcatcatggctccagagaaggacaaggctccaccagcttcctccaagcccgccaaagctggcgatgccaagcagaagaagaagaagtggagcaagggaaagcaaaaggagaaggtgaataacatggtgcggtttgatcagggcacctatgataagctccttgctgaagctcccaaatgcaagctcatcactccttccattctttctgatcgtttgaggattaa

SEQ ID NO: 71622 - DNA, 244 bp, Glycine max
  Clone ID: 700837212H1
catttcatccgggggtgcgcaaatttctgggactaatcaattgacaatgctgcattagtgggattggtactgccgggttctttagctgatgaaagaggattgagcggtggtgcttgtggcttgggtgttgcttacctgttctatacgctaattcagaagctctgtcaaatttagtgcctgacttactgctttattgagggattcatttcatatatttaattatattgagttgggaaaatcaata

SEQ ID NO: 71623 - DNA, 247 bp, Glycine max
  Clone ID: 700837213H1
ctagaatcttttgttccaaacaaaaacgtatggattggtcggtttttctacggagtcgtcaccatgaatcatctttggttaccaccaagaagctccacgcttgagtttcacgtttctccgaggttttattatcatccgtgtcgtgtctctgtctccgtctcttagtttcttcttcagatggcagaagttgaagacagagacaacaacactcgtcaccaccatcattacatttcttcaacaacaacaa

SEQ ID NO: 71624 - DNA, 251 bp, Glycine max
  Clone ID: 700837214H1
cgagtactggttcttgtgagagacatgatgtcatcttccggcgccgccaggtacatggcttttccaccctcgccctccgcgcctccgtcgccgcacctctccggtgctcttcgctccactcccctctccgacccggacaaatatcttactgaattgttgggagaacgtaacaagcttagtcccttcatggcggtccttccccactgctttcgattgttaaaccaagaaattttgcgtgtaaccacgctgat

SEQ ID NO: 71625 - DNA, 252 bp, Glycine max
  Clone ID: 700837215H1
tattcgcacagccatacagaatgccactggacctaaatcagcactgtttgttccagaagtcccatttgaagtgcttgtacgcaggcagatatctcgactattggatccaagtcttcagtgtgctaggtttatatatgatgagttaatgaagatcagccatcgatgtatggtcactgaattgcagcggttccctttcttgagaaagtgcatggatgaagttcttgggaactttttacgagaaggcctagaacc

SEQ ID NO: 71626 - DNA, 185 bp, Glycine max
  Clone ID: 700837216H1
aaagaaaggaaataattgatctttgaaaatgcagggaggaaagaaagctggagagtccatcaaggaaacagctgcaaacattggtgcttctgccaaggctggcatggagaaaaccaaggccactgtccaggagaaggcagaaagaatgacggcacgtgatccgatgcaaaaggagttggcacccc

SEQ ID NO: 71627 - DNA, 252 bp, Glycine max
  Clone ID: 700837217H1
cccaggtcagacgaggagcaccacttcgagtcaaaggctgatgctggagcatcaaagacatttccccagcaagctggaaccatccgcaaaaacggttacattgtcatcaagaacaggccatgcaaggttgtggaggtttcaacttccaaaactggcaagcatggacacgcaaagtgtcactttgttgcaattgacatcttcactgggaaaaagcttgaggatattgtcccatcttcccataactgtgatgtt

SEQ ID NO: 71628 - DNA, 246 bp, Glycine max
  Clone ID: 700837218H1
gagctgagaaaccctaacaatgggaggcaaatgtccgcataggaacgtgaagaagagaagatattctcacaagacagcgcggcgtacgaagtttgagttgaaaggggacgacatggtttatgcgcagctgaacaaacccgatgaagagagagcccctttacccctcgatgaagatttgcctgggatgggccagtactattgccttcactgcgagtactttccttttcttcctcaatttttttggtg

SEQ ID NO: 71629 - DNA, 246 bp, Glycine max
  Clone ID: 700837219H1
cagaaaagaagaacaaagatgcaatcctcaaaggagaagatgaaaaacatggcaagtgctgccaaggaacaagtcgacatctataaagccaaaatagacgagaaggcagagaaagcaacggcaagaacagaagaggagagggtgatagcccatgagcacgcaaaggcaaaggaagctggagcaaagatggagctgcatgaagctaaagcaaggcatgcagcagagaagcgaagcgccaaccaatca

SEQ ID NO: 71630 - DNA, 245 bp, Glycine max
  Clone ID: 700837220H1
ctcgagcgttttcagaacccccactttccggcctccgcctccgcctccgccgcacgctgccaagtcgccgaagccctcgcgcttcaccgtcgcgtctttcggacagagcaccacctgcaggagaaaacccccctcgctcctctcctccctgcggttccctactgttccctctccacggttcgtcaggttcgttcccttcgctttcgatggcgacaccgaggccccgcaagttcaggaaccggagt

SEQ ID NO: 71631 - DNA, 244 bp, Glycine max
  Clone ID: 700837221H1
cctaagcttagaattagaaacaaagaaaagaagaaaggaaagaattgatcgttgaaaatgcagggaggaaagaaagcgggagagtccattaaggaaacagctacaaacattggtgcttctgccaaggctggcatggagaagaccaaggccactgtccaagagaaggcagaaagaatgacagcacgtgatccggtgcaaaaggagttggcaacccaaaagaaagaggcaaagatgaaccaggcgg

SEQ ID NO: 71632 - DNA, 246 bp, Glycine max
  Clone ID: 700837224H1
agtggtggtggtggtgttcagcatgagaggaagtttgaaacgaaagttgaagagaagaagggttttggggaaaaagcagaactcgagagaagaacaagagaggtagagggaagagagtggaacaaagaggagaaacaaagaagttgtccaagagggaaagtagaggcagagaaagcaagaccaatggaagaaacaaaactggaagctaaaggaagagaaaaagctgaaaccaaagagggtggtggt

SEQ ID NO: 71633 - DNA, 71 bp, Glycine max
  Clone ID: 700837225H1
ggggcgtttggctggggcggcacatctgttaaaagatcacgcaggtgtcctacgatgagctcaacgagaac

SEQ ID NO: 71634 - DNA, 242 bp, Glycine max
  Clone ID: 700837226H1
ctacactggcgtcaatggcggcttcccgtcatcgaataataccgccggcggtattgcgccgccgttggaggtggacgggctactcggagaattttgattggagagagataggaactgtcaccgaagttaagtgtgacagggtagatgtggatcatgctgggctttcagcaccacaggatctatagaaggagccaattttcttgccaccggaaagctcgtcagtcttagtgaacaacagctcc

SEQ ID NO: 71635 - DNA, 243 bp, Glycine max
  Clone ID: 700837227H1
caactctcatcttcgcgcttcgggttagggttagggttagggaattagggcttcgaacttcgacgcaatgtcgtccattaacccctcacgagctaccgctccctccgccttcgccacgcgccggccgtgggaggagttcttcgcgctccactcgttcacgcgcccctacaccctcggcgagaccacgctccgtgtgaagcgcaacctcggccacttccgcgtgaactatgccatggtcgtgct

SEQ ID NO: 71636 - DNA, 75 bp, Glycine max
  Clone ID: 700837228H1
caactgtgcagggtagaatgtggtgggcgttttttgtcataagtggcatctagaaaattgcaacgtcatatactc

SEQ ID NO: 71637 - DNA, 235 bp, Glycine max
  Clone ID: 700837229H1
gtagtaaagatgattctgttgagatggaagatgatatggcacaaagtgagattgatgtaatttgcatggaggaccggatgagatcactagggatgatttccagtgaaagtgtgtatgcatcaaacattgaactttgctgtaagttgttgaagggtattgatctggaagctactattccaatgacaaagataagagcagctgttttgtctatgaagtcaaccaaagcagggaagct

SEQ ID NO: 71638 - DNA, 251 bp, Glycine max
  Clone ID: 700837231H1
gcccttcatcagagataacttgacaaataaaatcaccatgtctatcatcccaaacttgttcggtggtagacgaagcaacgtcttcgacccattctctctggacgtatgggaccctttcgaggggtttcctttttccacaggtcacgtgccttcctctggtggggaaagcagtgccatagccaacactcgcgtggactggacggagactccggcggctcacgtgttcaacgttgatcttcccgggttgaaga

SEQ ID NO: 71639 - DNA, 79 bp, Glycine max
  Clone ID: 700837232H1
gccgttcgtggagatcgaagcctcttgccctctcaacgcatatttcccacgtaattcgtcggtcaaaccaacgattctc

SEQ ID NO: 71640 - DNA, 246 bp, Glycine max
  Clone ID: 700837234H1
gagaaatcaagcccaagaataggagaatcatgggtgctggaggccctgatgatgaggacaacaacaggtggccaccgtggctgaagcctctgctaaaagaaagtttctttgttcaatgcaagcttcacgctgattcgcacaagagcgagtgcaacatgtactgcttggattgtatgaacggtgctctctgctctctctgcctcgcttaccataaagatcatcgtgctattcagataaggcggtcct

SEQ ID NO: 71641 - DNA, 246 bp, Glycine max
  Clone ID: 700837235H1
ctctacacaaaagtgttccacttgagtgataagtagtgtgttaagaactaaacaatttttcaatggcgtccaagaaacaagaggagcgagctgaggcagctgcgaaagttgctgccaaagaactcgaacaagtcaacagagaaagaagagaccgtgatttcggtgttgttgctgaacaacaacaacaacatcatcaggaagatcaacaaaaacgtggtgtaatcgggtccatgtttaaggcggtgc

SEQ ID NO: 71642 - DNA, 246 bp, Glycine max
  Clone ID: 700837236H1
gttgacgagtatggcaacgttgagaagcaaaccgacgaatacggcaaccctgttcatgctgctagtgtcacctatgtagccaccagaactgctgctggtggttacagtgatgacattaataagcaacatgataccaccaatgcctacggcgtagacactggtagacagcattctagtggtggctacgatggtgacactaataaacatcatggaaccactggtggctataatgatgacaccaataga

SEQ ID NO: 71643 - DNA, 242 bp, Glycine max
  Clone ID: 700837239H1
gactttttgtgaagagagtgttcatttcagatgattttgatggagaactgttcccccgatacttaagctttgtcaaaggtgttgttgactcaaatgaccttccactcaatgtgtcacgtgaaattcttcaagagagccgcatagttcggattatgaggaaacgtctagttcggaaagcttttgacatgattctgggaatatccatgagtgagaacaaagaggactacgagaagttctgggag

SEQ ID NO: 71644 - DNA, 246 bp, Glycine max
  Clone ID: 700837240H1
cgcatcggatacccttaaagaagcggagataggagtgtgcgcctccaaacccaaggggcttcggaggggctcttcatcggaggcggtgctatattcccctccggattcccccaccatgaagagcctcttcaagcccaagccccgcactccttccgatatcgtcaaacaaacgcgagatcttcttctccgtctcacctcccgagatgacgataacatgcccgacttgaccaaaaacctcagggactt

SEQ ID NO: 71645 - DNA, 241 bp, Glycine max
  Clone ID: 700837241H1
atgggctcaatcctggtatttcaggttctcgtcttttgggcaccattcctcagtccatttcacagcaaactgtttggaatcaaatggcaacagtgagaacaccattgaattttgattctagcaagcagagcttttgtcaattttctattgaccttctcggtggaggacattttagtggacaaaactggagattggatcacacttatacaaaattctccaattagtaacttgttgagagttg

SEQ ID NO: 71646 - DNA, 239 bp, Glycine max
  Clone ID: 700837242H1
ctatttctttgaagaaggggatggaaaagactgtaaaggagttggtcaagttcttgaaggagagaagtgttcctgttgaaggaagggagcatattagagctgtagcatcgatttctgctggaaatgacgagtatgttggtaacttgattgctgaagctatggagaagattggttcagatggggtgatctctattgagtcttcctcatcatctgaaacctctgtgataattgaagaaggg

SEQ ID NO: 71647 - DNA, 239 bp, Glycine max
  Clone ID: 700837243H1
gggacaatgaggttctgtttgcggacagggttctgaagtttacgggctccgggaagatgaaacgctgcgttctgatgatcacggattctgcgatttacatcgttgaccctgaggtggacgcgctgaagcggagaatagtgcttgcggcggtagagagggtttgtctgagtgaactgagtgataattttttcgcggtgattattccgtcggagtatgatttgctcatggctagtactcgg

SEQ ID NO: 71648 - DNA, 244 bp, Glycine max
  Clone ID: 700837244H1
ctccgaggcccttgaaagatcggttcgtgcttcggtcttctcaagtggcgcacatatcgtttacggaatctgagaactcactcatcgaagcccttcttggcatccaaggacgcggacgttcttcttctcgctgttgagcgtgctgttcaagtcctagagcggttagggggtgtacctgatccgacaaaatcaaacttgatcgcgggtcgctggcagctaattatcaccacaagaccaggaactg

SEQ ID NO: 71649 - DNA, 244 bp, Glycine max
  unsure (1)..(244): unsure at all n locations
  Clone ID: 700837245H1
ctcttcttctcttgcggctagggttttagcgcacntcttctagatttacggaagatgggtaaggatcaggttcacatcagtattgtggttattggccatgttgactctgggaagtccactaccactggccacctgatctacaagcttggaggcattgacaagcgtgttattgagagatttgagacggaagctgctgagatgaacaagaggtctttcaagtatgcctgggtgcttgataagctta

SEQ ID NO: 71650 - DNA, 248 bp, Glycine max
  Clone ID: 700837246H1
aggctgcagagatggagagggagtcattgataactgaagctcctaatgcaccagtgactgcacagagtagggtcagaaatgactgacaaaattctctaccaaaaccatacttgccaagagcattgaaagctcctgatacgggtcacccaaatggaacagcaggccacaggcagcacaacttatctattcttcagcagcattatgcttttcgtgagcaagatgacaatggaatcagtgacccttgggaa

SEQ ID NO: 71651 - DNA, 252 bp, Glycine max
  Clone ID: 700837247H1
acagttaacaaaatttcgataagaaaagttcccaacttcagctaagagaaaatgtctctgattccaaactttttcggtggccgtaggagcaatgtgtttgatcctttctcccttgaagtgtgggatcccttcaaggattttcattttccctcttctgtttctgctgaaaatttagcatttgtaagcactcgtgtggattggaaggagactccagaagcgcacgtgttgaaggcagatattccagggctgaag

SEQ ID NO: 71652 - DNA, 202 bp, Glycine max
  Clone ID: 700837248H1
gcgcgagggaatccaaagccatagataatactattaaaatcctctatagctacggcggaatgatccttcctcgccacaccgacgcctagctccgttactacggcggccacaccagagtcctctccctccatccttccacttctttctcagagctgatactatagcttaccgagttatgcgtttcgccggcacataaggggcc

SEQ ID NO: 71653 - DNA, 244 bp, Glycine max; identical to SEQ ID NO: 71631
  Clone ID: 700837250H1

SEQ ID NO: 71654 - DNA, 244 bp, Glycine max
  Clone ID: 700837253H1
agttaaaaacaagggactaaaatcaaagtctttttaaacatagaattaacctaaaagtaggcaaaaaaagagtaattaaaatcccctcccttcctcacccccaccccccgccctcctaacatgtccacaaaaaacagttcacgtgaaccaccatgaaaagctaccaaccacataataatgtccacctttagattctttaatcagttctggttgatccactgcttgtggcccggaacccattttg

SEQ ID NO: 71655 - DNA, 243 bp, Glycine max
  Clone ID: 700837254H1
tcaaaccttgctctatactacacagtacacacactagaagaataatggcttccatcctccactactttttagccctctctctttcttgctcttttcttttcttcttatccgactcagtcacccctacaaaaccaataaaccttgttgttctacccgttcaaaatgatggttccacagggctccattcggccaacctccaaaaaagaacccctctaatgcaagtaccagtcctggtggacctca

SEQ ID NO: 71656 - DNA, 243 bp, Glycine max
  Clone ID: 700837255H1
cgttaatgacttttacctacaattgaaaatgatagatacatattaaaaactttttacctacagttaggaaatgtaagtagaagttaatgacttttacctacacattatacatagtaggtaaaacctatagtgacagacaattagccgtcactatacccccccctcaaagttgacagagaaaacgtccgtaggacaaagtctatcatacatttacttacggattttttatttatagtgacagtt

SEQ ID NO: 71657 - DNA, 242 bp, Glycine max
  Clone ID: 700837256H1
tgtgagaaacaaagaaaggaaataattgatctttgaaaatgcagggaggaaagaaagctggagagtccatcaaggaaacagctgcaaacattggtgcttctgccaaggctggcatggagaaaaccaaggccactgtccaggagaaggcagaaagaatgacggcacgtgatccgatgcaaaaggagttggcaacccagaagaaagaggcaaagatgagccaggcagagctggacaagcaggcg

SEQ ID NO: 71658 - DNA, 243 bp, Glycine max
  Clone ID: 700837258H1
tatcacggcgttctatggtgcttaaatgcaagggcgaaggatcggatccggtaattctgggaaacgcttccgatgtcagccactccagctacttccagcgttccaacgttaaagcattcatcgttttcgttggatcgtacaatcgccagttgtactcctcagggccacagcaaatccgtaaaacacgaagagtacaaggtgcacacctacaaccggaatagtctttgcgcattagaattcttg

SEQ ID NO: 71659 - DNA, 217 bp, Glycine max
  Clone ID: 700837259H1
agactatgcggctcagaaagcaaaagaaaccaaagactatgctgctgagcaggctaagactgcgaaagataccactgtgcagacagctggagagtacaaggattataccgctgagaaggctaagaatgctaaagataccactgtgcagaaagctggagaagacaaggattataccgctaagacggcaattgaagggaaggacagtgcagtgaggaag

SEQ ID NO: 71660 - DNA, 243 bp, Glycine max
  Clone ID: 700837260H1
actctatactacacagtacacacactagaagaataatggcttccatcctccactactttttagccctctctcgttcttgctctcatcttttcttcttatctgacgctctcacccctacaaaaccaataaaccttgttgttctacccgttcaaaatgatggttccacagggctccattgggccaacctccaaaaaagaacccctctaatgcaagtaccagtcctggtggacctcaatggaaatc

SEQ ID NO: 71661 - DNA, 249 bp, Glycine max
  Clone ID: 700837262H1
aaattcccaatttcttctgccgttcgatttcagactcttcattcgggatttgccatagcgattccttggttctcattcattcgttgcgtgctcgttcggctgttctcgtcgttccagtgaagagttccgtttcagtcatacaaccttgctcactgatgtttctgcacagttgttcctctatatgttggtgtgtttgtttggacatctatttcagaatgtgcaatgcaagagctctcagccatgggtcga

SEQ ID NO: 71662 - DNA, 251 bp, Glycine max
  Clone ID: 700837263H1
atgggctaaagagaaactcactgaaggtcttggcttcaaacatgatcaagaatccaccactaagaaagtctctgactatgccggtgatgctgctcagaaatcaaaggactatgccggtgacactgctcagaaaaccaaggactatgccggtgacactgctcagaaaaccaaggactatgccggtgacactgcacagacatcaaaggactatgccggtgatgctgctcagcactccaagggctatgtcggtg

SEQ ID NO: 71663 - DNA, 186 bp, Glycine max
  Clone ID: 700837264H1
ggacatgataaacctgaggtgactgctgtgtcaatggaccctaatttttcaacctatctacactatgacttcctgtctgtcgtctctgacaaaaaacagaagtcaggaattttcttgaagaggaataaacgtagatatgccagtaatgatgaattttcaagccaggctatggcaggactacaattt

SEQ ID NO: 71664 - DNA, 242 bp, Glycine max
  Clone ID: 700837268H1
cccgagaaagacaccggtagacatcattttggtcgtggttacgacggtgacactaacaagcaacatgatgctactggtgtttatcccggaatagacattggtagagatcatgggactaccggtgtttatggcctaaacaccgacagacatcatggcacttctggggtgaatcccgggatagacacccataaccaacaacatgggactaccgttggttatgctggtgacactggaaggcagca

SEQ ID NO: 71665 - DNA, 242 bp, Glycine max
  Clone ID: 700837269H1
ctctccattgtctttgaacactcatcaccatggccaagcttgttctttccctttgtttccttcttttcagtggctgcttcgctctgagagagcaggcacagcaaaatgagtgccagatccaaaagctgaatgccctcaaaccggataaccgtatagtgtcggacggtgggttcattgagacctggaaccctaacaacaagccattccagtgtgccggtgttgccctctctcgctgcaccctt

SEQ ID NO: 71666 - DNA, 72 bp, Glycine max
  Clone ID: 700837270H1
gttcaaagtgtggacgtggtttctacttagtactcaaacgtattagtaattggtatcaaaactgtccaacaa

SEQ ID NO: 71667 - DNA, 240 bp, Glycine max
  Clone ID: 700837271H1
gggagttcgtggagtacaagaagacgatatacctagacggtgacatccaagtatttggaaacatagaccacttgtttgatctgcctgataattatttctatgcggtgatggattgtttctgcgagaagacttggagccacacccctcagttccagattgggtactgccaacagtgccctgataaggttcaatggccctctcactttggttccaaacctcctctatatttcaatgctggca

SEQ ID NO: 71668 - DNA, 235 bp, Glycine max
  Clone ID: 700837272H1
catcatcatcgcccatggatcagccgaagcgagtggttgtctgcggcggcggagtaatcagagtctgcaccgcctactttctggcagagaagggcgccgctgtcacgctcatcgagaaatccgacgtggcgtgcgccgcgtaccggaaaagccggcggattcctcgcgctcgattggcgtgacggaggaccgttggaagatctagctcgcgccagcttacaatctccaccgttcg

SEQ ID NO: 71669 - DNA, 240 bp, Glycine max
  Clone ID: 700837273H1
aaatggctgaagcacaactacgagaccagcatggcaaccctggcccactcaccgatcaatacggtaatccggttatcttaactgacgagcgcggtaatcccgtccaactcactggtgtcgctaccaccgctaccggcacagcaggttctgggtttgggtcctatggtaccggtgcttacggtggtggtgcaagtgcaaccaccgttgcagatcttttggcaacccaaccaaggagtggca

SEQ ID NO: 71670 - DNA, 243 bp, Glycine max
  Clone ID: 700837274H1
tgctccgcaagaatctgcctcccgaggtgcgagacgcgcaggaacagaagttggaggcgctgaagaagcagcaggagattcacactcgcctcgccgccgaacgcaagatattcttacgcgaccgaaagatcaagttcttcgagaggaggataatcgaaagacgaatcagacgcctcgagaaactgcaccgtgcttcttcttcctcttcttccgctgcccagtcttaccctgaccagatttccg

SEQ ID NO: 71671 - DNA, 238 bp, Glycine max
  Clone ID: 700837275H1
gcacaatttacaatctcaatggctggaatttgctatggtgttgttggagaaggtgacactccggctccactcgagcccactcctcgcccctccaggcgccggagtttggacatcttacctttaaaatatatcgccgacatgcccatgccgccgccggaagctttacggaagcgtcccaagctcaacctgcaggactgcgataacgccattgacaattgcgacgaatccactggacaca

SEQ ID NO: 71672 - DNA, 244 bp, Glycine max
  Clone ID: 700837277H1
ctctcgcttcctcaaaatttcgccctcttgcattcaattcacttctctgctcttctcttctgtgcccaccttctgatccatcatcccgcgttttctccgaacaatggctgctggtgtcactgtcaagtccgaggttctagaatcttctccccctgaaggagtatgttccaacacggaggaaagccacctggttcagaccaatttgtctgatgggtcacccaacaagtctgtgccagcatctgga

SEQ ID NO: 71673 - DNA, 215 bp, Glycine max
  Clone ID: 700837280H1
gtcgtggtcgcgttgtgatttcgtcacaatcgtggacaagtgcggccaatatggttccaattgcagttgcatggcagtcgcatacaggtaaaaaatcttgatgttgcagacggatatttaaaaccttgggggttggtgatgcataaagacactttgaggacgttcccttgaagggtttgatagttttaggtgtcttgttgataagtttaattgaa

SEQ ID NO: 71674 - DNA, 246 bp, Glycine max
  Clone ID: 700837281H1
agagaatcgtttgcatctgtactttaagaaagggagagttggggatgatccaaatgcagaggagcgattagaagagtgggacaatgtagatggtgctctgaaagagtttgtgaggctctttgaggaaataacaggaaatgagtttgaaccttgggaaagagagaagaagttccaaaagaaacctttgaagtgttaccccattgacatggatgatggaagtgaagttagacagggggcactaggtct

SEQ ID NO: 71675 - DNA, 246 bp, Glycine max
  Clone ID: 700837282H1
acaccctcacaaacacaaatcccttggttggccagcttgaccagcttcatgggattaacctcccttttggatcagaaccaagtagtggtattaggccacaaaataacagtggaaataaactgtttgatcagtccactcagaatgatctaccaaataaattggaaatggaacaaaactacaatatggaagagcatgagccaaaagatgaagaagatgcggatgagggagaaaatcttccacccggtt

SEQ ID NO: 71676 - DNA, 245 bp, Glycine max
  Clone ID: 700837283H1
gtaaccgtcttgataaacatgagttttcagaactggtaaagagggggtctacagcagaggacgtaggtgcaggtcatgctgaagcagcaagggttcaaggtcttggttttgcaagagaaccacgcccttgggaagaacctggttcttcaaagccttcactcggtgatacaccagctgaggaggaaaatgtatctttgccaagtcaaccagcaatgaagactgcagatgattcagaagatgaaagt

SEQ ID NO: 71677 - DNA, 244 bp, Glycine max
  Clone ID: 700837284H1
agaaaacctaagcttagaattagaaacaaagaaaagaagaaaggaaagaattgatcgttgaaaatgcagggaggaaagaaagcgggagagtccattaaggaaacagctacaaacattggtgcttctgccaaggctggcatggagaagaccaaggccactgtccaagagaaggcagaaagaatgacagcacgtgatccggtgcaaaaggagttggcaacccaaaagaaagaggcaaagatgaacc

SEQ ID NO: 71678 - DNA, 244 bp, Glycine max
  Clone ID: 700837287H1
ataagcttcatcatcatctacttctactctgcatcatctctatggctgtagtacgttcacaataagaactatcccaacatgtgcatgtccacgtaactcacacatcacaccccataagtccatggtcgtagtagcgtggcagtggcattctgatactcatcccggtgatatctctcacgggttccctactcctagctctcctcgccggcgttccacttagtgcaatgctactcctcctctccgg

SEQ ID NO: 71679 - DNA, 241 bp, Glycine max
  Clone ID: 700837288H1
gaaatttggaaataatgagaagaagaagaagaaaaaggaaaataataagggaaaatgagtactctttgagaacttccatggaaaaaattgaaatcttgataatgtattttaaaaatcaaattgatttaaatgcatgaacttgaagggcttgattttacagaaaatttggaaatcatgagaataagaagaaacagaataaggaagaattgtgagaaccttaatggcaaaaattacagtcgtc

SEQ ID NO: 71680 - DNA, 217 bp, Glycine max
  Clone ID: 700837289H1
gtttctctctctagaaaaaccaaaacctggctcctttttttagctctttccttatttagccttcacacactccaaactgtgaaatccatttttagcaaagtaaaaaaaagtgagccagtgtgagagagagtggtcatcagtcatcaccgttgattgattaagatgcagcaatcaaacggctctaattcgacgactacgatggagcagagcgcgccgc

SEQ ID NO: 71681 - DNA, 239 bp, Glycine max
  Clone ID: 700837290H1
cagttagcgggtgagaaaagtaatcgtgatatacgacgagctccaagctttagtggtccattaatgcttccaaaccgcgcttgagagaatagtttatcagcgtcaatcaaatcttctggaggtatttgaatcatcatgtacatcgtaaggctgtgtgcaagtttcagtatttatcaacagccatcgtaaacactttggtgctcatttggtccaccaatgcttgttaggattcagagatt

SEQ ID NO: 71682 - DNA, 249 bp, Glycine max
  Clone ID: 700837294H1
cggaacgttgccacaaacgttattgttttcagataaacacgtgactatctatctatcaatctccatctctgagttcaaccgaaccaaactccgaagctatggcagagctccaaaccaaggttgaacctgttccagtcccggctctagctccggtggagcccgagccaccgctggctgaagcgccgccgctcgagcagaaagcggtgatggtgactccagctgttccggcagcagcagaggaaaccaaag

SEQ ID NO: 71683 - DNA, 77 bp, Glycine max
  Clone ID: 700837295H1
tggacaggttccatgtgcacggcacgtgcacatgggttagtcgatcctaaaggccggaggaagcccgtctgatagcg

SEQ ID NO: 71684 - DNA, 256 bp, Glycine max
  Clone ID: 700837301H1
tgagtatgtacggtagggatccgtggggaggcccgctggagattcacgccaccgactccgccacggacgacgagcgcaccggaatctccaggagctggaccgaggcgctttagacgagacccaacagagctggctcttgggcgccggagaacagaaaaagaacaagaaaacctacgtagaccttggctgcatcatcgtcagccgcaagctcttcatctggaccctcggcaccctcgccgtcttcgccttcctctcc

SEQ ID NO: 71685 - DNA, 248 bp, Glycine max
  Clone ID: 700837302H1
gataatattgatctactgttgagcattgatttgttgggtttacaaggagcaggtaaagcttttccaaacaagattgtttttgatgataagcttgtgttggctaacacacaagaattctttgatggaaattttccagtggattcttggttaccaatttttgtgaattgtctttatcctgtaagtcgggtacctccagaagctgtcgttgtaaatgttacatgtggtagtggacgtggtggtttacccac

SEQ ID NO: 71686 - DNA, 251 bp, Glycine max
  Clone ID: 700837304H1
cgaaagtttctttgttcaatgcaagcttcacgctgattcgcacaagagcgagtgcaacatgtactgcttggattgtatgaacggtgctctctgctctctctgcctcgcttaccataaagatcatcgtgctattcagataaggaggtcctcataccatgatgtgattagggtgaatgagattcagaaggtgttggacatcacaggggtccaaacctacattatcaacagcgcgagggttgttttcttgaatg

SEQ ID NO: 71687 - DNA, 249 bp, Glycine max
  Clone ID: 700837306H1
ctctccttctcgctctttcagctttgacttttgttggaaactaaggcctaatcaaaatggtgaagttcacagctgaagagctacgtcgtattatggactataagcataatatccgtaatatgtctgtcattgctcatgttgatcacggaaaatcaaccctcactgattctcttgtggctgctgctggtattattgctcaagaagttgccggtgatgtccgtatgactgatacccgtgcagatgaagctg

SEQ ID NO: 71688 - DNA, 251 bp, Glycine max
  Clone ID: 700837309H1
cgaatagaagtaactttgtctctcttctctgcagtggtggtaatttattttccaatggcttcagcaagcggacggcgaattcctccgttccgccgccgcaaatccacacctcacgaacaaagctgagccaccacagcagcaacaacaacaacaacatcgactccatgagcaaggccatcgcgcagtacacggaggacgcgcggctccacgccgtcttcgagcagtccggcgagtccgggaggtccttcaac

SEQ ID NO: 71689 - DNA, 253 bp, Glycine max
  Clone ID: 700837311H1
gagtgcctcccacgcccggtcgtactcataaccgcatcaggtctccaaggtgaacagcctctggtcgatggaacaatgtaggcaagggaagtcggcaaaatggatccgtaacctcgggaaaaggattggctctgagggctgggcacgggggtcccagtcccgaacccgtcggctgtcggtggactgctcgagctgcttccgcggcgagagcgggtcgtcgcgtgccggtcgggggacggattgggaacgggcc

SEQ ID NO: 71690 - DNA, 251 bp, Glycine max
  Clone ID: 700837312H1
caaactgtaaataaggtaggacggtgcagctgctctgatgagccgcgccatggaatcgagagctccaagtgggccatttttggtaagcagaactggcgatgcgggatgaaccggaagcttggttacggtgcccaactgcgcgctaacctagaccccacatagggtgttggtcgattaagacagcaggacggtggtcatggaagtcgaaatccgctaaggagtgtgtaacaactcacctgccgaatcaacta

SEQ ID NO: 71691 - DNA, 249 bp, Glycine max
  Clone ID: 700837313H1
cgcgtaacagcggctaccctaacctcgtcttcctctctactaatttcagctatggccgacgaagctgtggttgttccagatcccacccagatcgatgtcaagctctttaaccgctggagcttcgaggatattgaggttactgacatttcactggctaatgaattggagttgcggcatccaagcacgccacatatgttcctcacaccgccggaaggtactccgtgaagcggttcaggaaggcgcagtgcc

SEQ ID NO: 71692 - DNA, 254 bp, Glycine max
  Clone ID: 700837314H1
gtgattttttgtgagtgtggcatagatcattgaatcaatggccttcgccaccagcgccttggtttgttcaaacttgctcggaaggaaggttctagtcacaagcaaatcatccactccactaccatttcttttcaagagaagcatcttaaaagctcagtattcagagcaagtcaaatccgcatcttcacgggctgctctagctgcacttatcgtctcctccgcgagcctctctgtgaccccagaagccctagccg

SEQ ID NO: 71693 - DNA, 258 bp, Glycine max
  Clone ID: 700837315H1
agcacaaccttatggtgtatatacatggttaacggatattaaagacacctctaaagaaggatatagttttgaagagatatgcatcaagaaagaagcgtttgagggagaagagaagttttgtgcaaaatccttgggaacagtaattggttttgccatttcaaagctgggaaagaacattcaagtactttcaagttcctttgtcaataagcaagagcaatacactgtggaaggagtgcagaatcttggagacaaagcagt

SEQ ID NO: 71694 - DNA, 256 bp, Glycine max
  Clone ID: 700837316H1
atgagggactgctaaccgaagttttctttggatcccctctttgggtggtcctactaccattgctgctagacaaagtggagctggaatctcttggctttttccatttgtggacggacatccacctttgggttggcaagatactgcagcatatcttgttttacctattcttctagtcgtttctcaatacgtatcaatggaaatcatgaaaccacctcagacagatccttctcaaaagaatcaacttcttattttaaag

SEQ ID NO: 71695 - DNA, 252 bp, Glycine max
  Clone ID: 700837317H1
atacaagaagtttacgttacaaatcgcataataaccgtcctaagtttattgagagaattttgcaagtgtgagaaacatggcatctcgtcaaaacaacaagcaagagcttgatgaaagagcaaggcaaggagagactgttgtcccgggtggaactggtggcaagagcctggaggctcagcaacaccttgctgaaggaaggagcaagggagggcaaacaaggaaggaacagctgggtacagaagggtaccagga

SEQ ID NO: 71696 - DNA, 252 bp, Glycine max
  Clone ID: 700837318H1
caagaaaagaaaagaagaggaaaaggagagtggagaggaagaaaaggattgaagttgttgctgtgagaaagagaaagagtgaaatcggagtttgggaaggaattgcaatcaatggatgtgataaagacgcagcaaatctcatctcgaccaatcgagaaggtggtggttcaccctctcgtgcttctcagcatcgtcgacaactacaacagagtcgccaaagacactcgcaagcgcgtcgtcggcgtcttgctc

SEQ ID NO: 71697 - DNA, 251 bp, Glycine max
  Clone ID: 700837320H1
caaacctcactttccaatggcaatttcttgggcagcagcaacaacctcaaagctcgcataccctcctcatgtccacttctctccttcaccctcctccaattatctcttccttaaaacccacaaaccctccgccacacacctctcctcttccttcatccaccccaccacaatcctccacctcgccgctgccaacaccaccacccgccgccgctccttcaccgtccgcgccgcccgcggcaagttcgagcgca

SEQ ID NO: 71698 - DNA, 244 bp, Glycine max
  Clone ID: 700837321H1
gcagaggagcgtaagttggaagaggaagccagagctcagaaggctaaggaggaggaggctgctgcattagagtttgagaagtggaaaggtgaattttcagttgatgatgaaggtacccttgaagaagtgcagggtaatactgaagacttgctaggcaattttgttgaatatataaagaagcacaaatgtgttcccttggaagatcttgctgcagaatttaaattgcgtacacaggaatgtatca

SEQ ID NO: 71699 - DNA, 248 bp, Glycine max
  Clone ID: 700837322H1
aagaaacctcaaggggagcaggaccccatcaaatacggcgacgttttcaaagtctccgacgaactcgctttcaaacccatcgcgccaagagacgtagctctcatgcaagccacggagaaccaagcattgggccaaactcaaaaaggaggtcccgcctcggtgatgcaatccgccgcaaccgaaaacctccgcgccggcgtcgtgggccgccaagacatctccgacgtggcgaggaacgaaggcgtgac

SEQ ID NO: 71700 - DNA, 245 bp, Glycine max
  Clone ID: 700837323H1
aggaattttagtggacaaaactggagattggatcacacttatacaaaattctccaattagtaacttgttgagagttgctgcttggaagaaaggctgtttaatggttaaaattgtgatgtctgggaatgcagcagtcaaaaggagtgattgggcctcattggtacaagtgtttttaacaaacagcaacagtacagagcatttcgatgcatgtaagtggacaaaatcggaaccacattcctgggaat

SEQ ID NO: 71701 - DNA, 246 bp, Glycine max
  Clone ID: 700837324H1
atttacaatctcaatggctggaatttgctgtggtgttgttggagaaggtgacactccggctccactcgagcccactcctcgcccctccaggcgccggagtttggacatcttacctttaaaatatatcgccgacatgcccatgccgccgccggaggctttacggaagcgtcccaagctcaacctcagggactgcgataacgcaattgaaaattgcgacgaatccactggacacaaggtgacgaagaa

SEQ ID NO: 71702 - DNA, 176 bp, Glycine max
  Clone ID: 700837325H1
ctggtattgtggggtgtggttcgtttagtggtgtcaagtcttgcgaacgtgagggtgcatgagtggtaatcgggatgtttttgttgcacggctccatgcttgcgcatgcaacgtgtgacatgcatccttttcattggtcaccttgagcctgtccgtggcttgacggtgcttgacga

SEQ ID NO: 71703 - DNA, 248 bp, Glycine max
  Clone ID: 700837326H1
cgaggaagtgaaatgtaatggaattgctgaagaagttaaggttgaacagggggggactgtggagtcctcctctgtccagcagcatataccacagcctcaaggggcaataatttgttgggagaggtttttgcatattagatcccttaaggtcttgcttgtggagattgatgactctacccgtcatgttgtcactgcactgcttcgcaattgtagttatgaagttattgaagcagcaaacggattgcaag

SEQ ID NO: 71704 - DNA, 252 bp, Glycine max
  Clone ID: 700837327H1
caaaatgccaggtcttaccatcggagacactattcctgatcttcaagttgaaactaaccaaggcaaaatcaagcttcatcagttctgtgctgatggctggaccatccttttctctcacccaggttctcattcacttaatttaaatatttttctttctatatccatatttggtggttacttgatttcttcttctcatgcatgcatgattgtaatttctaaatgtatgtatagatgatttcaccccggtttgta

SEQ ID NO: 71705 - DNA, 250 bp, Glycine max
  Clone ID: 700837328H1
caagaaaagttcccaacttcagctaagagaaaatgtctctgattccaaactttttcggtggccgtaggagcaatgtgtttgatcctttctcccttgaagtgtgggatcccttcaaggattttcattttccctcttctgtttctgctgaaaatttagcatttgtaagcactcgtgtggattggaaggagactccagaagcgcacgtgttgaaggcagatattccagggctgaagaaggaggaagtgaaggt

SEQ ID NO: 71706 - DNA, 255 bp, Glycine max
  unsure (1)..(255): unsure at all n locations
  Clone ID: 700837329H1
cgaaataattgatctttgaaaatgcagggaggaaagaaagctggagagtccatcaaggaaacagctgcaaacattggtgcttctgccaaggctggcatggagaaaaccaaggccactgtccaggagaaggcagaaagaatgacggcacgtgatccgatgcaaaaggagttggcaacccagaagaaagaggcaaagatgagccaggcagagctggacaagcaggcggcgcgtcacantaacacggcggcgaacagg

SEQ ID NO: 71707 - DNA, 251 bp, Glycine max
  Clone ID: 700837330H1
cggggttgagaggactgtggttacttggactttgttgatgaaatgttactgcaggcagggaagggtcgatgaggccgagaggttgcttcggaggatgaaggaggatgagggggtggttgtggatgatcgcgtgtatggcgtgttggtcaatgggtattgtcaggtggggaggatggatgatgcggttaggattcgagatgagatggccagggtggggttgagggtgaatgtgtttgtatgtaatgcgttgg

SEQ ID NO: 71708 - DNA, 257 bp, Glycine max
  Clone ID: 700837331H1
caaaaaaaccaagtgatttcttctaattacaacacgtataaaaaagaataattggatatcatagataatctctttatcaagaattatatatcggaagatgcgattctagatatggaaaaaaatatgtatagaaagtattttgattggatgggaatcaatagagaaatactaaatcgttccatatcgaatccagaattttggttcttttcaaaatttgtgatattttatgacgcatataggggtaactcgcaggttat

SEQ ID NO: 71709 - DNA, 158 bp, Glycine max
  Clone ID: 700837332H1
cagaaacaaagaaaggaaataattgatctttgaaaatgcagggaggaaagaaagctggagagtccatcaaggaaacagctgcaaacattggtgcttctgccaaggctggcatggagaagaccaaggccactgtccaggagaaggcagaaagaatgacg

SEQ ID NO: 71710 - DNA, 153 bp, Glycine max
  Clone ID: 700837333H1
caccttttctagggctagcagcactgtaacctcaactcacctctcccaaatccgttccctctttcaaacctttttttttttttccaccaaatcggcgatggcaaggacgtcggtggtcccggcaaaccggggtcgcggggggaaccccgcgga

SEQ ID NO: 71711 - DNA, 248 bp, Glycine max
  Clone ID: 700837334H1
catgtgagaagaagaagaagaaaagtgtgagtgcagaaaagaagagtggtgggcgagctcggaagaacgtgtacagaggaatcaggcaaaggccgtggggcaagtgggccgcggaaataagggacccacataagggcgtccgcgtctggctcggcaccttccccaccgccgaggaagccgcccgagcctacgacgacgccgccaagcgcatccgcggcgacaaggccaagctcaacttcccggccacc

SEQ ID NO: 71712 - DNA, 248 bp, Glycine max
  Clone ID: 700837335H1
aggctcccctcacctctctctccgaaatccccaaattgcctgtgaatgctagaaaccctaggcacgttcgatttgatgctctcccatttgcaatcaagggcgagcgcattcggttcttgcacgcaaggctggtactaccgctgcatcggcctcgatccctgaattcatcattctttctcgcaccatctttttctattccgattcgatttgttgttgttgttgttgttgttgtgtttttgtttccttcc

SEQ ID NO: 71713 - DNA, 245 bp, Glycine max
  Clone ID: 700837336H1
tatcgccatagatttagtttcattgagtactgtgtggcgaagtttgtgtcttggattttgtggacatgggtgcttatgatcaagtttttcttaagccattggattcttctagaaagaggaaaagtaggagcagaggggatgggtccaaatctgtggctgagactattgcaaagtggaaggaatacaatgagcatctttattctggcaaagatgatagtagaacaactcgtaaggcgccggctaaa

SEQ ID NO: 71714 - DNA, 244 bp, Glycine max
  Clone ID: 700837337H1
ttgcacagtccagaggaagctcgccaattgagaaggaaagctctctctcgtattgaatggctgcaaaaagctgatgtgcctaccatagcacagattgaagagttccattcgatgcagaggatgatgaatgctcctgattcaaatgataatattgatctactgttgagcattgatttgttgggtttacaaggagcaggtaaagcttttccaaacaagattgtttttgatgataagcttgtgttgg

SEQ ID NO: 71715 - DNA, 248 bp, Glycine max
  Clone ID: 700837338H1
cgaacagtgcaagtccaacccttccctcctcgctgatccttcactctccttcttccgcgactatcttcaaagtctcggcgcgaaacttcctgagtctgcttattccgaatcgacgggcgtggagagggatgaggacatagaggatcttacggaggagcacgagaaggtagaagaagaagaagaagaagaggacgatgtaattattgaatccgatgttgagcttgagggtgaaacctgtgagcctgatg

SEQ ID NO: 71716 - DNA, 245 bp, Glycine max
  Clone ID: 700837339H1
attggagaattcatgcaacctgactgggacatgtttcatagtttacacccagcagcagattatcatgctgcagctcgtgcaattggtggatgtcctatttatgttagtgacaagccaggctatcacaattttgatcttcttaagaagctggttctcccggatggttcggttctccgtgctcagttacctggcaggccaactcgtgattctctatttgtggatccagccagagataggactagctt

SEQ ID NO: 71717 - DNA, 247 bp, Glycine max
  Clone ID: 700837341H1
ttccaatgtagcttatggaatgtaccctatgccggccatgaacccaagtggggtctcgtcaaatggaccaacaatgccatctgttgtaatgttttatccttatgatcataatactggttatggttcaccagcagagcagcttgagtttgggactttgggatcaatggggttctcaggtgtcaatgaactgtctcaggcaaatgagggaagccaatctagtggagcacatgaagatcaaaggtttcgc

SEQ ID NO: 71718 - DNA, 249 bp, Glycine max
  Clone ID: 700837342H1
aaggctatcaaatggactggaatgcaggatttgcttatgcaaagaatggagtgcctattggtcctagagctaattcttattggctttacaatgtaccatggggcatgtacaaatcattgatatacataaaggaacgttatggaaacccaactgttattttatctgaaaatggcatggatgatccgggtaatgtgactcttcccaagggtttgcatgacaccacaaggataaactattacaaaggctatt

SEQ ID NO: 71719 - DNA, 249 bp, Glycine max
  Clone ID: 700837343H1
atgtaaccgcttatgaagtcagggataagcgttctactcttaaacccgacgattgggatcgggttgttgctgtttttgtgctcggcaaggagtggcagtttaaggattggcctttcaaggaccatgttgaaattttcaacaaaattattggatttttcatgcgttttgaagatgatagtttggagtcatgcaagactgtcaagcagtggaatgtcaagattatctcatgaagtaagaacaagcgacatc

SEQ ID NO: 71720 - DNA, 249 bp, Glycine max
  Clone ID: 700837344H1
cagaaaacctaagcttagaattagaaacaaagaaaagaagaaaggaaagaattgatcgttgaaaatgcagggaggaaagaaagcgggagagtccattaaggaaacagctacaaacattggtgcttctgccaaggctggcatggagaagaccaaggccactgtccaagagaaggcagaaagaatgacagcacgtgatccggtgcaaaaggagttggcaacccaaaagaaagaggcaaagatgaaccaggc

SEQ ID NO: 71721 - DNA, 164 bp, Glycine max
  Clone ID: 700837345H1
agtttgcatctcctctttggttttccttagttctgaaagttatctcctaagaagacaatcatatgtactgtacgtagtgtgaagatatagtattgtatgctgcagaatatgattgtctaataaggtggactagctgtaataaaagatatttccaggtggataac

SEQ ID NO: 71722 - DNA, 252 bp, Glycine max
  unsure (1)..(252): unsure at all n locations
  Clone ID: 700837346H1
acgaaaaacaagctacctagaaaagaagacacaagagtacagaaaagaaaccaacatttattgtaactgttgttcccagaactgggttcttgatcgacggtggcaaaattgcttttatttatctgtgttttaatgtgttgtgtttgtcggaacccctgattacatttttgttaagcgcacgnngtttcaggactttgctgcgttgtgttgctttggtttattaaatgtcaactttctatttgtagtgttcaa

SEQ ID NO: 71723 - DNA, 251 bp, Glycine max
  Clone ID: 700837347H1
tgatcgagcgattcggctcacggctcgagggctaatctactttaggtttgaaaaccgaaaatattcttaggggtagtctcctgaaaggctaaagagagggatgaaggagggaatactacgtagcgttgaaatttttaaatgagatatggccaatcccattttctgttgggttttggtgttgagcaagttaatggtcatgaggaagttaagtttctaattcatgttatattgaaaacgttactttattctta

SEQ ID NO: 71724 - DNA, 240 bp, Glycine max
  Clone ID: 700837348H1
cactcgttcttcttcgtcgttatcttcttcttttgtcgtttgtgtgtctgttttttctctcacctgaaaatgtcttgctgcggtggtaactgtggttgcggaagcgcctgcaagtgcggcaacggctgcggaggctgcaagatgtacccagacttgagctacaccgagtcaaccaccaccgagaccttggtcatgggagtggcaccagttaaggctcaattcgagagtgctgaaatgggt

SEQ ID NO: 71725 - DNA, 242 bp, Glycine max
  Clone ID: 700837350H1
aggccccgtaatggatttcactccgccgccgatcgatgacggtttcaccgccgagaaactcttcacgcagggcttctcctacacatacgatatactcatctttctcccccactacatcgactatactgccgacgtcgtggacctctccacgcgcctcacgcgccgccttccccttgccgtgccgtttgttgcctctccgatggacaccgtgtcggagtccgccatggcctccgccatggcct

SEQ ID NO: 71726 - DNA, 237 bp, Glycine max
  Clone ID: 700837351H1
ggagaacgcaaaaggatgattcagttgttgttcatggtgatttttgtcgagggggttctggcatttcttttgttggttaagataggacctttgagagatcttgtgataaagagcctggatcagttgaagatggggaagggtccagctacagtgaaaaccattgctggtaccatgtcggtgattctcctttcaagtctcatgagcattgtcaagatccagaacaaaggtgctaaactt

SEQ ID NO: 71727 - DNA, 245 bp, Glycine max
  Clone ID: 700837352H1
gttagcacttcctgctgtagattgtgataaagcctttgccatgcagttatcacttgaagagacattgttgacaactcagacaatgtatttgcaagtagcattgttatatactgcatcttgtggtgaaaggcgaataagagtacacacaatggcagttccagtagttacagagttagcagatatctatcggctggctgatacgggtgcaattgtatcactgttaagtaggctagcaattgagaaaa

SEQ ID NO: 71728 - DNA, 242 bp, Glycine max
  Clone ID: 700837353H1
ctcgagcgcgttgtactcacttagagccattcatctgcaaccaccagttcgataatgatgatgtgaaaccctttgatataacacagattaagggttattggaaacaggaaattctcaggtacatgtatacccaattggactcgaagtctagtgggagttccaggcaatcagatgatgacctggaacttgatgaaaatcatatgactaccgtttttatcagacctaagaagaggctgcgctta

SEQ ID NO: 71729 - DNA, 245 bp, Glycine max
  Clone ID: 700837354H1
cgaatgtcaataactccactcctatacccattgagagccgacaaccccaaactgatcatgcacatgtctcttaaaccgtgggagagacacatgaaattccccaccacaatctagccgactttaagccttgcctcggatatgccactgaagggcaagcagttggtggtatacccctacaaaaccctttggagggccctcagtatcatccccagctacacctcttgcattccacaacaagtaaaaac

SEQ ID NO: 71730 - DNA, 146 bp, Glycine max
  Clone ID: 700837355H1
acatttttcatcggaaagattttcttgggtgggattaaaatctataagtgttagcatcggtgggtagtttttctctatttcatttttccttgtttaatgttcatggtggttgaaaatttgctaataattgatggagaattagcata

SEQ ID NO: 71731 - DNA, 245 bp, Glycine max
  Clone ID: 700837356H1
gaaagaacttccttataaccaaaaccaacaacaactatggcaagttatcagaagcactacgatgatcagggtcgcaaggtcgacgagtatggcaatgttgagaggcaaactgacgaatatggcaacccggttcatgccactagtgtcacttatgtagccaccaaaagtgttggtggctacaatgatgacgctaataagcaacatgatattactggtgtctatcccgagaaagacaccggtagaca

SEQ ID NO: 71732 - DNA, 245 bp, Glycine max
  Clone ID: 700837357H1
tctcgagcgctcgagccgctcgagccgcacgcatattctagagatgctatcggagcaatatggtggacgtgtcgaactcgctaaagcatatgacaatgcacacactgcttccgtgatgaagcatatgcataggcaatggtgtcatttcaagcatgcatcagtgcaatgatttcatgttccttggtacggataccatatcacttggacgagtcggtgatgatttttggtgcacggacgcagctgga

SEQ ID NO: 71733 - DNA, 234 bp, Glycine max
  Clone ID: 700837358H1
caacaaccatcctcttcagtgatctttgattagtactaagctaaaccatttcttattccctcaaaatcataaccttcatctttctagctatttcccttgtcaaatcatgccacctaacatcaccaccgttgttgccaatgtcaccaccgagcaattacccaaggctcgtggaggaagtgcgcgtgccttcgtgacctttcttgctgggtacggtgattacgtaaatggtgtcgt

SEQ ID NO: 71734 - DNA, 248 bp, Glycine max
  Clone ID: 700837359H1
acgaagacgatcagataccgtcctagtctcaaccataaacgatgccgaccagggatcagcggatgttgcttttaggactccgctggcaccttatgagaaatcaaagtctttgggttccggggggaggtttgttgtaagacacctagtattagtatcatgtagtggagaaaaagggttgttgatcctaatagctagacaaggcatgttgtagtagtcatggggtggggaagtccttttgttgtagcatg

SEQ ID NO: 71735 - DNA, 155 bp, Glycine max
  Clone ID: 700837360H1
caagaaaagttcccaacttcagctaagagataatgtctctgattcgaaactttttcggtggccgtagagtaatgtgattgatcctttctgccttgaagtcgtgggatcccttcatggatgatcatgttccctgttctgaatctgctgaaaattta

SEQ ID NO: 71736 - DNA, 248 bp, Glycine max
  Clone ID: 700837361H1
caagtacacaacacaacagcaacatatggcgtctgaacaattggctcgcagagagaacaccaccaccgagaaggagattcacgttgagaaacacagggttcccaagatggccacccacttcgagcaccttgcggacaagctaaagaatctgacatcaccgctgggaaggatactccgcagggtagcatagaagccttgcaagctggagagagggtcaaagatcatgcaggaaaagccatgggagatat

SEQ ID NO: 71737 - DNA, 247 bp, Glycine max
  Clone ID: 700837362H1
tagctatccttggcttggacgaattatccgaagaagatcgcttaaccgtagcaagagcacgaaaaattgagcgtttcttatcacaaccttttttcgtagcagaagtttttaccggttcgccggggaaatatgttagtctagcagaaacaattagagggtttaaattgattctttctggagaattagatggtcttcctgaacaagccttttatttggtaggtaatatcgatgaagctactgcgaaagc

SEQ ID NO: 71738 - DNA, 251 bp, Glycine max
  Clone ID: 700837363H1
cttcaggatggtggatacttgttatggcactgtatcctgagcttgctttatatcgcgggttatatgagttagcacaattttcctttgaagggagtagttcagagacaggtggtatgaagtggcagaatctgagtgaaagcaccaatggcatgaaagaggtcttaattatcatgtttgttgagtggataatgatgctttttgctgccttctacgttgaccaagtattgtcgtcaggaagtagaaaaggtccg

SEQ ID NO: 71739 - DNA, 188 bp, Glycine max
  Clone ID: 700837364H1
cgccagtagtcatatgcttgtctcaaagattaagccatgcatgtgtaagtatgaactaattcagactgtgaaactgcgaatggctcattaaatcagttatagtttgtttgatggtatctctactcggataaccgtagtaattctagagctaatacgtgcaacaaaccccgacttctggaaaggatgca

SEQ ID NO: 71740 - DNA, 249 bp, Glycine max
  Clone ID: 700837365H1
gttgacaaccataaacaatatgtgtgcatatgggctcaatcctggtatttcaggttctcgtcttttgggcaccattcctcagtccatttcacagcaaactgtttggaatcaaatggcaacagtgagaacaccattgaattttgattctagcaagcagagcttttgtcaattttctattgaccttctcggtggaggaattttagtggacaaaactggagattggatcacacttatacaaaattctccaat

SEQ ID NO: 71741 - DNA, 244 bp, Glycine max
  Clone ID: 700837366H1
caaggaatgggtggtggcggtggccatgatccatttgatatcttttcatctttctttggcggtgggagtccctttggatcaggtggaagtagtcgaggtaggaggcagaggcgcggagaagacgtggttcaccctctcaaggtctctttggaggacctttatcttggaacttccaagaagctctccctctccagaaatgttatatgctccaagtgcagtggcaagggttctaagtctggtgctt

SEQ ID NO: 71742 - DNA, 242 bp, Glycine max
  Clone ID: 700837368H1
gacagagcagcactcacattcacaacgaaggtttcctattcatcagacatggtgaaggcaatcagagttcacgaactcggtggccctcaagttctgaagtgggaggatgtggaaattggagatccaaaagaaggcgaggtccgtgtgaggaacaaagccattggggttaatttcattgatgtctactttcgcaaaggagtttacaaagccccttcttttcctttcactccaggtatggaagc

SEQ ID NO: 71743 - DNA, 242 bp, Glycine max
  Clone ID: 700837369H1
ccccttctcacttcctttcacccttttccctcacaacacaatacaacaaaagagaacacgaataaaacgcaccgtaccgcacgcgaatcgcaattattagggtttacgcaccctcacaattggtttgagatttgcgaattcggcgacgatgatgggggaaggagcgagcaatggagggatgctgtaccacgaggtgcaggagtcgaagctctgcgcggtgcattgcgtgaacacggtgctgc

SEQ ID NO: 71744 - DNA, 135 bp, Glycine max
  Clone ID: 700837372H1
actctctctctctctcgctaagacacacaaacactacacatcacaatctcacattgatctcaagtttcaacactgtctaggtctagcatggcggtacgcctctccgccgccatacccatggtgtccctcctccgt

SEQ ID NO: 71745 - DNA, 241 bp, Glycine max
  Clone ID: 700837373H1
aaaggattctacccgccgctcgatgggaattgcgcttcaaggcgtctcgtagggctaatccgcctcacgagggtcaccaacggcacgtgcctttggggggccgaggctccctactgctggtcggcaaacggaccggcgggcgcacgcgtcgcttctagcccggattctgacttagaggcgttcagtcataatccaacgcacggtagcttcgcgccactggcttttcaaccaagcgcgatga

SEQ ID NO: 71746 - DNA, 245 bp, Glycine max; identical to SEQ ID NO: 64636
  Clone ID: 700837374H1

SEQ ID NO: 71747 - DNA, 246 bp, Glycine max
  Clone ID: 700837376H1
agttaataaaattctttgagttgaacacaggggccaagattccttctgttgggttaggcacttggcaagctgagcctggtgttgtagccaaagctgtcaccacagccattctggttggatacaggcatattgattgtgctcaagcgtataacaatcaagcagagattggttctgctcttaagaagctttttgatgatggtgtggtgaagcgtgaggacttatggatcacctccaaactctggtgtt

SEQ ID NO: 71748 - DNA, 247 bp, Glycine max
  Clone ID: 700837377H1
gcaaactggcaagagtgctgcaaaagttgcctcagatttgagggacaaggctttggccacagggtggagtgctgcacattattctactgagataactgtggagggaaccaaggctgcaacaaatgttgttaagggagttgctgagtatgcaggacagaaggcttctgagcttgcagctatgtcagtggatactgcgaaaggtttagctgctgctgcagctggggagaatgccaaggagtacactgca

SEQ ID NO: 71749 - DNA, 245 bp, Glycine max
  Clone ID: 700837378H1
ctcgagcgatataactccatggataatgggatgctaaggtttgaccatgtacggattccaagaaatcaaatgttaatgagggtttcacaggtaacaagggaaggaaaatatgtacaatccagtgttccacgacaattagtctatggtactatggtatatgtaagacaaacaattgtatctgatgcgtcagttgctttgtcgcgagcagtttgcattgctacaagatatagtgctgttcgaagaca

SEQ ID NO: 71750 - DNA, 246 bp, Glycine max
  Clone ID: 700837379H1
cgaaaagtagtgtattaagactacaaattttcaattcttcaatggcgtcgaagcaacaaaaagaggatcgagctgaggcagctgcgaaacttgctgcgaaagaactcgaacaactcaaccgagaaaaagaccgtgatttcagtcgtggtgttgcagaccaacaccaacaagaagaacatcagttagatcaacaaaagcgtggtgtaatcggatccatgttcaaggcggtgcaagacacctacgaga

SEQ ID NO: 71751 - DNA, 152 bp, Glycine max
  Clone ID: 700837380H1
attcggcatccggcacgacgagagaccagatctaaatcctcttccaagatgcagggaagagagacagctggtgagtccgtcgaggaaacagctgcaagcattggcgcttctgccaaggctggcatgcagataaccaaggccactctccagga

SEQ ID NO: 71752 - DNA, 242 bp, Glycine max
  Clone ID: 700837381H1
cacaactacaatacagaacttccttataaccaaaaccaacaacaactatggcaagttatcagaagcactacgatgatcagggtcgcaaggtcgacgagtatggcaatgttgagaggcaaactgacgaatatggcaacccggttcatgccactagtgtcacttatgtagccaccaaaagtgttggtggctacaatgatgacgctaataagcaagatggtattactggtgtctatcccgagaaa

SEQ ID NO: 71753 - DNA, 244 bp, Glycine max
  Clone ID: 700837382H1
cttaccaaagagccttggctcgtttctggtccaaattcattgatgacaaggtaactcagcttttcaaatatcttcttcttacttttcttgatttgtgctgatttgatttgtctccaaaacatcacctttcatgccatctagatgtgaaatctttgaataagtttagtgaaccctgaaaaaagttaaaaaaaaatttttcattaattgtatcaactttgtctaagatcataccaatgattggtca

SEQ ID NO: 71754 - DNA, 242 bp, Glycine max
  Clone ID: 700837383H1
aaaaaccacttggaagcatcattggagagagctttcaaggagttcaagaaaaagggagtgaagtgatggcaagcattggtgaaaaactgggaagtgctgcacatacattagtgaagaagccattggataaggccactgagggagggagagaggtgttgggagctgtaggtgaaactgtggttgagattggtgaaaacatggtgaaaaaaccagcacagaaagtgcagcagcatcaaggtgaa

SEQ ID NO: 71755 - DNA, 241 bp, Glycine max
  Clone ID: 700837384H1
gtttatgaatcgcatggaacagatactaacacaaaatggttatcaatcaaatctttcatctgctaaccctagagatcagctagtggaattgccttctaatgtacaagggttgccgacacttgaagcattaagcactgtcttgcatcgtgcagaacagttacttggtggtcaagctgttgctgcactatctgtaattaacacatcccatttactaatattcatgttcaccttaatgataaaa

SEQ ID NO: 71756 - DNA, 243 bp, Glycine max
  Clone ID: 700837385H1
ccaccccacaatggagccgtgaacacaacgttctacctcaactcagctccaccccaccatgtcgtcttcctccgccgccaccaccaccaccaccctcccggtgttggcgtttctcctcctcacgaccaccgcgatcaccgccgcgccgattatcggtctagactcattcttgagccaccaatcccgaatggaccctcacgcctccaacgactccttcctctctctcccttcctccgtcaaaaa

SEQ ID NO: 71757 - DNA, 244 bp, Glycine max
  Clone ID: 700837386H1
ctcaaagattaagccatgcatgtgtaagtatgaactaattcagactgtgaaactgcgaatggctcattaaatcagttatagtttgtttgatggtatctactactcggataaccgtagtaattctagagctaatacgtgcaacaaaccccgacttctggaagggatgcatttattagataaaaggtcaacacaggctctgcctgttgctttgatgattcatgataactcgtcggatcgcacggcc

SEQ ID NO: 71758 - DNA, 241 bp, Glycine max
  Clone ID: 700837387H1
aacctctttatttcggagttttctttctttggatctttgtctaatgtgggagcaatggtgggagctatagcgagtggtcagatagctgaatgtatcgggcgcgaagggtcattgatgattgctgcgatccccaatataatagggtggcttgctatttcttttgccaaagattcctcatttttgtatatggggaggttgttggaaggttttggcgttgggattatctcttatgtggtgcttg

SEQ ID NO: 71759 - DNA, 242 bp, Glycine max
  Clone ID: 700837389H1
gtccctgcggatgttgacgcaatgtgatttctgcccagtgctctgaatgtcaaagtgaagaaattcaaccaagcgcgggtaaacggcgggagtaactatgactctcttaaggtagccaaatgcctcgtcatctaattagtgacgcgcatgaatggattaacgagattcccactgtccctgtctactatccagcgaaaccacagccaagggaacgggcttggcggaatcagcggggaaagaag

SEQ ID NO: 71760 - DNA, 242 bp, Glycine max
  Clone ID: 700837390H1
ctcaattttctgagcagccaaacactctctctctgtctctcgaaaattctcagtttgcagagaaaatctgaatcatgtcgtggcaagcgtatgtcgacgatcaccttctgtgtgacatcgaaggtaaccacctcactcacgctgctatcatcggccaagacggcagcgtttgggctcagagtaccgacttccctcagttcaaacctgaggagataactgccatcatgaatgactttaatgag

SEQ ID NO: 71761 - DNA, 247 bp, Glycine max
  Clone ID: 700837391H1
agaagaagaagaagaaaagtgtgagtgcagaaaagaagagtggtgggcgagctcggaagaacgtgtacagaggaatcaggcaaaggccgtggggcaagtgggccgcggaaataagggacccacataagggcgtccgcgtctggctcggcaccttccccaccgccgaggaagccgcccgagcctacgacgacgccgccaagcgcatccgcggcgacaaggccaagctcaacttcccggccaccgctcc

SEQ ID NO: 71762 - DNA, 245 bp, Glycine max
  Clone ID: 700837393H1
caggtatgatgaaattgtgaaggaagtttcttcctatttgaagaaagtaggatacaaccctgacaagattccttttgttcctatatctggttttgagggagacaacatgattgagaggtccacaaaccttgactggtacaagggtcctactctgctagatgcacttgaccagatctctgagcccaagaggccttctgacaagcccctcaggctaccccttcaggatgtgtacaagattggaggaa

SEQ ID NO: 71763 - DNA, 232 bp, Glycine max
  Clone ID: 700837394H1
caatcatcgtcgcctctcggcaacggttagatgagagagtaggtgggcttcagtctctcacacagaaaaatggcagcgtcagtgtcgtgctcatggctaacccttccctcccaaatgaggagcctctccctcacatcctcgtcttcatcccttggcatctccaattccgcttctctcagtttctccagacacctctcacggcctttgctcctcagaaggtaactccttgtcg

SEQ ID NO: 71764 - DNA, 219 bp, Glycine max
  Clone ID: 700837396H1
aaaacagtaaagctaacttcaacacctttaattttctaaaagtaattcagcggctgaataccaagcggagaagatgagtcaggagcagccacggcgtcccaaaggccaaaaccccatcaaatacggcgacgtttttgtcgtctccggcgaccttgcacagaagcccgtcgcaccggaagatgctgccatgatgcaaagcgcggaaactcgagtgctcgg

SEQ ID NO: 71765 - DNA, 251 bp, Glycine max
  Clone ID: 700837401H1
cgtgaaaatcatgcccgtcctgttcttggaggaaatgacacctttccttatcctcgtagggggagaactggtagaaaaccaacaaggaaagatcctaatagtgagagtaggagcaatgatgtttatcttccaagagatgaggcttttggacacttgaagtcatctgactttcttacttatggactaaaatccgtatctcaaaatgttcttccattattgcaatctgcttttgatttgaatttcacaccccg

SEQ ID NO: 71766 - DNA, 216 bp, Glycine max
  Clone ID: 700837402H1
gaaaaaaagaagagttgagattccctttgaagaaaagatggcatcccataggcaaagctatgaagcgggtcaaactaagggcggaactgaggaaaagacgaaccagacgatgggcaatattggagagaaggctcaagctgcaaaggagaagacccaggaaatggcccaagctgcaaaggagaagacccaccaaccagcccaagctgccaaggccaa

SEQ ID NO: 71767 - DNA, 245 bp, Glycine max
  Clone ID: 700837405H1
cggttcataggaatctttttgaaaagtgatgtatatgacaaagatgatgaggagcaatctgccacaactagaggaggaaaactgacgccattgcttgacggcagcagtgacactacatccagtcaagtttaattcttttcaaattttagtactataactatgcttcaagtgtatattaacttctagtgtgaagagggtaaaagtcggtagcatactagcatctttactactactaccagtcatgt

SEQ ID NO: 71768 - DNA, 251 bp, Glycine max
  Clone ID: 700836801H1
aagccggagagcatgatggcgccgctcatggtgcagccggagcaacaatggcctcctcaaacaacgcttgtagtaccgccagaagtaaccatgggagacacccagaatgaccccatggaccggcagtaccatgaggagaatgaggatgacgaggacgacaaggaaattggagatgaagacgaggatgaggacgacgaaggaggtgataattatgagatagttgcgagcaaaccagccacagctgatgcttc

SEQ ID NO: 71769 - DNA, 247 bp, Glycine max
  Clone ID: 700836802H1
atgaaatcctattttcttgcaagacccgtttggataagggaaaactccagagattgctttgaagtaagatccttgcgttgaccctttcctgaaccagaaccggggggggagaggaaagaaaaggggatccaaatttcccatccatcaataaagtgagggctttccggaccttccccacccctctttccattcttccttcccctctcactccccctttttcaagaaataagccccgctccctaagaag

SEQ ID NO: 71770 - DNA, 246 bp, Glycine max
  Clone ID: 700836803H1
tgacgaagttgctttgactacagaaccatgcctgtctgttggagtgaattggatgatcgggccgagggctgccccctcttcccctcactctcctttccctaagatgaaccttgcttgagtcatcaaagcctttctgactcggcctggcccggtcgccctacgcgactggcgcttcaaaaggtagttgacttgcttactcgttagagtaggggtcgcgagagagcagagcgtaccgccctgccatag

SEQ ID NO: 71771 - DNA, 245 bp, Glycine max
  Clone ID: 700836804H1
aaaacctaagcttagaattagaaacaaagaaaagaagaaaggaaagaattgatcgttgaaaatgcagggaggaaagaaagcgggagagtccattaaggaaacagctacaaacattggtgcttctgccaaggctggcatggagaagaccaaggccactgtccaagagaaggcagaaagaatgacagcacgtgatccggtgcaaaaggagttggcaacccaaaagaaagaggcaaagatgaaccagg

SEQ ID NO: 71772 - DNA, 241 bp, Glycine max
  Clone ID: 700836805H1
cacgcgcttgaggcttccattgctagcaattttactgataacggatgcattgcgtgtatgtgtcacaacactgatggactttatagtgctaagcagactgctattgtgagagcttctgatgatttttaccctcgtgatcctgcttcccataccatccatatttcttctgttgcatacaactcactattccttggagaattcatgcaacctgactgggacatgtttcatagtttacacccag

SEQ ID NO: 71773 - DNA, 240 bp, Glycine max
  Clone ID: 700836806H1
tgcagaccgagctagctagctagcaagcaagcacagagatggaggcaaagcgaggccatgccctacatgtgcttggcacgtgtttcactcttcctctgcgctctaaccctatccgctgctcacggaagcaccacggttcaagacatcgcgagaaagttgaaactcggggacaacgagcttctgcgcacggagaagaagttcaaggttttcatggagaattacgggaggagctactccaca

SEQ ID NO: 71774 - DNA, 235 bp, Glycine max
  Clone ID: 700836807H1
ctagctagctagcaagcaagcacagagatggaggcaaagcgaggccatgccctcatgtgcttggcacgtgtttcactcttcctctgcgctctaaccctatccgctgctcacggaagcaccacggttcaagacatcgcgagaaagttgaaactcggggacaacgagcttctgcgcacggagaagaagttcaaggttttcatggagaattacgggaggagctactccacagaggagg

SEQ ID NO: 71775 - DNA, 235 bp, Glycine max
  Clone ID: 700836808H1
gttaacactttccaatacaataatcactaactgaatattcgatcggagatgtctgccgccgccgaagaagctaacgctcccgccgtcgaaaagccggttgaggaggtgaaggcgccgaaccccgcgaaggagaagaaacctaaggctccgaaggaaaagaagccaaaacaggccaaaacagcttcacatcctccatattttcagatgattaaggaggctttgatcgctttgaacg

SEQ ID NO: 71776 - DNA, 236 bp, Glycine max
  Clone ID: 700836811H1
attgcacttcccaagaacacagttggaggaaccattctgcgtagtgatttattggcaaattttttgacagagggcaattttagagcaagtgttgatttgcagcgcactcatcgtattagaggaatgattaaaatggtggccacagttggtattcctgagaatacaggtatagcattggcctgtgctatgaatagttcttttagggggcgcgccagttctgatatttacaccatctg

SEQ ID NO: 71777 - DNA, 235 bp, Glycine max
  Clone ID: 700836812H1
gatgacattaataagcaacatgataccaccaatgcctacggcgtagacactggtagacagcattctagtggtggctacgatggtgacactaataaacatcatggaactactggtggctataatgatgacaccaatagacatcatggaactaccggtgtctatggtatagacaccgataggcaacaacatgggactactggtggctatgccggtgacactggtaggcaacatggga

SEQ ID NO: 71778 - DNA, 236 bp, Glycine max
  Clone ID: 700836814H1
gagaaagagaaatggcaacaagcgaagaagtggttgcagcggcgcggaggagcccgccggaggagggttgaagcacaaactggagagaaaatggacgttttggtgcgacaaccaatccaaacccaagcaaggcgctgcttggggaacctctcttcgcaaggtctacaccttcgacaccgttgaagagttctggtgtttgtatgatcaggtattcaagcccagcaagttgcaaatca

SEQ ID NO: 71779 - DNA, 245 bp, Glycine max
  Clone ID: 700836815H1
ctctacatctagaccgaacttcacctagtcacagtcaaattgatgagaaagaggaggctccagatgaagatgatggtgatgacgacgtgcaatggctgacagatacatcacttgatgctgctcgtcaacgtatccaagaacagttaagtgctgtgacagctgatatggttatgctttctacagatgaaccagagaagaagaaaaaagcagcaagtaacggaaatggcggttctcagaatggtaac

SEQ ID NO: 71780 - DNA, 243 bp, Glycine max
  Clone ID: 700836816H1
gagattagcaaaacactccaagacctcaaatccccctccacctcaccccaacaacaacctcaacctccacaaaagaccaagtccttccacacggtggaagagctagacgccaagctcaaccccaagcccgagcccaagcccaatccagaattgaaaaagcccgctgatcagataattaacagtagcatagttaccgagccagtccgagggaacaagttgaaggaaaacatgttcatagttcgg

SEQ ID NO: 71781 - DNA, 247 bp, Glycine max
  Clone ID: 700836817H1
atttttcttcttcttcatcaccatgtctttactttcagacctcatcaacctcaatctctcagaatccacagaaaagatcattgctgagtacatatgggttggtggatctggtatggacctcagaagcaaagccaggactcttcctgggccagtgagtgaccctgcaaaacttccgaagtggaactatgatgggtctagcacagatcaagctccaggggatgacagtgaagtcattctatacccacaa

SEQ ID NO: 71782 - DNA, 243 bp, Glycine max
  Clone ID: 700836819H1
cgagatgcagaacttttgttcatgtggcaaatgtatcagagatcaaaccatcagtcagaaaataagacagacatcctcaaacaaattgcggagacagtgaagcataggaaacacatagatggtagcgtggaattgattggagttttactgtatggaccaggaaaaggttcttctgttctacaatccgtgagggctcctggttcgtcccttgttgatgactggacatgcctaaaatcaatggtt

SEQ ID NO: 71783 - DNA, 243 bp, Glycine max
  Clone ID: 700836820H1
tggagggattgacgctgcgtctcttcctcttctctttcgatccatccctcattcctaatcctccaatccaaccacctcagcctcacactcacatatacacatatctgaacgcgtatcgtccctcctatggcttcaaagcgcatcctcaaggagctcaaggacttgcagaaagacccaccaacttcttgcagcgctggtccagtagctgaggacatgttccattggcaagcaacaataatgggt

SEQ ID NO: 71784 - DNA, 239 bp, Glycine max
  Clone ID: 700836821H1
aactcgagcgattcggctcgaggtaacttctaatagatgaggcacaccaaagtagtaacgctatagtagcaaccagcaacaatattcaatctcatacacagaaaaatgggtgctttggatcacatctctgagctctttgactgctcccacgccagctccaagctcaagaagaaacgcaaacaattccagacggtggaggtggaagtgaagatggactgcgaagggtgtgaaagaaaggt

SEQ ID NO: 71785 - DNA, 235 bp, Glycine max
  Clone ID: 700836822H1
gacggaactacgcgggttttccatgactgcgcgaacatcttccgtcactctcccgacaaaatcacgatacgctctcctcttccccctctccgcttcttcgcattctccgattctttcttccgtcgcggattttgatacgttcgagagcggattagggttttgataggttcgcgatttcggtggagaaagagagggacggagatagatagatagagagagggagaaagtgtttggt

SEQ ID NO: 71786 - DNA, 236 bp, Glycine max
  Clone ID: 700836825H1
gttgtgttatgtaggaatggctttgtacggagagaaagagtggtattttttcacgccgagggaccgcaagtacccgaacggttcgcggccgaaccggtccgcggggaccgatactggaaggcaaccggagcggataaaccggttggcaaaccgaaacctgttgggatcaagaaagcattggttttttacgccggaaaagcgcccaagggagtgaaaactaactggatcatgcacga

SEQ ID NO: 71787 - DNA, 237 bp, Glycine max
  Clone ID: 700836827H1
ctcactcgctcttctccgccacttctgaatctattgaatcaacaatcatgtcggacgaagagcaccatttcgagtccaaggccgacgccggagcctccaaaacctaccctcagcaagccggtaccatccgcaagaacggctacatcgtcatcaaaggccgcccctgcaaggttgtggaagtttcgacttccaaaactggaaagcacggtcacgctaagtgtcactttgttggaattg

SEQ ID NO: 71788 - DNA, 237 bp, Glycine max
  Clone ID: 700836829H1
gtggaatttgtgatcacacaacataagcatatatatagaaagatgtcaggggcacaaggagcacaaccaaaggagtcaaaaacagcaacaacatatgagtcagtagaaggaggagagaaccgaacaaggactgacttgctttcaagggaggatcaaggctgcattcaagtggaaaaacttcatgagaaggtccatgatcctgctggcaaaggtggtcctgtctttggtgctggcaaa

SEQ ID NO: 71789 - DNA, 215 bp, Glycine max
  Clone ID: 700836830H1
cgatgttttctcaactcttcgatttagcggcttaaaccctctccgattcagattcggatttagggcttccctttctctattccgcctccaaagaaaaacagatctcgtggttggttcgtcatggccaccgttgctaatcccgcggatcaagcaactgatttgctacagaagctatcgttagaaactcagcccaagcccttggagattcctgagcc

SEQ ID NO: 71790 - DNA, 239 bp, Glycine max
  Clone ID: 700836831H1
atcagcaagagcaaggaggtcatcaaagccagaaaggaaagcatcagcaagaagaagaaaacgaaggaggcagcatattgagtggcttcaccctggaattcttggaacatgcattcagcgtggacaagcagatagcgaaaaacctacaaggagagaacgaaggggaagacaagggagccattgtgacagtgaaaggaggtctgagcgtgataaaaccacccacggacgagcagcaacaa

SEQ ID NO: 71791 - DNA, 250 bp, Glycine max
  Clone ID: 700836833H1
aataaaccttgttgttctacccgttcaaaatgatggttccacagggctccattgggccaacctccaaaaaagaacccctctaatgcaagtaccagtcctggtggacctcaatggaaatcacttgtgggttaactgtgagcagcagtactcatccaaaacgtaccaagcacccttctgccactccacccaatgctctagagccaacacccaccaatgcctcagttgccccgcggcatcaaggccagggtgc

SEQ ID NO: 71792 - DNA, 237 bp, Glycine max
  Clone ID: 700836836H1
atttcattgactgcctctggtcctgagaaaattgaagctaatttggatgagaaaagcaacactgttgatgaggtggctaagcctgactgtttgcaccctttaccaaaggaagggaatgtattgaaagaagaagcagaggtaggcttattgcagccgagtttggggccacattccgggtcacaagagtgtaagagtgacaaagattctgatattgggaaagtatcaagtttgaaaaag

SEQ ID NO: 71793 - DNA, 236 bp, Glycine max
  Clone ID: 700836837H1
gacagcatcaagcaaccaacacaaactgatttctcatttcgtagcatcaaccgctaactatccagatactaattttcgctttggtttggttcaattctgtccgcagacatggttttcaggccaatgagtggtaattggttagcactgttaagaaacagttatggaggtaaagccgcgtacgcaacctcaacagcaccaaagatgaaagcgtatgcagctgcggctgattacggaca

SEQ ID NO: 71794 - DNA, 234 bp, Glycine max
  Clone ID: 700836839H1
aaaccaacaacaactatggcaagttatcagaagcactacgatgatcagggtcgcaaggtcgacgagtatggcaatgttgagaggcaaactgacgaatatggcaacccggttcatgccactagtgtcacttatgtagccaccaaaagtgttggtggctacaatgatgacgctaataagcaacatgatattactggtgtctatcccgagaaagacaccggtagacatcattttggt

SEQ ID NO: 71795 - DNA, 233 bp, Glycine max
  Clone ID: 700836841H1
ccaatgcctacggcgtagacactggtagacagcattctagtggtggctacgatggtgacactaataaacatcatggaactactggtggctataatgatgacaccaatagacatcatggaactaccggtgtctatggtatagacaccgataggcaacaacatgggactactggtggctatgccggtgacactggtaggcaacatgggaacatcagtggcccttactatggaacc

SEQ ID NO: 71796 - DNA, 236 bp, Glycine max
  Clone ID: 700836845H1
taaatgcattgcacactccatgatcgatgtgcatgttttacttttatgtaaattttggaccgttttagttctaccttttgttattcgtgtatgctctctaaaactatacatggctttcgtagtagtagtattacttatcatagttgtgaagaacatgttttaggatgtccatccatatactataatggataataaattccaataataaaaaaaaaaaaaaaaaagggggggccgcc

SEQ ID NO: 71797 - DNA, 239 bp, Glycine max
  Clone ID: 700836847H1
tgcagctatgtcagtggatactgcgaaaggtttagctgctgctgcagctggggagaatgccaaggagtacactgcaaggaagaaggtggaagctgagatggatttggaggccaaaagggaagctcaaaatcaggaatcgaaggagtggccatcagcaaaatccaccactgagagcattcaaagaggacaaggacaacaagaacagcatgagcaaggagaaaaatgggaacatggtgcac

SEQ ID NO: 71798 - DNA, 245 bp, Glycine max
  Clone ID: 700836848H1
cgagaccagatcaacgcaagccaattggtctctctcttacaccatgagtgcatcaaccaaagcttggattgtggcatcaagcataggggcagtggaggccttgaaagaccaattaggtgtatgcagatggaactatgctttaaggtcactacaacaacatgcaaagaacaacatcagatcttatagtcaagctaggaaattgtcctctgcatcctctgctgcggtttccaacaaggtcaagagaa

SEQ ID NO: 71799 - DNA, 251 bp, Glycine max
  Clone ID: 700836849H1
tctcgagccgaatcggctcgacgggaagctcgccaattgagaaggacaagctctctctcgtatacgaatggctgcaaaaagctgatgtgcctaccatagcacagattgaagagttccattcgatgcagaggatgatgaatgctcctgattcaaatgataatattgatctactgttgagcattgatttgttgggtttacaaggagcaggtaaagcttttccaaacaagattgtttttgatgataagcttgtg

SEQ ID NO: 71800 - DNA, 240 bp, Glycine max
  Clone ID: 700836851H1
aatttcttctcggtagctcatcgaaaatgcaagcgtttcgacgaagaatctcaacagcgacaatctccacggcgaagaattcaacgctcttccatccattattgccggtgaatttccggcaacgagacggcggtggtcgagccgcaagtcccggagcggcgaggacgagtggaacgaggcgtgggagacggcgtggcttccggatgacctgacgccgaagacgcaagcgccgtgggagag

SEQ ID NO: 71801 - DNA, 237 bp, Glycine max
  Clone ID: 700836852H1
cgtgaatcggaagcggggcactgccctctttttggacccaaggtcggcttcggccggtcgatccgggcggaagacattgtcaggtggggagtttggctggggcggcacatctgttaaaagataacgcaggtgtcctaagatgagctcaacgagaacagaaatctcgtgtggaacaaaagggtaaaagctcgtttgattctgatttccagtacgaatacgaaccgtgaaagcgtggcc

SEQ ID NO: 71802 - DNA, 231 bp, Glycine max
  Clone ID: 700836855H1
tgccgaattcgttatcgctttgcactagcagctttgaaacccggttcatccgaagcaccttcaccgaaccatgtcgaggagaaaggttagagagccaaaggaggaaaatgtgactctgggtccagctgttagagatggtgaacacgtttttggcgttgctcgcatctttgcctccttcaacgacaccttcatccatgtcactgatttgtctggcagggaaacccttgtccg

SEQ ID NO: 71803 - DNA, 234 bp, Glycine max
  Clone ID: 700836857H1
tcaacctcaatctctcagaatccacagaaaagatcattgctgagtacatatgggttggtggatctggtatggacctcagaagcaaagccaggactcttcctgggccagtgagtgaccctgcaaaacttccgaagtggaactatgatgggtctagcacagatcaagctccaggggatgacagtgaagtcattctatacccacaagctattttcaaggacccctttaggagaggaa

SEQ ID NO: 71804 - DNA, 234 bp, Glycine max
  Clone ID: 700836858H1
ccgatcctacaatggcgacagtcacgttttccttttccgctaaaaccctaactctaccttatcaccccaaaaccccaatctccaactttaccccggtaacgaatcttcgcctccctccttctatcgtgacccgaacccgcaattgtaaccggattcgggcggcgctggatggggatttctcggcgaaaaggagcagcagcagcaacaacaacgaccagagggagacgataatgt

SEQ ID NO: 71805 - DNA, 225 bp, Glycine max
  Clone ID: 700836859H1
accattacatggcaaaactgcttctgtgggaaaatggggcattttgtcacaagagccctatgtaaacatatcatgtggtgatatagagttgtggagatgtttggcagatccgggggaaacaacaaagtatggctgccttgtgtatagagattctgacttgaatgctgcatattttctttaattccggagtttaaggatataacaagctatacctgaatgtatatc

SEQ ID NO: 71806 - DNA, 234 bp, Glycine max
  unsure (1)..(234): unsure at all n locations
  Clone ID: 700836861H1
ctttcccgtgaaaagggaccatggaggcaaattcaggtgccagcgaccgaatttcgagaatcgccggccacctccgcccccagagagaggatgatgtttgtttgaagcgtacannttgccgtgcaaaaggtggggtctccggattcaaggtggccatattgggtgccgcagaggcatagggcaacctctggcgatgttgatgaagatgaatccactcgtttcacttctccacct

SEQ ID NO: 71807 - DNA, 235 bp, Glycine max
  Clone ID: 700836862H1
aaatgcctcgtcatctaattagtgacgcgcatgaatggattaacgagattcccactgtccctgtctactatccagcgaaaccacagccaagggaacgggcttggcggaatcagcggggaaagaagaccctgttgagcttgactctagtccgactttgtgaaatgacttgagaggtgtaggataagtgggagctggaaacagcgaaagtgaaataccactacttttaacgttattt

SEQ ID NO: 71808 - DNA, 245 bp, Glycine max
  Clone ID: 700836865H1
cttctcttgcggctagggttttagcgcagttcttctagatttaaggaagatgggtaaggaaaaggttcacatcagtattgtggtcattggccatgtcgactctgggaaatccactaccactggtcacctgatttacaagcttggaggcattgacaagcgtgttattgagaggtttgagaaggaagctgctgagatgaacaagaggtctttcaagtatgcctgggtgctggacaaacttaaggctg

SEQ ID NO: 71809 - DNA, 243 bp, Glycine max
  Clone ID: 700836866H1
ctcgagccgctcgagccgctcgagccgcttgctctatactacacagtacacacactagaagaataatggcttccatcctccactactttttagccctctctctttcttgctcttttcttttcttcttatccgactcagtcacccctacaaaaccaataaaccttgttgttctacccgttcaaaatgatggttccacagggctccattgggccaacctccaaaaaagaacccctctaatgcaag

SEQ ID NO: 71810 - DNA, 240 bp, Glycine max
  Clone ID: 700836868H1
atttcattgactgcctctggtcctgagaaaattgaagctaatttggatgagaaaagcaacactgttgatgaggtggctaagcctgactgtatgcaccctttaccaaaggaagggaatgtattgaaagaagaagcagaggtaggcttattgcagccgagtttggtggccacattccgggtcacaagagtgtaagagtgacaaagattctgatattgggaaagtatccaggtttgaaaaaga

SEQ ID NO: 71811 - DNA, 234 bp, Glycine max
  Clone ID: 700836870H1
ctctttcttcttttctttaatacttaattcgtcttttttatctttctttctttctttccccttttatatttctgggttcgatattgttatcggtttatttgtgcactacttccgccggctattcaggaatcatggctagggttttggctcagtctattaatgtccctggtctattggctgagcataggcatggtcagcaaaaggcatcaggaaaattaaaaagatcgaccaaaa

SEQ ID NO: 71812 - DNA, 233 bp, Glycine max
  Clone ID: 700836873H1
gttgtgcaatcttacaagttccaaacttctctattttgttattatttgttctcacttctcacacatacagattttagccttttatattatcatggcttctaaggtggtttcggttttggttatagcgatgatgttgtttgccatgaactgtaactgcactagtgttggccacatgccttcaaccaaagaggaaggtcacgattttcaggagtctaaagccaagaccacacaaa

SEQ ID NO: 71813 - DNA, 233 bp, Glycine max
  Clone ID: 700836875H1
gtctttgggaatagtgctgcaatggcttcaagtcaggaggaggtgacccttttgggagctactggaagcccatttgtgtgcagggttcatattgccctcaagttgaagggagttcaatacaaatatgtcgaagaaaatttgaggaacaagagtgaactgcttctcaaatccaacccagttcacaagaaggttccagtgtttattcacaatgagaagcccatagcagagtctct

SEQ ID NO: 71814 - DNA, 233 bp, Glycine max
  Clone ID: 700836876H1
ctccttttagcaagttaacaacacttttgtcttcgttccattatctagttctcaattctcttcaccctttgcctctgaaagaaatgggtagtcttgaagcggaaagaacaacagtaggattggcagcaagagacccttcagggattctctccccatacacctacaatctaagaaacacaggccctgatgatgtttacattaaagttcactactgtggaatttgccattctgat

SEQ ID NO: 71815 - DNA, 236 bp, Glycine max
  Clone ID: 700836879H1
tggatttgtcatggattgatggctttgactttattgacgattacttgaagagcttttccgcggatgagttatttcaggtggatgaacttttggggcttatagataataacccaattgataactctgtgttgatgcaaggtttggattttggacaaatgggttttcctggagatggtaatcctcaggttgacgatactccttcaagctttatttatcagttgcaaaatccagatgcc

SEQ ID NO: 71816 - DNA, 243 bp, Glycine max
  Clone ID: 700836881H1
tgagtttgccacatcctcagggagatcaatctggtgcttttagtcaagtttttctgcctgcagatgaaggtgttgaaagttctatttggctgctagcaaaggcttatgtagttgtgaatgactcgtgctatcatcaacttgtcagccattggttaaacactcatgcagttgttgagccattcatcatagcaacaaacaggcatctcagtgttgttcaccctatttataaactccttcaccctc

SEQ ID NO: 71817 - DNA, 239 bp, Glycine max
  Clone ID: 700836882H1
aaaaaaaaaaaaacatggtggtgaaggtgtatggtccaacctatggatcccccaagagggtcctggtgtgtctgattgagaaggaaattgagtttgaaacagtgcatgttgatctcttcaagggagagaataaggaacctgagttccttaagctgcagccatttggatcccttcctgttattcaagacggtgattatactctctatgaatctcgtgcaataatcagatacttagctgag

SEQ ID NO: 71818 - DNA, 239 bp, Glycine max
  Clone ID: 700836883H1
gaaacccacatcacaatccaattccatgaccctttgtatggctgcagaaaatatgagcgaggtggaagaggagcatggatatgtcttcaaagaagagatccatctcacggtgttcaaaacttctctgttcttcgcgggcgatggcttcaccgtctacgattgcaaaggtcaacttgtgttcagagttgactcttatgggcccgacacccgcgacagagacgaactcgttctcatggatc

SEQ ID NO: 71819 - DNA, 237 bp, Glycine max
  Clone ID: 700836884H1
tgcagaccgagctagctagctagcaagcaagcacagagatggaggcaaagcgaggccatgccctcatgtgcttggcacgtgtttcactcttcctctgcgctctaaccctatccgctgctcacggaagcaccacggttcaagacatcgcgagaaagttgaaactcggggacaacgagcttctgcgcacggagaagaagttcaaggttttcatggagaattacgggaggagctactcca

SEQ ID NO: 71820 - DNA, 234 bp, Glycine max
  Clone ID: 700836885H1
caagttgaatcaaacagtgaaagtaaaacattgtgcaattaatcatcaactgcaagtagccagtgcataagatcaatggcgtcaagacagcaattcaaggaagacagagccgaggcagctgcaaaactcgcagcgaaagacatcggcgacatcaacagaacaaacgagcgcgacgaggggtacgacttgcacgacgaagccaacttcaagcaagcacgagctgaagcagctgca

SEQ ID NO: 71821 - DNA, 230 bp, Glycine max
  Clone ID: 700836886H1
tggcggcaaagcaaatctgcatagcgatggcgcctccgaagctcttcgtatttgcgctttcagtaaccctgatttttgccatcgttggggccgaagccgatgtttccgtcgaaggagccactccagagcctgatacctccgccatcaagatccaattagatcaactcaattccaagatccaaattctcgagtctcaaatcagtgaaaagttggaagaagtgaagaagaag

SEQ ID NO: 71822 - DNA, 232 bp, Glycine max
  Clone ID: 700836887H1
attgaaacagaaaatttgaagagtttgtttattgtgaaaaaaagaaaaatgcaggcagcaaagaaagccatagagacctttaaggaaaccgcagccaacattggcgcctctgccaagtctggcttggagaaaaccaaggccactatccaagagaagaatgagaagatgaatgcagaagatcaaactcaaatggatatggctaccaagaggaaagaagagaagatcaaccagg

SEQ ID NO: 71823 - DNA, 232 bp, Glycine max
  Clone ID: 700836891H1
taacaaacttctctatatcgtttactttttcaacacaccttacacactactttatttgagcctttcatataaatatcatggcttcgagggtggtttcggttttggtgatagcgatgatgttgtttgccatgaactgtaactgcactagtgttggccacatgccttcaaccaaagaggaaggtcacgattttcaggaggctaaagccaagacaacacaaactgcgaacaaggc

SEQ ID NO: 71824 - DNA, 233 bp, Glycine max
  Clone ID: 700836892H1
caacaacgccttagacgtcaccaccttcatctcctcccgcgcccaccgcgccaccacagccttcgtcgacgccgccaccgcccgccgcctcacctacacccagctatggcgttccgtggagggcgtggcagcctctctctccgtggacatggggatccgaaagggcaacgtggtcctcatcctctcccccaactccatccacttccccgttgtgtgcctggccgtcatgtccc

SEQ ID NO: 71825 - DNA, 227 bp, Glycine max
  Clone ID: 700836894H1
ctatgtctgaactgtggtagtaatagtgttttgttttatgcaagactattgcactgctcattgttgagatcttctaagttaagttttggtgatagtttctgttgttgtgtgggcatatatgttcccatcatgttgtgctcttttccttagttgtgatatcgtataatatcaggtgctgatttttgttaccaacaaatcaaatgcatgtaagggtgctcttgcgttcc

SEQ ID NO: 71826 - DNA, 239 bp, Glycine max
  Clone ID: 700836896H1
aagcttactcgtccattttagttcaatctttgaattctcctccttatcaagtcttcctcatcttccccacctttttgaaattttggtgtctaagaacataacctaaaagctcaaggtgagtgaaaagaagatgtcaggtgtgtctctagcagtgtctcatccaccggcatcagtgggagaacaaaacgtgcctcaagcaggcacaaagcctaaaccgcgaacagaacaggcaccaattg

SEQ ID NO: 71827 - DNA, 137 bp, Glycine max
  Clone ID: 700836901H1
aggagaattacgggaggagctactccacagaggaggagtatttgcgccgtttggggattttcgcccagaacatggtcagagcggcggacatcaggcgctggaccccaccgccgtccacggcgtcacgcagttctccg

SEQ ID NO: 71828 - DNA, 245 bp, Glycine max
  Clone ID: 700836902H1
ccgggtttgacgttgttcacaatcactttctgcgcttcactcactcccttcgtgcggttttctttctttgtcgaactcgtgcgaaaatgcgtgagattcttcacatacagggagggcaatgcggaaaccagatcggagcgaagttctgggaggtggtgtgcgcggacacgggatcgattccacggggaggtaccagggggacaacgagttgcaactcgagcgagtcaacgtctattacaatgaag

SEQ ID NO: 71829 - DNA, 136 bp, Glycine max
  Clone ID: 700836903H1
caaaacctaagcttagaattagaaacaaagaaaagaagaaaggaaagaattgatcgttgaaaatgcagggaggaaagaaagcgggagagtccattaaggaaacagctacaaacattggtgcttctgccaaggctgg

SEQ ID NO: 71830 - DNA, 245 bp, Glycine max
  Clone ID: 700836904H1
gaagaaaacctaagcttagaattagaaacaaagaaaagaagaaaggaaagaattgatcgttgaaaatgcagggaggaaagaaagcgggagagtccattaaggaaacagctacaaacattggtgcttctgccaaggctggcatggagaagaccaaggccactgtccaagagaaggcagaaagaatgacagcacgtgatccggtgcaaaaggagttggcaacccaaaagaaagaggcaaagatgaac

SEQ ID NO: 71831 - DNA, 136 bp, Glycine max
  Clone ID: 700836905H1
atgaggtcgagtttcacagcagcaatggtgtacgtcaaggctcagaaatcaaaagcctacttcaagagatatcaagtcaagttcaagagaagaagagagggaaaaaccgattaccgtgccaggattcggttgatta

SEQ ID NO: 71832 - DNA, 245 bp, Glycine max
  Clone ID: 700836906H1
tcaaaatatgcgcacgcctctgcttcccgctgcttcatctgcttcgttcttcactctctttctcgcttagccttcactttcttctctctgtttcttctttcttctgccagcgatgccgacttttactgccatggcactggataggttgatagagcccggagcttctaagccagttgataaatctgctccaacttcaatgcctgtgccaaactcgcagaagctggagaggagtactagtgcgcccg

SEQ ID NO: 71833 - DNA, 246 bp, Glycine max
  Clone ID: 700836908H1
caacaagaagcttgatgctgcatatcatgaggcacagcagaaacctggtggctgccctgtttttctctttttctcagttaataccagtgggcaatttgtggggcttgctgaaatgattggtcctgttgattttaacaagagtgttgagtattggcagcaagacaagtggaatggctgctttcctcttaagtggcacgttgttaaggatgttcctaacaatttgttgaggcacattaccctggataa

SEQ ID NO: 71834 - DNA, 248 bp, Glycine max
  Clone ID: 700836909H1
cttcttcttctttttcatcaatcatcaccagtggttcttttccttctgagaagatcgaattgtgttttgcaaaaatgggagttccagagaaagaccctctttcccaattgagtttgcctcctggttttcggttttaccccaccgacgaggagcttctcgttcagtatctgtgccgcaaggtcgctggccaccatttctctcttccaatcattgccgaaattgacttgtacaagttcgacccatgggtt

SEQ ID NO: 71835 - DNA, 248 bp, Glycine max
  unsure (1)..(248): unsure at all n locations
  Clone ID: 700836910H1
ttcagatcgcagacagacacagagagtgagagagggagatggggagcgacagcganggcagagaagtcggtgcagaaagagaaggagaagaagaagatgttggccctggctcccattgctaaacctcttgctgggaagaagctttgcaagcgaaccctaaaacttgttcgtagagctgccgaacacaaatgcttgaaaagaggagtgaaggaggtcgttaaaagtataaggagaggtcataaaggatt

SEQ ID NO: 71836 - DNA, 248 bp, Glycine max
  Clone ID: 700836911H1
cacaaatcaccatccgttcatctggaggactctcagaagatgagattgataagatggtcaaagaagcagagttgcacgctcagaaagaccaggaaagaaaggctctcattgacatcagaaacagtgcagatacaagcatctacagcattgagaagagtttaggtgagtacagagataagatccccagtgaagtggccaaagagattgaagatgcagtatcggatttgagaacagcaatggcaggagac

SEQ ID NO: 71837 - DNA, 248 bp, Glycine max
  Clone ID: 700836912H1
cctcgagcgaatcggctcgagcttcatcctcccctttccctaacctccttcttcttcagcactaatcttcacaaccatctcatccccaaaacaaaaaaaatccacgtatttgaaatccgacgctgtttttgatggatttagcgtgcaacgatgaaccacctaccgcgaatattcggcaatagaaagaagcaagcctccgacatggacccgacgaagaagaagaagaagagtaagggtaagaagcatca

SEQ ID NO: 71838 - DNA, 247 bp, Glycine max
  Clone ID: 700836913H1
tatgaaaaggagcctggtcccacacatgctggaggacgaagcaggcgagtagagcctgaaagaacactgactgatgcacagagggatgaatttgaggatatgctgcgtgctttaacattagagaggagccagataaaagaggctatgggattttctttagataatgccgatgctgctggcgaggtagttgaagttttgactgaatccttgacacttaaagaaacccctattccaactaaaattgcaa

SEQ ID NO: 71839 - DNA, 248 bp, Glycine max
  Clone ID: 700836914H1
gaagcagtatcacagtatagaacatatgaagatgcttttgtcaataaagttaaagatggactgatgattgcaaaggagaatccagctgtaagtgctggtgtagctatttctgctgcccttctggctatgcgagctccaagaaggtttctgtttcgccatacattgggtcgattccaaagtgaggaggcgcgatatgctagaattgagaagaatgtaaaggacttgaacctttcagtggatttactgaa

SEQ ID NO: 71840 - DNA, 249 bp, Glycine max
  Clone ID: 700836915H1
agctgctggtaactatcctgagtggaaactgtttgttcagacaatagatcctgagcacgaagacaaatttgactttgaccctcttgatgttactaagacttggcctgaggacattatacccttgcagcctgttggtcgcttggtcctgaataagaacatagataatttctttgctgagaatgaacaacttgcattttgccctgccattgtggttcctggtgtatactactcagatgataagatgcttca

SEQ ID NO: 71841 - DNA, 253 bp, Glycine max
  Clone ID: 700836916H1
cgccagctcgagaaaagggtgtatgagagggaaaggaggtcccgagaatgctagttgcacctacaaaggtgtgaggcagagaacatggggaaaatgggttgctgaaatccgtgaacccaatcgaggtgctaggctctggctcgggacttttgagacctctcatgaagctgctttggcttatgatgctgctgcacgtaagctctatggctctgatgccaaactcaacttaccagagctctctatcaaatcacaa

SEQ ID NO: 71842 - DNA, 245 bp, Glycine max
  Clone ID: 700836917H1
cgccattgtcaaacccttttcacttctctctagggttttagcactctctctctctctcgttttcgttcttcctttctgcctctctcagtcacacaccttctcgatgaccaacgacaacatcgccgtgacagatctcacttctgccctcaatgaagataatcgcgccgacctagtcaatgctctcaagagcaagattcagagtctggctggggcgcattctgatgttctagagactctatccccga

SEQ ID NO: 71843 - DNA, 245 bp, Glycine max
  Clone ID: 700836918H1
cattagttgttcctctcttctcctgaatcatatgcagtgcagattttggtgtgaattggcgaatccccaaaatgggtgacagcagaaagaagcaccgtcgtgtgcaagactcgccgtcttcctcatcctcttcgtgctcggactccgacgactcttcgcggcggcggcggcggaggcggcgcgagaaggagatgctcagaaagagcgaggaaaaggaggagcgaaggaggaagaagagagacaga

SEQ ID NO: 71844 - DNA, 240 bp, Glycine max
  Clone ID: 700836919H1
taggaatataagaactaagatggattggatcggagcgtaccgcggaggccagagaagcagggactggtgcgacccttcatcaccattcactgatttgtgggaccctcgtcgtgtcggtgacgctgatgatatcacctcctctctcgcccatgctcacgttgactggcgtgagactgataaagctcatatcttccgtgctgatcttccaggggtgaagaaagaggatctgaaggtgcaggt

SEQ ID NO: 71845 - DNA, 134 bp, Glycine max
  Clone ID: 700836920H1
acattattagattatcttttcgatatagaacactcatgtcgataaaatggcttgaatcctatttacttacggcaagacattgaaaaacgggttaatttaaccctcccttttgtacaatgcgtaatcgatgacct

SEQ ID NO: 71846 - DNA, 243 bp, Glycine max
  Clone ID: 700836921H1
gtttcaaagtctccctctctctgttttcatctttctttcgcttcaaatcttgcattctattttcactccctcaaatcctctcgctgtttcacctttctcatgccgttcttctctgttatttgagtcaaaggattatccccatgtcagttgcaccagttgacggtattccctcattaaacagtgatctcttctatgatatatttcgtcgacttgatggtgcaacattggctagtgcagcatgta

SEQ ID NO: 71847 - DNA, 243 bp, Glycine max
  Clone ID: 700836922H1
ctccttaaacactcatcagtcatcaccatggccaagctagttttttccctttgttttctgcttttcagtggctgctgcttcgctttcagttccagagagcagcctcagcaaaacgagtgccagatccaaaaactcaatgccctcaaaccggataaccgtatagagtcagaaggagggctcattgagacatggaaccctaacaacaagccattccagtgtgccggtgttgccctctctcgctgc

SEQ ID NO: 71848 - DNA, 246 bp, Glycine max
  Clone ID: 700836924H1
cacacacacagctagcagatattacatacacgtgaatcactaattaagccatggagaagaaatcaatagctgggttgtgcttcctcttccttgttctctttgttgctcaagttgtggtgcaaactgaggcaaagacttgcgagaacctggctgatacatacaggggtccatgcttcaccactggcagctgcgatgatcactgcaagaacaaagagcacttgctcagaggcagatgcagggacgatt

SEQ ID NO: 71849 - DNA, 246 bp, Glycine max
  Clone ID: 700836925H1
gttcgtgccgcgcgcggttctcatggacctcgaaccgggcaccatggacagcgtccggtccgggccgtacgggcagatcttcaggcacgacaactttgtgtttgggcagtccggggcagggaacaactgggccaaggggcattacactgagggtgcggaattgattgattccgttctcgatgttgtgcgcaaggaggctgagaactgcgattgcttgcaaggttttcaagtgtgccattccctggg

SEQ ID NO: 71850 - DNA, 246 bp, Glycine max
  Clone ID: 700836928H1
attttgggtagccatgtcaagattcaacaaaaatgtttgcaatttaactgtgactacaattctttcatacttgttatgcaggcacaggattacttgttcgttcgggcgtttgtcccatttgtggctagtgtgctgataaaagcgtggaaggaatcagattgcagtggtgacatggaagtcatattggggggcatggcttctctggaggatgagatttcatggttcaagacagaagccaacaagtgg

SEQ ID NO: 71851 - DNA, 250 bp, Glycine max
  Clone ID: 700836931H1
ccgacgaagccaaagccaaaggcaacgcagccttctcctccggggactatcctgccgccatccaccacttctccgatgccatcgccctggctccctccaaccatgtcctctattccaaccgatccgccgcatacgcctccctcaaaaactacgcagatgcattagcggatgccaaaaagacagttgaactcaagcccgactggtccaagggttacagccgtctcggtgccgcgcatcttggcctttccca

SEQ ID NO: 71852 - DNA, 252 bp, Glycine max
  Clone ID: 700836932H1
ctccaaccttacttttccgtctcttgttttttctttccttccttctctcatcttcccagccgccgcttcatactgtcttcactccgttgcctgtgtttttctttcttcctttatttctattcaacggatcggaacggtgcactgtgaaagggtttttgttttgtgagtgtattaaaaaatgctgcgtagaaacatccgtttgaggagagagtatttgtaccgaaagagcttagaaggcaaagaacgcttgct

SEQ ID NO: 71853 - DNA, 243 bp, Glycine max
  Clone ID: 700836934H1
tgaatctggtgaaggatgtcaattgttccaatcaaccagggtgatgccaacggctccaaccccttcgcttcgtggggtcaattcgtggattttcctctccctccttccatctccggcttcttccccggcttggaattcggattcggattcggatcatccgtgaacacacgtgtggactggagggagactcccagagcgcacgtgtggaagctggtgcttcccggcttctccaacgaggacgtg

SEQ ID NO: 71854 - DNA, 245 bp, Glycine max
  Clone ID: 700836935H1
agccttatgtgtattttcctttgctgctggtccagacagtgaacctatcacattttctggaaaaactccgggaaagattgttcctccaagagggcctaatgattttggatgggatcctatttttgaacctgatggctatgaccaaacgtatgctcagatgcccaaagaagaaaagaacaaaatttcccaccgctccaaatctcttgcattggtgaaatctcattttgctgaagctagatttactt

SEQ ID NO: 71855 - DNA, 244 bp, Glycine max
  Clone ID: 700836936H1
tgctattatcatccgcagctgcttttattcgcaccgcaaacagtgagccatggccgtcggaaagaacaagcgcatctccaaggggaagaagggtggcaagaagaaggcagctgatccctttgccaagaaggattggtatgacattaaggctccttctgtttttcaagtgaaaaatgttggcaaaaccctcgtctctcgtactcagggtaccaagattgcttctgaaggactcaagcatagagtg

SEQ ID NO: 71856 - DNA, 242 bp, Glycine max
  Clone ID: 700836937H1
cagtgtagaagtttctcttgagccttttagttgtgagcttttgaccgtttctccagtggtgatcttacccagaaaatcaatccaatttgccccaattggattggtaaacatgctcaactctgggggctctattatgtcattggaatttgatcaacaggaaaatttggcgaggattggggtgagaggacatggggaaatgagggtatttgcatcagagaagccagagagcgtcaagattgatg

SEQ ID NO: 71857 - DNA, 244 bp, Glycine max
  Clone ID: 700836938H1
gaaacatcactcacagcgaaaatggcaaagagaacgctgctgaagctaaagccaagtctccacgttccgttacgtttcttccgcagctccactttggccctgacccgacccgttgtcccgcttgcccgacgcgaatccccctcgatatccctcttcaaaccctccaccgttcacttcccgggcatactcgcaaggcaaatggtcactgcgagatcgccacgtggtgcttcaaaaaggaacgatg

SEQ ID NO: 71858 - DNA, 242 bp, Glycine max
  Clone ID: 700836939H1
tcgtatgaccgagacttggttgaagaagcaccgtcttctttacaatggagccactagacaccctcttattattagcattcgcgatggcatcatcaacactgcttccttcaaaacattgctcgcacaggattacttgttcgttcgggcgtttgtcccatttgtggctagtgtgctgataaaagcgtggtaggaatcagattgcagtggtgacatggaagtcatattggggtgcattgcttctc

SEQ ID NO: 71859 - DNA, 240 bp, Glycine max
  Clone ID: 700836940H1
attttgtaactttcaagactcagctaataaacatcaaaagatgtctctgattccaagtatttttggtggccgaaggagcaacgtgttcgatcctttctcccttgacgtgtgggaccctttcaaggattttcattttcccacttctctttctgctgaaaattctgcatctgtgaacactcgtgtggattggaaagtaaccccagaagcacacgtgttcaaggctgatattccagggctgaa

SEQ ID NO: 71860 - DNA, 244 bp, Glycine max
  Clone ID: 700836942H1
cccaaaccgaaaccctaaccctaacggagagatggcggacacttggcatcgatattcgggacggagaaggacagggtgaactgtccgttctacttcaagatcggcgcgtgcaggcacggcgaccggtgctcccggcttcacaccaagccgacaattagcccaacattggttctgtcgaacatgtaccagaggcccgacatgaacatgagcattatcaccaaccccgatcagccacaaccccaat

SEQ ID NO: 71861 - DNA, 244 bp, Glycine max
  Clone ID: 700836945H1
ccgctcgagccgcgagtagtggtggctctgtggagttgggtgctgtggcggctattcgcataccgttacttcatgtgtcaaatttcaaaggagggacgccggagttggttgagacgtgttatgctatacttgttttggttctgccaagttcaagcactagggtttggacctaccatgagatggagatagttgaagtggttgctgatcaggtggctgttgccctgtctcatgcatctgttcttga

SEQ ID NO: 71862 - DNA, 246 bp, Glycine max
  Clone ID: 700836947H1
tctcatttgaatacattccttgtagtttatactgaaagatgggtttgaagatggcgttactgatcctaggcctttccctcatgctccttttggtctcctctgaggtggcatccacgaatacaaaagaggaggcaaatggagtggatgatgccaaatatcccggtggaagctatggagggggttacccaggtcatggcggtggcggttatcctggccatggcggtggcggttatcctggccatggcg

SEQ ID NO: 71863 - DNA, 247 bp, Glycine max
  Clone ID: 700836948H1
tagatttcttgcaatcttgcttttactttaattttttgaggcttgtggataccagaaaacttgtaactaagccacaaacttataattatatttggagagaaagttttatatgtatatgacatccaaataattccttgtcatgactagtgacttctatctatcttacaacaacaacaacaaagtcttaccccaccaattgaggtcagtttcatagatcacataacaccattcgacttggttaaagcaa

SEQ ID NO: 71864 - DNA, 244 bp, Glycine max
  Clone ID: 700836949H1
gcatcatcacaatggctgaagtacgttcacaacaacaacaaccccagcatgtgcaagtccacgcaaccacaacacacaccccacaacaccatggcggggaaggtggcagcggcattctgaacctcatcccggagatgtccctcacgggttcccaactcctagctctcctcgccggcgttccccttggtgcaatgctgctcctcctctccggcatctcgctcatcgccagcctcttggggctggg

SEQ ID NO: 71865 - DNA, 124 bp, Glycine max
  Clone ID: 700836951H1
caaggcttctgagcttgcagctatgtcagtggtactgcgaaaggctagctgctgccgcacttgggagaatgccaaggagtacactgcaaggtagaaggtggaagctgagatggatttggaggcc

SEQ ID NO: 71866 - DNA, 238 bp, Glycine max
  Clone ID: 700836953H1
ctttccatttcttccatcgttccgtttatatatgaaacaagtcacttatagggttgtgagattgaaggggtattattttttcatgcagaaacgagggatcatctaattaaaccagctttcatcagggtgtgggtgatttattgtaagctttttcttattatcttcgattgtgtttacacgtgtgtgttaaaggtggcgaatcctaaagagaagggaaatgaggttgatgacaataagg

SEQ ID NO: 71867 - DNA, 241 bp, Glycine max
  Clone ID: 700836954H1
cacggctcctaaataataatcccacttctctccttcgccgcctcaaagtctttcgtggaatacgatgctgttttctcggatatcgaaaaacctcagaggcagcttcaactcttgtcggtggtttcggtccatcggagaccacaaccactgctttctttccccgcacaattttcattcacgcggtggagactctactcaacaggttatgagaagtttaattttttcaaagggcccagcactg

SEQ ID NO: 71868 - DNA, 131 bp, Glycine max
  Clone ID: 700836957H1
gcactgcatgctctcttcaaaaaaggttcccaaacctttttggactgaagctgtaaactggacgttctacttttcgaatcgatgtccaacacttgctgtgaagaacgtcactcctcacgaagcttggagtg

SEQ ID NO: 71869 - DNA, 243 bp, Glycine max
  Clone ID: 700836958H1
agttacgacgacgacgaagaagaagaagaggaatttcttggctccttagttttgcctgaaagatgggatgtactgggtctcggtcaagccatgggagaaattacgccgagcaaatgtgcaatttctttctgcaccaatgaaggatgggacaactggaacagttatagtcctcacaactccagatgcccagcgcacaatgcttgcatatcagggcacatcttcaactgttaactatgatgcatc

SEQ ID NO: 71870 - DNA, 243 bp, Glycine max
  Clone ID: 700836959H1
gcttcgcagggtggatctttcgggaacgggaagaatttgaagcaggatgttcactccattcccgattcgcccatgctcgaaacgacgtcgtcgtttgggtccacttcttcgtcgccttcgcttgcgaacttgccgccgattagggttcatgttgtggaggatcagaaggtgttggggattgaggagcagttcgcgcagatgggggttggtgtggggcagaagcagcagcagcaggatgagggt

SEQ ID NO: 71871 - DNA, 133 bp, Glycine max
  Clone ID: 700836960H1
gaaaaaaaaatggctgatacaggtggaggagatgcagtgagaccagtggtaatatgtgataacaagtgtggctgcacacttccatgcactggtggttccacttgcaggtctcttaagttcatgatttcaacaa

SEQ ID NO: 71872 - DNA, 242 bp, Glycine max
  Clone ID: 700836961H1
attctctccattggtccttaaacactcatcagtcatcaccatggccaagctagttttttccctttgttttctgcttttcagtggctgctgcttcgctttcagttccagagagcagcctcagcaaaacgagtgccagatccaaaaactcaatgccctcaaaccggataaccgtatagagtcagaaggagggctcattgagacatggaaccctaacaacaagccattccagtgtgccggtgttg

SEQ ID NO: 71873 - DNA, 246 bp, Glycine max
  Clone ID: 700836962H1
tgaaagcactcagtagggtttgcggtttcagagtttgtgacgcacgcatccatggccaccaccaccaacgccgccgcagccccgccgcgccagctctcccagaaggaagccgacatccagatgatgttagccgccgacgtccacctcggcaccaaaaactgcgacttccaaatggaacgttacatcttcaagcgccgcaacgacgggatttacattattaaccttgggaagacatgggagaagctt

SEQ ID NO: 71874 - DNA, 123 bp, Glycine max
  Clone ID: 700836964H1
aggacagtgataggtttggtttggaaggaagaagaaaatgaaggccatagtgataacgaggccaggaggtcccgaagtgctccaacttgaggaagtggaagatccctagtcggagacgacgag

SEQ ID NO: 71875 - DNA, 242 bp, Glycine max
  Clone ID: 700836965H1
ttttaatcttaattcccccactgacagggatgggaatctagccgtttcacggatgcttagtggacataaaggttatgtttcctcttgtcagtatgttccagatgaagatactcacttgattactggttctggtgatcagacatgtgttttatgggatattactactggccttagaacatctgtttttggtggtgaatttcagtctggacatactgcagatgtacttagcatttccattatgg

SEQ ID NO: 71876 - DNA, 129 bp, Glycine max
  Clone ID: 700836966H1
ccattccaatttccatggcactctcctttcgacccgtcatccacccccgcgtcaccgaccggtcactctttcagttcctcccacccaagcctccccctcttccaacttcgccacctccctccgttctcc

SEQ ID NO: 71877 - DNA, 238 bp, Glycine max
  Clone ID: 700836967H1
aatttggattcaagaactgggaaatgttccacttctggaaagcagtcatcaaaagaagagcttagtagatgtaaaaatatctgtgcctacccgtcttataagatttccaaagcattctggccccactgggcgtatcggatgtttgactcttattcgcttgcacaaagggctgcagatatgtggaagcgaatagttgggatgcctgacatggatagtctcattaagaagcctgatattt

SEQ ID NO: 71878 - DNA, 238 bp, Glycine max
  Clone ID: 700836968H1
cttttcagatctctcattctcactctgttttacatacaatgtcgttctgaatcactgcatcttttcttatttccactctctgcagcttcattttctgcaaaatggatccctctgcggcattgctatttaaccacctcaagggtgcagacccgttcttcctgctagcgggtcctaatgtgattgaatcggaggagcacattctgcggatggctaagaacatcaagagtgttgcatctga

SEQ ID NO: 71879 - DNA, 237 bp, Glycine max
  Clone ID: 700836969H1
ggaaagactttaccgagtccttacgcgttgtttgtgtttgcgtcggaaggaagagaagatgagtgagaatttgatggagaaagtgagcgcactgggagagcgcctgaaaatcggaggcgtggaagtggggagaaagatgagcgaggggatgagctccatgagtttcaagctcaaggagttcttccagcctgggcccaatcaggccgacaagcttgtggaggacgctacttccgaggc

SEQ ID NO: 71880 - DNA, 241 bp, Glycine max
  Clone ID: 700836970H1
atgagaaacaaagaaaggaaataattgatctttgaaaatgcagggaggaaagaaagctggagagtccatcaaggaaacagctgcaaacattggtgcttctgccaaggctggcatggagaaaaccaaggccactgtccaggagaaggcagaaagaatgacggcacgtgatccgatgcaaaaggagttggcaacccagaagaaagaggcaaagatgagccaggcagagctggacaagcaggcg

SEQ ID NO: 71881 - DNA, 241 bp, Glycine max
  Clone ID: 700836971H1
agatctttaagcatttctgttcaagaacacccttagctgctatctgcttctagcttctatcctggaaggagaggttacgaagtagctcgaacaacgggagaggtcaaaaaacggctttttcttaggcgcaggccagctttaatcgaactcagggagaggagtataccagtggttagggaggcttggttgattgacagcattgaaaagcaagaaccacaacctttggaagcttatgatcttg

SEQ ID NO: 71882 - DNA, 241 bp, Glycine max
  Clone ID: 700836972H1
gaacaaaccagataaaatgcttcatgataatgaggagtgcattgacagcacatcaactaacaccaatcatccagagattggtgtgggcaaaggtgttttgaagaattttacaagatcttcgggggatgttgcagagacaaagatagcagctgattggaaaggtggagaaaattgcccaaagggtacacgtcctgaggaaattgatgcatctggggatgtaaacatggaggcatcaataaca

SEQ ID NO: 71883 - DNA, 240 bp, Glycine max
  Clone ID: 700836974H1
ggaatgcccaagtaacgatggttttcatttttctagttatggtttccattttattgtttatagcaagatggctaacggggtgataatatagtttttctttttattattatttttataggagttaccaatattcagtttccaggtacgatttttttttcctgaatttacataattattattctttaagaaaatagctgttaaatcaaatgtatactgttttaaagaaaattagccaaaggg

SEQ ID NO: 71884 - DNA, 243 bp, Glycine max
  Clone ID: 700836975H1
attgtgaattccatatgcaaatttttgttttttaaatcattcgattatatatagaaagagtagtatgaaaaagagggtatttacaattttatctgatctatcaggaacctagtttaattttagtgtcacagactttttgttttttttttcataccagaaaacttttaacaatttttattttaattagaagaaaacataacatatgaaaaaaaaagaaactttcggattgttgaataacaaaat

SEQ ID NO: 71885 - DNA, 241 bp, Glycine max
  Clone ID: 700836977H1
tgacttctccctacattaaatgtacagtctctttcttcatagcatttggaatttggctgatgacaccatcaattttgaggcttttccccacaagctggtgcagtttggagagattcaggaaaaagttgtattgaaattttcacaagaggaatttcttacagcttggtcaactcaggtgcgtcctgcgacaactctgttggctgatgggtgtccatatttgtatgctatggtgcatgatagc

SEQ ID NO: 71886 - DNA, 246 bp, Glycine max
  Clone ID: 700836978H1
cgctcgagagaagaaataggagaagaaaataaacaatccagcctggaagagatttttaagtacagagctgaagctcaacagaaagttaaggagagaaacgagagagcaaaacaagcagcagaagctgccaaagagagaaacaagcaggcaaataaagggaatgaagaaggcagaagagaaagagaaagtggtgggggtgttcatcatgaggctaagtttgaaactaaaggtgaaaaaaagaaggat

SEQ ID NO: 71887 - DNA, 246 bp, Glycine max
  unsure (1)..(246): unsure at all n locations
  Clone ID: 700836979H1
cacacaactacaagaaagaacttccttataaccaaaaccaacaacaactatggcaagttatcagaagcactacgatgatcagggtcgcaaggtcgacgagtatggcaatgttgagaggcaaactgacgaatatggcaacccggttcatgccactagtgtcacttatgtagccaccaaaagtgttggtggctacaatgatgacgctaataagcaacatgatattactggtgtctatcncgagaaaga

SEQ ID NO: 71888 - DNA, 248 bp, Glycine max
  Clone ID: 700836980H1
aactatggcaagttatcaaaagcactacgatgatcagggtcgcaaggttgacgagtatggcaacgttgagaagcaaaccgacgaatacggcaaccctgttcatgctgctagtgtcacctatgtagccaccagaactgctgctggtggttacagtgatgacattaataagcaacatgataccaccaatgcctacggcgtagacactggtagacagcattctagtggtggctacgatggtgacactaata

SEQ ID NO: 71889 - DNA, 130 bp, Glycine max
  Clone ID: 700836981H1
agatagttttgccatacttggctactaccaaattagtcatggatcttattcataagttcctgaacatagtagcttctataaccaccttctttttcctttgccttttcttgccaccgtattggaccttcaa

SEQ ID NO: 71890 - DNA, 233 bp, Glycine max
  Clone ID: 700836982H1
cttctctgagactctctccctatcgtcaccgtcactgccatggaggatgccaatcttcagaggctccattgctccgtcaaaaactacgattggggtctcccaggtcgcgtctccgaggttgccagactccacgcgctcaattccgcgtctgaattccacgcggaggacccttacgccgagctttggatgggtacccatgattcaggcccttcctttttagcttcctccaatgg

SEQ ID NO: 71891 - DNA, 239 bp, Glycine max; identical to SEQ ID NO: 67821
  Clone ID: 700836983H1

SEQ ID NO: 71892 - DNA, 234 bp, Glycine max
  Clone ID: 700836984H1
ctgaagaaaacctaagcttagaattagaaacaaagaaaagaagaaaggaaagaattgatcgttgaaaatgcagggaggaaagaaagcgggagagtccattaaggaaacagctacaaacattggtgcttctgccaaggctggcatggagaagaccaaggccactgtccaagagaaggcagaaagaatgacagcacgtgatccggtgcaaaaggagttggcaccccaaagaaagag

SEQ ID NO: 71893 - DNA, 237 bp, Glycine max
  Clone ID: 700836985H1
caatggcaaagactgagttagaggtgactgttgagagcaagaacaaagaactaaagcacctgggatttgtgaggattgctgctattcaaacttttgtgattgtgtcaaatctgtatgagtacgcaaagcagaattctgggcctttgagatccgctgttggaacggttgagaacactgtaaccaccgttcttggtcctgtctgcaacaaattcaaggacttccctgatgatgtcctgg

SEQ ID NO: 71894 - DNA, 128 bp, Glycine max
  Clone ID: 700836986H1
gaaaaccaacataacaatgtcgttgattccaagtttcttcggcaccgggcgaagaaccaacgtcttcgacgccttctccctcgacgtgtgggacccattccatggcttccccggtactatcgtgctct

SEQ ID NO: 71895 - DNA, 240 bp, Glycine max
  Clone ID: 700836987H1
ccaaaacagtaaagctaacttcaacacctttaattttctaaaagtaattcagcggctgaataccaagcggagaagatgagtcaggagcagccacggcgtcccaaaggccaaaaccccatcaaatacggcgacgtttttgtcgtctccggcgaccttgcacagaagcccgtcgcaccggaagatgctgccatgatgcaaagcgcggaaactcgagtgctcggacaaacccaacccggcgga

SEQ ID NO: 71896 - DNA, 238 bp, Glycine max
  Clone ID: 700836988H1
gaagattacaacaagttctatgatgctttttcgaagaatttgaagttgggtatccacgaggatagtcagaacaggtccaagttggctgatttgctcagataccactcgacaaagagcggagatgaaatgacaagcttgaaggactacgttacacggatgaaggagggtcagaaggacatttactacatcacaggagagagcaagaaggcagtggagaactctcccttcttggagagac

SEQ ID NO: 71897 - DNA, 241 bp, Glycine max
  Clone ID: 700836989H1
caaaagggtaaaagctcgtttgattctgatttccagtacgaatacgaaccgtgaaagcgtggcctatcgatcctttagtccttcggaatttgaagctagaggtgtcagaaaagttaccacagggataactggcttgtggcagccaagcgttcatagcgacgttgctttttgatccttcgatgtcggctcttcctatcattgtgaagcagaattcaccaagtgttggattgttcacccacca

SEQ ID NO: 71898 - DNA, 242 bp, Glycine max
  Clone ID: 700836990H1
gtccaaaagcaatccaacatcgtcagagttcacgctctcagtctcagagagtgacaaatcagaaggttttggagattaaggatcaaattattagagccagagcatacttggggtttgctcctccaggcagcaactcacacttgatgaaggagttgaagctgagaattaaagagatggaacgtgctgttggagaagctactaaggattcagatctgtcaaggagaaaatgagacacatggagg

SEQ ID NO: 71899 - DNA, 242 bp, Glycine max
  Clone ID: 700836991H1
tagagaacatgaatttgaaggctacagagttgaggcttggtcttcccggattccaatcgcctgaaagggaaccggatcttttctctttaagctcaccaaagcttgatgagaagccactcttccctttgcttcctactaaagacgggatttgctcgtcggggcagaaagctgttgtttctggcaacaaaagaggttttgctgataccatggatgggttttctcaggggaagtttgctggtaat

SEQ ID NO: 71900 - DNA, 243 bp, Glycine max
  Clone ID: 700836992H1
aaaggatccaaagacaagaaggccatgaggagagctgagaaggagagactgaaggaaggtgaaatggctgatgaggaacagaagaaagtgaagaaagaggttaagaagaaaggctcttcatcttcaaaagatggcactgctaaatccacctcttcaaagaagaaagcaagtggctctgatgaagaccgcacttcacctactcacagtcaaattgatgagaaagaggaggctccagatgaagat

SEQ ID NO: 71901 - DNA, 240 bp, Glycine max
  Clone ID: 700836993H1
gctgggcacgggggtcccagtcccgaacccgtcggctgtcggtggactgctcgagctgcttccgcggcgagagcgggtcgtcgcgtgccggtcgggggacggattgggaacgggcccttcggggcctcttccccgggcgtcgaacagtcaactcagaactggtacggacaaggggaatccgactgtttaattaaaacaaagcattgcgatggtccctgcggatgttgacgcaatgtgatt

SEQ ID NO: 71902 - DNA, 244 bp, Glycine max
  Clone ID: 700836994H1
tctgaggtgaactcgtgtggggtgtggtagtgtggcagcgacacgtatcaacttcaataatcgcatcgcagaagcagtttccggtgcatctcatcgtctccgaaaatgaacgacgcagatgtctcgaagcaaatccagcagatggtgcggttcatccgccaggaagctgaggaaaaggccaacgagatctctgtctccgccgaagaggaattcaatatcgagaagctgcagttggtcgaagccg

SEQ ID NO: 71903 - DNA, 245 bp, Glycine max
  Clone ID: 700836995H1
ctacaagaaagaacttccttataaccaaaaccaacaacaactatggcaagttatcagaagcactacgatgatcagggtcgcaaggtcgacgagtatggcaatgttgagaggcaaactgacgaatatggcaacccggttcatgccactagtgtcacttatgtagccaccaaaagtgttggtggctacaatgatgacgctaataagcaacatgatattactggtgtctatcccgagaaagacaccgg

SEQ ID NO: 71904 - DNA, 246 bp, Glycine max
  Clone ID: 700836996H1
aatagcttgctagctactcctgttgctgtgagaaccgttgatgtagatgctttgcaagcaagatttagagactccaacaataaaagccatgcttaacacctaccatgcctccaaactctcatcaaaccagtgtggttctagccttgtgcaaacaatagatgcacctttacctctcgtatggtccctcataaggcgctttgagtatccacaagggtacaagctctttgtgaagaagtgcaaccttct

SEQ ID NO: 71905 - DNA, 261 bp, Glycine max
  Clone ID: 700837001H1
ttctcttactctgcaacaacgtcgttttccttcttcttcttcgtcttcttcttctttgctcacccggctcagttcgcgctctcagtaaaacgcgctcaagtgtcgccgttttctgcaaattcagctagggtttcactctcgccgcgatctctcatcctagctcgccgagttcgggttctaatcgccgcgtctaagttcactgtttctctgaatcgaagaaaggacttcgaatttcgctgctttcagttagtagctggtaat

SEQ ID NO: 71906 - DNA, 256 bp, Glycine max
  unsure (1)..(256): unsure at all n locations
  Clone ID: 700837002H1
ggcagttacaaaactaaaggcggcgccggtgtcgcgcacggaagtttagagtccggcatgacggcggtgaagctgctggatttgatgccggtgatgcgaactccgatgaggacgcggcggagatggcgccggaggagatgaatccgaagctgtttggtgtggcgattggagcgaacangcgagagagggaggaggtggtggagattgtggaggtggaggagaggaagatacgctgctgcgcctgcatcacgcgggt

SEQ ID NO: 71907 - DNA, 258 bp, Glycine max
  Clone ID: 700837003H1
gaagaagttcaaggttttcatggagaattacgggaggagctactccacagaggaggagtatttgcgccgtttggggattttcgcccagaacatggtcagagcggcggagcatcaggcgctggaccccaccgccgtccacggcgtcacgcagttctccgatctcaccgaggacgagtttgagaagctctacactggcgtcaatggcggcttcccgtcatcgaataatgccgccggcggtattgcgccgccgttggaggt

SEQ ID NO: 71908 - DNA, 257 bp, Glycine max
  Clone ID: 700837004H1
caataagcggaggaaaagaaactaacaaggattcccttagtaacggcgagcgaaccgggaaaagcccaccatgaaaatcggtcgccctcggcgtccgaattgtagtctggagaagcgtcctcagtggcggaccgggcccaagtcccctggaagggggcgccagagagggtgagagccccgtcgtgcccggaccctgtcgcaccacgaggcgctgtcggcgagtcgggttgtttgggaatgcagccccaatcgggcgg

SEQ ID NO: 71909 - DNA, 255 bp, Glycine max
  Clone ID: 700837005H1
gagaacaagaagctgattctggcaatattggacaatcaaaatcttggaaaacttgcagaatgtgcccagtaccaagctcagcttcaaaagaatttgatgtatttagctgcaattggtgatgcccagcctcaaacaccagccatggctccacagatggcaccacaccctgccatgcaaccaggattctatatgcaacatcctcaggctgcagcagcagcaatggctcagcagcagcagcaaggaatgttcccccag

SEQ ID NO: 71910 - DNA, 253 bp, Glycine max
  Clone ID: 700837008H1
caagtgaccagagatgacatgggattgactggagctggacaagctgctcctcttaattgttgctacagcagtagtaatgagagcacccctccgacttggcctcgtagcaaaaggattaatcaaggtgaccagggcaagccaattaaagtaatgccagattttgcacaagtctacagcttcattggcagtgtattcgatccaaattcaactaatcacctacagaaactacaacagatggacccaataaatgtgg

SEQ ID NO: 71911 - DNA, 259 bp, Glycine max
  Clone ID: 700837009H1
attcctctttttttttttctagaccgaattgaaattgaaactttagttcttcttcttcttctgcactttcaagcaggtatggctcaacaacagggggacgaaatggagtatgctgctgatgataatgaaatggcggaagtagaagatgacatgtatttcagtggtagagtgtttggtgattcagagtccgaatcagacgacgatgatgaatatgactccatggaaaatcggatgacagatacctctgctgcagaagcta

SEQ ID NO: 71912 - DNA, 259 bp, Glycine max
  Clone ID: 700837010H1
aagtcgagtcacctgccgaaatcctatagcaccattttgaccaatgcgatatagctaacagctattcgcccccccatactttctttaattttctccttctcccatggtgtaattgctccaactatggccgtggacctcatgacgaccggttacacccgaaacgacaacatcagtagtttcacaaccaaagccgaggaaaatgccgtccaagaagccgcttctggtctagagagcgtcgagaagctcatcagactcctct

SEQ ID NO: 71913 - DNA, 257 bp, Glycine max
  Clone ID: 700837011H1
cagagaaggtgcagaaaaggcagcagaagaactctccaacaaactggttattaagggccttaggctaaagctgatgtggggcaggcctcagacatcgaaacccgagtctgatggttctgatcaagctaggccgcaggatgctgtagctcatagtggattgttgcctcgggcagttatatcacagcagcaaaaccaggaccaagcccaaggaatgctttactataacaatcccccacctcctcagcaggaaagaagct

SEQ ID NO: 71914 - DNA, 260 bp, Glycine max
  Clone ID: 700837014H1
ggaaaaagttgaaacttgctatttgggacactggtaatgtgcaatttgttaattataatttcttgaaagtcaaatcccttttattctatgttgtttgcttctgttatatattttcagaattacatattagttaaggtgaagaattttttccattgctagaaacttatgctgaagagtgagtgtggagctttggagctctgatgtacttgactctttcgagctttaattgagagttttgccataccagttggaatcttcaa

SEQ ID NO: 71915 - DNA, 259 bp, Glycine max
  Clone ID: 700837015H1
ctctcccagacaaacacatggctttgcccaatcagcaaaccgtcgattaccccagcttcaagctcgtcatcgtcggtgacggtggcacaggaaagacaaccttcgtgaaaaggcatctcactggtgaattcgagaagaaatatgaaccgaccattggtgtggaggttcatccgttggattttttcactaactgcggaaagattcgattctattgttgggatactgctgggcaagagaagtttggcggcctcagagatgg

SEQ ID NO: 71916 - DNA, 259 bp, Glycine max
  Clone ID: 700837018H1
tgaagaattaaggagagaaaaatcaacatcaaagttataacgatgaagcccattgacgataaacaagagacagtgacgatcagagcggtgagccacgacgaggaagggagaaagagggtggaaaaaatagagctcaacactcacaacatccacactataaagtacgtcgagaagaagctcatcaacaagggtgtgcagcgcaaggaccgccacccagccgacggcatcagaatcggccggccaccgccaaagtccggcc

SEQ ID NO: 71917 - DNA, 254 bp, Glycine max
  Clone ID: 700837019H1
gacaccctcttattattagcattcgcgatggcaccatcaacactgcttccttcaaaacatggctcgcacaggattacttgttcgttcgggcgtttgtcccatttgtggctagtgtgctgataaaagcgtggaaggaatcagattgcagtggtgacatggaagtcatattggggggcatggcttctctggaggatgagatttcatggttcaagacagaagccaacaagtggggtatttcactttctgacgttgtt

SEQ ID NO: 71918 - DNA, 254 bp, Glycine max
  Clone ID: 700837020H1
gcaaacttttcaaacaaaaaaaataaataataaagaaaacaaaacaagaagaaggaaacgcgcaacgcaacacaaaaaaccacactttcaattgcatttctctctctttctcacaatttccactttccgggttttcgattcgatattcgttgttccaatgagcgatcacttggtggtgttcgttgaccgtctcgcgcgccctgtccccgttgatccggtggcgcagacggcgcaggtgccttccgaaccatctc

SEQ ID NO: 71919 - DNA, 248 bp, Glycine max
  Clone ID: 700837021H1
ggagagcgcaatgggaatgagtatcttatcaatctcattgactcccctgggcacgttgacttctcatctgaggttactgctgcactccgtattactgatggagctctagttgtggtcgattgtgtggaaggagtttgtgtccaaactgaaactgtgctaagacaagcccttggagaaaggattaggcctgttctgactgtcaataagatggacaggtgcttccttgaactccaggttgatggagagga

SEQ ID NO: 71920 - DNA, 254 bp, Glycine max
  Clone ID: 700837023H1
taaaatcaccatgtctatcatcccaaacttgttcggtggtagacgaagcaacgtcttcgacccattctctctggacgtatgggaccctttcgaggggtttcctttttccacaggtcacgtgccttcctctggtggggaaagcagtgccatagccaacactcgcgtggactggaaggagactccggcggctcacgtgttcaacgttgatcttcccgggttgaagaaggaggaagtgaaggttgaagttgaagatg

SEQ ID NO: 71921 - DNA, 256 bp, Glycine max
  Clone ID: 700837024H1
cgcagctgcaagggatgcaagggaggcagctgcaagggatgcaagggaagctgctgcaagggatgcaaaggtggaggcaagggatgtaaagagcacaacagtgacagcaacaaccgcaaccgcatgatgagtaattctgatattagagggagcattaatgtgttgttgtgatgtggtttatatggggaaattaaataaatgatgtatgtacctcttgcctatgtaggtttgtgtgttttgttttgttgtctagctt

SEQ ID NO: 71922 - DNA, 255 bp, Glycine max
  Clone ID: 700837025H1
gttgtcctctacaggaatggaatttactctccacattggaacttgaacgcgaacagtgtgatctatgtgactcgagggaaaggaagagttagagtggtgaactgccaagggaatgcagtgttcgacggtgagctaaggaggggacaattgctagtggtgccgcagaactttgtggtggctgagcaagggggagaacaaggattggaatacgtagtgttcaagacacaccacaacgccgtgagcagctacattaag

SEQ ID NO: 71923 - DNA, 255 bp, Glycine max
  Clone ID: 700837026H1
ccgagttcgccgatattacctcaactcattcaactgctactactttacatcataaatcatccattaacggccatcttgcgctagattatacttgcatcaagtggttgtccttcgacaaaaagaggaaaaggaagcatatatcctccttgttagtgcttggaactggtggcggtgatgttttagcacttgacatcgcttctggtcaattgacttggagacttactgactgtcatcctggaggtgtgagagccattg

SEQ ID NO: 71924 - DNA, 257 bp, Glycine max
  Clone ID: 700837028H1
cgcgacggactcggcgacggaggacgagcggaccggaacctgcaggacgttgacagggcagcgctgtcgcgtcccttggatgagacgcagcagagctggctccttggccccggcgagcagaagaagaagaagtacgtcgatctcggctgcatcatcgtcagccgcaagatcttcaagtggaccctcggcacaatcctcttcgccgcattcctcgccggcctcatcgccctcatcgtcaacaccgtcccccgccaccg

SEQ ID NO: 71925 - DNA, 259 bp, Glycine max
  Clone ID: 700837030H1
aatttcaccaccgaacgaaccaacacacgctcaaaccccaaaccctaacacaagccttgatcagatggcatccaaacgaatcaacaaggaattgaaggacctgcagaaagatcctcctacgtcatgcagtgctggcccagtggctgatgacatgttccattggcaagctacaattatgggtcctgcagatagtccatttgctggaggtgtatttcttgtgtcaattcactttcctcctgattatcctttcaaaccaccc

SEQ ID NO: 71926 - DNA, 261 bp, Glycine max
  Clone ID: 700837031H1
ctctctctctctcttcgttcttttggagtgtgtgtgcacccattgatgacaagcaaccccattgcatggaagcctaagaggaggagaagacgaagaggacaagggtaactgaatcgccgcttctgcagcttcgttctttcgtttttgtttcatctttttagcttcagagggtaaataaaaaatggaggttttggtgggtcccgctttcaccatcgacgttccctcgtctccgccgcagcatgccggttccgatgatcggat

SEQ ID NO: 71927 - DNA, 265 bp, Glycine max
  Clone ID: 700837032H1
tgcaggtggaatctcaatggccacgcttagcttcggcatcgccacgacatgtctgagtgctgccgctgattatcgtagaagaagcaactggaaatggagcagacccagaattgtgtgtgttggatgggacccggaaggcgtgcttggtccaccccaaactgggcacctcgccaggttcgagtttaagaggcgcctcgagagagacgcagatgcccgcgaagcttccaacgtcaagtccgtgaagagaaagaacgccgtcaatccc

SEQ ID NO: 71928 - DNA, 260 bp, Glycine max
  Clone ID: 700837033H1
gacatattcaagattatcatcatcatcacactacgtatccttaacgagatttcctttgtcattgatcatcatggcattcatttaacgaggagagaaaaaagaaaataaacaaaacagacaccctgacacgaccatagataaattatgagcagaaaacaagtggcaaagcaggcaaaagagaatgcatggttgttgcatttgcataccttgttttaataatctctgtgattattcttaaaaggagagcatgcaagaaagaa

SEQ ID NO: 71929 - DNA, 257 bp, Glycine max
  Clone ID: 700837034H1
actttctgaaggagatatattagttacatttatctatgaaaaatcgagatcgggtgatataacacaaggtcttccaaaagtagaacaggtattagaagttcgttcgattgattcaatatcgatgaacctagaaaagagagttgatacttggaatgggcgtataacaaaaattcttggcattccttggggattcttgattggtgctgagctaacgatagcgcaaagtcgtatttctttggttaataaaattcaaaaag

SEQ ID NO: 71930 - DNA, 253 bp, Glycine max
  Clone ID: 700837035H1
aaaattttgtttctttgtgtgtgtatggtgatgataacttaattagtgttcaaaaaatgtgtcattgccaaacaacagccaacagctgtctttgggaaccaatagtacattggaaaataaagaaaatagtcaggatggtggtgagaatgagaacaatgcgacaaggaatggaaattctgcaaaccatcaaattgttgagcagtgtgatgagcaaaaagtggctgatacttatacacaatctaatggtaaagat

SEQ ID NO: 71931 - DNA, 253 bp, Glycine max
  Clone ID: 700837036H1
cttctctcctctcatatcttcattttctttcaggtaaggatttgagaagattttgtggaacctggaggattcggccctacagggacagttaatgaacctacataggaatacaacgtgaatctattaatacaaggttttatcttcaatggagaacaaaccagataaaatgcttcatgataatgaggagtgcattgacagcacatcaactaacaccaatcatccagagattggtgtgggcaaaggtgttttgaag

SEQ ID NO: 71932 - DNA, 252 bp, Glycine max
  Clone ID: 700837039H1
ttgcgcgtgaacaagcctcagccaaaaccatggttaagcataacaatgttatcccaaacggacacttccgtaagcactggcagaactatgtgaagacttggttcaatcagccagcacggaagacaaggagacgattggctcgtcagaagaaagctgtgaagatattccccagacctacggctggacctctcaggcccattgtacatggtcaaactttgaaatacaacatgaaagtgagaggtggaaggggat

SEQ ID NO: 71933 - DNA, 258 bp, Glycine max
  Clone ID: 700837041H1
gagaaacaaagaaaggaaataattgatctttgaaaatgcagggaggaaagaaagctggagagtccatcaaggaaacagctgcaaacattggtgcttctgccaaggctggcatggagaaaaccaaggccactgtccaggagaaggcagaaagaatgacggcacgtgatccgatgcaaaaggagttggcaacccagaagaaagaggcaaagatgagccaggcagagctggacaagcaggcggcgcgtcagcataacacgg

SEQ ID NO: 71934 - DNA, 254 bp, Glycine max
  Clone ID: 700837044H1
cctttgttcactcttcttctcttgcggctagggttttagcgcagttcttctagatttaaggaagatgggtaaggaaaaggttcacatcagtattgtggtcattggccatgtcgactctgggaaatccactaccactggtcacctgatttacaagcttggaggcattgacaagcgtgttattgagaggtttgagaaggaagctgctgagatgaacaagaggtctttcaagtatgcctgggtgctggacaaactta

SEQ ID NO: 71935 - DNA, 256 bp, Glycine max
  Clone ID: 700837045H1
caaaaacaaaaacaaagtaagagttcactcaatctcactgtgttgtgagttgtgtgtgagcaccaaccaacaatggtgtctctgactccgttatgtttctttattaccttgttgatcgctggtgcagacgcagcggcggagccccaaacggtgcgttttgacaccggggggttgagcagagacacctttcccaaaggattcttattcggaacggccacgtctgcgtaccaagtggagggtatggcccacaaagacg

SEQ ID NO: 71936 - DNA, 255 bp, Glycine max
  Clone ID: 700837046H1
gaaatccccaaattgcctgtgaatgctagaaaccctaggcacgttcgatttgatgctctcccatttgcaatcaagggcgagcgcattcggttcttgcacgcaaggctggtactaccgctgcatcggcctcgatccctgaattcatcattctttctcgcaccatctttttctattccgattcgatttgttgttgttgttgttgttgttgtgtttttgtttccttccttgacgaatcatcacgatgttgatgagcaa

SEQ ID NO: 71937 - DNA, 258 bp, Glycine max
  Clone ID: 700837047H1
aactctttctcttcttccgtttcctagtctcacacccaaacctcatggaaggctctgtcaacgaacgtcttgattttgggaagatgggatatgggtgcaatcattaccggagaagatgcaggattcgtgctccctgctgcaacgagatctactcatgccgtcactgtcataacgacgctgcgagcttgttgaagaatccctttgatcgccacgagctcgttcgccaagatgttaaacaagttgtttgttcagtttgtg

SEQ ID NO: 71938 - DNA, 263 bp, Glycine max
  Clone ID: 700837048H1
gtttgcttgtctatacttaatgaagatagtgggtggagaccagctataacagtgaagcaaattcttgtgggcatccaagacctgcttgatcaaccaaatcctgctgaccctgcccagacggagggttatcatctattcatccagctgagtacaagagaagagtccgacagcagtcaaagcaatatccacctcttgtctagtgttatatctgctcactttaggaactgttatagtatgttagttgttgtcagttatttcttgtt

SEQ ID NO: 71939 - DNA, 256 bp, Glycine max
  Clone ID: 700837049H1
caaaacaaaacagtgtctttgaacacgagagagagagaacaaaacaatcaacacaatggcttctgagcaaatgcctcgcagagagaacaacagcaatagggtgatagagagagaggttcacgttgagacacacagaaaagagtccctccctgataagggaagggttgtgatagagagtgagaagaaggagaaagagagagagttggcttctgatagagccaggtctggaaatatagttaaggaggacaaagaggtt

SEQ ID NO: 71940 - DNA, 80 bp, Glycine max
  Clone ID: 700837050H1
ctttattttgtgcttttgtaactcttggcttcctggttagatcagagtgatgctcagctttagtatattactttgcactg

SEQ ID NO: 71941 - DNA, 253 bp, Glycine max
  Clone ID: 700837051H1
gtttcccaccgtcacttttccttaacggcgaagcagtcgccgaaaagggcacaaccgtcattcccaccccccaaaccgtttcttcaattctcctctctcccatcccagtaaaaaggagaggaatcgaagctgttccgttctcatcggaaaggggaaaacggtaacggagatgggacttctgtctaacagagtaactagagagagcctgaaaccaggggatcacatctactcttggaggactgcgtatatatat

SEQ ID NO: 71942 - DNA, 256 bp, Glycine max
  Clone ID: 700837053H1
ctttgatataatatagaaagagacagagagagagagacagacaagaagaacaaagatgcaatcttcaaaggagaagctgaaaaacatgaccagtgctgccaaggagcaagtcgacatctataaagcaaaaatagacgagaagacagagaaagcaacggcaagaacagaagaggagagggtgattacccatgaacgtgcaaaggcaaaggaagctgaagcaaagatggagctgcatgaagcaaaagccaggcatgca

SEQ ID NO: 71943 - DNA, 249 bp, Glycine max
  Clone ID: 700837054H1
gctggttttgttaagatgattccaaccaaacccatggttgttgaaactttctccgagtatcctccacttggtaggtttgctgttagggacatgcgtcaaactgttgctgtgggagttatcaagaacgttgagaagaaggatcctaccggagccaaggtcaccaaggctgcccagaagaagaagtgaatcgtgcgggctggttcatcaggggatgttggttacaataaatgttggtttcttttctgtact

SEQ ID NO: 71944 - DNA, 252 bp, Glycine max
  Clone ID: 700837055H1
cacaattcattttcgaacgaacgtgtcacagaattctcgccttttccgaatatggcatcgcgcgtcacattggcaatctcacttcctccgcgccgtatattaattcccctcattttcgctcacaacttaagctttccagcaactcctctttgcacaagccactcatgcgcgacaagactgtgctggtaaccggcggagcgggttacatcggcacccacaccgttcttcagctcttgctcggaggttgcagaa

SEQ ID NO: 71945 - DNA, 255 bp, Glycine max
  Clone ID: 700837057H1
gaaaagtagtgtattaagactacaaattttcaatttttcaatggcgtcgaggcaacaaaaagaggatcgagctgaggcagctgcgaaagttgctgcgaaagaactcgaacaactcaaccgagaaaaagaccgtgatttcagtgttggtgttgcagaccaacaccaacaagaagaacatcagttagatcaacaaaagcgtggtgtaatcggatccatgttcaaggcggtgcaagacacctacgagaacgccaagga

SEQ ID NO: 71946 - DNA, 254 bp, Glycine max
  Clone ID: 700837058H1
catttatattttcaactgctgcactagttccagttgctgctgctggtcatgctgcgattaaagtggcaaaacttgagaaatggcgtagagaggctatttggaaccgggtgaaagactttcatttgcttacaggaatacccgttacaagtcacattatatccctagtagtaggcagtgaagacaaagcacttcaagcaagccggcatttattgcaatctggcttccacgtgactgcaatcagaccacctactgtg

SEQ ID NO: 71947 - DNA, 252 bp, Glycine max
  Clone ID: 700837060H1
gcttgggctttgccttgctcgaatatgtgacaaggctattggtggcaatgagttagagcagagtctattggattcatgtgcggctaaagggagactcattcattatcattcacatttagatgctctcctcctaaaacaacttgagaggagtaaggcaactagcaagagacgtgctggtaatatcaaaccgttggaagggttagagtcgaattcaattgcccatgacgcgaattcgggtggaattcattcgaa

SEQ ID NO: 71948 - DNA, 255 bp, Glycine max
  Clone ID: 700837061H1
cgacttcaaaagttcagggacttgagaatgcaacaaaagacggggagactcaatagttttccaaaaagagatgccgctatattgaagagacatttagctcatttggaaacatatcttggcggcattaaatatatgacggggttacctgatattgtaataatcgtcgatcaacaagaagaatatacggctcttcgagaatgtataactttggaaattccaacaatttgtttaatcgatacaaattgtgacccggac

SEQ ID NO: 71949 - DNA, 256 bp, Glycine max
  Clone ID: 700837062H1
cggctcgagtcagaagctagtgatcaatcatcaacacagagctgagtgtgttgctctgtgaatccaccttcttcttccattggaggaccatttcctcctggaatagaaatactaccacacttttcttttttcacttctctaagttgctaagttaattgctccttcattttttcactcttcgttctcgcgtacccgtgtcacggtaactcgtggtgaagtgttcgaaaatgactgtcacacctaagatctcagttaa

SEQ ID NO: 71950 - DNA, 259 bp, Glycine max
  Clone ID: 700837063H1
gcaaaagaaagccctggaggaagatccatctgtatttgattatgatggagtctatgaccaaatgaaagagaaagttgctcgtccattggtacaagatcgtgaagagagaaaggtatggttgcagttctaataatcttttcttaattacaatcaaacaaccattgtgttgtttttacaactgtatagaatcatataaatataatgagaaactgagaatctctgccaacttacatcataattatgatgactctgggattag

SEQ ID NO: 71951 - DNA, 264 bp, Glycine max
  Clone ID: 700837064H1
aaaaggttcacatcagtattgtggtcattggccatgtcgactctgggaaatccactaccactggtcacctgatttacaagcttggaggcattgacaagcgtgttattgagaggtttgagaaggaagctgctgagatgaacaagaggtctttcaagtatgcctgggtgctggacaaacttaaggctgagcgtgaaagaggaatcaccattgatattgctttgtggaagtttgaaacaacaaagtattattgcacagttattgatg

SEQ ID NO: 71952 - DNA, 254 bp, Glycine max
  Clone ID: 700837065H1
gcctccttgaaattagagacattgaagacgtagcacaaatttattattgcgagtgtgcgacgaggacgagctcgagatcgtgtaaaagtgaaaattagccacttgaaaattgagtcaccaagtgttcaagcgcgttttctaacaaaaaaataatgtttttagaagttcttcctttaatatttttttagaaattttttaacctttatattttcaattttatctttcgcgtcttggttctaaatttaacttcaata

SEQ ID NO: 71953 - DNA, 251 bp, Glycine max
  Clone ID: 700837067H1
gttccaaacaaaaacgtatgaattggtcggtttttctacggagtcgtcaccatgaatcatcttcagttaccaccaacaagctccacgcttgagtttcacgtttctccgaggttttattatcatccgtgtcgtgtctctgtctccgtctcttagtttcttcttcagatggcagaagttgaagacagagacaacaacactcgtcaccaccatcattacatttcttcaacaacaacaacacaatctccaatgaa

SEQ ID NO: 71954 - DNA, 250 bp, Glycine max
  Clone ID: 700837068H1
gcgccgctacttccagcagctcgtttcggcgttgcggttctgccaccgcaacggcgtggcccaccgcgacctgaagccgcagaacctcctcctcgacggcgacggaaacctcaaggtctccgacttcgggctctccgcactgccggagcagctcaagaacggcctcctccacaccgcctgcggcacgccggcgtacaccgcgccggagatactccgccggagcggcggctacgacgggtccaaggccgac

SEQ ID NO: 71955 - DNA, 252 bp, Glycine max
  Clone ID: 700837069H1
caaatcaacaaccactgccttcatcagtttttacaaatcctcacaacatgttcatgtctctcttcagccacttcgagatcgcacaggcccagaagtggaggttttctttgtcccccgtaaaaggtacgaattccaagcccaacgcggaagccacctcttcctccgcagagtccaaaaccgccggaaaagataagaatccatcacaacccggtgggcccaggtttgcgccggagttggatggactacactgct

SEQ ID NO: 71956 - DNA, 245 bp, Glycine max
  Clone ID: 700837071H1
tgaaaacaacaaaatagacacctgttaagaaggaggacaacgatggtgctgccgctatttactgctttcattctctttgcttttattccgaatggattgttagcagttccttccaccgtcccggcattcctttggtcatcacattatgaactggcctctgaaaatatattgaaggaatctgtaaattaccaagtcatttctccgaaggatctagcaaaatctattttatctgaagcaggctggtc

SEQ ID NO: 71957 - DNA, 254 bp, Glycine max
  Clone ID: 700837073H1
aagtacttccttacaatcaaaaccaacaacaactatggcaagttatcaaaagcactacgatgatcagggtcgcaaggttgacgagtatggcaacgttgagaagcaaaccgacgaatacggcaaccctgttcatgctgctagtgtcacctatgtagccaccagaactgctgctggtggttacagtgatgacattaataagcaacatgataccaccaatgcctacggcgtagacactggtagacagcattctagtg

SEQ ID NO: 71958 - DNA, 248 bp, Glycine max
  Clone ID: 700837074H1
gctgaaattaccaaaaaaaatcatggggaagctaacattcggtatgcttggcttgcttcctctaaaggagaactatctacaatgatgaactatggacttagtcattatggactatctggatcaaagtgcacatatggcattggtgttcatcttgctgctgttacttgccctgatgccagtgtgcgttattgtgatgttgacgaaaatggggttcgacacttggccctttgtcgtgtaataatggggaa

SEQ ID NO: 71959 - DNA, 252 bp, Glycine max
  Clone ID: 700837076H1
gtggaatttgtgatcacacaacataagcatatatatagaaagatgtcaggggcacaaggagcacaaccaaaggagtcaaaaacagcaacaacatatgagtcagtagaaggaggagagaaccgaacaaggactgacttgctttcaagggaggatcaaggctgcattcaagtggaaaaacttcaggagaaggtccatgatcctgctggcaaaggtggtcctgtctttggtgctggcaaagatgaagacaaacaa

SEQ ID NO: 71960 - DNA, 254 bp, Glycine max
  Clone ID: 700837077H1
gaaaacctaagcttagaattagaaacaaagacaagaagaaaggaaagaattgatcgttgaaaatgcagggaggaaagacagcgggagagtccattaaggaaacagctacaaacattggtgcttctgccaaggctggcatggagaagaccaaggccactgtccaagagaatgcagaaagaatgacagcacgtgatccggtgcaaaaggagttggcaacccaaaagaaagatgcaaagatgaaccaggcggagtgg

SEQ ID NO: 71961 - DNA, 255 bp, Glycine max
  Clone ID: 700837078H1
agaagcgatctctgaagccgacccattttggaattcggaaaacccagtgctgatcgctctctgggtgttcccaaaatgaagcttcggagatcttcgctgtgcgtctttctagggtttctggtgctgttcctttcgccgccgccatctatggcgaaattcgtggtggagaagaacagcttgacggtgacgtcgccggacgacatcaagggcacgcacgatagcgcgattgggaacttcgggataccccaatacggt

SEQ ID NO: 71962 - DNA, 258 bp, Glycine max
  Clone ID: 700837079H1
gccgtacctaatcggagagctcccgctgactgcgatcggatttcatggctcctaagaaagacaaggctcccccaccttcatccaagcccgccaagtctggtggtgggaagcagaagaagaagaagtggagcaagggaaagcaaaaggagaaggtgaataaccaggtgctgttcgatcaggctacctatgacaagctcctctccgaggcacccaaatacaaactcattactccttccattctctctgaccgtttgagga

SEQ ID NO: 71963 - DNA, 250 bp, Glycine max
  Clone ID: 700837081H1
cagacttttctcaaattcgctgaggctccctcacacacacaccccttcatgcttcccagcaccgacttccaccgactctgcctccacctctttcgcagaatcgttcccgaagccctcctctcggtgtatgttagacctgctggtagttatgtgatgggttggtgctgtggtgggttgcactgtaccctggagatgcagaggcagagggcattgtcattcttgtaggtcattttaatattcctgcaggctt

SEQ ID NO: 71964 - DNA, 250 bp, Glycine max
  Clone ID: 700837082H1
attttgtataataaaagatagataataaagagaataatcatattaaatattaaatagaaaaaatggcccgatcatttatcaaaggccaatcttcggtagaagataaggttcctttggaacacttatttctatttcagtataccgggtctctttctttcatttcaaaaaatttatagaatttcgattttgaaatgaaagaaaagtgtggggataaatataaatgacaaagagatattggaacataatcttg

SEQ ID NO: 71965 - DNA, 250 bp, Glycine max
  Clone ID: 700837083H1
gtgaagtactccagagaacccgacaatcccaccaagtcctgcaaggccagaggcgctgacctcagagttcattttaagaacactagggagactgcctttgccatcaggaagttgccccttgttaaagctaaacgatacttagaggatgttttggcccacaaacaggctattcctttccgacgcttttgtggtggtgttgggaggacggcccaggctaagaacagacactccaatgggcaaggacgctggc

SEQ ID NO: 71966 - DNA, 246 bp, Glycine max
  Clone ID: 700837084H1
ctttggagagacgattccagccagttaaagtgccagagccaactgtagatgaaaccatacaaatactgaaaggacttagagagcggtatgaaattcaccacaagctccgctatactgatgaggctcttgtagctgctgcacagctgtcctaccagtatatcagtgatcgatttttgccagacaaagctatcgatttgattgatgaagctggttcacgagtccggcttcaacatgcacagttacctg

SEQ ID NO: 71967 - DNA, 249 bp, Glycine max; identical to SEQ ID NO: 66800
  Clone ID: 700837086H1

SEQ ID NO: 71968 - DNA, 250 bp, Glycine max
  Clone ID: 700837088H1
tgtaggagtgcgaacatattctgtgtagtgcagaaggcagaggatggatggtggaaaaggttactgcgtggagaaggcaagcctccacattatgtgaaagtagattgggataaatgggtggatgaggatgaagatgatggtaataatggtgaagtggacttgggagggatggatttctcgaaatttggggggatgggtgctgatgcaatgggagcaatgggagggatgggtgctggtgcaatgggaggga

SEQ ID NO: 71969 - DNA, 252 bp, Glycine max
  Clone ID: 700837089H1
aaggattctacccgccgctcgatgggaattgcgcttcaaggcgtctcgtagggctaatccgcctcacgagggtcaccaacggcacgtgcctttggggggccgaggccccctactgctggtcggcaaacggacggcgggcgcacgcgtcgcttctagcccggattctgacttagaggcgttcagtcataatccaacgcacggtagcttcgcgccactggcttttcaaccaagcgcgatgaccaattgtgcgaa

SEQ ID NO: 71970 - DNA, 251 bp, Glycine max
  Clone ID: 700837090H1
cttatctgggaaacaaacttcaaatttaagctttataaaccagatgaaatgttttttaaacactacaaagtttcagaatcctatttgaggttctttacaaactggaataaccattcttttacttatatagttccaggtgttatggatctagtgcttagtttctttatgttttgctggtggattcttggtattatttaaaacctaacattgtcttgaagtttttcttgcaacatataaatatgatttcctaa

SEQ ID NO: 71971 - DNA, 252 bp, Glycine max
  Clone ID: 700837092H1
aagaaacacaagaacctttttgtgggaaccctggttttgccatctcttgtggcccaaatggttttccaatcctcaatctgtctaatacccattacatcattcatcagatattctacgaaaatcagacccttcgagtgtccaatgctgcgttttcagtttcacggtcaaacaccaccaattccaaaggttgtcttcctgttcctcttactcataatctcactcttcctagtacccccgagttcgatattgctc

SEQ ID NO: 71972 - DNA, 252 bp, Glycine max
  Clone ID: 700837093H1
attgtttgttgttgtaactcgttcttcttcttttgttgttctgtgtttgtgtttgttttttctctcacctgaaaatgtcttgctgcggtggtaactgtggttgcggaagctcctgcaagtgcggcaacggctgcggaggctgcaagatgtacccagacttgagctacactgagtcaaccaccaccgagaccttggtcatgggagtggcacctgttaaggctcaatttgagggtgctgaaatgggtgtgcccg

SEQ ID NO: 71973 - DNA, 253 bp, Glycine max
  Clone ID: 700837094H1
gcaactgcaatgatgaattccaggtccgccgcgtttgcaaagcgaaccaaagtttcatcgatcgtggagctgctgcaacccaccaccatcttggggggatgtcttccccttccaacccttcctgcagggtgtcctctaccctttcaggttggagttcccctaccgggaaactggattggggcgtaaatggagatgagctgaacaagctgaggaaatctgcttcctttggtttcagaaacagtggggtaactgc

SEQ ID NO: 71974 - DNA, 261 bp, Glycine max
  Clone ID: 700837096H1
cattgtctttgaacactcatcaccatggccaagcttgttctttccctttgtttccttcttttcagtggctgcttcgctctgagagagcaggcacagcaaaatgagtgccagatccaaaagctgaatgccctcaaaccggataaccgtatagagtcggaaggtgggttcattgagacctggaaccctaacaacaagccattccagtgtgccggtgttgccctctctcgctgcacccttaaccgcaatgcccttcgtagacct

SEQ ID NO: 71975 - DNA, 255 bp, Glycine max
  Clone ID: 700837101H1
ataacaataggagaggcattggaggccacggcacagacggtgggtcacaagccggtggatcagagtgatgcctcagcgattcaggcggcggaggttagagcaacgggaagtaacgttataacgccgggaggacttgcggctatggctcaatcagctgctgcttataatgctgactgcaagcatgaccaggacaaggtcaagcttgccgacgttctgaccggagcaaccgccacattgctcgcggacaaggccgcg

SEQ ID NO: 71976 - DNA, 251 bp, Glycine max
  Clone ID: 700837102H1
agaagatggtggttgcaatgatgcttatatttcttctaatttctacgcaaatggagagcgttgagcccgatgctgcagattgcttggatggttgcactactgcctgtgttcaaagcgactcgaggcttcaagcacggtgtgatcgcaagtgcagcattagatgcggtccagattccacaatcaaggaggacatgggttgagtatgtaaagtcacagcgcaacaagcagtgtctgcttgaccaacaccgtgt

SEQ ID NO: 71977 - DNA, 249 bp, Glycine max
  Clone ID: 700837103H1
aaaataaattataatgttttaaaacactatataataatttaaataatttcaatcttgaaatgacaaattaataaacgttagataataatatcataagaataacagaattcatgctcattcctttaactggtacaaaatcttgttaagaaataagtaagacaatgagagcaaaacatgacacttgcatgatagttcactagttcagtttctattttcttcagcgaactttcataagtgctgcagttgaaa

SEQ ID NO: 71978 - DNA, 249 bp, Glycine max
  Clone ID: 700837104H1
gaaattagctgggagacaaatgggggatgtcataccagaatctaacgacggaattctttctaacgaagacttcaagaggatcaaagaactgaaggcaaaaagtgaggcaaaaaatgcgttggctcagcaagggctagcgaagtcagctgcaactaaggttccaagctctggtcaactaaatctaaagcgagtggatggtaccatgcttgaagctcacataaggaaaaagttgaacaaggatgaaaggtt

SEQ ID NO: 71979 - DNA, 247 bp, Glycine max
  Clone ID: 700837105H1
gggtttttgagtgcggtgcggcgatcctagcactctcttctgcagctttcgccgacagcttcattcaccatggctgagcaaaccgagaaggcttttttgaaacaaccaaaagtgtttctcagctcgaagaaaactgggaagggaaagagacccggaaagggtgggaaccgcttttggaaatccattgggcttggatttaagactcccagggaagccatcgaaggaacctacattgacaagaagtgcc

SEQ ID NO: 71980 - DNA, 241 bp, Glycine max
  Clone ID: 700837106H1
aaagaatcaaagaaaggggtggtggctgcttcgaaagcttaataatttgtttatttccagaacatcatagttttcgcagcagcaaactaacaaattactcatatcatataataagatggcccgttctctctcgcaagccaaacgtattggtgtccttgttgctcaatctatctccctaattcccgttcatcggcgaggttacgcagtggcatccgatgtatcggtaagagttggattgggt

SEQ ID NO: 71981 - DNA, 250 bp, Glycine max
  Clone ID: 700837107H1
agcatttcgttactttcatttgttgtgcaatcttacaagttccaaacttctctattttgttattatttgttctcacttctcacacatacagatttccgccttttatattatcatggcttctaaggtggtttcggttttggttatagcgatgatgttgtttgccatgaactgtaactgcactagtgttggccacatgccttcaaccaaagaggaaggtcacgattttcaggagtctaatgccaagaccaca

SEQ ID NO: 71982 - DNA, 247 bp, Glycine max
  Clone ID: 700837108H1
taacctaagcttagaattagaaacaaagaaaagaagaaaggaaagaattgatcgttgaaaatgcagggaggaaagaaagcgggagagtccattaaggaaacagctacaaacattggtgcttctgccaaggctggcatggagaagaccaaggccactgtccaagagaaggcagaaagaatgacagcacgtgatccggtgcaaaaggagttggcaacccaaaagaaagaggcaaagatgaaccaggcgg

SEQ ID NO: 71983 - DNA, 248 bp, Glycine max
  Clone ID: 700837109H1
tgaaaggaggattgtttcacaacttttgactcttatggatggattaaaatctcgtgctcatgttattgttattggagctactaatcgtccaaatagcattgacccagcattgagaaggtttggtagatttgatagggaaattgatattggtgttcccgatgaagttgggagacttgaagtccttcgcatacatactaaaaacatgaagctatctgatgatgttgatttagagagaattgcaaaagata

SEQ ID NO: 71984 - DNA, 241 bp, Glycine max
  Clone ID: 700837110H1
taacagggacagtcgggggcattcgtatttcatagtcagaggtgaaattcttggatttatgaaagacgaacaactgcgaaagatttgccaaggatgttttcattaatcaagaacgaaagttgggggctcgaagacgatcagataccgtcctagtctcaaccataaacgatgccgaccagggatcagcggatgttgcttttaggactccgctggcaccttatgagaaatcaaagtctttggg

SEQ ID NO: 71985 - DNA, 232 bp, Glycine max
  Clone ID: 700837111H1
gggaattggatttttgggattaggttttcagcctaaatggagactggaagacatacctggagtgcctaaggtacgatataacatcatgcaaaatcacttaggtaaatttggctcacctacaattgaatcattgttcatgacatgctcagttcaggtcaacctggacttcagttctgaagcagacatgatcaagaaaatgcgtgccagtattgctttgcagcctttggcagca

SEQ ID NO: 71986 - DNA, 245 bp, Glycine max
  Clone ID: 700837112H1
ctttctttctctctgcagcaacaagatgtggaaccaaccattgggaaaaaccgatttggaaagcggttctcgcccgctgtatccgatgatgcttgagagccccgaactgcgctggtctttcatcagaaaagtatactccataatcgccatacagttgctcgtaaccatcgtcgtcggcgccgtcgtcgtcaccgtccgcccaatcagcgtcttcttcgccaccaccggcgccggattggctctct

SEQ ID NO: 71987 - DNA, 213 bp, Glycine max
  Clone ID: 700837113H1
acattggtagagtggacaacattactacaccacttgctaaaaaggctcaagttgctggtagcaccactgttcagtatgctggagagatatcagcacaagccaaagatgctacggtaggatcaatggagaaaactacaaaggatgctaaaggaagagaaaaagcaggaaccaaaggtcaaacaaagcagggtggtggtgagggacaacgagaaa

SEQ ID NO: 71988 - DNA, 239 bp, Glycine max
  Clone ID: 700837114H1
ccgcgtaatttacgtgtgctcctttattcagttcctcttctcacactggtcaagatagtctatcttgatcatgggtttcaattctgtctatagaaacttgcaggagatatttccgcaggttgatcccaggctactgagggctgtagctattgaacacccaaacgatgctgatctagcagctggaatagttcttgcggaagtcatcccgttcatgtccaaaaaactacctgctgcaattc

SEQ ID NO: 71989 - DNA, 245 bp, Glycine max
  Clone ID: 700836485H1
caattggaaaatttacagcagggagttgatgtcttaatagctacacctggccgtttcttgttcctcatccatgaaggcttcttgcagttaacaaatctaagatgtgctatcttggatgaggtgatatactctttggtgatgaggacttcgaagtggctcttcaatccttgatcaattcttcacctgtagacacacagtatttatttgtgactgcaactttaccaaaaaatgtttacaccaaattg

SEQ ID NO: 71990 - DNA, 246 bp, Glycine max
  Clone ID: 700836486H1
ctcaaatccccctccacctcaccccaacaacaacctcaacctccacaaaagaccaagtccttccacacggtggaagagctagacgccaagctcaaccccaagcccgagcccaagcccaatccagaattgaaaaagcccgctgatcagataattaacagtagcatagttaccgagccagtccgagggaacaagttgaaggaaaacatgttcatagttcgggacaggctggagagacagaaggaagag

SEQ ID NO: 71991 - DNA, 244 bp, Glycine max
  Clone ID: 700836487H1
gtctatctggctatttgtacattcgaaaaagatgggcagcacttccaggagaacctcctcctatagatgatactgacgtagatgattggcttcctcgatttgttgttcttcagggtgcatgctattcttatatttgttgtgtacaggtaatttggttatttctttttcttttctgcctatgcattcgttcttctccttcttttgctctcaactcctattttgtatgcagagttgttgttcttgc

SEQ ID NO: 71992 - DNA, 249 bp, Glycine max
  Clone ID: 700836488H1
ggtcgaactcgagcgctcgagccgctcgagccggtttataatggcacaacaaagaaactatcactttctagacacatattatgcccaaaatgtaaagggaaaggttcaaaaagtggaactgctggtagtgttttggatgcaaaggcactggtatgaaaattacaagaaggcagattggactaggcatgattcaacaaatgcaacatgtctgtcctgactgcagaggatctggtgaggtcattaacgaga

SEQ ID NO: 71993 - DNA, 245 bp, Glycine max
  Clone ID: 700836489H1
tcctcgagccgaatgcggctcgagcatgaaaagctcagaatttccaccactggggctggtactttcattgcctcacacaacgctcgccgcctcaagaccgagggacattacatcattgcttctgatggaagaagaatgagcacatgactgaggacatgttctgccatgaattccatcttgttgaccttagggtcatggataactgcttgacagttaccaagggtgtggaccatgttttcaatctt

SEQ ID NO: 71994 - DNA, 247 bp, Glycine max
  Clone ID: 700836493H1
gattccacaaccagctgggcatcaagaaaacccagccaacaaccacaaccaaacagggtggatagggatgtcgcagcagggcacaggttcagtggtggatttcgacctccccgacgagattctgtcggtgataccaacggacccataccagcagctggatctggctcgcaagataacctccatggccattgcctcccgtgtctcttctctcgaatccgatgcatctcgcctccgccagaagcttctc

SEQ ID NO: 71995 - DNA, 245 bp, Glycine max
  Clone ID: 700836494H1
gttatgcaggaatggctttgtacggagagaaagagtggtattttttcacgccgagggaccgcaagtacccgaacggttcgcggccgaaccggtccgcgggaaccgggtactggaaggcaaccgagcggataaaccagttggtaaaccgaaaccggttgggatcaagaaagcgttggttttttacgctggaaaagcgcccaagggagagaaaactaactggatcatgcacgagtatcgtcttgcag

SEQ ID NO: 71996 - DNA, 251 bp, Glycine max
  Clone ID: 700836495H1
gtttttgtaaggcgaaaacagtgagagcggtgtggtgcttagtgctcacaccaattaccaatggcagtggagaagacggagcaagaactccgcaacgagatcgatgagcttcttcgccaacagcggagatttcggaaaggcttcgagatcctcgaggtcttcgcagaggtgccttgccgggtcctcctgctctccgcactaacggtgttcgccaacgaccctttattcgccctggagacaggaacgattct

SEQ ID NO: 71997 - DNA, 252 bp, Glycine max
  Clone ID: 700836496H1
cgaatggtgggaatgcaaaaggtcggggtccaacttcaggttatcaggatccaagatttggttttgatggagtacgctcacctatcccctggctagatgccccactattttcagatgggcagccaagcctgtaagtagcacaaccatcacttcttcgatatcaggtggcaacaacactgcctcaaggaacccaactttccgccctaattctcagtttatgggcttgcaccacccaagaccaatgcctgccat

SEQ ID NO: 71998 - DNA, 260 bp, Glycine max
  Clone ID: 700836502H1
cgaaagaacttccttataaccaaaaccaacaacaactatggcaagttatcagaagcactacgatgatcagggtcgcaaggtcgacgagtatggcaatgttgagaggcaaactgacgaatatggcaacccggttcatgccactatgtcacttatgtagccaccaaaagtgttggtggctacaatgatgacgctaataagcaacatgatattactggtgtctatcccgagaaagacaccggtagacatcattttggtcgtgg

SEQ ID NO: 71999 - DNA, 257 bp, Glycine max
  Clone ID: 700836503H1
gtttattacgatataaagaaagaaatttagcaacgtaatgggttctcttatggcaggatgggactctctgaccttggatcctgaatcagctacaattgagaggaatcgatctctcaccaaagaggaaattaatgctttctgaaaacaaagaaggaggccgagttagaacacctcaaagctctttccaaattatctgagactattcgggtttgactttgaaattaacatctctacagatttcacctctgcattttatc

SEQ ID NO: 72000 - DNA, 253 bp, Glycine max
  Clone ID: 700836504H1
ctgcggatactgaaagagttgcctcccagactcaagctgaaagtggagcgcgggtttctttacaccatgccgcctattagttggtctgatatatcttactataaggatcagattctacccttgatacaaaagtacaaagttttcatttaaatagaactgatgctcggttggccaataatggtcaaccgctggagattcagaagctgcgttgccgagttaattttagtggtctgagatttacttctcagataga

SEQ ID NO: 72001 - DNA, 256 bp, Glycine max
  Clone ID: 700836505H1
ttcgatcttcggtttcattctgcgtttgttcacatcatggccaccgcttcagtggcatttaagtccagggaggaccaccgcaagcagattgagttggaggaggcgcgtaaagcagggcttgcgccggctgaactcgatgagatggaaaggaaatcaatcctcacattccccagtatatgtcttctgcaccttggtatcttaatgctgagagacctagtttgaaacatcaaaggaaatggaaatccgaccccaatta

SEQ ID NO: 72002 - DNA, 255 bp, Glycine max
  Clone ID: 700836507H1
tctcgagcgaatcggctcgaggccgtcgtgcactttgttgatgtacaggtaccgcttcagaaaaaagaagggtccggagtgagggatttcgggttcgggtgctgtcggaaggaagtgtgcgtggattcgttggcggagatgatcgcgtttgttcattggagcaagtgctcgaacctgataagtggagagagaagagccgtgtgaggcgagtgatgatgagaagcgaagtgctgttactgccatggacagtatatt

SEQ ID NO: 72003 - DNA, 253 bp, Glycine max
  Clone ID: 700836508H1
ggccaggcaagccccactcaaccaccacacctctcctcgttcacgctacccctttctgctcttcttctacctttcaagttttaaaagtataaagatggcagagacattcctatttacctcagagtcggtgaacgagggacccctgacaagctctgcgaccaaatctccgatgctgtcctcgacgcttgcctcgagcaggacccagacagcaaagttgcctgcgaaacatgcaccacaaccaacttggtcatgg

SEQ ID NO: 72004 - DNA, 253 bp, Glycine max
  Clone ID: 700836509H1
aaaacagtaaagctaacttcaacacctttaattttctaaaagtaattcagcggctgaataccaagcggagaagatgagtcaggagcagccacggcgtcccaaaggccaaaaccccatcaaatacggcgacgtttttgtctctccggcgaccttgcacagaagcccgtcgcaccggaagatgctgccatgatgcaaagcgcggaaactcgagtgctcggacaaacccaacccggcggagcagcttccgtcatgc

SEQ ID NO: 72005 - DNA, 251 bp, Glycine max
  Clone ID: 700836513H1
caaatgataatattgatctactgttgagcattgatttgttgggtttacaaggagcaggcaaagcttttccaaacaagattgtttttgatgataagcttgtgttggctaacacacaagaattctttgatggaaatttccagtggattcttggttaccaatttttgtgaattgtctttatcctgtaagtcaattaccttcagaagctgtcgttgtaaatgtcacatgtggtagtggacgtggtggtttaccca

SEQ ID NO: 72006 - DNA, 254 bp, Glycine max
  Clone ID: 700836515H1
ctagctagctagcaagcaagcacagagatggaggcaaagcgaggccatgccctcatgtgcttggcacgtgtttcactcttcctctgcgctctaaccctatccgctgctcacggaagcaccacggttcaagacatcgcagatagttgaaactcggggacaacgagcttctgcgcacggagaagaagttcaaggttttcatggagaattacgggaggagctactccacagaggaggagtatttgcgccgtttgggg

SEQ ID NO: 72007 - DNA, 252 bp, Glycine max
  Clone ID: 700836516H1
cgtgaaaactgattgttttccattgagtctgatttagttcttagcttctgcttcgatgccttcaatcatgtcacctcagtggcaagataaggctgctggtttcttttcttcctccggggtgaagcttaaagaagccaagaatcagcaggaacatttgttggcgaggtcacgaaggatacaaagagtaatgtggccgaagtggcaggacgagtgggatcgatggtgaagagtcggtgggcacttcttcagcag

SEQ ID NO: 72008 - DNA, 258 bp, Glycine max
  Clone ID: 700836517H1
cctgcttccaaagttgatcctcaagaagaagataagaggaaagcaagggcacttaggtttgcgaatccgtcatcaacttctatagctaatgttaatggcgaggcaaagattgagccggctgctattgcaggcaatgctggagagggacctgaatgacaggtcgcgtctttaatttgtaggaatttttctttttttagcagttcaaaatttgcagagcaacctccacaccgtttctacatttcagcatattaatcccag

SEQ ID NO: 72009 - DNA, 256 bp, Glycine max
  Clone ID: 700836518H1
cttcattcattcattcgttcttcttctttcaccaacaacaaagaaaacagagaaactttcatttcatatattttcatcatcgcagcaaaggaatcaatcaatcaaaaaccatggcaggcttcagtggcgacgaaaccgctctatcttcggcttcctcggtgccgctgcggccctcgtcttctcctgtatggcagcggcgtacggaacggcaaagagtagggtgggggtggcgtcgatgggcgtgatgaggccggag

SEQ ID NO: 72010 - DNA, 252 bp, Glycine max
  Clone ID: 700836519H1
gaggaaggtcacgattttcaggaggctaaagccaagacaacacaaactgcgaacaaggccatggaaactggtaaagatgggaaagaagccgcagagtcatggacagaatgggctaaagagaaactcactgaaggtcttgcttcaaacatgatcaagaatccaccactaagaaagtctctgactatgccggtgatgctgctcagaaatcaaaggactatgccggtgacactgctcagaaaaccaaggactatg

SEQ ID NO: 72011 - DNA, 254 bp, Glycine max
  Clone ID: 700836520H1
gcttacttaagcagcatgtagaagctcaggccaaggagcttgaccatagaatgcatcgggtagaggaacttgaagagaaggagagagtggcaaatgaaaatattgagggactaatgatggacattgctgccgctgaagagaaattaacagatggaaagtggcagcagagcaagaagctgctgcaggcagaggcgtcgaacaggaatttgtggcacagttgtcagcacttaagcaggaatttgaagaggcaaagc

SEQ ID NO: 72012 - DNA, 255 bp, Glycine max
  Clone ID: 700836521H1
ttcagaagctagtgatcaatcatcaacacagagctgagtgtgttgctctgtgaatccaccttcttcttccattggaggaccatttcctcctggaatagaaatactaccacacttttcttttttcacttctctaagttgtaagttaattgctccttcattttttcactcttcgttctcgcgtacccgtgtcacggtaactcgtggtgaagtgttcgaaaatgactgtcacacctaagatctcagttaacgatggga

SEQ ID NO: 72013 - DNA, 251 bp, Glycine max
  Clone ID: 700836526H1
ctctgagaaaacttccgccggtgaccaactcccacgacgcctctcccgccggtccttcaatgacgagagagattcgaccgctggtggagaatttcaatcagcatctcttcatgcacgaaggcgaaatggcttcgtgcttcactatcctatcgacgacgacgagcctgcgttggatcaaagcttcggcgccgattttctctattctccgacgacgacggctaacaacagcagcttcatgcaaaccctcggcc

SEQ ID NO: 72014 - DNA, 252 bp, Glycine max
  Clone ID: 700836527H1
agagaagaagaaaagaagaacaaagatgcaatcctcaaaggagaagatgaaaaacatggcaagtgctgccaaggaacaagtcgacatctataaagccaaaatagacgagaaggcagagaaagcaacggcaagaacaaagaggagagggtgatagcccatgagcacgcaaaggcaaaggaagctggagcaaagatggagctgcatgaagctaaagcaaggcatgcagcagagaagctaagcgccaaccaatca

SEQ ID NO: 72015 - DNA, 248 bp, Glycine max
  Clone ID: 700836529H1
agataaggcaatgaatctgatgcaggcggttcgctacgacgcctacgggggaggtcctgccggcctcaagcacgttgaagttgccgttcccagtccaaaggcaaatgaggttttaatcaaactggaagcagttgcattaaccctattgattggaagattcagaagggtcttctccgtcctttatttctccccagaacctttccccacataccttgcactgatgtggctggagacatagttgagatcgg

SEQ ID NO: 72016 - DNA, 249 bp, Glycine max
  Clone ID: 700836530H1
gaaaaagaggaaggaagaggcagatcagaagatgtgagtagcagaactaaagagccagcttccacgaccgcagaccaggatgcagtcagaacaaggataatcaagctcaatgacaagctcaagaaactcaattccactcctcattcctcaatatcctcaatctcatgtctcttacttggcatctcgtttatttggctcaacgacttccccatatttgctaaaccaaatactacgttccttttgtctttt

SEQ ID NO: 72017 - DNA, 250 bp, Glycine max
  Clone ID: 700836531H1
ctgaaacagactctatccctaatccctatcttcttctctgctctctccgcacgctttggctcctctgatctcaggtgttgttggcttggtatccgtgcaagttctgctgtagccgatttgaaggtgaaggtgtcacttaaagtttctttcatgtttgatcaggctactatccatttgggagcaactgagctgcttggagagtatttttcttctactagacaaaattacagaccctcatcccagagagtta

SEQ ID NO: 72018 - DNA, 213 bp, Glycine max
  Clone ID: 700836533H1
gtgattgttgtgactcgttcttcttcgtcgttatcttcttcttttgttgtttgtgtgtttgttttttctctcacctgaaaatgtcttgctgcggtggtaactgtggttgcggaagcgcctgcaagtgcggcaacggctcggaggctgcaagatgtacccagacttgagctacaccgagtcaaccaccaccgagaccttggtcatgggagtggc

SEQ ID NO: 72019 - DNA, 256 bp, Glycine max
  Clone ID: 700836534H1
ttggcttgggagctatggcggcaaggatgttgcagaggcgattcatttcaatcttctcaagacaaacccatcaccccattactcaagaatcttggtattctcctaccagtgcaatattaaacagttatggattccatcacggggggtcatgacccatacaaatccaatcaaacctgtctgtgaagatgtagagaataatgaagcagacaccttaaaatcaagtccaaacccagatgaagttgctacatctattagt

SEQ ID NO: 72020 - DNA, 252 bp, Glycine max
  Clone ID: 700836535H1
cactgaagagcttccttcaatggcggtttcttctctctctgttactcctctttcgctctcaaattcttccccctctctatcttccaagccaaagtttccatctttgtgttttctctctggcaacaacaccacattgaggtaacatgcccaaaacctctgcactcatccactgttgttcatgttgctaccgaagcgttggattcatcccctgatcccttggacccacctccagaaaccttgatgatgactctg

SEQ ID NO: 72021 - DNA, 250 bp, Glycine max
  Clone ID: 700836536H1
ttgagatcacccctgagaaaaacccacagcttcgggacttggatatcttcctcagttctgtggatatcaacgaaggagctcttcttctaccacacttcaattcaaaggccatagtgatactagtgattaatgaagggatgcaaacattgaacttgttggcattaaagaacaacaacagaagcagaaacaggaagaggaacctttggaagtgcaaaggtacagagctgaattgtctgaagacgatgtattt

SEQ ID NO: 72022 - DNA, 253 bp, Glycine max
  Clone ID: 700836537H1
gccagacgaccaacacctgcaccagattcttctccactttctcctgctgctatttactttatttgtctgaccttcagtcacaggagtacttgctgttggcttacttggtcctcgagtaactaaagttatttgttgctaatataatttaattgtttgatcaaatcgcttgcaaaggaattacgagattcatcagagctttgatctatgcaaggaagaattaactcaagaagagccctctcggtcccatgctgct

SEQ ID NO: 72023 - DNA, 252 bp, Glycine max
  Clone ID: 700836540H1
ctcgagcgttcaaagtgaactttgcaactttgagcagaaaatctcacagtcgaaggaagaaataatcgccaatggcaattgaacacgaagacgatctcaaagacgagaagaacccacgacccctcgacgaggatgaatcgccctcctcaaaacctacggtttgggaccttattccacaagcataaaaaaggcggagaaggaaatcaaagatatggccaagaaagtgaatgacttatgtggtatcaaggagtc

SEQ ID NO: 72024 - DNA, 248 bp, Glycine max
  Clone ID: 700836542H1
tagagcttcagttgcagaagtgtattattgaaaagaatgatcttgaaattaaaatggaagaagctaaacaggatactgggagaaaagatatcaaatctgagtttcatgttatggcttcagctttatctaaagaaagggaatgatggaaggtcaattaaagcgatggaaagatgcagctcatgaggctgtatcattacgtgagacagcacattcactaagagaagcattgagcacgaagacaagtgaac

SEQ ID NO: 72025 - DNA, 246 bp, Glycine max
  Clone ID: 700836543H1
tttaatttccattgtctttcctcctcaaaattattttcactcatcattaatatctcctaactctcaatcatcagtttcgtttctgcttaatcaggatcctttggcactttcaaatggaggatgttgatgacaactgccactgccagaaccctcttcagtaagtgctgaattgaagccacatgcagaaaccactgaagaaaatcctgaagtgataaacccacccagtagtcagtcttttgttgaagc

SEQ ID NO: 72026 - DNA, 249 bp, Glycine max
  Clone ID: 700836544H1
ttgtggaatttgtgatcacacaacataagcatatatatagaaagatgtcaggggcacaaggagcacaaccaaaggagtcaaaaacagcaacaacatatgagtcagtagaaggaggagagaaccgaacaaggactacttgctttcaagggaggatcaaggctgcattcaagtggaaaaacttcaggagaaggtccatgatcctgctggcaaaggtggtcctgtctttggtgctggcaaagatgaagacaa

SEQ ID NO: 72027 - DNA, 248 bp, Glycine max
  Clone ID: 700836545H1
agtagtgatggcatcgaggattctattccaaatccattaccacaacagaaatcagaatgttctgaatctgagaaggttgatgaggtgaagacatctgatgttgtcagggttgatccaggactgatgtccaaaacacagatttgccttcttccttggtgatggagcaagataaagctgatgcatcatatgatagcccactggccgctgcagaaccaaaatattgtttgactggcgagaattgtgaagat

SEQ ID NO: 72028 - DNA, 249 bp, Glycine max
  Clone ID: 700836546H1
tgcagaccgagctagctagctagcaagcaagcacagagatggaggcaaagcgaggccatgccctcatgtgcttggcacgtgtttcactcttcctctgcgctctaaccctatccgctgctcacggaagcaccaggttcaagacatcgcgagaaagttgaaactcggggacaacgagcttctgcgcacggagaagaagttcaaggttttcatggagaattacgggaggagctactccacagaggaggagta

SEQ ID NO: 72029 - DNA, 251 bp, Glycine max
  Clone ID: 700836547H1
gagcgagcgagcagtttcaaagagaggatttgggattgggaaggcgagggattgcgctgcgtctcttcctacttctcttacgattcatccctcattcataatcttccaatccaacaacctcagcctcacactcaacatacacacatctgaacgcgtatcgtccctcccatggcttcaaagcgcatcctcaaggagctcaaggacttgcagaaagacccaccaacttcttgcagcgctggtccagtagctga

SEQ ID NO: 72030 - DNA, 251 bp, Glycine max
  Clone ID: 700836548H1
aaaatctttgagaaatttactttcactgatgccactgctttggaggatactgataagaaggatggttcagaagaaaatgcagcaactaataagaaggctaattctgattctgaagaggaagaaaacgataatgacaaaaagagaaaggcatctcagacaagaagaaaaagcttcaacggaggatgaaaattgctgaactgaaacaaatttgcttgaggccagatgttgttgaggtgtgggatgctactgca

SEQ ID NO: 72031 - DNA, 250 bp, Glycine max
  Clone ID: 700836549H1
ctacaagtacttccttacaatcaaaaccaacaacaactatggcaagttatcaaaagcactacgatgatcagggtcgcaaggttgacgagtatggcaacgttgagaagcaaaccgacgaatacggcaaccctgttcatgctgctagtgtcacctatgtagccaccagaactgctgctggtggttacagtgatgacattaataagcaacatgataccaccaatgcctacggcgtagacactggtagacagca

SEQ ID NO: 72032 - DNA, 250 bp, Glycine max
  Clone ID: 700836550H1
cagacacgtccccctcttcctcatcacccctctctcttttgtttccaccgcatccaaaccaaacgctgacataaacacactgcacaaacccctaaccttccttccattcactactcctccttcacttaaaaaatttagccttccaaatcctcaacttttacaattattacaatttagcatcactctttctcttcctcaatccaatcccctctcgatcgaaccaagagaatttaagaacccaaaccatgta

SEQ ID NO: 72033 - DNA, 151 bp, Glycine max
  Clone ID: 700836551H1
attttttaaaatcgcttattttaaaattatttttttataattataaataaactgacccaatatgaaaaattagttacccatttaccgtggataagatgaaaagaagtgaaataaaatattttgattccttttatattgatattttttgttt

SEQ ID NO: 72034 - DNA, 250 bp, Glycine max
  Clone ID: 700836552H1
gaaaaactccagaaaaaaaagcaagaaggtaaactgttaactggtaagcagaaggaagaagcccgtcgtctagaggcaatgaggaagcagattctcaataacacagggggcatgactctccctggtggggactctgtgctccagccaaaaaacccatatatcaaacgaagaaggtaaaaccaaataaccgtaatcagaatggtgctgctgctgctcagattgctgaaagtgttgaagcaaaggagactgc

SEQ ID NO: 72035 - DNA, 253 bp, Glycine max
  Clone ID: 700836553H1
tgcacgtcttcaacatcatttcccgtccaagcacacaataagttactggtctgcttagatgtcctcatggccactggcttacgacattcaagaatcaatgtcaacaaaaaggaaaatagatctttaatcgtcaaaagttcagtttctgccaaagactggtaaagagaaatgacacactccaggcggcttcttggtccccgaccatggaatgaaaatgaggacaagagcatgctcgacagggtattcactgcat

SEQ ID NO: 72036 - DNA, 250 bp, Glycine max
  Clone ID: 700836554H1
gctgagtatgaggagctgaggaagaatccccagaaggcttacttgaagactattacaccaaagtttcagacccttattgacctttctgttatagaaatcttgtcaaggcatgcatctgatgaggtgtaccttgggagagggacaatccaaattggacatctgatacaagagcattagaggcttttaaaaggtttggaaataaactggcacaaattgagaataaactctcagagagaaacaacgatgagaa

SEQ ID NO: 72037 - DNA, 251 bp, Glycine max
  Clone ID: 700836555H1
ggcttctgaatatgctagtgatgcggctcagaggaccaaagagtatgctggtgatgccaccaagagaagcaaagaggcttctgatcatgccaatgacatggctcggaagaccaaagactacgccagtgacactgccagagaaccaaggaaaaactccaagacattgcatctgaggctggtcaatacagtacagagaaggccagagaaatgaaggatgcagcagcagagaaggctagtgacattgcaaaggc

SEQ ID NO: 72038 - DNA, 246 bp, Glycine max
  Clone ID: 700836557H1
caataattccttcacttgcagaacttagttctctgttgcatcatcatcatcttcattagtgttagccctaaacttcaccttcaaccatgaccacagtgccaccacacagtgtccaagtgcacacaacaacacacgctacgaagccggcgtcgtcccgccggctcgttttgaggcgccgcgttacgaagccggcatcaaggcgccctcttccatttaccattccgagagaggtccgacgacctctca

SEQ ID NO: 72039 - DNA, 167 bp, Glycine max
  Clone ID: 700836560H1
aaggaggagagggagaagaagaagaagtaggaggaagaaaaggggaaaacgcaaagaaaaaaagaggaagatagatcaagatctcccttgcgtttgtctcagttgaagaaattcaagagcagaacgagactactcaacggtatcagacgtttcagggtttcagcact

SEQ ID NO: 72040 - DNA, 244 bp, Glycine max
  Clone ID: 700836561H1
caaaaaagaagaagaagaagaagagaggaaagtagtagaagaatacagggcagagctgcagccaacaccacccatggctgaatccgtttcagtggacatggagatgatctttctcggcggaaaggaacatatattcaaactggctgtggttctgtatctgtaatagtctgtggggatcaagaaaaaccagctctgatcacttatccagatatagcgctaaattatatgtcatgtttccaaggat

SEQ ID NO: 72041 - DNA, 247 bp, Glycine max
  Clone ID: 700836562H1
ctcattcgctaatttcaccaatttctattttcataactttctctgcagtctcttcacctttatgttaatgatattatgtgtttagagagatagagaacaagcatagttgagcttgattgtgtactacaacatagaacaagaaaagatagacaacaacatggaaggaggaggagtagaagttgatgcctctgctttcagagaatgcttgtctctgtcatggaaaaatccttacgttcttcgccttgct

SEQ ID NO: 72042 - DNA, 249 bp, Glycine max
  Clone ID: 700836563H1
gtgaatgcgtataaaaggaaaataaagaaattagcgtcaaaatgttgggtgtgttcagcagctccatagtgtcgccgccggacgagctcgtggccgccggcagccgtactccgtcgccgaagatgacggcgcggcgctgcggaagcggttcgaggagaagaacccctccgccgtgtcggtggaggtcggagagcatgtccagctcgcttatacccaccacaacgagtcgccgtttcagcccagatcctt

SEQ ID NO: 72043 - DNA, 248 bp, Glycine max
  Clone ID: 700836564H1
ggaaaatatactaacctctcagatgcatatctttctgtactgaaggcacttttgcatgcttctactgcttgcaatcataagcttgttgtggatttggttcccgctgaacatctcgaagatgatacctctaaaaggatcctgatgcatataaagctgcttggggtcttttgaagggtgctaatgggattctagttccaggaggttttggtgacagaggagtggaaggaaaaattcttgctgccaagtat

SEQ ID NO: 72044 - DNA, 248 bp, Glycine max
  Clone ID: 700836565H1
aataagatggcccgttctctctcgcaagccaaacgtattggtgtccttgttgctcaatctatctccctaattcccgttcatcggcgaggttacgcagtggcatccgatgtatcggtaagagttggattgggtaaattgggcgaaggaatggaatcgtgggaggtgtagaagagaagcctgatacaagagatggttcaaaagcctactcaactgattgggccccagacccagtaacaggttactatagg

SEQ ID NO: 72045 - DNA, 250 bp, Glycine max
  Clone ID: 700836566H1
ctactacaagtacttccttacaatcaaaaccaacaacaactatggcaagttatcaaaagcactacgatgatcagggtcgcaaggttgacgagtatggcaacgttgagaagcaaaccgacgaatacggcaaccctgtcatgctgctagtgtcacctatgtagccaccagaactgctgctggtggttacagtgatgacattaataagcaacatgataccaccaatgcctacggcgtagacactggtagacag

SEQ ID NO: 72046 - DNA, 250 bp, Glycine max
  Clone ID: 700836567H1
gagcattttactgagtggtcaatcattaaaatctgtagaaccgttagtcattaaagcagtggtggagtcactagttgaaaagtcagttgaggacttaagacaaatgaaggggataacagcaacctataggatgactaataaacctctacctgtgaggcattcaccatatatttcaggggtattacgtccccttaaggcttatttgggtggggagagagctacaagatatttggtcagtgagactaggaat

SEQ ID NO: 72047 - DNA, 98 bp, Glycine max
  Clone ID: 700836568H1
ataatcttttttctctatttttattgttattttaatatatgatgatgttttcttttgatcttataaccttgctccagcaacaattttgtggttttttt

SEQ ID NO: 72048 - DNA, 200 bp, Glycine max
  Clone ID: 700836569H1
ctccgttctcaaaaccctaacccgacgccaccattcatccgatccaatgagttcgagaggagccagcgcgctgctatctcgagccagcaggattcgctcgaagcttcaaacggcgctggaagccaccgttttggggtggacgacgtgtcgtaccagcacgcgggccacgccgccgtgaagggaagttccgacaaagaaac

SEQ ID NO: 72049 - DNA, 248 bp, Glycine max
  Clone ID: 700836570H1
gaaagagagagaagaagaaaagaagaacaaagatgcaatcctcaaaggagaagatgaaaaacatggcaagtgctgccaaggaacaagtcgacatctataaagccaaaatagacgagaaggcagagaaagcaacgcaagaacagaagaggagagggtgatagcccatgagcacgcaaaggcaaaggaagctggagcaaagatggagctgcatgaagctaaagcaaggcatgcagcagagaagctaagcg

SEQ ID NO: 72050 - DNA, 249 bp, Glycine max
  Clone ID: 700836571H1
caaaaaagaagaagaagaagaagagaggaaagtagtagaagaatacagggcagagctgcagccaacaccacccatggctgaatccgtttcagtggacatggagatgatctttctcggcggaaaggaacatcatatcaaactggctgtggttctgtatctgtaatagtctgtggggatcaagaaaaaccagctctgatcacttatccagatatagcgctaaattatatgtcatgtttccaaggattattt

SEQ ID NO: 72051 - DNA, 248 bp, Glycine max
  Clone ID: 700836572H1
tgcagaccgagctagctagctagcaagcaagcacagagatggaggcaaagcgaagccatgccctacatgtgcttggcacgtgtttcactcttcctctgcgctctaaccctatccgctgctcacggaagcaccacgttcaagacatcgcgagatagttgaaactcggggacaacgagcttctgcgcacggagaagaagttcaaggttttcatggagaattacgggaggagctactccacagaggaggag

SEQ ID NO: 72052 - DNA, 244 bp, Glycine max
  Clone ID: 700836574H1
gtgaatgcgtataaaaggaaaataaagaaattagcgtcaaaatgttgggtgtgttcagcagctccatagtgtcgccgccggacgagctcgtggcagccggcaaccgtactccgtcgccgaagatgacggcgcggcgctgcggaagcggttcgaggagaagaacccctccgccgtgtcggtggaggtcggagagcatgtccagctcgcttatacccaccacaacgagtcgccgtttcagcccaga

SEQ ID NO: 72053 - DNA, 245 bp, Glycine max
  Clone ID: 700836576H1
cttaactcgcggactgtgcaagtttggtctgtgtgacctgtgtgttgactcgtaagttcgcttactaaatccaaatatatatttttagttaaaaatcgaaagtgtacattgttgtgcatattaaataagcaataacttagataaaaaaaattttactagaataatttttaagtgttatccgtgttgttttttgttaattagaactaataaagttttatcttgagaatatatataatcttttaata

SEQ ID NO: 72054 - DNA, 246 bp, Glycine max
  Clone ID: 700836578H1
cgcaccgcaacaaagaagaaaccatgctcgatggcgaagaagatcattcacgacaccactaggaagatgtctcagctgtgccagaaaatcgttcaggtcgacgtccggtggggattcctcaaaagggtactttcgttggccactttttccgtttcatttggaacagacttgttgtttgctctgtcgccggaagcccatctcactaccggaaactacccctccgggacccctcttcttcgccgccgg

SEQ ID NO: 72055 - DNA, 231 bp, Glycine max
  Clone ID: 700836579H1
attagaagccataagggatcctggttcctggacggtggtgaatcagaattttcttgtgattgttgatgttccttacagcattattgctcttcaaaatgttgcactaccatgatttcataaatgaacgggcgtatattttattcctaagcttttacgcttttgatttcctgtaatcttaagtaatgtttatgtggagaaggattaaaaaggaagctttcttcagatgtgatt

SEQ ID NO: 72056 - DNA, 158 bp, Glycine max
  Clone ID: 700836581H1
gtcctatggtaccggtgcttacggtggtggtgcaagtgcaaccaccgttgcagatcttttggcaacccaaccaaggagtggcagggaggctagagagcttcgtcgttcctccagttcaagctctcagtcgtctaggatgatgggcaaggtgggaggag

SEQ ID NO: 72057 - DNA, 206 bp, Glycine max
  Clone ID: 700836582H1
cagtgcttcaaacccctttttctcttctcatttcctttcatcactctcttgcttcttttcttcttctcgcaattttccattttcacacttttagcgtaaggtttagtatctcgcagttatgattctcgaacatttaccttttcatgtctgtattttagagattattgttgtgaattcatgttacatttcgtaattgtgttgaatct

SEQ ID NO: 72058 - DNA, 248 bp, Glycine max
  Clone ID: 700836583H1
gaaagccaaccgaccaaacaacaataaaatgaagaaagaaaaaactctgcattcaattcgattgattcacaaattgcaactccttctcggctcttcctaatcagcacgaacacaacacaaacacaaacacagagagagacatggattttgaactgagaagagcgagagagaagctagagaaagagcagagggagaggaaggaaagagcaagactgaaacttcagaaggaaaagaaggtcaaagaagag

SEQ ID NO: 72059 - DNA, 244 bp, Glycine max
  Clone ID: 700836584H1
tttgctgttggcttgttgttcaaggatggcaatttgtaagaaagatgtttggagagttgaatgtggaatcccttctggatttccgctcacagttatttgcaatagcatttttaatgagatgctcattagattagctatgaaaaattactgcgccaggctagagctccaagtatgtttttacaatccttcaaaaattttgtttctttgtgtgtgtatggtgatgataacttaattagtgttcatg

SEQ ID NO: 72060 - DNA, 247 bp, Glycine max
  Clone ID: 700836585H1
cggagagaatggaggaaaaggcaaaagctgagcagaagaagataggtatgaccgagacttggttgaagaagcaccgtcttctttacaatggagccactagacaccctcttattattagcattcgcgatggcacatcaacactgcttccttcaaaacatggctcgcacaggattacttgttcgttcgggcgtttgtcccatttgtggctagtgtgctgataaaagcgtggaaggaatcagattgcagt

SEQ ID NO: 72061 - DNA, 246 bp, Glycine max
  Clone ID: 700836586H1
ggcaattgaccacaaggcattgcatgataccttttctacatttggaaatatcctttcgtgcaaggtagctacggattcatctgggcaatcaaaaggctatggctttgttcaatttgataatgaggaatctgccaaaaagctatagagaagctgaatggtatgctgttgaatgataaacaagtgtacgtgggacccttccttcgcaagcaagagagagaaagtgctgctgacaaggcaaaattcaac

SEQ ID NO: 72062 - DNA, 243 bp, Glycine max
  Clone ID: 700836589H1
gtagtgtagctagggagggatatatatctgagtaagatggcatcagagcttgaattgcccccaggcttcagattccatccaacggacgaggagctggtgttgcactatctctgccgcaaatgcgcgtcgagccaatcgccgttcccatcatcgccgaaatcgacctctacaaatacgacccctgggacttacccggattggctacttatggagagaaagagtggtacttcttttcaccacggg

SEQ ID NO: 72063 - DNA, 183 bp, Glycine max
  Clone ID: 700836592H1
cgagatctcaagtttccatgcatccagtggagttaagtgccataccctgtggctgctggggcatccatggcgatagtgtgtatgtttaaataaatcaagtcactctgagtttgactaataaaagtacaatagcttagtgtgtcaattttctgcttttgtactttgttttattgattatggtta

SEQ ID NO: 72064 - DNA, 243 bp, Glycine max
  Clone ID: 700836593H1
gtttgtttattgtgaaaaatagagaaatgcaggcagcaaagaaagccatagagacctttaaggaaaccgcagccaacattggcgcctctgccaagtctggcttggagaaaaccaaggccactatccagagaaggttgtttttttttgcctcatttttctttctgggaatgataataagtaaatgatgaatgttctatgttggcattacttaagattcatttttcatgatatccaaaccatctt

SEQ ID NO: 72065 - DNA, 259 bp, Glycine max
  Clone ID: 700836596H1
attcggctcgagcaaatattcctgaaaacaacgcattcctttcactgccccttcccaattcccttccctgattgtcaattggatcttcatgagttcaacaaccactggagcatacttcgtttcctgtgttgcgggaaacaagacaacgatctcttctgctgggttttgctctgcttgctgccaaaatttttgggaactccatttgccttcatcaactttctcttgattcaggccattgacaggagtccatcggcggtgg

SEQ ID NO: 72066 - DNA, 174 bp, Glycine max
  Clone ID: 700836601H1
agaaacttacatggggctgcgttctattggatttaatgttgttgcatctgttattatggctattgttatcaatgttggattgagttaccccactctacctaattggttcccttctctcctttttcctatctacatacacaacatacacaaagcaaagcatgggagtgactctgg

SEQ ID NO: 72067 - DNA, 239 bp, Glycine max
  Clone ID: 700836602H1
cgcagattagtgcgtatctaaaagggagcaaatattggaagtaggggaaaccagatatgatatccttcacaacacaaccttatcctttccaattgctaagttaactctcatcaatatctcattcctattcctatgtcttaagtcttaggattattttcttttctactcaaaacaaaacatgtctcacaccccacccagctaatctcccccttcaacacaacaacataatggttgaactg

SEQ ID NO: 72068 - DNA, 240 bp, Glycine max
  Clone ID: 700836603H1
atttgatataatatagaaagagacagagagagagagacagaacagaagaacaaagatgcaatcttcaaaggagaagctgaaaaacatgaccagtgctgccaaggagcaagtcgacatctataaagcaaaaatagacgagaagacagagaaagcaacggcaagaacagaagaggagagggtgattacccatgaacgtgcaaaggcaaaggaagctgaagcaaagatgagttgcatgaagca

SEQ ID NO: 72069 - DNA, 239 bp, Glycine max
  Clone ID: 700836604H1
gtgattttaggtaaatgttctgcatttggttctgtgtcatggaattgattctcggtctagaattggttgagttgaaacaactctaggtagcattatactgagttttatggctaacctgcttgcaaaatagaaacattcaaacattaatcacttcaccttaaaatcaattttaaccaaaattaatcatttcaaaattaattttatgaacattcatccaaacatacacgattacaatgagt

SEQ ID NO: 72070 - DNA, 241 bp, Glycine max
  Clone ID: 700836605H1
gtcacgttttccttttccgctaaaaccctaactctaccttatcaccccaaaaccccaatctccaactttaccccggtaacgaatcttcgcctccctccttctatcgtgacccgaacccgcaattgtaaccggattcgggcggcgctggatggggatttctcggcgaaaaggagcagcagcagcaacaacaacgaccagagggagacgataatgttacctggttgtgactacaacattggct

SEQ ID NO: 72071 - DNA, 243 bp, Glycine max
  Clone ID: 700836606H1
aaaattcttccaccaagttatgggtttccttgtgttgcttcttttctccctcttaggtctctcttctagttccagcatatcaactcatcgttccatattggaccttgacctaaccaagtttaccacacagaaacaggtgtcttcactgttccaactatggaagagtgagcatggacgtgtctaccataaccacgaagaagaggcaaagagacttgagattttcaagaataacttgaactatat

SEQ ID NO: 72072 - DNA, 243 bp, Glycine max
  Clone ID: 700836607H1
accctacttctacttccctttgttctcaaaccttatcccttatcctcccaaaaccaaaccatgtctacctccgcagcttctctcgcactcccaaccctcactctccgaactcgacaacctctctgttctccccaatgcttctcctcgtccctctccctaacccctaactcaaaaccatttccatttccgccgttttcctcaaaacaacgctgtcgtcgtcgtcgccgttgtcgctgcgtctcg

SEQ ID NO: 72073 - DNA, 242 bp, Glycine max
  Clone ID: 700836608H1
cagtagttcttcagaaaaaatctcagaagacagaatcaggcaaccgggcagtccaaattctgtaagaaaagaggaccagctcactcctgtccctcccaaggaggtttcctcccgacaaagccatgctactgaggcatattcaatggagaggcatgcaagtattttagacaacaatgaggctgagccaaaatgcagacctgatatggtgtccttagaggtgactgaaacagctcaagatcagc

SEQ ID NO: 72074 - DNA, 244 bp, Glycine max
  Clone ID: 700836609H1
ggaaacttacatggggctgcgttctattggatttaatgttgttgcatctgttattatggctattgttatcaatgttggattgagttaccccactctacctaattggttcccttctctcctttttcctatctacatacacaacatacacaaagcaaagcatgggagtgactctggagtgtatgacacagaaggacgttatgtgccagcaaatattgagaacatattcagtaagtatgccgtacag

SEQ ID NO: 72075 - DNA, 244 bp, Glycine max
  Clone ID: 700836611H1
cccaaagcaggtatgggaagggaaacctgctgatgagaagattgagataaatggggaagttaatactcaaaaatctgaagttagctcggaattgctcaaggagtctacccttgctgagaaggatagtgatgaccacaaagttcccgagaatggatctgctacaaaaactggagatgccccaaagatagctaaaccagttgttcccgagagtaagattgtagccaatggggttgtttcaatggtg

SEQ ID NO: 72076 - DNA, 243 bp, Glycine max
  Clone ID: 700836612H1
cgtaatcaaaaccatgcagatacgaacctgccactccatcaccacccaaacccttccacaacttccgtgttcttctagaaaagcccaccaccgccaccttcttccgccgttaaacgctgcggtttccgcggcgccgttcaaagcccggaaggcccactcaatgcctccagaaaagaaagaaattttcaagtccttggagggatgggcctcggagtgggtcctaccgctgctgaagccgtggag

SEQ ID NO: 72077 - DNA, 241 bp, Glycine max
  Clone ID: 700836614H1
gttgatttttgttcaataacagtggatggagctctagacaatgatattttgcagcaacagctacataatgttgttagacaaagacaagaactactgcaaatggagattgaactaaaggctcaaatgattgctagaactgagataatggaaatgcgaaacacctttgatgctcaactcaaggaccatgagcaactttgtgaaagggagcagacaattcatgagcttgaaaggaaatagaaga

SEQ ID NO: 72078 - DNA, 244 bp, Glycine max; identical to SEQ ID NO: 68670
  Clone ID: 700836615H1

SEQ ID NO: 72079 - DNA, 242 bp, Glycine max
  Clone ID: 700836616H1
gcaggagcttgtgttgatcggtgtttatcccactttttcgagcttggcggcgattgcgtctaattgtgggaatctggagaggttggccctttgtgggattggaaccgttggtgatgcagagattgagtgcattgctgataagtgtgttgcactcaggaagctttgcattaaagggtgccctgtgtctaatgctgggattggggctctagcttcggggtgtcccaatttggttaagttaaggt

SEQ ID NO: 72080 - DNA, 237 bp, Glycine max
  Clone ID: 700836618H1
cagagactgcgagatcttccctttctcttgcacaggctgctcagggaattcctccaccctcacagatcccttcctcttctcattcgcgctcgcgtctttgttgttatgatagcgagtgttatatacctcttcagccctattgacatcattcctgaagggatattaggagtagttggtttcttagatgatctcctaattgtgctcatctgcttcctacatgttgctgccctttataga

SEQ ID NO: 72081 - DNA, 239 bp, Glycine max
  Clone ID: 700836620H1
gtttatttgttggttgttcaataatcttgtttttgtcaaactgcagacagatgaaataaacagattaaatggactttacaagcggatgttatccaattggggggttaaattatttgaaggtgagggaaagatagttggtccaaatgaagttgaggtgacacaattggatggcactaaactgtcctactcagcaaagcacatattgattgcaactggcggtagagctcaacgtccaaata

SEQ ID NO: 72082 - DNA, 241 bp, Glycine max
  Clone ID: 700836623H1
aaactttagcatctgggatcgcgcaattggggttttttttggttaaaagggtatcttcggaattcatggcaaaactgtacgtgaaggcggtgccaccggcggatctgaacaggaacacggagtggttcacgtaccctggcgtttggaccacttacatcctcatccttttcttttcttggatcctcgttctctccgtcttcggttgctcccccggcatcgcttggaccatcgttatctcgca

SEQ ID NO: 72083 - DNA, 240 bp, Glycine max
  Clone ID: 700836624H1
tcctgccagtagtcatatgcttgtctcaaagattaagccatgcatgtgtaagtatgaactaattcagactgtgaaactgcgaatggctcattaaatcagttatagtttgtttgatggtatctactactcggataaccgtagtaattctagagctaatacgtgcaacaaaccccgacttctggaagggatgcatttattagataaaaggtcaacacaggctctgcctgttgctttgatgat

SEQ ID NO: 72084 - DNA, 241 bp, Glycine max
  Clone ID: 700836626H1
tctgaatccgcgcagttaggtttgtgattgattgattgatcaatcaaagagagagagagagagggaatgggagatcaagtggagggaacggtgcagaacgttctggaacaggagactctgaagtggatcttcgttggtggcaaaggcggcgtcggcaaaacgacatgcagttcaatcctctccattctcctcgccaccgttcgctcctccgtcctcatcatctccaccgaccccgcccaca

SEQ ID NO: 72085 - DNA, 239 bp, Glycine max
  Clone ID: 700836627H1
tatattttcacccaacttttctctcttctttggcatattctatatttgattataaaaaaacagttaattaaatatgataatagggggggatcaggagtctaagccacgtttgactcttggagttgacatttgcttcttttttttttataaattttccccctttcgctgcagttggttgtgtggtggagctactggccgagagcatacttggtcaagtatagctggtcatagctgggtcg

SEQ ID NO: 72086 - DNA, 241 bp, Glycine max
  Clone ID: 700836628H1
aactactacaagtacttccttacaatcaaaaccaacaacaactatggcaagttatcaaaagcactacgatgatcagggtcgcaaggttgacgagtatggcaacgttgagaagcaaaccgacgaatacggcaaccctgttcatgctgctagtgtcacctatgtagccaccagaactgctgctggtggttacagtgatgacattaataagcaacatgataccaccaatgcctacgggtagaca

SEQ ID NO: 72087 - DNA, 239 bp, Glycine max
  Clone ID: 700836629H1
ggagaaactaatagagagtcctatgctgggggactcagcagtgttgggaacaggaggaggaggctctggtgatgcagtggcagcagcaccacctgctgcatcaggaggagcacatgatggtggtgttgacggcggtgacggtggcggtggcggatcaaattcaggggatgatagagttgaggaaggtgagaggagctttggtgggaacaggtggccgaagcaagagactttggctttgt

SEQ ID NO: 72088 - DNA, 241 bp, Glycine max
  Clone ID: 700836630H1
ggttccaactcttctctctctcgccgtctagcaattttctattttctcctctcatggcttcagattccaaaaaggatttccctgctgatgacaaagctggaacagaagagagtaaaacatccaaagatgagacttcatctaaagattctccagcagaacaaagagcgacagctacttttggacctagacctggacctgctgggcatccaggcaacccttttgatctctcagcaatgtctgg

SEQ ID NO: 72089 - DNA, 239 bp, Glycine max
  Clone ID: 700836631H1
gtgaaactgggaaaatggggagagcctttgtgtatgtgattcttggaggaggcgtggctgctggctatgctgctcttgaattcgtcaagaaaggagtctctcatggtgaactctgtattatttccgatgaaccagttgctccttatgaaaggcctgcattgagcaaaggatttttgcttccagaagctgctgcccggcttccatcctttcatacctgtgttggtgcaaatgaggagagg

SEQ ID NO: 72090 - DNA, 162 bp, Glycine max
  Clone ID: 700836632H1
aagaaagaaagccactttttttttctctctctctctctctcacactaatatatctgattttctctttcacttcttctgttctatgtaatgggtgttggaggtgcttagtttcagtgtgcaacacaacaccatcaacatcatcatcaacaacaacaacaacag

SEQ ID NO: 72091 - DNA, 130 bp, Glycine max
  Clone ID: 700836633H1
tccggtgcaaaaggagttggcaacccaaaagaaagaggcaaagatgaaccaggcggagctggacaagcaggcggcgcgtcagcataacacggcggccaaacagtccgccaccacggctgggcacatggga

SEQ ID NO: 72092 - DNA, 237 bp, Glycine max
  Clone ID: 700836634H1
atcacacacaactactacaagtacttccttacaatcaaaaccaacaacaactatggcaagttatcaaaagcactacgatgatcagggtcgcaaggttgacgagtatggcaacgttgagaagcaaaccgacgaatacggcaaccctgttcatgctgctagtgtcacctatgtagccaccagaactgctgctggtggttacagtgatgacattaataagcaacatgataccacaatgcc

SEQ ID NO: 72093 - DNA, 235 bp, Glycine max
  Clone ID: 700836636H1
cacatggtgtgcaatcaaactcctccagtaggaaacaagccaagtctaatgacattccgtgaggttgagactgttttccatgaatttggtcatgcacttcaacatatgcttactaagcaagatgagggtctggttgctggtattagagggatagagtgggatgctgttgagttaccttctcagttcatggaaaactggtgttaccatagagaaactttaatgggtattgaaagca

SEQ ID NO: 72094 - DNA, 238 bp, Glycine max
  Clone ID: 700836637H1
ctttcggatgcaaaccaaccagaggaaaaccattcaagccctgaggttgctacttgcacaagttatggcagcttgcaaaaagtatgaggtgaaggtttcaggtcaaaattcttctgagtctggtgttccaggtggttttgaacaaataaagaagaatctatctggagataatgtattggatttgttcacatatcatagaatgggagcatctttcttttctccagagcattttctttgt

SEQ ID NO: 72095 - DNA, 239 bp, Glycine max
  Clone ID: 700836638H1
gtcgttgattccaagtttcttcggcaccgggcgaagaaccaacgtcttcgaccccttctccctcgacgtgtgggacccattccatggcttccccggcaccaccgccctctacgctccgcgctccgagacggcggccttcgccaacacgcgcatcgactggaaggagacggcggaggcgcacgtgttcaaggcagacctgccggggctgaagaaggaagaggtgaaggtggagtcgagga

SEQ ID NO: 72096 - DNA, 238 bp, Glycine max
  Clone ID: 700836640H1
taaaaatgtcgcagttgctggataaagccaagaacttcgtgtcggagaaggtaaatgatatggccaagccggaggcgagtgtcactgacgtggacttcaagcgcgtgagcaaagataatgtcgagtacttggccaaggtctctgttcgtaacccttattcaacttccatacccatttgtgagatcaactactctttcaaaagcgcatccagggagatagcatcagggaaaattcagac

SEQ ID NO: 72097 - DNA, 240 bp, Glycine max
  Clone ID: 700836641H1
cttccattttaggctctgatccatggcttgaatagacattattactccatagcaattaattacagaaagaatgaacttgaagagaagatgttgcttaaccttcacaaaaagaagtggactgatggtttgacactcaggcattttgattcacattctaaaactaatgaacagactgttcaggtaagttgagatttttcaatgtaaatgactcaaacttttaatttctgttttctctcccca

SEQ ID NO: 72098 - DNA, 241 bp, Glycine max
  Clone ID: 700836642H1
cttcctcgaagcgtgttgatgcggcagcagtcccctaccgtcccgcacccacaagcttggcggtgttcgacatcaacaccatcgaggagccatggctgaagcacctcaacaacaccatcgaggagccatggctgaagcacctcaacaacaccacccctctcccccaagacaataataaaccctccctccccgcccctattctccacaaactcaacttgctcgacgccaccgatgcccccaa

SEQ ID NO: 72099 - DNA, 236 bp, Glycine max
  Clone ID: 700836644H1
ttgcatttcgttactttcatttgttgtgcaatcttacaagttccaaacttctctattttgttattatttgttctcacttctcacacatacagattttagccttttatattatcatggcttctaaggtggtttcggttttggttatagcgatgatgttgtttgccatgaactgtaactgcactagtgttggccacatgccttctaccaaagaggaaggtcacgattttcaggagtct

SEQ ID NO: 72100 - DNA, 238 bp, Glycine max
  Clone ID: 700836645H1
aaactactctacaaacacaacaaaactctccaattctgaagattttcttatctcttgtcattgaaactagaagctccgtgattgatcaatggcgacaaaagaaggcaaagccataggcatagacctcggcacgacctacagctgcgtgggcgtgtggcaaaacgaccgcgttgagatcatccccaacgaccaaggcaaccgaaccaccccctcctatgtcgccttcaccgacccgaga

SEQ ID NO: 72101 - DNA, 235 bp, Glycine max
  Clone ID: 700836646H1
ctactgcaatgcatgtgggagctatagaaattatcattgatagtttcgcaagtcctgactgcaacatagttggtgcaatgcttttggttgatacttatcataccaatcctgaaaatgcagttcgtagtatttttgttgcgcctttcagaggcggaaggcccattcgggtggttacatttccgaataccattgtgcagattgaaccagacatgaattcaaggtttcagctttgagt

SEQ ID NO: 72102 - DNA, 130 bp, Glycine max
  Clone ID: 700836647H1
gtctatgggttatctcacaaaaggtagtgtaataaagcatcaatctaaatcaattcatatctatttatatatgaattaatttataacgtaaacaaattaagagctctgaatcaataaaaactgagaatat

SEQ ID NO: 72103 - DNA, 236 bp, Glycine max
  Clone ID: 700836648H1
ctttctctttctgggtctccattaaatttttcttctctccctactttctctctctctctctctgaccattctcttcttcttctttttcttctcctctctctctctcccctccgccatggctgaggataaggagatgtctacctctgtcatcaatgggaatgattccctaactggtcacatcatatctacaactattggaggcaaaaatggggaacccaaacagactattagtacat

SEQ ID NO: 72104 - DNA, 226 bp, Glycine max
  Clone ID: 700836649H1
ccctttttggtggggttcttttcagttttctcagcctttcttcaaactctttctctgcgtgatagatgtgtttctcctgatcttcagctctggattctgggcttggttgcaaaaaggtcattttttattggcttatgagggtgcaggttttcagcagtgttggcatgtgagtttttttacatgtgtggattttagatattggtctatggtctctcgatctctctga

SEQ ID NO: 72105 - DNA, 234 bp, Glycine max
  Clone ID: 700836650H1
cagttttctctctctctctctagctttcggttttctctctcctcagatctctttcccgtttctctggcggttttcggaacacccctctttctcaatcatctatcttcaatcatgtcttacattttataaccgtaaagtttcatttttttctttcaaaatttgtgtaattagttgaatcctttattatttcatttgttaatagagaataataaaaacaaaaataattgacgtggt

SEQ ID NO: 72106 - DNA, 233 bp, Glycine max
  Clone ID: 700836651H1
gaaagagagagaaatggctttcacgatttccagatctcaatctgctttgacagatagagagaaggagaatcttgacaacttagttgacaaggagtgtgcaaccacagagggtatgatatcgagccagctcaagttgaagtcttctttgacatccaaagcgtcttctcatcaaagcatggacaaacatgcaatccttcgacgtatcaggcaacgcaggtttaataacaaaccaa

SEQ ID NO: 72107 - DNA, 232 bp, Glycine max
  Clone ID: 700836652H1
gggagagagagaaggaaatgggaagcacaaagtttctattgttggtgatggtgtttctcgcagtgtgcgtggggacatgcaggccttggggtgatgatgtagttgaagatggagaggaggccaaacattttgcagcaaaagccgtgcatgatgtcgaggaagagacccgctcttgggctgattgggctcaagacaagttctccaaaagtttcggggccgaagaggatctgaa

SEQ ID NO: 72108 - DNA, 233 bp, Glycine max
  Clone ID: 700836653H1
agagcatgaaagaagtgctgataaatatcaaggcgcaaacttgtatgtaaaaaatttagatgatagcattggtgatgaaaaacttaaggagctgttctccccttttggtaccattacctcttgcaaggttatgagagacccaaatggcttaagtcgtggatcgggttttgttgcattctcgactcccgaggaggcatctagagcactcctggagatgaatggcaaaatgtggt

SEQ ID NO: 72109 - DNA, 230 bp, Glycine max
  Clone ID: 700836654H1
attccccaattataatactaaattcaaaaaaaggagagtaatgagtataatctttcgctcagacgatgtactgatatattctatggcggaggttcgaagaacaagcaatttattttgggccgttttcactttgttaggttcattggggttattgttcgttgcaatttccagttatcttggtatggatttgttctttatttctgagaaaattagtgatttttcttttattc

SEQ ID NO: 72110 - DNA, 238 bp, Glycine max
  Clone ID: 700836655H1
gtctcgcagacgtagatcgctccgttcgcaaaaagaacaccctaaggttggatgattgggtgctttgccgtatttacaacaagaagggcacgatcgagaaactgcaaccaagcagcgatgttgctcatagccgaaatatcgaatcctcggagatcgaagacaggaagccggagattctgaaaagcggaggaggttgtcttccgccgcctgtgccggtgcctgcgccgccgaagcgacg

SEQ ID NO: 72111 - DNA, 237 bp, Glycine max
  Clone ID: 700836656H1
taacaactcacctgccgaatcaactagccccgaaaatggatggcgctaaagcgcgcgacctatacccggccgtcggggcaaggaccaagccccgatgagtaggagggcgcggcggtcgctgcaaaacccagggcgcgagcccgggcggagcggtcgtcggtgcagatcttggtggtagtagcaaatattcaaatgagaactttgaaggccgaagaggggaaaggttccatgtgaacg

SEQ ID NO: 72112 - DNA, 204 bp, Glycine max
  Clone ID: 700836657H1
cccaggaagactacaaggacgacccccccgccgatcccgactcgcccgccgagtgggatgagttcgcccacggagacgcccacaaatccgaggaggacctcgaccccggctcatggcgccccatcttcgagcctcccgccggagatccccaacccctccccgaatccgacgccgcctactactccgccgtccacaagctcatgt

SEQ ID NO: 72113 - DNA, 238 bp, Glycine max
  Clone ID: 700836659H1
ctcgagccgcaggacaggaagacacccttagaagcatggtggaagctcttgggatggagatggagaatgtaaaaagagaacactctgaattgaaggagaaagaatccaaaactgaatccattgttgagaatctgcaggtagagctctggaaaagcgagtttgaacttgaagcctacttggcaggagaatctaaagctagaggcgcatcagaggaaatgatcttgacattgaacagttg

SEQ ID NO: 72114 - DNA, 235 bp, Glycine max
  Clone ID: 700836661H1
ccaaaatgttcctgcttccgctgggggtgagaccagggttgaagagaagaaaccaacacgtgaggatgtcacagatgagaggaaatcagaatcaacttctgctataattaatgcatcagaacttccacctcatgtccttcttgaaatgccagctttgtcaccgacaatgaaccaaggaaacattgctaaatggaggaaacaagaaggagacaagattgaagtgggcgatatatta

SEQ ID NO: 72115 - DNA, 236 bp, Glycine max
  Clone ID: 700836662H1
caaccttgtagttattctctttcttcttttttagctatccctctcttgaaaaatctagatctcgttcttccttgatctacgttacgcttttagtgaccggatctgtatggatctgaaccagatctacacgccgatggtggttttggcctggtctttcatagatctgatgcatggaggctcagatctactgtacagagatactgtagataatcgatgagaagaacgcagatcagccg

SEQ ID NO: 72116 - DNA, 236 bp, Glycine max
  Clone ID: 700836663H1
gtttgtgcattgtacattattatctctacatgttctgactagaaggtgctctttctgtatcagtggatagaggcatatgggtaaatggcatcaagttgtgaattatttgcaaatctgattcaactacagtgtctattttgactcccaagattgcaagtggcagttatgggtcataggcacttacataacacatcttcattgttcgatggtgagcctgaccagaactggatcatttg

SEQ ID NO: 72117 - DNA, 103 bp, Glycine max
  Clone ID: 700836666H1
ctggggatggcctagaggcatggaacaaatcttctaaggtccttaggttcattttggttggacgtgaaccattgggtcaacctgtggtgcaatttggaccttt

SEQ ID NO: 72118 - DNA, 232 bp, Glycine max
  Clone ID: 700836667H1
ggataatgaaggcccaagctctaagggacaacagcatggcagggtacatgtcaagcaagaagaccatggagatcaaccctgagaacccaatcatggaggagctcaggaagcgtgctgatgcagacaagaatgacaaatccgtgaaggaccttgttctgttgctgtttgagactgctcttctcacttctggtttcagccttgacgagcccaacacttttggaaacagatccac

SEQ ID NO: 72119 - DNA, 232 bp, Glycine max
  Clone ID: 700836668H1
ggtattcaaaagggccataatacagcctgggccaccggaaagttttgctttgaggacggttcaagaagtaattaagcctcagaaacaaacaaaattggcccaagatgagaaccagttcctagaaaatattctacgtatgttgcttcaggagtttgtgtcagcagcggtacagtttggggagaaaatcatgcaatttggccaatcaattgattctagtgaaactacccgggcc

SEQ ID NO: 72120 - DNA, 232 bp, Glycine max
  Clone ID: 700836669H1
attcattccttttcttcttgcactctgccctttgggaggagtttgtaacatggctgctctacctactgcggacttagtgatgcaaatgcaacacatgtagcaagtggtgatgtgagggtgctgcatccagtgttcaaggtttatggccaggccacggcattctccggccccattgtcaccgtgaaggtgtttgaagacaacgtgttggtgagggagcttgttgagcgaaagg

SEQ ID NO: 72121 - DNA, 232 bp, Glycine max
  Clone ID: 700836670H1
cttgaggtaactccatgtttgctttcccctacaagtgagtgtgcatctagcattgatatgggaaaaaaggctgatgatgtaatgaatagaacagtttggtcattgccttattctcttgtgctaagacatactactgaggaggtactagatgcatgcatggaagcaattgagccggaacatgctgcaataacatctgaactccggaagaaagtaatgaatgatcttatggagg

SEQ ID NO: 72122 - DNA, 228 bp, Glycine max
  Clone ID: 700836671H1
ggagagggagaagaagagacgtttggtattggttcatggagcctgccatggggcgtggtgttggtacaaggtggctgctttgttgaaatccaatggacaccaagtcacagctctagacatggctgcatcaggcatccatccaaagcaggtacacgacctcaattcaatttcagaatattttgagccattaatgtactttctagggtctttgccaacagaggagcgtgt

SEQ ID NO: 72123 - DNA, 233 bp, Glycine max
  Clone ID: 700836672H1
agcgatcgaagtttcacatcagccttatccagtttagggtttcggttccttaccctacctttgacgtatcgaaaccttaaatttgggattaggtctgagcaatctggttggtagaacctttggtcttagagagtcaagttttatgtctggattagacgatcaaattcctactgccttcgatccttttgctgatgcaaatgctgatgactcgggtgctgggtcaaaggatatgt

SEQ ID NO: 72124 - DNA, 234 bp, Glycine max
  Clone ID: 700836674H1
gcttctcatgggctctatatttcagtgcctaaatcctgccttaactattgctgctgctcttgcataccgcaacccatttgtcttacccataaacagaaaagaggaagccgatgcagcaaaacaatcttttgcaggtgattcttgcagtgatcacttagcccttctcaaagcttttgaaggatggaaggaggcaaagcgaagtgggaacgaaaaacaatttggttgggatatttc

SEQ ID NO: 72125 - DNA, 238 bp, Glycine max
  Clone ID: 700836676H1
aggagaagaaggagcttgatgctgaggttcatcgcaaatatgtttttggtggacatgttgctgcctatatgaagatcttggcagaagatgaaccagagaaataccagtcacacttcagcgaatacatcaaacgtgggatagaggctgatggtattgaggcactttacaagaaggttcatgctgccatccgtgctgatcctactctcaggaaatctgataagcagcccccgaggagcac

SEQ ID NO: 72126 - DNA, 234 bp, Glycine max
  Clone ID: 700836678H1
aacacaccttacacacttctttatttgagcctttcatataaatatcatggcttcgagggtggtttcggttttggtgatagcgatgatgttgtttgccatgaactgtaactgcactagtgttggccacatgccttcaaccaaagaggaaggtcacgattttcaggaggctaaagccaagacaacacaaactgcgaacaaggccatggaaactggtaaagatgggaaagagccgca

SEQ ID NO: 72127 - DNA, 234 bp, Glycine max
  Clone ID: 700836679H1
acaactactacaagtacttccttacaatcaaaaccaacaacaactatggcaagttatcaaaagcactacgatgatcagggtcgcaaggttgacgagtatggcaacgttgagaagcaaaccgacgaatacggcaaccctgttcatgctgctagtgtcacctatgtagccaccagaactgctgctggtggttacagtgatgacattaataagcaacatgataccaccaatgctacg

SEQ ID NO: 72128 - DNA, 125 bp, Glycine max
  Clone ID: 700836680H1
tccactttcgtttttatccctctcaggacatcctgtattaacagtgaaaagtgcatctgaagagacagaatgcaaggacccgggggtggcagggatcgtttctttgattttggcgatccttttgg

SEQ ID NO: 72129 - DNA, 154 bp, Glycine max
  Clone ID: 700836681H1
ccctcaacaatctctttccgagattacaataaccttcgacgtgctctaaagcctccaccgccccgccaatcttcctcgtgtttgggctgggctgcgattctctcatgtgggacagcctcaactcacacggcaccacgctggtcctcgaggagga

SEQ ID NO: 72130 - DNA, 222 bp, Glycine max
  Clone ID: 700836682H1
atggaaccaagtccttgtttgttcctcagtacctcgactccaatctcatcatattcatccgtagaggggaagcaaagctgggattcatatatgatgatgaactagcggaaaggagattgaagacaggggacttgtacatgattccatctggttcagcattctatttggtgaacataggagaaggtcagagacttcacgttatctgcagcattgacccctcta

SEQ ID NO: 72131 - DNA, 240 bp, Glycine max
  Clone ID: 700836683H1
gaatgcggctcgagtagagagatagaaatggctttcacgatttccaggactcaatctgctttgacagatagagagaaggagaatcttgacaacttagttgacaaggagtgtgcaaccacagagggtatgatatcgagccagctcaagttgaagtcttctttgtcatccaaagcgtcttctcatcaaagcatggacaaacatgcaatccttcgacgtatcaggcaacgcaggtttaataac

SEQ ID NO: 72132 - DNA, 232 bp, Glycine max
  Clone ID: 700836684H1
gaagtttaaagatgcattggccaaacacaccccagatagatgcagcttgggcccaaccaaagggttagaagagaaagagcttctagctcttgctgccaacaaagatctttccttcaccaactcaccagaacctttacaacctgcacatgcagatgaagagttgggaaccgaacctgctcctgctcctggttcaaaatctcttccttcaccttcaatgattctcaatctgagg

SEQ ID NO: 72133 - DNA, 234 bp, Glycine max
  Clone ID: 700836685H1
tggtgacatgatgctgaaacaactgtggcatcaccaggatgccattctatgctgttcactgaagtcattgccagtgttcatatttgcaaatcaagctggccttgacatgttggaaacaaccctagttgccttacaagatatcacattggataaaatatttgatgaggctggacgcaaggcattgagtacagactttgccaagttaatggagcagggttttgcttatctgccagc

SEQ ID NO: 72134 - DNA, 231 bp, Glycine max
  Clone ID: 700836687H1
tggtgaacaggcccttaagtttcctcctcctaaagtaattcaagtgagtaagtctgcatggatgactgatgaagaatttgcaagagaaatgcttgctggtgtaaatccaaacttgattcgttgtcttaaggatttccctccacgaagcaagctagatagccaagtctatggtgatcatactagtcaaataaccaaagaacacctagagcccaacttagaagggctcatgta

SEQ ID NO: 72135 - DNA, 232 bp, Glycine max
  Clone ID: 700836688H1
gtggtaccagcagcagagcttgtatacgtcgccgcttcagcgtagaacatgatcattcccgagaagaaccgtaaagagatctgcaaatacctcttccaagagggagtttgctttgcgaagaaggacttcaatctggcgaacacccggagattgatgtgccgaatctgcaggtgataaagctgatgcagagcttcaaatccagagagtacgtgagggaaacatttgcgtggat

SEQ ID NO: 72136 - DNA, 231 bp, Glycine max
  Clone ID: 700836690H1
tgacatttgggctgtttttggcgaggaagttgtcgttgcccagggcgattttctacattgtaatgcaatgcttgggtgctatttgtggcgctggcgtggtgaagggtttcgaggggaaaacaaaatacggtacgttgaatggtggtgccaactttgttgcccctggttacaccaagggtgatggtcttggtgctgagattgttggcactttcgtccttgtttacacgtttt

SEQ ID NO: 72137 - DNA, 236 bp, Glycine max
  Clone ID: 700836691H1
caaattcattttaatcctaattctgcacttcttgatcattcgatttttctcctcaagatgcagatattcgtaaaaactttgaccggcaagaccatcacccttgaggtggaatcctccgacaccattgacaacgtaaaagctaagattcaagtcaaggaagggatcccacctgaccagcagagacttatctttgcgggtaaacaacttgaggatggtcgcacccttgccgattacaa

SEQ ID NO: 72138 - DNA, 235 bp, Glycine max
  Clone ID: 700836692H1
agaaaacctctcgttttctttctctctctctaaaacacgatttccaattttctttctctagaaatgggaacagcaatccatcgttcccacgattgcctccaaggccggttcctccacaacgaagcctcagcgatcgccacgtcacgtgttgcatcgcgaagaaaccctaactctaacaacaataaccataatagcttcgcctcctccgcaaaccagattgcccgccggaagcgga

SEQ ID NO: 72139 - DNA, 113 bp, Glycine max
  Clone ID: 700836694H1
acaccgctctctctctctccacaactctttctcacccgctaggtttccttccatcgcatcttgatttcgcaacctcgtctagcaattctccatggagggtgctgggatggaag

SEQ ID NO: 72140 - DNA, 143 bp, Glycine max
  Clone ID: 700836695H1
ctccgttttcaaacttcattagcacacagacacagcttccgcaaccaatcggacattgcgagcgagggcggcaacaagagcttcgcgcggcgtgatcgtctccgcgagatcgaatcgaaggtccagaaatggtgggaagagaa

SEQ ID NO: 72141 - DNA, 235 bp, Glycine max
  Clone ID: 700836696H1
gagaaagcggtgcaggccaaggatgtcgccgtggagagtgggaagagtgcggctgggtatgctgccaaggtggctgctgatttgagggacaaggccaccgcggtggggtgggccgcggcccatttttcggcggaaaagacggtggaagggaccaaggccgccgcccatgttgtcgagggagcggccgggtatgccggacataaggccgcggacttgcttcgatgtcggcggtgct

SEQ ID NO: 72142 - DNA, 256 bp, Glycine max
  Clone ID: 700836701H1
cttacagaagcctcttttaatttccaccccctctagattttctctctaactggttttccttagatctctcacaatgacctttaatcttatgcttttgttctgtttggttgcagtgatcaacaatgttgttgttccaactagtgcaagacaactcatgagtaccaccactacttcaccagacgagaaagaagtgatgatgaatattggcactgcaaatagagggcatgatgaaaaacatgatcatcaagtacaagta

SEQ ID NO: 72143 - DNA, 254 bp, Glycine max
  Clone ID: 700836702H1
atagttaccaacaacagaaccaaccctcttctgggttgcttcgttttcgctctgcgcctagctctcttctttcaaatctcacaccttcttttgtgagtgaagactttggttctagcagcttcagagagttggaaggaaacaacaacaagggttgttctaaggatttgagttcgatgaattcgcataagggggtttatggtggggggttgccacctcactatccaaggcatggttcttcttcttctacttcgagt

SEQ ID NO: 72144 - DNA, 254 bp, Glycine max
  Clone ID: 700836703H1
tggaagccatgatcagttaaaaccagaattatctttctctactgaacctaaaactccctacccttcttctaccaaaatcaatgatcaccacttgccacaacactccagtgcaagtgcaacaaatgctcaatatccttcagctagaagtcatgatcagtttctacctgaatattcaagtcaaaccaaaaccccaaaaacctatggagacaaccaaaccactcaaacaaggcatcaagaagagaacaaaggcaatg

SEQ ID NO: 72145 - DNA, 254 bp, Glycine max
  Clone ID: 700836704H1
agaaaaaacagctgaacgtgcaaagagggatctatatcggtatatgcactatcataaccggtataaagctcacacagactcctttaagattgaaagtaaactgaaagagactatacaagggaagatttccatttcagaagaaaaagattctacactcagagatagctgggtaaataatggactctccagacttttcagatctaggcgagtcctatcatattcatatgcatttgcattttatatgtttggagatg

SEQ ID NO: 72146 - DNA, 250 bp, Glycine max
  Clone ID: 700836705H1
cgcaacaaaaagaaagaatcccaggcgaggagaaagatggaggggaaggagcaggatgtgtcgttgggagcgaacaagttccccgagagacagccgattgggacggcggcgcagagccaagacgacggcaaggactaccaggagccggcgccggcgccgctggttgacccgacggagtttacgtcatggtcgttttacagagcagggatagcagagtttgtggccacttttctgtttctctacatcaccg

SEQ ID NO: 72147 - DNA, 250 bp, Glycine max
  Clone ID: 700836708H1
cccatttcctcttctctctcctctctcttcgtctttctctttctctctctttcagatttctgtctctctcatctttctctctccggaagggcaaaccctaaagaccgtttgcacccaccaattgtcatggatgatgatgtgttgaacatgcccaattggggttattacgaacccttcagagggggacatcttggccttcagctcatgcctggtatgactgaacgggacacaaagccatttttgcctggtc

SEQ ID NO: 72148 - DNA, 159 bp, Glycine max
  Clone ID: 700836710H1
attcctctcccacgcagaagaatcatcaccccaaaacccaaattaaaaaaaaaacccaaataatacaactgaagttattttaattttcttagtaaaaaaaaaaaagagaagaaaaatgacttcgattcatttgataaacactctcgctgctccgcttcg

SEQ ID NO: 72149 - DNA, 244 bp, Glycine max
  Clone ID: 700836711H1
cttcaccattcctctctctcagaaaggagagatcaagctaccaaccctctctaccatgttcgcctaatcgcatccacaaagcttaggataaaataaatgcattgcacactccatgatcgatgtgcatgttttacttttatgtaaattttggaccgttttagttctaccttttgttattcgtgtatgctctctaaaactatacatggctttcgtagtaaaaaaaaaaaaaaagggcggccgccga

SEQ ID NO: 72150 - DNA, 250 bp, Glycine max
  Clone ID: 700836712H1
aggcactgattatggaacaactggtggcactggttatggaagtggaactgggtatggagtcaacactgggggtgcgcacactgaagcaggatataggaaggaacatcgtcagcatgaccaatctcatggtgatcagaacgagaagaaagggattatggacaagattaaggagaagcttcctggaggacacagtgacaagtagatgcatcgtgcatcatgcatgcatgcatatatataatattgttgtctt

SEQ ID NO: 72151 - DNA, 248 bp, Glycine max
  Clone ID: 700836713H1
aggagagtctctttttccccttcgagttgccgagcgaggagcgtggtcgtcgcgctgttgcgtgagaagcagtgtggagggatgctaacggaataaaatggccacttgtattgctatcccttgtgctagcataatagaaagggttgaatcgagctaatccgagtttcattcagtttaactcgagtttttttttaaaatgaatttttcgggcccagaggacgatacccaaaatcggtcatctcagcatt

SEQ ID NO: 72152 - DNA, 245 bp, Glycine max
  Clone ID: 700836715H1
atttccataaccttagtcatcttcttctttcatctttctccctaacggtatcgagggaaaaatatggcggaagaacacagatgccaggcaccgcgcttctgcgccaacaattgcggtttctttggcagccctgccacgcagaatatgtgctccaagtgctaccgcgatttccagctcaaggagcagcaatcttccaacgccaagatggttctcaatcagtcgctggttccttcaccgccaccggc

SEQ ID NO: 72153 - DNA, 249 bp, Glycine max
  Clone ID: 700836716H1
cacacttccatctcttggtgttggccgcttgaagttacgtggagatgattctcgtgtttacgggacagacaaagaatatggattgagactgcctgatgatccattctataaacaaatggctgctgagttttccaagtaccaaatctcaacaaatgtgtatgcattcagtgataagtacactgacatagcctccttaggaactctggcaaagtatactgctggtcaagtgtattactacccagctttcca

SEQ ID NO: 72154 - DNA, 253 bp, Glycine max
  Clone ID: 700836717H1
agatcggaaagcccacaccgttccctgcaaggttaccggaaagtgtggctccgtcaccgtccgcatggtccccgcccctcgtgggtccggaatcgtcgccgctagggtccccaagaaggtcttgcagttcgctggaatcgatgacgtcttcacttcctccaggggttccaccaaaaccctcggaaatttcgtcaaggctacttttgactgtttgctgaaaacctacggttttctaacacctgaattctggaag

SEQ ID NO: 72155 - DNA, 252 bp, Glycine max
  Clone ID: 700836719H1
tgaaattttgataaaccgcgatcacaggttgccgcaccttaaaaccggaaacaaaagcaatcgttacttgatttcaagaatctctcaatttcttcctacttctttgtgtacgatttcttaagggaaagaaaatcactctctgtgctggccacagacttcgtgaatcattttcttttccactcttagtttatttgctgaacactctcctatttgatataggacttcgtgtcagatttaaacttcttctgtctc

SEQ ID NO: 72156 - DNA, 249 bp, Glycine max
  Clone ID: 700836720H1
caaaaccaaaacactcaagttaacttcaacacctttaattttctgaacgaaattcagccacagaatatcaaagggagcgaagatgagtcaggagcagccaaggcgcccccaaggccaagaccccatcaaatacggcgacgtttttgacgtctacggtgaccttgcacagatgcccattgcaccggaagatgctgccatgatgcaaagcgcggaagctcgagtactcggaaaaacccaacccggcggact

SEQ ID NO: 72157 - DNA, 248 bp, Glycine max
  Clone ID: 700836721H1
cgacacgctgtttctgcgctcaaatgctcggatctctcgccggttacgtggcctccagcttgaagcagttggagctgcaaaagtatgtgtttcgatgatttgtggttgtagagctacctttagctttgatatgtttcttatggtctaaggagtgtggcgaaatggttttacattctaattttattattaaaacatggaagagacacgagaagatgccgggcaaccagagcgaaggccatccaacatgt

SEQ ID NO: 72158 - DNA, 250 bp, Glycine max
  Clone ID: 700836725H1
ccaccacgcagcacttgatggaaagtcttcaactttgttcatgaaatcgtgggcgcatatttgttcttacctcaatacctcaccggaagaaccgttgctgttttcactaccgaagcatctaacaccttcgtttgatagatctgtcataagagaccctttggggatcggtgagatttacgcgaagtcgtggacgagcttcggtggagccaccaatgaccgaagcttgaacgtgtgggataccctcggtgga

SEQ ID NO: 72159 - DNA, 207 bp, Glycine max
  Clone ID: 700836726H1
caaaaacgaaatgacccctcccccagaattctttcggattgtcgggcacattaaaaaaggaatggataagttcctaaaaataaagaaaactataacacattataaggaggggtcaaatattaattaagataaaagatatagaatatctatctgtatatatatatatatagatataatttattaataattagaactttcttttttctt

SEQ ID NO: 72160 - DNA, 247 bp, Glycine max
  Clone ID: 700836727H1
gcagaccgagctagctagctagcaagcaagcacagagatggaggcaaagcgaggccatgccctcatgtgcttggcacgtgtttcactcttcctctgcgctctaaccctatccgctgctcacggaagcaccacggttcaagacatcgcgagaaagttgaaactcggggacaacgagcttctgcgcacggagaagaagttcaaggttttcatggagaattacgggaggagctactccacagaggaggag

SEQ ID NO: 72161 - DNA, 246 bp, Glycine max
  Clone ID: 700836728H1
atgggtatcagcctcatcttatagctccagaacaaggatatcgtcgtctaattgaatcttctctaataactattaggggccctgctgaggcagctgttgatgcggttcactcgctgttaaaggacttggttcacaaagctatcagtgagactttggacttgaagcagtatcctggtctccgggttgaggttggggctgctgctgttgattcactagaaagaatgagggatgaaagcaaaagagcaa

SEQ ID NO: 72162 - DNA, 246 bp, Glycine max
  Clone ID: 700836730H1
ccaacttccattacaaaaccaaaacactcaagttaacttcaacacctttaattttctgaacgaaattcagccacagaatatcaaagggagcgaagatgagtcaggagcagccaaggcgcccccaaggccaagaccccatcaaatacggcgacgtttttgacgtctacggtgaccttgcacagatgcccattgcaccggaagatgctgccatgatgcaaagcgcggaagctcgagtactcggaaaaa

SEQ ID NO: 72163 - DNA, 251 bp, Glycine max
  Clone ID: 700836732H1
ctgaagcaaagcaatggctacttcacagttgaaaacccagaatgtggttgtatctctcaccctagccttaacctcggtactggtgctactgtggataatgtgttgcggcatttggacgaaatcagcaggtgcaatccatctccgcccgaatcacgtgcatctactccaacaagtggaagtgacggacacgtgtcgtccactgttttctccccaaagagtttagagaagcactgccgtccgattgagaacat

SEQ ID NO: 72164 - DNA, 252 bp, Glycine max
  Clone ID: 700836733H1
cgaacctgcgcatctctctctctctcgcgcgcgccgcttttctctcagccagccctgcagggttttgcataatttagctctttttctccgcccacaatgggtaaagctaaaaagggaccaaagtttgctgttatgaagaagattgtcacttccaaagcaatcaaaagctacaaagaagaggttttgaacccagaaaagaagaatcttatgaaggaaaagttacccagaaatgttccaactcattcttcagcg

SEQ ID NO: 72165 - DNA, 251 bp, Glycine max
  Clone ID: 700836734H1
gcaaaattgaaggcttggttccttctctccgtgcttccccgcacgtgccaacagtgaaaaacaatggagtcagatctcgagcaacagccgcaggtgaattcctcgggtttaactcggtaccgatcggcgccgagttcttatttctcgaacatcattgaccgcgagttctacgagcacgtcttcaaccgtccctcgagtcccgaaacggagcgagtgttctcacgcttcatgaacagcttaaacagtgaaga

SEQ ID NO: 72166 - DNA, 250 bp, Glycine max
  Clone ID: 700836735H1
ctttccgttcatttcctctgttttttcttcaaatccattgtttcgtggaaatcccgaaatttaaccatgcttctccgaaccgccgcctccgccgcttctgcttcgtccctctccctcttcagccctacctccgaacctctccgttcggttcccgctcgtggattggtggttcgcgccgcgaaaggatccacgaaccaccgcgccctaaccggcgtgatctttgaaccgttcgaagaggtgaagaaggagc

SEQ ID NO: 72167 - DNA, 250 bp, Glycine max
  Clone ID: 700836736H1
gattgcttgcacattgtgttttgtgcagttagaagaaaacttccttcaacatgttcattctttaattcaaaattcagattctgatttttggagaaatggaaggtttctggttcattctggcagtcggttagtttcacacaaagatgggaagattcgcatatgcaaaccatggataacatggaagtctccagagtagatatgtgtgtccccttaggcaattgtgagtggacaggaaacctctatggcattg

SEQ ID NO: 72168 - DNA, 246 bp, Glycine max
  Clone ID: 700836737H1
gtagaggaaatcttctccaaggaactagatgggccaattatgttcgtggatgattctcatgcacctagcttatggactaaattccttcaactgaagaaggatgacaaagagcaacagctgaagaaaatgatgcaagaccaagaggaggatgaggaggagaagcaaacaagtaggtcatggaggaagctcttggaaaccgtatttgggaaggtgaatgagaagatagagaacaaagacactgctggt

SEQ ID NO: 72169 - DNA, 245 bp, Glycine max
  Clone ID: 700836738H1
cagaccgagctagctagctagcaagcaagcacagagatggaggcaaagcgaggccatgccctcatgtgcttggcacgtgtttcactcttcctctgcgctctaaccctatccgctgctcacggaagcaccacggttcaagacatcgcgagaaagttgaaactcggggacaacgagcttctgcgcacggagaagaagttcaaggttttcatggagaattacgggaggagctactccacagaggagga

SEQ ID NO: 72170 - DNA, 246 bp, Glycine max
  Clone ID: 700836740H1
atatatactatgatgagagtgcggtttcctttgttggtgttgctgggaactgttttcctggcatcagtttgtgtctcattaaaggtgagagaggatgagaataaccctttctacttgagaagctctaacagcttccaaactctctttgagaaccaaaacggtcgcattcgtctcctccagagattcaacaaacgctccccacaacttgagaaccttcgagactaccggattgtccagtttcagtca

SEQ ID NO: 72171 - DNA, 245 bp, Glycine max
  Clone ID: 700836743H1
taatttcccagtacctgatagcctactcagtaacctggtgagtaacctctgtcttaatatataatttaattgtgtggttttcctttgttactaatttaattgacctttcattgtttaaccaatgtgattaggtgataattgtctagggtacatatgttattctaaggcttatgatgtctaagtttcagatgctcggagcataaacggagttcttgtgactcaaggtagccattcacaggcacctt

SEQ ID NO: 72172 - DNA, 247 bp, Glycine max
  Clone ID: 700836745H1
gaaaaattgtagaaaactacaccaaggtgagtgaagatatatattcatagtttccaagggaattaatatctccataaaaaggaaagtggcgaaaattaatggctgccaccgaggaaccaattctctctaggattgaccgtttggataatatgttgaggcaattggaggtaatcagagggtgcaatccatctccaaagagctcgtgtgcatctactccaacaagtggaagtgatggacacgtgtcatc

SEQ ID NO: 72173 - DNA, 245 bp, Glycine max
  Clone ID: 700836746H1
gggatgatatgttgagattcaaacagatggacccttccataagtgggcgtggtgctgaacctgtatatcgtgataaagtaaaaggagtacgcatttcgaaggaggaatacttgaaatcaaaacagaaagtagaagaaaaacccaaggagatagaaatagaatggggcaagggcttagctcaaaagcgtgaagctgaggctaggctaaaggaactagaacttgagaaggagaagccttttgcacgg

SEQ ID NO: 72174 - DNA, 248 bp, Glycine max
  Clone ID: 700836747H1
ttttcatttctcggtgttgttgttcttcatccatggcttttcctcagcaccacttccaacagcactaccaaacccaacagcaacaacagccacaaaacaaatccttcagaaatctgcaaacaatcgatggtcagatgtcacagcaggtggcgttttacaaccctactgatttgcaagatcaatcccaacatccatcctacattcctccatttcatgttgttgggtttgctccgggtcctgttcctcct

SEQ ID NO: 72175 - DNA, 249 bp, Glycine max
  Clone ID: 700836748H1
ggaaaaaactcttctctgcaacatcaagtgctggcattcgacattggtgtttgcttgacagagaaactctctgccactgccaccttcgctgctggcattcaagtttgcctcttctctttttccttacatgtatcctgatttggacacctgtttacatgatgagatggcggttacaacctttaaagtacctcctagtgagtgttgtggaataagaaaatggaaagaaagccttctgggaggagacgtgta

SEQ ID NO: 72176 - DNA, 249 bp, Glycine max
  Clone ID: 700836750H1
agagaagaagaagaagtaggaggaagaaaaggggaaaacgcaaagaaaaaaagaggaagatagatcaagatctcccttgcgtttgtctcagttgaagaaattcaagagcagaacgagactaactcaacggtatcagacgtttcagggtttcagcacttccattttttttttccggatttgagttggaagaagatcaaagaggttcctagttgcttggattgttcctctgggtggtggagactttgtgta

SEQ ID NO: 72177 - DNA, 249 bp, Glycine max
  Clone ID: 700836751H1
gaaaacctaagcttagaattagaaacaaagaaaagaagaaaggaaagaattgatcgttgaaaatgcagggaggaaagaaagcgggagagtccattaaggaaacagctacaaacattggtgcttctgccaaggctggcatggagaagaccaaggccactgtccaagagaaggcagaaagaatgacagcacgtgatccggtgcaaaaggagttggcaacccaaaagaaagaggcaaagatgaaccaggcgg

SEQ ID NO: 72178 - DNA, 247 bp, Glycine max
  Clone ID: 700836752H1
atggaggtacttatggcagaacgggccaatctagtctttcacaataaagtgataggtggaactgccattaaacgacttattagcagattaatagatcactttggaatggcatatacatcacatatcctggatcaagtaaagactctgggattccgtcaagctacggatacatccatttcattaggaattgatgaccttttaacaataccttctaaaggatggctagtccaagatgctgaacaacaaa

SEQ ID NO: 72179 - DNA, 245 bp, Glycine max
  Clone ID: 700836754H1
ggttcactgccaagtgagaatgcagaaaatattgctggaataaagcagggtcgaattgagtcttcccatgttcataataatagcagtagaacttctactagtttccaattggataagcgggggaatcaaaatgtagttggaaagagaagcaatatttcatccagtgcaaaagaatcagaagttcagcctgtcactagagatgcatcatataatccagtttcaaaagagaattttatggagtcaaa

SEQ ID NO: 72180 - DNA, 248 bp, Glycine max
  Clone ID: 700836755H1
atggaggtacttatggcagaacgggccaatctagtctttcacaataaagtgataggtggaactgccattaaacgacttattagcagattaatagatcactttggaatggcatatacatcacatatcctggatcaagtaaagactctgggattccgtcaagctacggatacatccatttcattaggaattgatgaccttttaacaataccttctaaaggatggctagtccaagatgctgaacaacaaag

SEQ ID NO: 72181 - DNA, 247 bp, Glycine max
  Clone ID: 700836756H1
acacgttccaacccacacgtgcacgccgctgtcacttccgactccaaggccgctacttcgcttgacctaactcaacccgatctcgataatagcggcggcggtgccaacggtaacggaggcggcggtggaggtggaggtggaggtggaggtggaggagaaggaggaggtgataatagcaagggcgaggaaggatctgacggtgacaagaggaaaatggctctgttaatgtctcagaaattcactctag

SEQ ID NO: 72182 - DNA, 242 bp, Glycine max
  Clone ID: 700836758H1
gaagagttacagaatttcctgtttacgatcttattgcaattttgcaactttcaaagcttattagctaaagtaacatcaaaagatgtcattgattccaagtattttcggtggcccaaggagcaacgtgttcgatccattctcactcgatatgtgggatcccttcaaggattttcatgttcccacttcttctgtttctgctgaaaattctgcatttgtgaacacacgtgtggattggaaggaga

SEQ ID NO: 72183 - DNA, 155 bp, Glycine max
  Clone ID: 700836759H1
cttttcaatctatttcgcatgcgctccagatttcaatcaccgatttcaccattatcatcatcattattataattattttctcgctcgatttgtttcaattacgaaataatcgcgataattattttttttttttgttatatcaggaatctctctga

SEQ ID NO: 72184 - DNA, 244 bp, Glycine max
  Clone ID: 700836760H1
gttttgtgggtggctcctgaagacaaggcgagtttatggtcacaacttcattatgtttcgtgtaataatctggaaatgcaagaagcttatcttgtcaatctcgtaaatgtgttacgagaactgtatttgcacagtccagaggaagctcgccaattgagaaggaaagctctctctcgtattgaatggctgaaaaagctgatgtgcctaccatagcacagattgaagagtcccattcgatgcagag

SEQ ID NO: 72185 - DNA, 246 bp, Glycine max
  Clone ID: 700836762H1
acatttgctcggtaccccctgggtcacctattgagcacttctgccaaatttctcacaggctacaaggacatgtcctaaactcttggtggaaagctggttggtgcgttattatctggaacatttggtataacagaaataagatattgtctggaggaggagaaggtgaggcacaagatactttttgatctttggtcatggctcaaggcttaccagagtgactttaacatctcttttcaacaatggcaa

SEQ ID NO: 72186 - DNA, 245 bp, Glycine max
  Clone ID: 700836763H1
ggagctgtctgtgcaaatttgcgttgttcttcgcggcacacctcactcactgaacggtaagtatggcggacaaggctgttacaatccgaacccgaaagttcatgaccaacaggcttctttccaggaagcagtttgtcgttgatgtccttcatccagggagggcaaatgtttccaaggctgaacttaaggagaagctggctaggatgtatgaagtgaaagaccctaatactgtatttgtcttcaaa

SEQ ID NO: 72187 - DNA, 249 bp, Glycine max
  Clone ID: 700836764H1
ctcgaaaaatcgtagaagactacaccaaggtgagtgacgaaaactgatggctgccactgaggaaaaaattctctctaggattgaccgtttggataatgtgttgcggcatttggaggaaattagagggtgcaatccatctccgaagagctcgtgtgcatctactccaacaagtggaagtgacggacacgtgtcgtccactgatttctccccaaagagtttagagaagcactgccgtccgattgaaaacat

SEQ ID NO: 72188 - DNA, 248 bp, Glycine max
  Clone ID: 700836766H1
atttaatgaaattaaatatttaaattaataaaattagtcgtgttttattcgattttttgaattggtttttttttacagtagctaatgctagtcaccgaacttagtcaatgagctagaatgggttataaagatatctatagatatatatagatatatttatctatagatatctttagaaaaaaaaaaagaaaataaacaaataagacgtatcattttatgtatagtagtggggaattatgggacaaaaa

SEQ ID NO: 72189 - DNA, 246 bp, Glycine max
  Clone ID: 700836767H1
ctttgagtcttcttgatccttctttttctccttgaactcaaacatggcagatgaggtggttctgctagatttctggccaagtccatttgggatgagggtcaggattgcacttgctgaaaagggtatcaaatatgagtacaaagaagaggacttgaggaacaagagtcctcttctcctccaaatgaacccggttcacaagaagattccggttctcatccacaatggcaaacccatttgtgaatccct

SEQ ID NO: 72190 - DNA, 244 bp, Glycine max
  Clone ID: 700836769H1
ggaagaacaaaaaactatccccctcccccaaaaaaaaccctaaccgagccgctttgggtttagttttgtaccatttcgtgtaatctaatttttcatccgtaaaaatctaattttgaggcggcgagatggcggagattcaggtgcagcatcagagtccggtgtcggcggctcctcctccaaacggcggcgtggcgaacgccccgaacaacgcgaaccagttcgtgacgacgtcgttgtacgttgg

SEQ ID NO: 72191 - DNA, 245 bp, Glycine max
  Clone ID: 700836772H1
gttgataaaaggaaatatcagtctagaaatggagaggatgaatcttgtcccgaggctggaggtgacaatgatgcagatgctgatgatgaggacagtgaaaatgtttctgaagctggtgaagatgtctcaggcagtgaatctgctggtgatgaatgcttccgcgaagatcatgaagaggaggaagatatagaacatgacgatgttgatggtaaggctgagagtgaaggtgaagctgaggggatttg

SEQ ID NO: 72192 - DNA, 245 bp, Glycine max
  Clone ID: 700836773H1
gtgggagaagggaaggtgagtagtaatggtcatggatgttgcaaatcagggccaggctatgcttccccactggaagccatttctggtcccagagagtctctcatttatgtaacctctgtctacacagggaccggaatagagaagccagactatttggcgacagtggatgtggatccaaactctccaacttattccaaagtcatccataggcttcctgttccttatttaggtgacgaattgcatca

SEQ ID NO: 72193 - DNA, 244 bp, Glycine max
  Clone ID: 700836774H1
cagtaaagctaacttcaacacctttaattttctaaaagtaattcagcggctgaataccaagcggagaagatgagtcaggagcagccacggcgtcccaaaggccaaaaccccatcaaatacggcgacgtttttgtcgtctccggcgaccttgcacagaagcccgtcgcaccggaagatgctgccatgatgcaaagcgcggaaactcgagtgctcggacaaacccaacccggcggacagcttccgt

SEQ ID NO: 72194 - DNA, 242 bp, Glycine max
  Clone ID: 700836775H1
acactttccaatacaataatcactaactgaatattcgatcggagatgtctgccgccgccgaagaagctaacgctcccgccgtcgaaaagccggttgaggaggtgaaggcgccgaaccccgcgaaggagaagaaacctaaggctccgaaggaaaagaagccaaaacaggccaaaacagcttcacatcctccatattttcagatgattaaggaggtttgatcgctttgaacgagaaaggaggat

SEQ ID NO: 72195 - DNA, 241 bp, Glycine max
  Clone ID: 700836776H1
gagagtcttcggaggcaacatcttttctcagttctttttggtcaagcatgctctgaagcacatgaaagaagggagctgcatcataaactctacttcagttaatgcatacaatgggaatccagaagcgttggactacactgctaccaagggagcaattgtggccttcaccagaggtctttctcagcagctagcgagtaggggaattagggtgaatggtgtggcacctggcccagtttggacg

SEQ ID NO: 72196 - DNA, 245 bp, Glycine max
  Clone ID: 700836777H1
ctggcatggagaagaccaaggccactgtccaagagaaggcagcaagaatgacagcacgtgatccggtgcaaaaggagttggcaacccaaaagaaagaggcaaagatgaaccaggcggactggacaagcaggcggcgcgtcacataacacggcggccaaacagtccgccaccacggctgggcacatgggacatggccaccacaccaccggaaccgggactggaaccgccacgtattccaccaccgg

SEQ ID NO: 72197 - DNA, 245 bp, Glycine max
  Clone ID: 700836778H1
ccggtaaccattacaactttggcggagtggctgcgccgctgttattaccacattccaatactacctgctacccgggtcagctccccttcttttcacttcccgtatatataagcttatataaaccccgttgattctaatccaaactcaacccgacccgaattctttgtttaaaaagagagagagaaatgatactggtggcgatcgtggcggaggtgctggaggagtatacggcgttgctggccaga

SEQ ID NO: 72198 - DNA, 244 bp, Glycine max
  Clone ID: 700836779H1
agaagggatgatccagatgaagatatggatgcagagatgaattgggcattgaagcaggctgggaatttgagtcttgaattcagtgaaattggagatgatcggccactttctggttgctccttctcaagggatggaaaatggcttgctacctgttctctgacaggagcttccaagttgtggagcatgcccaaaataaaaaagcattccagctttaagggtcacacagagcgtgctactgatgttg

SEQ ID NO: 72199 - DNA, 247 bp, Glycine max
  Clone ID: 700836782H1
cttgtatctttttcttctatagagacacacggagagagtctcagagcaataaacacccttcaatggctaccactaaagtttacattgtttactattctacgtacggacatgttgagaagttagctgaagagattaaaaagggagctggttccgttgaaggtgtggaagcaaagctatggcaggtacctgaaacactttctgaagaggtccttgggaagatgggtgcacctccaaagagtgatgtacc

SEQ ID NO: 72200 - DNA, 243 bp, Glycine max
  Clone ID: 700836783H1
gagcgtagcagcggaagtctagcttgggtagcgaatcacaatggcgagaggattaaagaagcatctgaagaggcttaatgccccaaagcattggatgcttgacaaactgggtggtgcatttgctcctaagccctcatctggaccacacaaatcgagggaatgcctgccactcatactcattttgcgaaaccggctgaagtatgctctaacataccgtgaagtcattgctattctgatgcagcg

SEQ ID NO: 72201 - DNA, 243 bp, Glycine max
  Clone ID: 700836787H1
gcaatactagcgatagtgataagagagataccaacaagaaaagaaaaaaagaagagttgagattccctttgaagaaaagatggcatcccataggcaaagctatgaagctggtcaaactaagggccgaactgaggaaaagacgaaccagacgatgggcaatattggagagaaggctcaagctgcaaaggagaagacccaggaaatggcccaagctgcaaaggagaagacccaacaaacagccca

SEQ ID NO: 72202 - DNA, 245 bp, Glycine max
  Clone ID: 700836788H1
cagcggatgagttgtggttaggggtgaaatgccactcgaacccagagctagctggttctccccgaaatgcgttgaggcgcacagttgactagacatctaggggtaaagcactgtttcggtgcgggccgcgagagcggtaccaaatcgaggcaaactctgaatactagatatgacctcaaaataacaagggtcaaggtcggccagtgagacgatgggggataagcttcatcgtcgagagggaaaca

SEQ ID NO: 72203 - DNA, 241 bp, Glycine max
  Clone ID: 700836789H1
cggagtggtggacggggaaggggtggcgctgccgagggtgttcgtgaaggggaggtacgtgggtgggttggaggagttggtggagctgaacgagacgggtcgactcgggaggatattgaatgcgacgcgtgtggagagggggattgggaggcaaacgtgtggaggttgtggtggggctaggttcgttccttgcttcgactgtgctgggagttgcgagcttcttcacagagagaggtgcccc

SEQ ID NO: 72204 - DNA, 240 bp, Glycine max
  Clone ID: 700836790H1
ctctactggaagaatatttcagtgtcaggcttttggacgaggcattacagtgtgtggaggaactaaaagctccagcttattaccctgagtttgtcaaggaagccatttcccttgcactagataagagtccaccatgcgttgaacctgttgcaaatctttttgagtacctgctaattaagaagattctttcagccagagacatagggaccgggtgcatgttatttgcttctctgctggatg

SEQ ID NO: 72205 - DNA, 243 bp, Glycine max
  Clone ID: 700836791H1
ggtggcagcattcgggttctcaagaagttcactgagaaatccaagcttcttcaaggcattgagaatttccgtttggccatcttagaagctagagcacacacgttcgtgtccccacgccactttgattccgaggttgtcttgttcaacattaaggggagagccgtacttgggttggtgagggaaagtgaaacagaaaaaatcaccctagaacctggagacatgatacacataccagcaggcaca

SEQ ID NO: 72206 - DNA, 243 bp, Glycine max
  Clone ID: 700836792H1
aaaaaaaaaagcagcggatttagtagcacgggctgcaataagagctcggtgtcattatgttaataaaaagtggctcggcggtatgttaacgaattggtatactacagagacacgacttcaaaagtccctgaacttttgaagtcgtgtttctgtagtataccaaaaagagatgccgctatattgaagagacatttagctcatttggaaacatatcttggcggcattaaatatatgacggggtta

SEQ ID NO: 72207 - DNA, 241 bp, Glycine max
  Clone ID: 700836794H1
cagtttagggtttcggttctctaccctatctttcacgtatcgaaaccttaaatttacgatcaggtctgagcaatctggttggtagaacctttggtcttagtgagtcaagttttatgtctgaattagacgatcaaattcctactgccttcgatccttttgctgatgcaaatgctgatgactcgggtgctgggtcaaaggagtatgtgcatattcgtgtacagcagcgaaatggtaggaaaag

SEQ ID NO: 72208 - DNA, 246 bp, Glycine max
  Clone ID: 700836795H1
ccctctgtggtgtattttggggctaacctaattgccattgctgctattggcatgctgaactactgaggattctgttcatactctatagatcgtacccattgattaattgtatttaaaattttcatatattattccaaatagaaattgcagacgtaaattaaaatgcttgttacccaaggtaatcataaatggcatgcgtgtgaaattgtacctgacgattgtaaaatttcagatgttagtcacttt

SEQ ID NO: 72209 - DNA, 250 bp, Glycine max
  Clone ID: 700836796H1
aacccaattaattaagcacacaaggaccataacatacctatacctcaatatcacaagtcttatggaggcagagcgagacaagtacaagatgatcaactttgaagaaaccgagttacgactcggcctcccactcagtggaaacgagacgctcaaaaccacttgcagcactgggaagagggttttttcggatactgccgtggatttgaagcttaacctttcctcaacctcaaacagtgcttcttctgacctg

SEQ ID NO: 72210 - DNA, 125 bp, Glycine max
  Clone ID: 700836301H1
caccaacataacaatgtcgttgattccaagtttcttcggcaccgggcgaagaaccaacgtcttcgaccccttctccctcgacgtgtgggacccattccatggcttccccggcaccaccgccctct

SEQ ID NO: 72211 - DNA, 237 bp, Glycine max
  Clone ID: 700836302H1
cgggctggggatgtgactgtggacaggttgaagtgggggaatgatttcttgaagaagaggttggagcctggttcacactcccaggttagtcctcaggcactggagagcatcaaaagggttaagaagttgaccaagatgtctgagaaggttgccactggtgtcctctctggggttgtcaaggtatctggattcttcacaagttctgtagtcaactccaatgctggaaagaagttcttt

SEQ ID NO: 72212 - DNA, 235 bp, Glycine max
  Clone ID: 700836303H1
acttggtacaactcaaagtcatgattctatttggtttgctcaaccaacaaattattccgagaatatacaagaagataaaaaaatacgagattgtatcaaaaattatatacaaaaaaatataagaatatcctctggtgttgagggaattggacagataaagattcaaaaaagaattgatcttattcaagttataatatatatgggatttccaaagtttttaatagagggtaagtct

SEQ ID NO: 72213 - DNA, 234 bp, Glycine max
  Clone ID: 700836304H1
atgagtacgctggatgcaacaagggctgaacttggtcttcttgttttatatttgggcaaggctgaagcaagggacaaaatatgcagggcaatacaatatggttccaaatttttgagtaatggggaacctggtactgctcagaatgtagacaaaacaaccagcttggcacgaaaagtcttccgtctctttaagtttgtcaatgacctacatgctttgataagtccaacaccacag

SEQ ID NO: 72214 - DNA, 137 bp, Glycine max
  Clone ID: 700836305H1
aggcaaaattgcttttatttatctgtgttttaatgtgttgtgtttgtcggaacccctgattacatttttgttaagcgcagacagtttcaggactttgctgcgttgtgttgctttggtttattaaatgtcaactttct

SEQ ID NO: 72215 - DNA, 234 bp, Glycine max
  Clone ID: 700836306H1
caaagaaaggggtggtggctgcttcgaaagcttaataatttgtttatttccagaacatcatagttttcgcagcagcaaactaacaaattactcatatcatataataagatggcccgttctctctcgcaagccaaacgtattggtgtctttgttgctcaatctatctccctaattcccgttcatcggcgcggttacgcagtggcatccgatgtatcgttaagagttggattgggt

SEQ ID NO: 72216 - DNA, 238 bp, Glycine max
  Clone ID: 700836307H1
gcaccatctaaggaaacaaaggcacagagtgatgaatcagttaaagaaagcagcactgaagggcttccaatggaggatagtccctatgtgaaatacaaggatttggaggattataagcgtcagggttatggtacacaaggtcatcaagaaccaaagacaggtcgtggagctggagccactgaagcaccctctctctctggtgctgcagtttcatctgctgcacaagtcgctgccactg

SEQ ID NO: 72217 - DNA, 237 bp, Glycine max
  Clone ID: 700836308H1
agctgccaccctgctatttcaatcccactatagtgtttttgggctcactcactctgtgctgcaattcaagattgataactatgattgagctaaatggaagcttaggccattcaacagggttaaacttcaatactttctatatacttttttcaccctaaagattgcccccttcacttaattgttgtcaatcttgtcttgctctgccaatgggaatttttttggttatttatattctat

SEQ ID NO: 72218 - DNA, 164 bp, Glycine max
  Clone ID: 700836309H1
aatagctgaagcattcaatgcaataggccaaaatgagttctattacacagagtttcctaggaccatgtccagtgttgctgcttcccagtccagaaagggaagcagcaacactggacatggtcctaggaaactctgtgtctagttttgtcttcagcgttgtacaa

SEQ ID NO: 72219 - DNA, 236 bp, Glycine max
  Clone ID: 700836310H1
acaaaattgaactgtaattgtagtagtagacagtagcaccatgagccaggaacagctcaagaaacctcaaggggagcaggaccccatcaaatacggcgacgttttcaaagtctccgacgaactcgctttcaaacccatcgcgccaagagacgcagctctcatgcaagccacggagaaccaagaattgggccaaactcaaaaaggaggtcccgcctcgctgatgcaatccgccgcaa

SEQ ID NO: 72220 - DNA, 234 bp, Glycine max
  Clone ID: 700836311H1
caccttcaacaagttgaatcaaacagtgaaagtaaaacattgtgcaattaatcatcaactgcaagtagccagtgcataagatcaatggcgtcaagacagcaattcaaggaagacagagccgaggcagctgcaaaactcgcagcgaaagacatcggcgacatcaacagaacaaacgagcgcgacgaggggtacgacttgcacgacgaagccaacttccagcaagcacgagctgaa

SEQ ID NO: 72221 - DNA, 234 bp, Glycine max
  Clone ID: 700836312H1
caagagcctctttaatttccccatcccctctagattttctctctaaatggttttccaaagatctctcacaatggcctttaatctcgtgcttttgttctgtttggttgcggtgatcaacaatgttgtcattccaactagtgctagacaactcatgatgactgcatcaccaaatgagaaagaagtgatgtatattggcactgaaaatagaggacatgctgaacatgatcatcaagc

SEQ ID NO: 72222 - DNA, 234 bp, Glycine max
  Clone ID: 700836313H1
caagagatgtatgtgaatagtccaggtaaaggtgtggttgataaggttaaaggtgtggttgggacatggtttaccaacccagcagagaatcaatcttcacaagattcatctatgaattatgaggtcagaagggcagaagtggaacaagctaaccaaggtgcagcaggtgaaagaaggctgcaggagtcatctaattgaagaggtgctttgaaggagtcttgctttggggtgatt

SEQ ID NO: 72223 - DNA, 233 bp, Glycine max
  Clone ID: 700836314H1
caagaatgatgctatgctgaagtaaatttcatgagaactaaaaattgtataattatcaaaagaaggaaatcatgtaacatttaagtcgataccagtacatagagcaataactttttgtctatatagttagaaagctcttctaaaagggagaaattaaaatctaaccatcaagtatattccgacaaagaggacgcctgcagcaccagcagtgacacatgtgtaactgagcgagt

SEQ ID NO: 72224 - DNA, 237 bp, Glycine max
  Clone ID: 700836316H1
agtatagagtcagaaggagggctcattgagacatggaaccctaacaacaagccattccagtgtgccggtgttgccctctctcgctgcaccctcaaccgcaacgcccttcgtagaccttcctacaccaacggtccccaggaaatctacatccaacaaggtaagggtatttttggcatgatatacccgggtcgtcctagcacatttgaagagcctcaacaacctcaacaaagaggacaa

SEQ ID NO: 72225 - DNA, 241 bp, Glycine max
  Clone ID: 700836317H1
cggagaccgccgaggcgacggcgaataaggcaggggagatgaaggaggcaacaaagaaaaagacggcggagaccgcggaggcggcgaagaataaggcgggggagatcaaggacagagccgcggagacggcggaggccgcgaaaaacaagaccgcggagaccgcggaagtgacgaagaataaggctttggagatgaaggatgcagcgaaggacaggaccgctgagacaacggatgcggcgaa

SEQ ID NO: 72226 - DNA, 237 bp, Glycine max
  Clone ID: 700836318H1
ccttttctctctctagaattctcagatttgcggggcgagatgatgcagcagccaggacccggcatggcacctcccaccatgggccagcagccgcagcaacagtaccagcagcagcctccgccgcagcagcaacaaccctacgtcatgatgccgccgcagcatcaggcgccgcagcctatgtgggccccatccgcccagcctccgctgccgcagcagcttgctagcgccgacgaggtc

SEQ ID NO: 72227 - DNA, 236 bp, Glycine max
  Clone ID: 700836319H1
cacacaactactacaagtacttccttacaatcaaaaccaacaacaactatggcaagttatcaaaagcactacgatgatcagggtcgcaaggttgacgagtatggcaacgttgagaagcaaaccgacgaatacggcaaccctgttcatgctgctagtgtcacctatgtagccaccagaactgctgctggtggttacagtgatgacattaataagcaacatgataccaccaatgccta

SEQ ID NO: 72228 - DNA, 235 bp, Glycine max
  Clone ID: 700836320H1
agaaaaagagagaggtagagaaaagcgaagagtctctctcttcctatctctctctttcaatgtcagggcacaaatcttccacctctacttcttcttcttcttccttctaacctatatcagaaggaaacgcgaaaaaagaaaaaaaaaaaagaggcagaaggttctagaagccgccaatttttatttcttttaatttgtctgagtcagagacgttcgtgattgtaaccatggattc

SEQ ID NO: 72229 - DNA, 235 bp, Glycine max
  Clone ID: 700836321H1
aactactacaagtacttccttacaatcaaaaccaacaacaactatggcaagttatcaaaagcactacgatgatcagggtcgcaaggttgacgagtatggcaacgttgagaagcaaaccgacgaatacggcaaccctgttcatgctgctagtgtcacctatgtagccaccagaactgctgctggtggtcacagtgatgacattaataagcaacatgttaccaccaatgcctacggc

SEQ ID NO: 72230 - DNA, 237 bp, Glycine max
  Clone ID: 700836322H1
gtatgggtgtggaacaggacaagggggtttctgtgaaggactatttggtggacaaactgaggcgtggtgatgaagacagggctctctctgaagtgatatcagagactctgcacaagaaggaactgccctcagtggaagttactgaagaaggtgtgagaaaggtggtttctgatgctgtgcataagagataggatgatcctgagagaagaatggaacttcaaagaatactgggaaagg

SEQ ID NO: 72231 - DNA, 236 bp, Glycine max
  Clone ID: 700836323H1
cccaccgtaagcgtttctgcatacgagatgttctagtaccttcttcgttcacctcttctcttcaccgtcgcaacacaacgctgagctgcagcaattcaccaccgcagagttttccaagtccaatctcacttcacttatcgccagggtttaatctgaatatctttcgcgttgccactgaggttgttatctttcttccaaaatggcgacggtgatgcattagatcaaagatatcgaag

SEQ ID NO: 72232 - DNA, 236 bp, Glycine max
  Clone ID: 700836324H1
gcacgcattgccttccatccatcagggaagtacctgggcactgctagctttgacaagacatggagattatgggacatagaaacaggagacgagttgctttttcaagaaggccatagtagaagtgtatatggtttggctttccacaatgatggatcattggctgcatcttgtggactagactccctggctcgtgtttgggacctccgaactggaagaagtatccttgcactggaagg

SEQ ID NO: 72233 - DNA, 237 bp, Glycine max
  Clone ID: 700836325H1
gcctttttcccaagccacgaagaataccatacccttctgcatgaattgaagatggatgtagtaccacacaaacccacgtaaccataaataaattcatttcccatatagaacttccatcactgttaagtttgtaggaattgacaataggagggagccaactaatttgaagaggttgcctttgaatttgggtgttgggttgttgaagaagcacgttttgtagagaatgagtttgatttg

SEQ ID NO: 72234 - DNA, 237 bp, Glycine max
  Clone ID: 700836326H1
aattaaactaaacatatcccaagtgttcttacttattatataagtcttgaattcagttcatattttgctgatcactctactttatacatctgtataagcctttagtcatgtttgaaccaagggacatgtggaccaagctgaaggaaaagggtgagacaattttctctaatgctggctggattcaccgtcaacctagccagggaattcaaggaaaggtgaagagttcacctgggttgg

SEQ ID NO: 72235 - DNA, 233 bp, Glycine max
  Clone ID: 700836327H1
gtcatcgaataatgccgccggcggtattgcgccgccgttggaggtggacgggctgccggagaattttgattggagatagagaggagctgtcaccgcagttaagttacagggtagatgtggatcatgctgggctttcagcaccacaggatctatagaaggagccaattttcttgccaccggaaagctcttcagtcttagtgaacaacagctccttgtctgtgacaacaagtgtg

SEQ ID NO: 72236 - DNA, 233 bp, Glycine max
  Clone ID: 700836328H1
gttgcagaccgagctagctagctagcaagcaagcacagagatggaggcaaagcgaggccatgccctcatgtgcttggcacgtgtttcactcttcctctgcgctctaaccctatccgctgctcacggaagcaccacggttcaagacatcgcgagaaagttgaaactcggggacaacgagcttctgcgctcggagaagaagttcaaggttttcatggtgaattacgggaggagct

SEQ ID NO: 72237 - DNA, 231 bp, Glycine max
  Clone ID: 700836329H1
atcgagcgattcggctcacagagtcataaaaaaccaaacgttttctattctctgtagctcacatggtgggctaagaatatctgactttggggtggaaagtatggttggcaaggagagtttgagaactgaggtcttgaacttgagctttgagaagcttatgatggttgaatgtggtggaattagtgggaaaggagtgaacattaaagctggtgtgatcacggagtggaagga

SEQ ID NO: 72238 - DNA, 235 bp, Glycine max
  Clone ID: 700836330H1
ctacacagtacacacactagaagaataatggcttccatcctccactactttttagccctctctctttcttgctcttttcttttcttcttatccgactcagtcacccctacaaaaccaataaaccttgttgttctacccgttcaaaatgatggttccacagggctccattgggccaacctccaaaaaagaacccctctaatgcaagtaccagtcctgctggacctcaatggaaatc

SEQ ID NO: 72239 - DNA, 233 bp, Glycine max
  Clone ID: 700836331H1
gccaccacaaattacatagtaactctttttctcgaatccacagagtgagactcatcgtgtgaacaacgataacggcatgtttgagcgtacttgaaaaatttgagcggccatggacgaaaccgccgtaacgacgaagcctgattggctcaacaaccgcgcgagggtcgccggagagagaaccgaagaatttttctgtggcggcgacgacgaagaggaatgcgacgacgaggctt

SEQ ID NO: 72240 - DNA, 78 bp, Glycine max
  Clone ID: 700836333H1
ctcttcagcaacctctgcaatagctgataaagccatatcagccatgaacacagtctcttccaagctcggatacgggga

SEQ ID NO: 72241 - DNA, 234 bp, Glycine max
  Clone ID: 700836334H1
gtcatcgaataatgccgccggcggtattgcgccgccgttggaggtggacgggctgccggagaattttgattggagagagaaaggagctgtcaccgaagttaagttacagggtagatgtggatcatgctgggctttcagcaccacaggatctatagaaggagccaattttcttgccaccggaaagctcgtcagtcttagtgaacaacagctccttgactgtgacaacaagtgtga

SEQ ID NO: 72242 - DNA, 234 bp, Glycine max
  Clone ID: 700836335H1
acagttcgcaggagctgcgtacttatatgaaaggttcgtgagagagcatataaggaaatatataacggagagacagtatctctatggcaaccaccagcaacaaagcaaaaagtctcccaataacggtggcaaggccaagaaattcgtcgaattcgtcacgcccaagaaaggggatcaggaggcatattgaattggcaattggacggtgctgagcattgtattttgagtttttta

SEQ ID NO: 72243 - DNA, 234 bp, Glycine max
  Clone ID: 700836336H1
gcctaagaggaggagaagacgaagaggacaagggtaactgaatcgccgcttctgcagcttcgttctttcgtttttgtttcatctttttagcttcagagggtaaataaaaaatggaggttttggtgggtcccgctttcaccatcgacgttccctcgtctccgccgcagcatgccggttccgatgatctgatctttcttaacgtgtcacccgaagaaggtgatgggtcgaactttc

SEQ ID NO: 72244 - DNA, 231 bp, Glycine max
  Clone ID: 700836337H1
ccttgcaaggctaaatactcctgggtgaccgatagtgaagtagtaccgtgagggaagggtgaaaagaacccccatcggggagtgaaatagaacatgaaaccgtaagctcccaagcagtgggaggaggctcgggactctgaccgcgtgcctgttgaagaatgagccggcgactcataggcagtggcttggttaagggaaaccaccggagccgtagcgaaagcgagtcttcac

SEQ ID NO: 72245 - DNA, 234 bp, Glycine max
  Clone ID: 700836338H1
agagaagactgagttagaaaacacgctcggtcttcttctccaatggcgatttccgatgagcctgaaagtgtagccactgctctcaaccactcttccctgcgccgccgtccctccgccacctccaccgccggcctcttcaattcgcctgagacaaccaccgacagttccggtgatgacttggccaaggtttctggttccgacgactccatcaacagtgacgccgccgccgtcaat

SEQ ID NO: 72246 - DNA, 236 bp, Glycine max
  Clone ID: 700836339H1
ctcacttcacacgttcattttcatttcacctttgttatttactgtggcccaaccaccccaacctaattaagcacccctttactactctttccatcaccttctctctttctatttcttccttttcttttcatcttagttcactctcaacgtacaaacaatataataataatacaaacacatatgggcaacttgtggaccttgatcatccagcttcattctattgctgggccggttgt

SEQ ID NO: 72247 - DNA, 237 bp, Glycine max
  Clone ID: 700836340H1
ataaaaaggctcaagttgctggtagcaccactgttcagtaagctggagagaaatcagcacaagccaaagatgctacggtaggatcaatggagaaaactacaaaggatgctaaaggaagagaaaaagcaggaaccaaaggtcaaacaaagaagggtggtggtgaggaacaaggaaaaagaagagaagaaacaggagaagaaaaacaatccagcctggatgagattactaagcacagag

SEQ ID NO: 72248 - DNA, 236 bp, Glycine max
  Clone ID: 700836341H1
aatcctagtacaccgtattaaagaatttaagatatactatgatgagagcgcggttcccattactgttgctgggagttgttttcctggcatcagtttctgtctcatttggcattgcgtattgggaaaagcagaaccccagtcacaacaagtgcctccgaagttgcaatagcgagaaagactcctacaggtaccaagcatgccacgctcgttgcaacctccttaaggtggaggaagaa

SEQ ID NO: 72249 - DNA, 236 bp, Glycine max
  Clone ID: 700836342H1
cacacaactactacaagtacttccttacaatcaaaaccaacaacaactatggcaagttatcaaaagcactacgatgatcagggtcgcaaggttgacgagtatggcaacgttgagaagcaaaccgacgaatacggcaaccctgttcatgctgctagtgtcacctatgtagccaccagaactgctgctgctggttacagtgatgacattaataagcatcatgataccaccaatgccta

SEQ ID NO: 72250 - DNA, 233 bp, Glycine max
  Clone ID: 700836343H1
ctgaaagagtttgcgaggctctttgatgaaataacaggaaatgagtttgaaccttgggaaagagagaagaagttccagaagaagccattgaagttttaccccattgacatggatgatggagttgaagttagacatggcgcactaggtcttcggcagctggggatagcagcgacacactgcatacttgagcctttggttgcaaattttatgaaggtcttgtgcagccaggagat

SEQ ID NO: 72251 - DNA, 232 bp, Glycine max
  Clone ID: 700836344H1
ctcgagccgctttgctggagacactgaccttggactccaatatgttctacaaggatgtcctaatctgcagaagcttgaaatcagggacagtccatttggggatggagctttgcattctggcttgcatcacttttacaacatgaggttcctctggatgtcctcatgtaagttgacgcgccaagcttgccaagaagttgcgcagacattgccccatctggtgttggaagtcatt

SEQ ID NO: 72252 - DNA, 231 bp, Glycine max
  Clone ID: 700836346H1
atacaatagatattggcatgaaaataggaagtagaacgtgagagaaacgagtatgtacctggcaagcccttcatcatggcctataaggagcatatggttagtgtattctgcatctatacaggagcagcataacagcaccaaagcagagggcttggggtattgtggcttttctctttctttcatagctctgtaatcaccgagtttcgatgccttccttgttcagttttgtat

SEQ ID NO: 72253 - DNA, 234 bp, Glycine max
  Clone ID: 700836347H1
gttatacaggcgctatggcatttgatgtagagtacgcacgatggttagaagagcataatagacaaaccaatgagctaagggctgcaataaattctcatgctggagatattgaacttcgaaccattgttgacaatttcatgacacaatttgatgatatcttcaggctgaaaggtattgcagcaaaacctgatgttttccacattctgtcaggaatgtggaagactccagctgaga

SEQ ID NO: 72254 - DNA, 78 bp, Glycine max
  Clone ID: 700836348H1
ctcagttgatagtataggttgtcaaatttggatctctctgaattgtctgttttaattttattgtagtagtgacgcatt

SEQ ID NO: 72255 - DNA, 235 bp, Glycine max
  Clone ID: 700836349H1
atttctgcagtcggcaactcttccctttctcttgaagcttctattctgtgctgttgctgaatcagaatggatggtgctgtgttggcatgtacagatggagcagttcttcccgtcagtcaagtgtttgatgcaattagagagcttgggaatggagggcttgagcaatgggatcctcttgttcttacttctgcctcactcttaaaaattcttagagtgttaaaagtagatggtacaa

SEQ ID NO: 72256 - DNA, 233 bp, Glycine max
  Clone ID: 700836350H1
gaagattctgccaggaatggatccttatcaactccaagcacaaggcaagagccttcaagttctcgtgttgtaaatatcaatattctggctgctagtggaccccaaaacaaccaagaatctgagagacaaataccaagcagtgtacttcagtttttaaggacattctttcctggtggagaaattcacgtggaagattcaagtgtacaaggaacaattgcaggttctgccttaga

SEQ ID NO: 72257 - DNA, 235 bp, Glycine max
  Clone ID: 700836351H1
gcatcaaggtgaaggtggaggaggggtgctgaatgccattggtgaaaccatagcagagatagcagagacaactaaggtgattgttgctggagagggagaaaaggagataatagtaaaaacacatgaatttgaatatggagacttgaaacttgattagtgaattgctgcattgcatggatgttcatgtcaagttggtttatggaaggaaatctatcatgaagtacatagctgcaaa

SEQ ID NO: 72258 - DNA, 234 bp, Glycine max
  Clone ID: 700836353H1
atccgtggttccaatggatgggagatattcttctactagcaaggatgagaatgaaactagcaagaaccccatggctgattcagaaagatatatcagtaccagggatagttgttcgactcgagttgccatactcagagatagggaaaaggatcgtagtgatccagattatgaccgtagttatggaagttatgctaggagtatcccaacctctgctcttaacttggtgccatttaa

SEQ ID NO: 72259 - DNA, 235 bp, Glycine max
  Clone ID: 700836354H1
aaaagatcaatgttaatggaggtgcaatggcaattgggcatcctctgggttcaacaggtgctcgatgtgttgcaactctgttgcatgaaatgaagaaacgtggcagggactgtcgatttggagttatatctatgtgcataggtactggaatgggggcagctgctgtttttgagagtggtgattgtgctgatgagctatgcaatgcccggaaagtgtatgaccttcttttatccaa

SEQ ID NO: 72260 - DNA, 234 bp, Glycine max
  Clone ID: 700836355H1
accgaggatccctcatagtattggtcaaatattggctaatgtggatggggcattcatctatgtacaagcgcactccttcgagagataattcaaacatggaggacgtggaagaaaactcagatcttttagacatcggcctggacaagggaacctcaaatccttcattgatgctttctttaccgcatgtacttgtggcgaccatttcttcattcctttttggataccatcttggag

SEQ ID NO: 72261 - DNA, 236 bp, Glycine max
  Clone ID: 700836356H1
tttatttacaacaacaatggcttctgtgcctcaaccaaaaatctcccttctaaccttattcttcttctcgtccttcaccatcattgcgcatgcaattgttcctcaaaacgaaaccttcaaatttgagaactcaggtgaacttggaccctacatcgttgagtacggtgcagattacagaatgataagcatcttcaactctccattccaagttggtttctacaacaccaccccaaatg

SEQ ID NO: 72262 - DNA, 236 bp, Glycine max
  Clone ID: 700836357H1
gggtgatgtagcactgaatgccaaagattatgctcaaaaaagcaaagattacgcaggtgatgctgcacagaatgtcaaagattatgcaagtgatgcagtgcagaagagaaaagagtattctggtgatgcttctcacaagagcaaagaggcttctgattatgccagtgagacggctaagaagaccaaagattatgtcggtgatgctgctcagagaagcaaaggggctgctgaatatg

SEQ ID NO: 72263 - DNA, 235 bp, Glycine max
  Clone ID: 700836358H1
atcacacacaactactacaagtacttccttacaatcaaaaccaacaacaactatggcaagttatcaaaagcactacgatgatcagggtcgcaaggttgacgagtatggcaacgttgagaagcaaaccgacgaatacggcaaccctgttcatgctgctagtgtcacctatgtagccaccagaactgctgctggtggttacagtgatgacattaatatgcaacatgataccaccaat

SEQ ID NO: 72264 - DNA, 236 bp, Glycine max
  Clone ID: 700836359H1
gacgcaacgttagagaagggtcagcaaggctatgctgtgacaaaggacaccatttcaagtgcagcgaaaaccgcttcggagaaaactgcgccagtggcagagaaggccaaagactacactcttcaggctgcggagaaggccaagagtgcgggtggcacaacggcgagttacgtcggagagaaagcggtgcaggccaaggatgtcgccgtggagagtgggaagagtgcggctgggta

SEQ ID NO: 72265 - DNA, 232 bp, Glycine max
  Clone ID: 700836360H1
attatagtaactctctttctctatctgaagaagaagaagttctgaagaagcatgtgtggaggtgctatcatctcagacttcattggtgtgaagcgtggccgcaacctcgccgcgcaggaactgtggtccgagcttgaccctttctctgacctccttggcttcgataccaccaccaccaccaccaatcaaccaccccttccagacaaaaaagtgttgtcatcatgtgagaaga

SEQ ID NO: 72266 - DNA, 233 bp, Glycine max
  Clone ID: 700836361H1
aatcgatatctttcatcgcctacggcaacgcttcatttgaatcaacactccttcctcttcctctctctcgtccattttagttcaactttgaataattctccttcgtatcaagtcttcctcatcttcaccacctttttgtaagtggatatttatgtgtctaagaacataaactaaaaaaccaaggctagtgaaagacaaaaaaatgtcaggtgtctctctagcagtgtctggtc

SEQ ID NO: 72267 - DNA, 232 bp, Glycine max
  Clone ID: 700836362H1
cagatttttgatactggatcacttgagggcccacatgctttatttgaagtgcgtaatgttcaagtttatggaggctttgttcttcacattggtaatgggactggtgtctcagttggcgacaaagtagtgtgcaaggttgattatggaagacgcgcccttatagcccctaaccatacctgcacacatatgttaaattttgcccttagggaagtatttggtgatcatgttgacc

SEQ ID NO: 72268 - DNA, 232 bp, Glycine max
  Clone ID: 700836363H1
caacagccatgcttggggcagttccatctagatataattggaatggtggggagattgggtttgatgtttacttctcgatggcaagagggaattcatctgtaccagctatggaaatgaccaagtggtttgacacaaactatcattacattgttcctgaattgggtccagatgttaagttctcctatccatcacacaaggttgtggatgaatacatagaggctaaagttctggg

SEQ ID NO: 72269 - DNA, 231 bp, Glycine max
  Clone ID: 700836365H1
acacgttcgtgtccccacgccactttgattccgaggttgtcttgttcaacattaaggggagagccgtacttgggttggtgagggaaagtgaaacagaaaaaatcaccctagaacctggagacatgatacacataccagcaggcacaccactgtacatcgttaacagagatgagaatgagaagctcctcattgccatgctccatatacctgtctctactcctggaaatttga

SEQ ID NO: 72270 - DNA, 232 bp, Glycine max
  Clone ID: 700836366H1
cacaactactacaagtacttccttacaatcaaaaccaacaacaactatggcaagttatcaaaagcactacgatgatcagggtcgcaaggttgacgagtatggcaacgttgagaagcaaaccgacgaatacggcaaccctgttcatgctgctagtgtcacctatgtagccaccagaactgctgctggtggttacagtgatgacattaataagcaacatgataccaccaatgcc

SEQ ID NO: 72271 - DNA, 234 bp, Glycine max
  Clone ID: 700836367H1
gcgggagagtccattaaggaaacagctacaaacattggtgcttctgccaaggctggcatggagaagaccaaggccactgtccaagagaaggcagaaagaatgacagcacgtgatccggtgcaaaaggagttggcaacccaaaagaaagaggcaaagatgaaccaggcggagctggacaagcaggcggcgcgtcagcataacacggcggccaaatagtccgccaccacggctggg

SEQ ID NO: 72272 - DNA, 231 bp, Glycine max
  Clone ID: 700836368H1
caaaaaccccaactttgttctccctcaggttctctcccttgactcaattctaaaatctcaataaggttctttgtttttttcttacttaataataaatttctcttcttttatggttactttagggtttgtggggttgcattgaagatggttcaattgatggagagaacatgattttggaagatcatgatgaatggattttcaagctacaacgtgaattcaagaaaatctgag

SEQ ID NO: 72273 - DNA, 232 bp, Glycine max
  Clone ID: 700836369H1
ctgaattccaatagttgttgtgttctgaagagagaacatgtcaagcaattcagatgcagcagcagcgacggtgcatgctcgtggccgtttggccatgctcgctgctcacctcctcccctttgaactcactgatcacgacgccctccgccctatccctctctccgctcagttgccgccgacgaacttcgccggaagtttgaccgtcgtcgacgacagaaccggcaagaagtac

SEQ ID NO: 72274 - DNA, 232 bp, Glycine max
  Clone ID: 700836370H1
tttctgaagccagtaacgtttcaaaaactcaagaatcaccatttgaccagcgcaggctgtttggttttcgtcctcgctccccaccacttccatacttgttgtcttggttattgcagacacgtacctacccaaaactccctgctgatcagggtggggctgacaatggtgattctgatattgaaatggctgatttatctgattctgatctagatgtagatgaggatgagtatga

SEQ ID NO: 72275 - DNA, 77 bp, Glycine max
  Clone ID: 700836371H1
gtagaaaataaatgtcctcttcccagggacactctctatttcagagatctatatctaagtgtcggtgatcccctttt

SEQ ID NO: 72276 - DNA, 236 bp, Glycine max
  Clone ID: 700836372H1
cacacacgccatccaatttctgtctttgatatttttaattagagagagaaaaagaaaaagaaaaaacaaagagagaaagagagaagagagagggtgtgtttctgggttttggaaatttcagccaatatcgaaaaacaagaagccccatcaataataatcatcgaaggaatttgaaaggtcgaaacttgtgcatctgggatcgcgaaattggggtttttggttaaaagggtattatc

SEQ ID NO: 72277 - DNA, 234 bp, Glycine max
  Clone ID: 700836373H1
aacacgttctgcttcttctgtggttgcgttgctcaatccagcgtcggcgtggtcgagcagtggggtcgcttccaccgcctcgcccaaccgggcttccactttttcaaccctctcgccggcgaatgcctctccggtatcctctccaccaggatctcctccctcgacgtccgcatcgaaaccaaaaccaaggacaatgtttttgtgcagttgctgtgttcgattcaataccgagtg

SEQ ID NO: 72278 - DNA, 234 bp, Glycine max
  Clone ID: 700836374H1
ctcagtacggtgacgtcgttgaatcgaagattatcaacgatcgtgagactggaagatccaggggatttggatttgttaccttcgcctccgaggattcaatgagggatgcgatcgaagggatgaacggtcagaaccttgatggacgcaacatcactgtgaacgaagctcagtcccgcggaagccgcggtggaggcggtggcggttacggaagtggcggtggatacaaccgcagtg

SEQ ID NO: 72279 - DNA, 231 bp, Glycine max
  Clone ID: 700836375H1
gccatcttcaacttcacctgtattgagatgcgcgatcacgagcagccacaagatgccctttgtgcacccgagaagcttgtgaagcaagtggctctggcaacgcagaaggcacaggttccacttgctggtgaaaatgcgctgccacggtacgatgagtatgctcatgagcagatcataagggcattacagttggatgttgatggtgactctggcggaagagagatgtgtgca

SEQ ID NO: 72280 - DNA, 231 bp, Glycine max
  Clone ID: 700836376H1
atcgattaaagacttgcttccaagatggttctgctagagaagctctgggatgacgttgttgctggccctcaacctgagcgtggccttggcaagctcagaaaactcaccaccctcaaaactattgatgaaggagacagtagcaagctgcagaagacgttgtcgatgccgtcgacaccgacaaccctgatgactcccacgactccaacgacaccgggatccgcgcgtaaagct

SEQ ID NO: 72281 - DNA, 232 bp, Glycine max
  Clone ID: 700836379H1
gtcacctttccgttcatttcctctgttttttcttcaaatccattgtttcgtggaaatcccgaaatttaaccatgcttctccgaaccgccgcctccgccgcttctgcttcgtccctctccctcttcagccctacctccgaacctctccgttcggttcccgctcgtggattggtggttcgcgccgcttaaggatccacgaaccaccgcgccctatccggcgtgatctttgaacc

SEQ ID NO: 72282 - DNA, 233 bp, Glycine max
  Clone ID: 700836380H1
cagtgggtgaacttaagaaattggtcgaagagggtaaagtcaaatatattggattatctgaagccagcccagatacaataaggagagcacacgcaattcatcccatcacagctgtgcaaatagagtggtctttgtggactcgtgacattgaagaagagatagtccctctctgcagggaacttggtattggaattgtaccatatagtcctcttggtcgtggcttttttggcggc

SEQ ID NO: 72283 - DNA, 234 bp, Glycine max
  Clone ID: 700836381H1
cgcgtcgctgctccgtaccagtttcactgcataaatttgagagaaaactctgcaaacatgttggtttatcaggacctccttacaggtgatgagcttctctcggactccttccgttacaatgaaattgagaatggaatgctgtgggaagttgaggggaagtgggttgttaagggagcagttgatgttgccattggtgcaaacccttctgctgagggtggagaagatgagggagtc

SEQ ID NO: 72284 - DNA, 233 bp, Glycine max
  Clone ID: 700836382H1
tgcagaccgagctagctagctagcaagcaagcacagagatggaggcaaagcgaggccatgccctcatgtgcttggcacgtgtttcactcttcctctgcgctctaaccctatccgctgctcacggaagcaccacggttcaagacatcgcgagaaagttgaaactcggggacaacgagcttctgcgctcggagaagaagttcaaggttttcatggtgaattacgggaggagctac

SEQ ID NO: 72285 - DNA, 233 bp, Glycine max
  Clone ID: 700836383H1
ctccttctctcgttgattcggatctagagtcttttttcactcttcagttctcgttgttgttcttcgctttcctgaaactagggttttcaatttcgattcattcgttaataattaaagatgtttgggagggcaccgaagaagagcgataatacgaggtactacgaaatcctcggcgtctcgaagatcgcttcgcaggatgatctgaagaaggcttacaagaaagccgccatcaa

SEQ ID NO: 72286 - DNA, 75 bp, Glycine max
  Clone ID: 700836384H1
agattttgctctgatttcagttcttgaaactcaccggttgtaatgatcaatgtgttagacccgtagtttatcaag

SEQ ID NO: 72287 - DNA, 233 bp, Glycine max
  Clone ID: 700836385H1
atcgaagaaagaagcatcataaagcaatacacttttttcccctcattctaccttccttcaccttcttcttcgttgcggtggtgccctagattttctctatccctttgatcgttcctgaattaccagcccccggccctcgctctagggtttcccatggattccgaggacgatatgcacgacgccaatgatgtggagtccctcgacgacgatttctacagtggcgagaccgagga

SEQ ID NO: 72288 - DNA, 236 bp, Glycine max
  Clone ID: 700836386H1
gagaaaagtagtgtattaagactacaaattttcaatttttcaatggcgtcgaggcaacaaaaagaggatcgagctgaggcagctgcgaaagttgctgcgaaagaactcgaacaactcaaccgagaaaaagaccgtgatttcagtgttggtgttgcagaccaacaccaacaagaagaacatcagttagatcaacaaaagcgtggtgtaatcggatccatgttcaaggcggtgcaaga

SEQ ID NO: 72289 - DNA, 234 bp, Glycine max
  Clone ID: 700836387H1
cgattgactcttgttgttcgctaaatgtgtagtctcatttccaagtcacactgtcacctgcgacaacaactccctctgcaacccactcgcactggcaatggaattgcgagggtgaggatgagtgggagaatggaggtggtgtgtcggggaatgttgaaacccagaaagttcatgcagaggaggagtaaattcgaggttttcaaggattctgcatatgaagctgaccagaagaat

SEQ ID NO: 72290 - DNA, 233 bp, Glycine max
  Clone ID: 700836388H1
actcgagcgattcggctcagatcaccattactgatggtaacgacaaaactagtgcaactttgcaatttagaaagttagcagattgtgattttctcaagagaaactttaagcagatgtctaatgttttgtgggtggctcctgaggacaaggcgagtttatggtcacaacttcattatgtttcgtgtattaatctggaaatgcaagaagcttatcttgtcaatctcgtaaatgtg

SEQ ID NO: 72291 - DNA, 231 bp, Glycine max
  Clone ID: 700836389H1
cgcccctcagcccgatgatattgccaaagctgttagtggggaagctgctgaaatgattatccaagtgtctgatagtgtggttcctgcattcaagtctgctgctgaagagcttttgaacagttctggtttaccagtcattgaattactggcaaaggctcttgccaaggctgttggttataccgatgtaaagcaaagatcacttctcacttccatggagaactatgttacatt

SEQ ID NO: 72292 - DNA, 231 bp, Glycine max
  Clone ID: 700836391H1
agaaggtcaaaacttactttgcttgccataaattttcttaggccgacggttattccaactctctagcaatgttatctttctagcaatactcaccgacttcgccaacatcccgaaattgtctttcaaaccattgttttttggtggaactccatttttatgtttatttagttgggaataaattttcttgtgacaagctgagagcttatactttaatgggggtaaaataatata

SEQ ID NO: 72293 - DNA, 229 bp, Glycine max
  Clone ID: 700836392H1
cgtcacgaaccctaattccttttcttcttcttctcttcccttactctcatcctcgattcagtggcagaggtgacggaattcacgtgatttccatgagtggctccgttttccttgaatcgaacaccacgtctgttcacggttcgcggtttccgaaattgagctcgattcctcgtcagtggtgatcgtcagtgcatgcatcctcggattggttatgtgcgagcttgatcca

SEQ ID NO: 72294 - DNA, 230 bp, Glycine max
  Clone ID: 700836393H1
gtgaaaataggctcaaaatctttcttgggcattctccgaatcatcatggttggagttttcattggtctttttggaagtattggttttggaaggcagcttcttttgaaatttcctgaaatattcagccttggttggttcaggaagaatggcccctctgaagaggaggtggaaagtgcttccttctagatgtggtttgttggacatggttatagtgatgggagcattgcttc

SEQ ID NO: 72295 - DNA, 231 bp, Glycine max
  Clone ID: 700836394H1
gcggagaaaaaggaaacaaggatagaccagaactgaaaacacgaaccagagaggtaataggaagaacggagaaagaaagaggaagagaaagtggaggacaagtagtggcagagaaaggaagagaaacagaaactgcaaggggaagggttggtgctgaaaatgaaggtgcaagaacaaccgctgttataacttgcacgttggaaaaaggtggtggtactcagaaaccaataa

SEQ ID NO: 72296 - DNA, 232 bp, Glycine max
  Clone ID: 700836395H1
ttcggcgttttgtccttacgttgttattaagaagcgtaacgcattcaccacgatggtgaccaaagcgatggaggtggtgaaggatctggacgtgaagcggtacatgggtcggtggtacgagattgcgtgcttcccgtcgaggtttcaacccagtgacggcaccaacaccagagccacctacactttccgagatgacggcaccatcaacgttcttaacgagacttggagtggc

SEQ ID NO: 72297 - DNA, 80 bp, Glycine max
  Clone ID: 700836396H1
gcagaactcgagagaagaacaagagaggtagagggaagagagtggaacaaagaggagaaacaaagaagttgtccaagagg

SEQ ID NO: 72298 - DNA, 253 bp, Glycine max
  Clone ID: 700836401H1
actctggcgaccaaactcgaagaatccaaacagcaggtttgttgtggaagatgagtggtgttgttagggctgcattgagatccaccactagtgtttgtgcacttgtgcagagaagccatggcctcctcccatgaggtgcttctccactgaggcagaacagccacctttgaattcaacaccccctcctcctccgttctttgagactgaccattcaggtttgacatatggtaatctgcttggtgttcgtaaatat

SEQ ID NO: 72299 - DNA, 70 bp, Glycine max
  Clone ID: 700836403H1
gcattgtatttcgtttgttgttcaatctaacaaacttctctatatcgtttactttttcaacacaccatac

SEQ ID NO: 72300 - DNA, 249 bp, Glycine max
  Clone ID: 700836405H1
ggaaaatcgagttgacatttcatccgtgcagcagcaggatcaagcagttgaagacgaaatgaaggtcaagtttgtttccacctctaaaaaggcctcatcccagggtactagctttctacagcgctacgcaatgccatcatgggagctgctgatgccgtgcgtcgagttgcaaccaagggtgctggggcatttgtcgaagatactaaaagaaccgaagcccttgtgcaaacaggcgatggaatgatttgg

SEQ ID NO: 72301 - DNA, 87 bp, Glycine max
  Clone ID: 700836406H1
tgaccctcttgttgagtatgctctgcctatttgaaaatttccacacctcttttaatcgtcgtaatgatgtgtgaagtgtgtgttatt

SEQ ID NO: 72302 - DNA, 246 bp, Glycine max
  Clone ID: 700836408H1
gcgaaaacgctcatttcgtctcaatcgttcatcggcacaccgctcccctcactccctcgccaccacctcccccaccgcaccaggctcgtcgccaccaaagtcctcgtcagcctccacgaaattccccaatccactccataagctcgcaacattgacttcgccggaatcgtgactagagcgaggcttctctacacgctcgccgatgctgcggttgcggcggaccctgcggttgctgcggactctgcg

SEQ ID NO: 72303 - DNA, 245 bp, Glycine max
  Clone ID: 700836409H1
catggcgataggagagtttgtagctgtgtgcactcagtatgaagttgaggtaggtcaaatgaagagagagatgaataatgaggagaaagacttggagatggggatggagaaaagaggattgcctatccattgcaagctactttggcatctgcagtgtccttttctataggtgcattggtgcctctactttcagctgctttcatagaaaactacaggactagggttattgtggttgtggcaatggt

SEQ ID NO: 72304 - DNA, 246 bp, Glycine max
  Clone ID: 700836410H1
ggcggacggcaagcccctccactacaagggctcgtccttccaccgcgtgatcccgagtttcatgtgtcagggtggcgacttcaccgccggaaacggaaccggcgacgagtcgatttatggcgcaagttcgccgacgagaacttcgtgaagaagcacaccggtcccggcatcctctccatggcgaacgccggtcccggaaccaacggatctcagttcttcatttgcacggagaagacagagtggctc

SEQ ID NO: 72305 - DNA, 242 bp, Glycine max
  Clone ID: 700836412H1
tggtgacatgatgctgaaacaactgttgcatcaccaggatgccattctatgctgttcactgaagtcattgccagtgttcatatttgcaaatcaagctggccttgacatgttggaaacaacccagttgccttacaagatatcacattggataaaatatttgatgaggctggacgcaaggcattgtgtacagactttgccaagttaatggagcagggttttgcttatctgccagctggaatctg

SEQ ID NO: 72306 - DNA, 227 bp, Glycine max
  Clone ID: 700836413H1
gaaaaagatgtgttgtttggatgtatagaaatagaaaaggaaagaagtggacaattttctctccacttgtttggatatttgaaaaagagaatggaaagaaattaataaattgtacggaaaaacttttgtactaattaaaaaaacttaatttggttattccacttttttttaacaaaattattttttttctaactttttatatcatataaaatattcaaatttataag

SEQ ID NO: 72307 - DNA, 249 bp, Glycine max
  Clone ID: 700836414H1
ggagtatgatgagacacgtgagaaacttcagatgatcagggtgaagtttttacggttggctcataggcttgggcaaactccccataatgttgttgtagctcaagttttatatagattaggactggtgagcaactccgaggaaggaatgggggtcgtgttggtgcttttagctttgatcgtgcaagtgcaatggctgagcagcttgaagcagcaggtcaggagccacttgatttctcttgtacaattatg

SEQ ID NO: 72308 - DNA, 88 bp, Glycine max
  Clone ID: 700836415H1
aagcggacttagttactgctcccgctgccttgggactggagagtataggtatatcatgggcttccagttcatgaacagggacaataat

SEQ ID NO: 72309 - DNA, 252 bp, Glycine max
  Clone ID: 700836416H1
ctcatcttagattccattttgtctcttcattgcccccaaaataactttattttctctgaattattgcctacagcaactttgaataattctccttcgtatcaagtcttcctcatcttcaccacctttttgtaagtggatatttatgtgtctaagaacataaactaaaaaaccaaggcgagtgaaagaaaaaaaatgtcaggtgtgtctctagcagtgtctggtccaccagcagcaacagtggctgaagcagca

SEQ ID NO: 72310 - DNA, 253 bp, Glycine max
  Clone ID: 700836418H1
ctgatatcggccttaagccaagaaatgtgaaaaaagctgctgttattggaggaggtctaatgggttctggcattgctacagctcttatactaggcaacattcgtgttatactcaaggaaatcaattctaatttcttctgaagggaataaaaacaatagaagcaaatgttaatggcttagtaagaagaggaaagttgacgaaacagaaggcagatgctgcactgtcactgcttaaaggtgttctggattactca

SEQ ID NO: 72311 - DNA, 249 bp, Glycine max
  Clone ID: 700836419H1
ataaattgcagcatctattataaaataatgtttcctaagaagttttttttcttctatttttttattttttaaaactaaaacttggtggaagagatgacagattggcaggataaaatgcagtcagagaataatttaatttcattattaatgtaattaaagattttgtctttcccgtcatcttgaaatattaaataattgaagaataaatgtaatataattgctggtcagaaaataaaaaataattgctca

SEQ ID NO: 72312 - DNA, 248 bp, Glycine max
  Clone ID: 700836421H1
gtgatgtccaccgtgcagagccagattggaaaataatattgttaagatacttcaacccagtcggtgcacaccccagcggttgtattggggaggatccccgcggaattccaaacaatctcatgccattgttcagcaagtagcagttggccgacggcctgcactgacagtttttggaaatgattataatacaactgatggcactggggtatgctctgactgacttaaacttatgcactgaaatttttcca

SEQ ID NO: 72313 - DNA, 244 bp, Glycine max
  Clone ID: 700836422H1
gtaggtgaggaatacccaaacagcatctcattctactgtttattggccagatggcttctgcgctatttcgagctattgcagcactgggtagaaacatgattgtttccaacacatttggagccttgcagttctcacgtttcttacattgggtggttacgttatgtcaaaaaatgatatcaaaaactggtggatttggggctactggatttcacctttaatgtatgggcagaatgctttgatggtc

SEQ ID NO: 72314 - DNA, 246 bp, Glycine max
  Clone ID: 700836424H1
gagaagctgaggcaatctcttgttaatgaggggaatgaaactggtggaacattttttaactctgaagctgacaatgatgacaatgaatatgatggtggaaatcctgattttgatatgccggacatgcttacatggaagaagatctaccatctttcagtaatgagcatgaatttgatgatgctcatgtcaaccctgatgaagctgtggatcttactcagactagtttggaagatctttgccgctctc

SEQ ID NO: 72315 - DNA, 244 bp, Glycine max
  Clone ID: 700836425H1
gcactgtggacaaatcaggagaagaacgtgctcaagaggaaggcattggcatcgatgagtccaagttcaggactggtaataacaagaaccagaatcagaacgaagaccaggataagtgataatgaacacccttcactagcatgtgtagtgtgttcttatgctagcttaaatgtgagtgtcaagtgttttaggaagtaggaaaagaataggttataaaaaataatgtttaggcaatagttatata

SEQ ID NO: 72316 - DNA, 244 bp, Glycine max
  Clone ID: 700836427H1
ggattatgcaagtgatgcaactgatgctgcaaaaaagactaaggattatgctgcgcagaagaccaaggactatgccagtggtggtgcgcagaagaccaaggactatgccagtggtgctgcgagaagaccaaggactatgcaagtgatgctgcgcagaggaccaaggaccatgcaagtggtggtgctcaaaagagcaaagaatatgcgggtgatgtagcacagaatgccaaagattatgctcaaa

SEQ ID NO: 72317 - DNA, 245 bp, Glycine max
  Clone ID: 700836429H1
aactactacaagtacttccttacaatcaaaaccaacaacaactatggcaagttatcaaaagcactacgatgatcagggtcgcaaggttgacgagtatggcaacgttgagaagcaaaccgacgatacggcaaccctgttcatgctgctagtgtcacctatgtagccaccagaactgctgctggtggttacagtgatgacattaataagcaacatgataccaccaatgcctacggcgtagacactgg

SEQ ID NO: 72318 - DNA, 249 bp, Glycine max
  Clone ID: 700836430H1
ggagaattacgggaggagctactccacagaggaggagtatttgcgccgtttggggattttcgcccagaacatggtcagagcggcggacatcaggcgctggaccccaccgccgtccacggcgtcaccagttctccgatctcaccgaggacgagtttgagaagctctacactggcgtcaatggcggcttcccgtcatcgaataatgccgccggcggtattgcgccgccgttggaggtggacgggctgccgg

SEQ ID NO: 72319 - DNA, 248 bp, Glycine max
  Clone ID: 700836431H1
aaagagagaaagagaggaaattggcgtgtcgtggcgtgatcggggcacagtctgaatctgaaatccatcttcaaaatctcaattcaatataggagggagctgtgccctgccctgacgttaaaaaaattcgctgaatatgaaaaccctaacccaagcattggcgaagaccgcggcggtgatcgagaagacagtgcagacgacggtgcaggaggtgacgggcccgaagcacttcaggactacgagctgct

SEQ ID NO: 72320 - DNA, 253 bp, Glycine max
  Clone ID: 700836432H1
cttggttgctccagtcactgcaaaagctgtaagtatggacaactatgttggtgatttgtttcaatgtccatttacataaataacttcgggtgttatcaactcttttcaacatccttttggtgagtttactaggagttatttttatcttttttttaaacaaggtcacataagaacctaatgtatattgttattgtatgtaaagtgtaaactcaatcaatacatataatggtctagtaaatcttggttattgcga

SEQ ID NO: 72321 - DNA, 247 bp, Glycine max
  Clone ID: 700836433H1
tagagcttgcacctattggtatcttctacaatatcctaaagtgcttgtcttcttcttcatcaccatgtctttactttcagacctcatcaacctcaatctctcagaatccacagaaaagatcattgctgatacatatgggttggtggatctggtatggacctcagaagcattgccaggactcttcctggggcagtgagtgaccctgcaaaacttccgaagtggaactatgatgggtctagcacagatc

SEQ ID NO: 72322 - DNA, 253 bp, Glycine max
  Clone ID: 700836434H1
gcagcacctttaaacgccgaaggttcatccaatctccgaaggccttcaccggattgcaaccatgtcgaggagaaaggttagagagctaaaggaggaaaacgtgactctgggcccagctgttagagatgtgaacatgtttttggagtcgctcgcatctttgcctccttcaatgacacctttcttcatgtcactgatctgtctgggagggaaacacttgtccgcatcactggcgggatgaaggttaaagctgaca

SEQ ID NO: 72323 - DNA, 245 bp, Glycine max
  Clone ID: 700836435H1
ttcgagcgattcggctcgactcttcaccagctatagttcacctgaactaactgcactgccactgaacaccctcacctggcaccttcttcttctcttttctcctcttcaatgcatatggagatgttgctccaaagacatcaaagtgtccccaaaattttgtatgctgtcatagcaaaatctcctatatagaacctaattatttaaaaccagtatgctgtcctaattcaagatctttaagtatgaat

SEQ ID NO: 72324 - DNA, 243 bp, Glycine max
  Clone ID: 700836436H1
agaagttccaaaagaaacctttgaagttttaccccattgacatggatgatggaattgaagttagacatggggcactaggtcttcggcagctggggatagcagcaacacactgcaaacttgagccttggttgcaaattgtatgaaggtcttgtgcagccaggagatatataagtatgcattgatggagatgggttacgactgtccggaccttcgaataggaatggttacaaatcttcatctgaa

SEQ ID NO: 72325 - DNA, 247 bp, Glycine max
  Clone ID: 700836437H1
gattactgcaactgcagttgtacttgagtttaatcatgcagcaaggatagtgaagaaaatcaaattggttggttatccatgcaagatattcaagaagacagcacttatcaaggatatgtttactcagatcttgaagtagctcggtttgaaggtgcagctattcggacagtcagtgggatcagggggcaggtcaagaaggctgcaaaagaagagataggtaatcaagcgaaaaggtagggagggcaaa

SEQ ID NO: 72326 - DNA, 247 bp, Glycine max
  Clone ID: 700836438H1
cttctctaagttgctaagttaattgctccttcattttttcactcttcgttctcgcgtacccgtgtcacggtaactcgtggtgaagtgttcgaaaatgactgtcacacctaagatctcagttaacatgggaaacttgttgtccatggtaagaccattctgactggagtgccagacaacgttgtgctgactccaggttctggaaggggtcttgtgactggtgcttttgttggtgccacagcttcacaca

SEQ ID NO: 72327 - DNA, 245 bp, Glycine max
  Clone ID: 700836439H1
ggcaatttgtaagaaagatatttggagagttgaatgtggaatcccttctggatttccgctcacagttatttgcaatagcatttttaatgagatgctcattagatatagctatgagaaattattcgccaggctaaagctccaagtatgtttttacaatccttcaaaaattttgtttctttgtgtgtgtatggtgatgataacttaattagtgttcatgaatatgtcaagccttactttagtggttc

SEQ ID NO: 72328 - DNA, 246 bp, Glycine max
  Clone ID: 700836440H1
ggagagaaagagagagagagagagaaaaatggctgatacaagtggaggagatgcagtgagaccggtggtaatatgtgataacaagtgtggctgcacagttccatgcactggtggttccacttgaggtgcacaagtgtcggcatgacaactggaggcggtgatcacgtgacatgctcgtgcggagagtactgtgggtgcaatccatgctcatgtcccaagactgcggcttctggaactggttgcaga

SEQ ID NO: 72329 - DNA, 243 bp, Glycine max
  Clone ID: 700836441H1
aaacgacggagactaaatctctaaaacgcttgaaaccctaaaactctgtgtcctccgccgttcacatcattgtcgacgttcgttcagttgctcacactctcaacagagaagagaagagaatggaggaaggagctatagtccatcgcctcctcctccacgttacagcagaagaggaggagggaggagtcccagccctaggggccgctatcctccccgtccccgacaacaagatctccctaccag

SEQ ID NO: 72330 - DNA, 245 bp, Glycine max
  Clone ID: 700836442H1
cggtgattttagctagagtgatgctatcgctttgatcagccattttagtgggacctgagaagtgtcagtatgatctctggttcttgctcatttctaccacctttgtcctgcaactattttaaaccgtgggtctattaatgaataaggctgagcagcccatccatctgaaagtttctgcttcgatgccttcttttgctatgacagaaaattgatgttggattttgctggaccagcaggaacctgtt

SEQ ID NO: 72331 - DNA, 243 bp, Glycine max
  Clone ID: 700836444H1
attttgttcaaggaaaagatctcgcaatggttaaagttaatgtagcatgtgctgctgttggcttgacatcaagttacactccaactccattgttggaatctggtttgcaaaaagacagagggtaattgtggagtattttggaaggatgtcttacgttgctcataacattaatcagccccaagagaaagatttgttggagggaaatttttcctttgacattaaatctcgctctagattggaaaa

SEQ ID NO: 72332 - DNA, 245 bp, Glycine max
  Clone ID: 700836445H1
gttaaattagaatcggagatttaagctggaggaggatattctgaaatcccatccaatcgaaggctgtgaagtgtgtgatgcactctatccttctttctcttgaacccataattccatgactcgcgttgctcccactgcagcaacaacggccacaattcccggacatgcccttcgcgtgggggcggaggtgtgaagcttttcggggtcaggctgacggatggatcaatcattaagaagagcgccac

SEQ ID NO: 72333 - DNA, 250 bp, Glycine max
  Clone ID: 700836446H1
aaagttttatcatcattctttcatctgtgttgtgttgttttgtgtgtgcaatcctcattaccattgccgccgccaccaccaccgcctatcaccctctcatccaccaactgatacccgtaacttctcaccttcctctccttccccaatttaaaactaaataaaaaaactgtccactaaggttgaggcacgtcaccatctcgtccttcccctcgctcatctcaaatccatggttcggaattagggtttccat

SEQ ID NO: 72334 - DNA, 252 bp, Glycine max
  Clone ID: 700836448H1
gcttgaaattgtcgggagggaagagagtgcagcaaagaggagaaacaaggaagaacaagagagaaagtagaggcagagaaagcaagatcaatggagaaaactagagatgaagctaaaggaagagaacagctgaaaccaaaggtcaaaccaagaagggtggtggtgaggaacagggaagaagaagagaagaaataggagaagagaataaacaatccagcctcgaagagatttctaaatgcagagctgaagctg

SEQ ID NO: 72335 - DNA, 253 bp, Glycine max
  Clone ID: 700836449H1
tcttcatccttctctgttctcctagaacttgattacttgaacattccctatgacagatgaggtggttcttctggatttctggccaagtccatttgggatgagggtcaggattgcacttgctgaaaaggtatcgaatatgagtacaaagaagaggacttgaggaacaagagtcctcttctcttacaaatgaacccggttcacaagaagattccggttctcatccacaatggcaaacccatttccgaatccctca

SEQ ID NO: 72336 - DNA, 249 bp, Glycine max
  Clone ID: 700836450H1
ctcgagccggggcgaagcccgtctgatagcgctctgtgcgcgaactccgaaagggaaacgggttaaaattcctgatccgggacgtggcggctgacggcaacgttagggagtccggagacgtcggcggggccccggaaagagttatcttttctgtttaacagcctgcccaccctggaaacggctcagccggaggtagggtccagcggctggaagagcacagcacgtcgcgtggtgtgcggtgcgcccccg

SEQ ID NO: 72337 - DNA, 246 bp, Glycine max
  Clone ID: 700836454H1
cttctcttgcggctagggttttagcgcagttgcttctagatttaaggaagatgggtaaggaaaaggttcacatcagtattgtggtcattggccatgtcgactctgggaaatccactaccactggcacctgatttacaagcttggaggcattgacaagcgtgttattgagaggtttgagaaggaagctgctgagatgaacaagaggtctttcaagtatgcctgggtgctggacaaacttaaggctga

SEQ ID NO: 72338 - DNA, 248 bp, Glycine max
  Clone ID: 700836455H1
cgcgaggtcgccgccatgatccgcaccaagggcgaggccggcaccggcaacatcatcgaggccgttcgccacgtccgctccgtcatgagcgacattagggttctccgcaacatggacgacgacgggtcttcaccttcgccaagaacatcgctgcgccttatgacctcgtcatgcagaccaagcagcttggccgcctccccgttgtccacttcgccgccggcggagtcgccacccccgccgacgccgcg

SEQ ID NO: 72339 - DNA, 243 bp, Glycine max
  Clone ID: 700836457H1
agaaaacctaagcttagaattagaaacaaagaaaagaagaaaggaaagaattgatcgttgaaaatgcagggaggaaagaaagcgggagagtccattaaggaaacagctacaaacattggtgctctgccaaggctggcatggagaagaccaaggccactgtccaagagaaggcagaaagaatgacagcacgtgatccggtgcaaaaggagttggcaacccaaaagaaagaggcaaagatgaacc

SEQ ID NO: 72340 - DNA, 245 bp, Glycine max
  Clone ID: 700836460H1
caaaattccacagcggcccccagctaaagcaaactcaagactctagcctctttattaaggaccgtctcgtcttctcgatagtccgttagtatgctctgcggttgttgaatcttttttagattatcctgaacccttcaaaaccctcttatctctcttctatcgcttggcctgatattctttttggctgagagatcaagcaaaaatgagcgtggttggatttgattttggtaatgagagctgcattg

SEQ ID NO: 72341 - DNA, 247 bp, Glycine max
  Clone ID: 700836461H1
ctaggatattggagttcttgagtcctgaaataagccgaacatcactgtaggttggtattgtcaaagatatacgtgagtctatgcttgaagaagttgacttttacaaggaggctgcaaatattgagcttttaggagatatttagaaacaatgggacttactgggaatgcaacagctccaaaagtgtatcgatactgcagtacaatgaaagttttaactatgcaaagactatatggagttcctcttact

SEQ ID NO: 72342 - DNA, 246 bp, Glycine max
  Clone ID: 700836462H1
aacttaattagtgttcatgaatatgtcaagccttactttagtggttctaaattgaaaagctttctagctggtcataatatcaccattactgatggtattgacaaaactagtgcaactttgcaattagaaagttagcagattgtgattttctcaagagaaactttaagcagatgtctaatgttttgtgggtggctcctgaagacaaggcgagtttatggtcacaacttcattatgtttcgtgtaata

SEQ ID NO: 72343 - DNA, 250 bp, Glycine max
  Clone ID: 700836463H1
ttcctcctccgtcgttgacgacagcgacgacaacatcgtttcctcgtcgtttcgacctcccttgccgttcgatctcaacgcgctgccgtttgatgatgatgctgccgtcgtggatgatgatctacgtgcaccgcgctttgtctctgatgattatcgtgcgatgatgatttttaatttctcattttttttatctcttcaacttgattttttgttattgctatgagggaaaaaatatattaaaaaaatgatc

SEQ ID NO: 72344 - DNA, 252 bp, Glycine max
  Clone ID: 700836465H1
caagaaagaacttccttataaccaaaaccaacaacaactatggcaagttatcagaagcactacgatgatcagggtcgcaaggtcgacgagtatggcaatgttgagaggcaaactgacgaatatggcacccggttcatgccactagtgtcacttatgtagccaccaaaagtgttggtggctacaatgatgacgctaataagcaacatgatattactggtgtctatcccgagaaagacaccggtagacatcatt

SEQ ID NO: 72345 - DNA, 248 bp, Glycine max
  Clone ID: 700836467H1
gacaagagtcaggttcatgaggttgtgcttgttggaggttccactaggatccccaaggttcagcaactcttacaggatttcttcaacgggaaagagctttgcaagagtattaaccccgatgaactgtggcgtacggtgctgctgttcaggccgcgatcttgagcggcgaaggagacgagaaggttcaggatttattgctgctggatgttacaccactcagtctcggtcttgaaactgctggtggtgtc

SEQ ID NO: 72346 - DNA, 243 bp, Glycine max
  Clone ID: 700836468H1
cttgttgtttggagcgatccgagaaaaactctgtaaacatgttggtttaccaggacctccttacaggtgatgagcttctctctgactccttccgttacaaggaaattgagaatggaatgctggggaagttgaggggaagtgggttgttaaaggagcagttgatgtagacattggtgcaaacccttctgctgagggtggaggagaagatgagggagttgatgatgcagctgttaaggttgttga

SEQ ID NO: 72347 - DNA, 243 bp, Glycine max
  Clone ID: 700836469H1
aggaattgatcttcccaatagaggtatgtggtcctaataatggttttgaaatgtggagttctgagtgggcaaatcaaacttcatggcatttgagtttccttattgacaatcccaaacagtctcagtttttgatattctcttgggaatctctcaagattttgaaattgctggtaatactcttatgccagctttttctgttccacaggctactgccagatcttctgaaaatgcggaatcctctgc

SEQ ID NO: 72348 - DNA, 73 bp, Glycine max
  Clone ID: 700836470H1
gtaattcagcatgtaagatgtaatgtcatgttgttgatttctttgctttgtctggtcttttgttgaaaaggga

SEQ ID NO: 72349 - DNA, 245 bp, Glycine max
  Clone ID: 700836471H1
caaatacggcgacgttttcaaagtctccgacgaactcgctttcaaacccatcgcgccaagagacgcagctctcatgcaagccacggagaaccaagcattgggccaaactcaaaaaggaggtccgcctcggtgatgcaatccgccgcaaccgaaaacctccgcgccggcgtcgtgggccgccaagacatctccgacgtggcgaggaacgaaggcgtgagcgtgaccgaaaccaaagtgggctgcca

SEQ ID NO: 72350 - DNA, 244 bp, Glycine max
  Clone ID: 700836472H1
cattttagctttctcttccttcataatttctcacctttcaaatctccattcagcttcattttctgcatagaaaaaacccttttctggagaaagaatatagtcttcagctggacaaggatcatcatcttgaaagaagagtttgtgtgtgacaatctttatagttctaaggagggtgcaagagagaactgaatttgctgtgatggcaactcgtagatatgcttttggaagagctgatgaggccact

SEQ ID NO: 72351 - DNA, 242 bp, Glycine max
  Clone ID: 700836473H1
aatcatctaactcaagaatcagatatttatagatttggtattagcttgtctggatataattaccggaaggaaagagatttacaattaaaaatctgcaggagagcagaatattgttacgtggtaagaaaatcgtattgttatttcttctcataggtctggctcattcgaaagcctgagagtacaatagtgaattgttaaataaacattgtggatagtttcattcgcatagtaatagtaataat

SEQ ID NO: 72352 - DNA, 245 bp, Glycine max
  Clone ID: 700836476H1
gacatttctcacctgacatgtgcagatttccttcgagcccctggagttcagacgcctgtaattgttcgtttctcaactgtcattcatgagcgtggtagccctgaaaccttgagggaccctcgaggttttgccgtgaagttttacaccagagagggtaactttgaccttgttggaaacaaccttcccgtcttctttgtacgtgacggcatgaaatttccagatatggttcatgctcttaaacccaa

SEQ ID NO: 72353 - DNA, 234 bp, Glycine max
  Clone ID: 700836480H1
cgcagagtagagcagcacagaagagggaaaacggcaccgccgccgtagaagaaaacaaccatggtgcacgtctccttttacaggaactatgggaagacattcaagaagccgcgtcgtccgtacgagaggagcgtctcgacgcggagttgaagctggttggtgagtacgggcttcggtgcaagagaaaactgtggacggtgcagtacgcgctcagccgcatccgcaacaacgcgc

SEQ ID NO: 72354 - DNA, 252 bp, Glycine max
  Clone ID: 700836481H1
gctagctagctagcaagcaagcacagagatggaggcaaagcgaggccatgccctcatgtgcttggcacgtgtttcactcttcctctgcgctctaaccctatccgctgctcacggaagcaccacggtcaagacatcgcgagaaagttgaaactcggggacaacgagcttctgcgcacgatgaagaagttcaaggttttcatggagaattacgggaggagctactccacagaggaggagtatttgcgccgtttg

SEQ ID NO: 72355 - DNA, 245 bp, Glycine max
  Clone ID: 700836482H1
ttcgagcgattcggctcgagcggtttcgagcgagagaggaacgttgttgggttcgactccagcggcggcttcgaatccgacaattggaacacaaagaagggcgagtccaacgttggtagcgaggagttggtgggaggccgaagcttgtgttgcaacctcggacagtgtccgtgagcgatgaaggggttgatggcaataatgcggggaagcctaaaggtgttaatccgttcggagaggcgaggccg

SEQ ID NO: 72356 - DNA, 248 bp, Glycine max
  Clone ID: 700836483H1
aaaacttaaatcaaaatacttaatagcatggcgatacatttatacaaaacttctaccccaagcacacgcaatggagccgtagacagtcaagtaaaatccaatccacgaaatcatttgatctatgacagcatcgttgtggtaaaggccgtaatgccagaggaatcattaccgcagggcatagagggggaggtcataagcgtctataccgtaaaattgattttcgacggtatgaaaaaaacatatatggt

SEQ ID NO: 72357 - DNA, 238 bp, Glycine max
  Clone ID: 700836484H1
cctcccgtgactgtttgttaagaagtttaacctgattgtcacaatcttttctttcatttgcatagtcattatttgaatatcaattcttaaagattcttaaagcatatagatcactaatataaatatgcatcataacctatggtatgaaagttggttttgtgggagagttttcgctgttttcaactggtgatgtatatgggatttggtacccttgtacctatatatcatatatgtttta

SEQ ID NO: 72358 - DNA, 333 bp, Glycine max
  Clone ID: 700764269H1
cttcttaaaagttaaaaaggccaaggtcctgaatctcacagagacagagagaatgagtacggtgggagaagggaaggtgagtagtaatggtcatggatgttgcaaatcagggccatgctatgcttccccactggaagccatttctggtcgcagagagtctctcatttatgtaacctctgtctacaccagggacgggaatagagaagccagatcatttgccgacattggatgtgaatccaattctccagctaattccaaagtcatccataggcttcctgtacctaatttaggtaacgaattgcatcacacaggctggaattcatgcagctcttg

SEQ ID NO: 72359 - DNA, 332 bp, Glycine max
  Clone ID: 700764270H1
gtgatgtgatgtgatgtgatgtgatggagtctacaaaggaacaatctggaatgctgcacaagatcctacctccacgtctagaagatgccggcctcgaagatcctgcccttccacccgattccatccacgaagcttttctgaaggccgccgccgccgtcaaatcacgcgccgcttccattttctcctccaccgacgacgacaaacgacggaggttgcgtcagcgacccgtggcccagcgccaaggacgcctccgatgcagtcatcggagtcgaatcggaaaacgaactgccgggatcctgcatcgtagagaggggagtcgagcctgtcgccga

SEQ ID NO: 72360 - DNA, 321 bp, Glycine max
  Clone ID: 700764271H1
atcaaagaaaggggtggtggctgcttcgaaagctttataatttgtttatttccagaacatcatagttttcgcagcagcaaactaacaaattactcatatcatataataagatggcccgttctctctcgcaagccaaacgtattggtgtccttgttgctcaatctatctccctaattcccgttcatcggcgaggttacgcagtggcatccgatgtatcggtaagagttggattgggtaatattgggcgaaggaatggaatcgtgggaggtgtagaagagaagcctgatacaagagatggttcaaaagcctactcaactgatt

SEQ ID NO: 72361 - DNA, 280 bp, Glycine max
  unsure (1)..(280): unsure at all n locations
  Clone ID: 700764272H1
tcggaatcggctcgagcgaggcaccaacttctcatatgtcccgacaanaggaatggtgggtttatctctctggagaaacgcatttcatccaaggtggcattgctcaagatcttcgttgtgatggtagaaaagagatgacatatcgaccaatctctgttgaaactggagtgatctccagaccaatgttcagcagagtcgaatgggtccacagatgttattccagcgtaaggctaacttnacagccagcttgttcaactgacaaggaaagtctctatatata

SEQ ID NO: 72362 - DNA, 302 bp, Glycine max
  Clone ID: 700764273H1
gctcggatatcggctcgagacaattacacggttcaatgaatagtcggtgataaacaaacgaagtctctgcaaaacgcgatcgattcttctgtcgacagatgaagttcactgcactgaattctacgtttcgccgcgctctgctcaatggccggaaccataacggtaaccgcctcggttcagcggcgctgatgccgtatgcgtcggcggatacgaggctcctctgcgccggaccaaaacggattgttcttctactggaagaggacgatggtttcgccggcggaggcgaactgccggagcaggag

SEQ ID NO: 72363 - DNA, 292 bp, Glycine max
  Clone ID: 700764274H1
gtgaattcatggaaaggcacactgtctccaaacttattggttcacctcctggatatgttggttacactgaaggtggtcaattgaccgaggcagttcggcgtcgtccttacactgttgtactgtttgatgagattgagaaagcccatcctgatgtgttcaacatgatgcttcagatcctggaagatggaagactaacagacagtaagggcagaacagtggatttcaagaacacacttcttataatgacatcaaatgttggaagcagtgtgattgagaaaggaggccgcaaaat

SEQ ID NO: 72364 - DNA, 283 bp, Glycine max
  unsure (1)..(283): unsure at all n locations
  Clone ID: 700764275H1
caactccaagaagtccacggtcgatgtcgagctctccagcctcggtggcggcatgaacatctcccgtcatcatgcccgtatcttctacgactacgcccgncgtcgcttcgccctcgaggtcctcggcaaaaacggctgcctcgtagagggcgtcctccatctccccggcataccccccgtcaagctcgattctcaagatctcctccagattggggacaaggacttctacttactcctgctcgttcgcagcatccttattcggcccgtcggtacgaggcattag

SEQ ID NO: 72365 - DNA, 291 bp, Glycine max
  unsure (1)..(291): unsure at all n locations
  Clone ID: 700764276H1
canaccttgctctatactacacagtacacacactagaagaataatggcttccatcctccactactttttagccctctctctttcttgctcttgtcttgtctgcttatccgactcagtcacccctacaaaaccaataaaccttgttgttctacccgttcaaaatgatggttccacagggctccattgggccaacctccaaaaaagaacccctctaatgcaagtaccagtcctggtggacctcaatggaaatcacttgtgggttaactgtgagcagcagtactcatccaaaac

SEQ ID NO: 72366 - DNA, 326 bp, Glycine max
  unsure (1)..(326): unsure at all n locations
  Clone ID: 700764278H1
ggatttatgatctctttcacttcggccatgcacgttctctcgagcaagccaaaaaaactgtttccaaacacttatctccttgttggatgctgcaatgatgagatcacacataagtatanaggcaaaactgtcatgactgagaaggaacgctatgagtctcttcgccactgcaggtgggttgatgaagttattccagatgcgccatgggtaatcacttcgggagttccttgacaagcatcaaattgactatgtggcacatgatagtcttccgtaagttatgctgatgcaagtggagctggaaaggatgtgtatgaatatgttaagtc

SEQ ID NO: 72367 - DNA, 319 bp, Glycine max
  Clone ID: 700764279H1
ctagtcctgagtgtccatggcacatagagcaccgtatgcatgagttagacttactagcaaatctacttatctatagtctgacatgtcattttcgagtgcgatgactcagtgtgatcctaaactatttggataatttcaagcaggatcccaagctatttgtgttatcatcatttcactatgagagttgacaatgagcagatagtttacggactaatgtagcttagagcatctaatttacttacacatgcctatatcatggttctatcagaagatgtatctacaactaccattgcaggtgtggatactctgtaatgactgt

SEQ ID NO: 72368 - DNA, 321 bp, Glycine max
  Clone ID: 700764280H1
cggctcgagttgatggtcttgcgtctcgctcagctgcatactaccagcaaggtgcgcgtttcgccaaatggcgtactgttgtcagcatccccaacggtccctctgctctggcagtgaaggaagctgcctggggtctagctcgctatgctgcaatttcacaggagaacgggttggtcccaattgtggagccagagatcttgcttgatggtgagcatgggattgacaggacattcgaagtagcccaaaaggtgtggtcagaggtattcttctacctggctgagaacaatgtcctgttggaaggtattctcctcaagcctagca

SEQ ID NO: 72369 - DNA, 297 bp, Glycine max
  Clone ID: 700764281H1
cttgtttatcggaacgttgctataaacgttgttgttttcagataaacacgtgactcactatctatctatcaatcgatatctccgagttcagccgaaccaaactccgaagctatggcagagctccaaaccaaggttgaacctgttacggtcccggctccggtggatcccgagccaccgctagctgaggctccgccgctcgagaagaaagcggtggcggtgccacacctgttccggctgcggcagaggaaaccaaagctcttgttattgtggagaaggagaaggagaatgagaagatac

SEQ ID NO: 72370 - DNA, 318 bp, Glycine max
  Clone ID: 700764282H1
catattcagcaagagtgctaagtacagtttattcgatccatgcaaagaaatggcctacatacccttggatgaggataccaaggtcaaggggaaggcagccattgatgttgtgtgcaacccattggggaaatctggaggagctctaattcagcagttcatgatcttaacttttggttcactagctaactcaactccgtacctgaggagggtccttctggtgattgtacttgccctggtatcagcagccaagtcgcttgatacacagtttactgcctttcgtcgagaagaagaacttgagaaagagatggagagagcagc

SEQ ID NO: 72371 - DNA, 326 bp, Glycine max
  Clone ID: 700764283H1
cacacaactactacaagtacttccttacaatcaacaccaacaacaactatggcaagttatcaccagcactacgatgatcagggtcgcaacgttgacgagtatggcaacgttgcgaagcaaaccgacgaatacggcaaacctgtgcatgctgctagtcgtcactatgtagccaccacaactactgctagtggttacagtgatgacattaataagcaacatgataccatcaatgcctacggcgtagacactggtcgacagcattctagtcgtagctacgatggtgacactaactaacatcatcgaactactggtggctataatgatga

SEQ ID NO: 72372 - DNA, 192 bp, Glycine max
  Clone ID: 700764284H1
atttgagaaggtgttgagtgccagtgacgcatgtcgaattggccgtcttgttctcccaaaagcctgtgctgaggcatattttcctcctatttcacaatctgaaggtgttcctttgcgaatgcaagatgtgaaggggaatgagtggacatttcagttcagattttgggctaataacaacagcaagatgtatgt

SEQ ID NO: 72373 - DNA, 328 bp, Glycine max
  Clone ID: 700764286H1
agataatcttcatctaaacataaaaatcactttcccctgctagattctcgctagtacaatcatagaatccgagtttttgtgggttgcattgttgtgagaagatgagaagagttggtggtgatgttttgaacgtggatttggctgctgcagtgaacaacctcttcaatcttcctgaaactatggagaagttcatgtttccttcttctcgtgctcatgatcaccaccatgaaaccagaggggtctctagcatcattccagtggacattttggacactcccaaggagtatacattctttatggatgttcctggtctctccaagtctgaaat

SEQ ID NO: 72374 - DNA, 327 bp, Glycine max
  unsure (1)..(327): unsure at all n locations
  Clone ID: 700764287H1
cacgccaccaagcccaagaagaagaaggcccagacctactccctcgccgaattcaccgccaagcccgactccgccttcgccgaccaagatcccgtcgtcctccccaccggcccccgccagcgcaccgccgaggagctcgaccgcacccgtctcggtggcggcttccgcaactatggcgatccncccaacaggaataactcctccggcggcgacgagtcttccaattcccgctggggttcatctagggtttctgacgagcccaggagaaacggttttggggctagggattccaatcgcgagctatccccttcgcgcgctgacgaaact

SEQ ID NO: 72375 - DNA, 290 bp, Glycine max
  Clone ID: 700764288H1
ctcggagagaaagagagagagagagagaaaaatggctgatacaagtggaggagatgcagtgagaccggtggtaatatgtgataacaagtgtggctgcacagttccatgcactggtggttccacttgcaggtgcacaagtgtcggcatgacaactggaggcggtgatcacgtgacatgctcgtgcggagagtactgtgggtgcaatccatgctcatgtcccaagactgcggcttctggaactggttgcagatgtggcacagattgctcatgtgcctcttgccgcacttaac

SEQ ID NO: 72376 - DNA, 338 bp, Glycine max
  Clone ID: 700764290H1
tcggaagcggctcgagaacctggttgggtggaggaattgaccttgatggtcaagactaagcaaaaggctgaaatacaggctttgagcacttttggttttcagtatctgtcagaagtgtatgtgcccttgaagttgcagcagaaagattggctttgacctgtgaataatgtagtaatatctaagaattaaaatggtggttatgccactacttagcccaacagcttagtcatgctatagtatctctgcaagttgcaccagaatgtggtaaatttttaagtatccttcattgaaaaattgttaaaaaattatgttgatcgcctgtttttcagactgagttt

SEQ ID NO: 72377 - DNA, 288 bp, Glycine max
  Clone ID: 700764291H1
ggcaaactgacgaatatggcaacccggttcatgccactagtgtcacttatgttgccaccaaaagtgttggtggctaaatgatgacgctaatagcacatgatatactggttctacgcgagaaagcacggtagacatcatttgtcgtggtacgaggtgaactaacaacaacatgatgctactggtgttatccggatagacattgtgagatcatgactacggtgttatggctatacacgacagacatcatggactctggggtgatccgggataacaccataacgacacatg

SEQ ID NO: 72378 - DNA, 322 bp, Glycine max
  unsure (1)..(322): unsure at all n locations
  Clone ID: 700764295H1
ctcttctgcgcctgacctccaccgtcgtctgagtcgcgccgccgttttgcttcgccggatttctcctatgttcgcctaacgagacagagtgaatcctgaatcgcacttcgaacgtgttctcttcgacatcttcacttaagccttcgatttgtcagataagatgcttccgagggctttattggccaaattcattctcaaaccctccactgtttctccattccagttcaatcagcagagagcattgcatagtaggaacaagaaagccttggagttcattgcanaaggctggaatgctttgaaggaggttgatagagtcatcgat

SEQ ID NO: 72379 - DNA, 306 bp, Glycine max
  unsure (1)..(306): unsure at all n locations
  Clone ID: 700764296H1
ctcaagtctctcgaagcctctttctctctcttctagaagctatctgtgtttggtgttactaagtctccaacaagcanagtacatggttgatttggaaatccaggtcnccaccccattcgacccgtttgccgaggcgagagaatcggatgcccccggagcaaaggagtatgtgcatattcgaattcagcagaggaatgggaagaagagtctgaccacagtgcaagggctgaagaaggagttcagctacgagaagatcctcaaggacctcaagaaggagttctgctgctacggaaccgtggtgcagga

SEQ ID NO: 72380 - DNA, 307 bp, Glycine max
  Clone ID: 700764102H1
gagagacactctagaatttgcatgcactgttcttcatacaatggcattacgcgagcttcttatgatggggatattgctgctggtatgtcttgctaaggtttcatctgatgttaacaatgcaaaggaagaagatgaagaacttcgctttcctaatcaccctcttatcgtgagagacggggacagaaggctaatgcaagacatagattgcggaggattgtgcaagacaaggtgcagtgcccattcgaggccaaacgtgtgcaacagggcttgtggcacgtgttgtgtgaagtgcagtgtgttcccccag

SEQ ID NO: 72381 - DNA, 248 bp, Glycine max
  Clone ID: 700764103H1
tgcagatttacatgtatctttacattatctattgggagcttgacaatatattcctatgcacatatcttaatgtattatctatccgattactccatctggctagtttgtgtacttacctgggattgactatcatgtatgtaacagtatagtagatcatgctagaatgatgcactacgaataagtcactgcccgtttatcccattgttgtgatactcgtgcatgtatcgctttctcgttgtagtcagtgt

SEQ ID NO: 72382 - DNA, 183 bp, Glycine max
  unsure (1)..(183): unsure at all n locations
  Clone ID: 700764104H1
aatattcanaccttgctctatactacacagtacacacactagaagaatattggcttccatcctccactacttttgtagcctctctctttcttgatgctttcttttcttcttatccgactcagtcacacctagaaaatcaataaaccttgttggtctacacgttcaaaatgatggttccacagg

SEQ ID NO: 72383 - DNA, 283 bp, Glycine max
  Clone ID: 700764106H1
cgactttgtttcccaatttccattgcctccgcttccacctcgcaaccatgatcatcccggagaagaaccgcaaggagatctgcaaatacctcttccaagagggagtttgcttcgcgaagaaggacttcaatttggccaagcaccctgagatcgacgtgccgaatctgcaggtgattaagctgatgcagagtttcaagtctcgcgagtacgtgagatgaacttttgcttggatgcactattactggttcctcaccaacgatggcatcgagtttctcagaactta

SEQ ID NO: 72384 - DNA, 321 bp, Glycine max
  unsure (1)..(321): unsure at all n locations
  Clone ID: 700764107H1
cttcttcactattttctcagttatcgtgaccttatcccaaccctattctgttgcgaaggtgcttctgggctgttgtcagatcaatccacaaccctctcttgttggtgttttggctcttcctgtatcatggatggtattcatgggggtgattctcggatacacataactgatggacagcatcctatacacgtgccatatgtgcaagaacacgagcatcatggactccacatataagcaatggcgatgggatagatgatgatcataatgatggtggtgatactaactgtggtgnaagtgagagtatggcaagtgagtccctcc

SEQ ID NO: 72385 - DNA, 276 bp, Glycine max
  unsure (1)..(276): unsure at all n locations
  Clone ID: 700764110H1
tagacaataaaatggttaagttagttattnttaattaatgatatcataactttaaattttatttcaaaaatacgcatggaattaattggtttaagtgatagttgtatttaatgacactactcatttntcatggggtagctttttcaccaatgagtaagacttatctcattaatagtccttataatanataaggtatagaaggagattaacatttaatgcacttannagtgatcatatgtgtcctatatttaggggacaaaaaatatctccattgtt

SEQ ID NO: 72386 - DNA, 260 bp, Glycine max
  unsure (1)..(260): unsure at all n locations
  Clone ID: 700764111H1
cgcaggatatcatatgattgtttagagtataaaaaagtaatgcctgcccaatagaattgaaatctgtaaatgttgcagagagcattagccaatgaatcatatacatttctttatataggttaatccaattgcttacttgtcttcggtgatatntatgnttattcaagtgctctggaaaacttggattnttaataaccaagatatctgcttgcagcttgggacaccatgagcacgagactacagtgctgtcatatactcgt

SEQ ID NO: 72387 - DNA, 295 bp, Glycine max
  unsure (1)..(295): unsure at all n locations
  Clone ID: 700764112H1
tgtgcatcagaatcacattcaatttgctctagaaagaggaattcccggatatcttggtgtcctgggaactaagagactcccttacccaagcagatcttttgagctcgctcattgttctcgttgtcgaattgattggcttcaaagagatggaattctacttcttgaactagaccggttgctaaaggcagaggnntatttgcatactcatctctgaagcatatgctccagatgaagaggtctaaggatatggaagaatgagtgacttgtgggcgtattgtggaaatactgcaagagg

SEQ ID NO: 72388 - DNA, 317 bp, Glycine max
  unsure (1)..(317): unsure at all n locations
  Clone ID: 700764113H1
cgagccgaatcggctcgagtccaagaactcgccgaagaacaccgtgataatgatcgacgctggaagcacgtcggtcgacgtcgtgtactccgacggcagccgcgagatcaacgtcggcaccgttgcggtggacccacgctcatttcaagagctgctcacgctcctcagccacggatcgggatctcgcgnaccagttctccgtctacctcgcgccgtcggtatcgccgcaagattcggtcacggcgagctcatctcgccctgtgagccgcgacgggcgctcactattcttcgtgagcgctccagcgcacaagaggcga

SEQ ID NO: 72389 - DNA, 287 bp, Glycine max
  Clone ID: 700764114H1
ttgaggctttgattatgtctttccaatctctgtggctaagaagcttcggcagctccaatctcttgatatgaagcgctgtgtcataaagaatattgttgaagaaagtgatagttctgatatgacgaatatttaccttgcacagttatcagtagatagctgtgataatatgaataccatagtccagccctccgtgctatttcagaatttagatgaattggtgggtaacgaggctcacaagctttgccggggaattacacttctactttcatcactaggatggtacattg

SEQ ID NO: 72390 - DNA, 303 bp, Glycine max
  Clone ID: 700764116H1
cggctcgatgttatcagaagcactacgatgatcagggtcgcaaggttgacgagtatggcaacgttgagaagcaaaccgacgaatacggcaaccctgttcatgctgctagtgtcacctatgtagccaccagaactgctgctggtggttacagtgatgacattaataagcaacatgataccaccatggctacggcgtagacaactggtagacagcattctagtggtggctacgatggtgacactaataaacatcatggaactactggtggctataatgatgacaccaatagacatcatggaacta

SEQ ID NO: 72391 - DNA, 269 bp, Glycine max
  unsure (1)..(269): unsure at all n locations
  Clone ID: 700764118H1
gtgcattactataaccagccctcatcaatgcctatggccccaatatctcgacaataaaattcccagtcctagatcttttcggcgtaaggttgcttagaaaaagccttcataccttcacccataaccttggtatggtaatctgattcttctacagtctggtgtgcacagtaaagtgcttgtaactttagtttgtggctggtactaatctccctggagctagataatttcattgtgttacaccgnagataacgggtttgtactattgttga

SEQ ID NO: 72392 - DNA, 242 bp, Glycine max
  unsure (1)..(242): unsure at all n locations
  Clone ID: 700764119H1
agctcctgaggacaaggcgagtttatggtcacaacttcattatgtttcgtgtaataatctggaaatgcaagaagcttatcttgtcaatctcgtaaatgtgttacgagaattgtatttgcacagtccagaggaaagctcgccaattgagagganagctctctctcgtaatgaatggctgcaaaaagctgatgtgcctaccatagcacagattgaaagagttcattcgatgcagaggatgatga

SEQ ID NO: 72393 - DNA, 131 bp, Glycine max
  unsure (1)..(131): unsure at all n locations
  Clone ID: 700764120H1
gagatagcagtatntttttctctctctcttttggactanaaagaatagtctagtcatttggtgaaaaaaaaaaaaacccaattcaggtggccaaagggatcgagcccagaaacaaaaattaatgtgaaagt

SEQ ID NO: 72394 - DNA, 344 bp, Glycine max
  unsure (1)..(344): unsure at all n locations
  Clone ID: 700764122H1
tgtntatcttgtcttcacctcactccttcccaaagttaatctacctgatctttttattgcaggttggctatgtgactaccatatgcttttcatgcttccttatcagatgtgttatggtcagtccctttttctttaaaaacctcagcaattccctgtgcatggttcttaaattgagtctgattatagtgtgtcagatgtgctttaatgcatntgatanagctgccgaccttgatgtcttgtaccatcccatctgaatttatgtattacctgtagtggannatatgcttctacttagtcctttcatttgaggagctcctccaagcgtgtatcatcatatcaccatc

SEQ ID NO: 72395 - DNA, 307 bp, Glycine max
  unsure (1)..(307): unsure at all n locations
  Clone ID: 700764123H1
tgttggcanagtgctacaaaactggtctatccattttggatgatgatgtttttgaagtagaccaaccacgagacctttttctctactgttattatggaggtatgatatgcattggacagaagcactttcagaaggcattggacctcctgcataatngtgtaactgctcccatgtctaccataaatgctatagctgttgaagcttacaaaaagtatatattggtttctctcattcgtcatggacagttctcaaccagtcttcccctagtatctnnctcgactgctcaaaggaaccctgagactttgtc

SEQ ID NO: 72396 - DNA, 254 bp, Glycine max
  Clone ID: 700764124H1
aggatgttcaggtgatgagtgaaggacctgtacacatcccaatgcacaagattcctgaaaacatgcatgaacagttagaatggtgtagtgaagcgcctttttacactcttggtcctttaactaatgatattgaacacggctatgatcacatcacctctgcaattggtgctgccagtatgggggcacttggtactgctcttctctgttatgtgactccaagtaacatcttgggttgcctaacgggatgacgtgaa

SEQ ID NO: 72397 - DNA, 251 bp, Glycine max
  unsure (1)..(251): unsure at all n locations
  Clone ID: 700764125H1
cgacttatctctcttctcacttctgttgttataagtaacttccctcatcattacaaaacaatcctccacaggtttcaaaatgctgaaatcgggcatgggaattgaggagaganagcaagtgaagaagccagcacaagccagctcgagaaaagggtgtatgagagggnaaggaggtccgagaatgctagttgaacctgacaagtgtgaggcagagaacatgcggaaatgnggtgctgaaatcgtgaacccat

SEQ ID NO: 72398 - DNA, 335 bp, Glycine max
  unsure (1)..(335): unsure at all n locations
  Clone ID: 700764126H1
atcaactttcncttcgatctcattctcaggtgttgttgaagcttactgtgttggcttggtatccctgcaagttctgctgtagcagattccaaggtgaaggtgtcacgtttaagtttctttcatgtatgaacaggctactatncatttgggagcaactgagctgcttggagagtatttttcttcctctagataaaattcagacctcaccacagagatttagtgtatgaacgttggcaccttccatatcttgaagagatgttcaggtacagctaccttgagttgaatgcggtgatatatttgattcagctttctgctctgatatcttggaattgtag

SEQ ID NO: 72399 - DNA, 235 bp, Glycine max
  unsure (1)..(235): unsure at all n locations
  Clone ID: 700764127H1
cgtcaagatgtaccagggtggtgctggtccagacgtgggtggtgcaatggacgatgatgttcctgctgctggaagcggtgcggggccaaagattgaggaagtagactaaatttagtttatttctgcttttgatttactatttatttttaaatgtctgatttcatgtcctttggttggatttagtttctcaagaaagacaatatttggtagtatgtcatgtcngattatgttttca

SEQ ID NO: 72400 - DNA, 337 bp, Glycine max
  unsure (1)..(337): unsure at all n locations
  Clone ID: 700764128H1
taaatatccacgtttctttttccacacactatcttaatttatgnaaacattnntntttcaaagcaattagaatttagaccaccattggaacacagttgagatgtacggacagagtagtagtagcagtagttcttacgaatcggatttggcgctgttggattcgattctgcaccacttgctgggcgagtccgaatccatatacggcgacccgaatttcgggtcgggtcggagctccagtggcagcaccttggactcgtgtttgagcgacaattggggcgagcttccgtttaaggaggacgatactagagacatggtgttgtacgccgttctcgtgacg

SEQ ID NO: 72401 - DNA, 369 bp, Glycine max
  unsure (1)..(369): unsure at all n locations
  Clone ID: 700764130H1
taggatctaccctgcacttggttttgaggcttcgtggtggcatgcaaatctttgttaagactttgaccggaaaaacaataactttagaagttgaaagttctgataccatcgataacgtgaaggcaaagatacaggacaaagaggggattccaccagaccagcagaggcttatctttgctgggaagcagctggaagatggtcgtactcttgctgattataatatccagaaggagtccactctgcatttggtgttgaggcttcgtggaggtatgcagatatttgtgaagactctgacagggaagaccattaccttggaggtgganagctctgnatactattgacatgtgaaagctaagattcaggacaagg

SEQ ID NO: 72402 - DNA, 277 bp, Glycine max
  Clone ID: 700764131H1
acaacctaagacgcgctgcttcactattctccctatggagtttaatcttgtggttcgtcagaagtttttaaattttgtgaggttcattatgaagaaaagggacaagcttagttgtcaagttggaatcaacccatactccatggaatggactggtttggccaatagattactgagcaagggcaacgatattctgtgttgcgattatgctagttttgatggtttgattaccaagcaagttatgagcaagatggcagaaatgataaacagtctttgtggt

SEQ ID NO: 72403 - DNA, 337 bp, Glycine max
  unsure (1)..(337): unsure at all n locations
  Clone ID: 700764132H1
tgatcttcttctatccccaccaccgtgcaccaccatctctccaccgcaggcaaccgcaccacgttaccgctaccaacactccactatgtcgccgtcaccgaccaaggtcacggcatcntcacccaccctttcagcaaatatatagcgttacgaaatggggccccagttggaatcgctgaagatatgatgctccggcaagatttcgacgtcgaatacttcgatggtgatgtcagatctgcagtcaatttctgaccagagatctgtgcgatgcagtacattgcctagatggtgcaggacatgccttccaccgacgccacagttgtcgtgaagtaacggc

SEQ ID NO: 72404 - DNA, 251 bp, Glycine max
  unsure (1)..(251): unsure at all n locations
  Clone ID: 700764134H1
tgaagggggaatctcttcttcaatggcggcagagtcatctcgcagtagcgctaaacgcccctttatggaagaagacgacaatgaattctccaaaaagccaccagaaaaaaggggtaggtttccaaagggatagacagtggagctaggagatgaagtggtggtggacaagcagatgttgaggagggtgaagttgacttggtgaatgctanaactgccaccaatgctgcaagagagcgggaaaaactcagaag

SEQ ID NO: 72405 - DNA, 306 bp, Glycine max
  unsure (1)..(306): unsure at all n locations
  Clone ID: 700764135H1
tgtgtgtggttgctgcggcggcaatggcggacacttggcatcgatattcgggacggagaaggacagggtgaactgcccgttctacttcaagatcggcgcgtgcaggcacggcgaccggtgctcgcgtcntcacacgaagccgagcataagctccactatttctcctctcaacatgtaccagcgccctgacatgatcacccncggcgtcgacgcncacggccaccttatcgancctcgcaaaatccaggtacacttcgaggagttctacgcagtactcttcgacgagctctccaagtaccgtgatat

SEQ ID NO: 72406 - DNA, 327 bp, Glycine max
  unsure (1)..(327): unsure at all n locations
  Clone ID: 700764136H1
gtananaagaaggatttagtgggaagagagcggaacaaagaggagaaacaaagaagcagtccaagaggaaaagtagaggcagagaaagcaagaccaatggaagaaacaaaggtggaagctanaggaagagataaagatgtaacacaagagggtggtgttgaggaacaaggaagaggaagacaagaaaatgaacaatctagcttgaaagacatgtcgaagtacagagctgaagctcaacaagattcattcaatgctactgaagctgctaagggaagatacgagagggcaaacaagcgacagtgaagctgcaaagagagaagcagcagg

SEQ ID NO: 72407 - DNA, 335 bp, Glycine max
  unsure (1)..(335): unsure at all n locations
  Clone ID: 700764138H1
agaaacctaagcttagaattagaaacaaagataagaagaaaggaaagaattgatcgttgaaaatgcagggaggaaagaaagcgggagagtccattaaggaaacagctacaaacattggtgcttctgccaaggctggcatggagaagaccaaggcactgtccaagagaaggcaganagaatgacagcacgtgatccggtgcnaaaggagttggcaaccannagatagaggcaagatgaacaggcggactggacaaagcagcgcgcgtcagcataacacggcggcaacagtcgccacacggctggcacatgggcatggcaccacacacggaacggga

SEQ ID NO: 72408 - DNA, 350 bp, Glycine max
  unsure (1)..(350): unsure at all n locations
  Clone ID: 700764139H1
tgctcatatcactccaggcggaggtcttactctccattctatagccggtacaggtcctattctcgatatgatcgacacaggtcatattctcgatctcgctctccgtatagcaggtcacctgtcagcatgcatgacagatcatactctccctatgaaatacgatatgactcgccggatgcgcactcctacagaaggcacccgttacgatctgtttcacgaatgcctcgcctgatgatcttattatggaggcaccgtacagtctgttctcgagtgctcatccagcaangagaggatctagagagctatcacgagtctacactgtttcaagagagcactcacgaatgtgtccc

SEQ ID NO: 72409 - DNA, 230 bp, Glycine max
  Clone ID: 700764140H1
gtcgagccgattcggctcgagaagtgtgacataacagagaagacagcatgtgacaatgggagtaatggaggtcttatgacagatgcctacaattatttgctcgagtctggtgggttggaggaggagtcttcatatccctacactggggagagaggtgaatgcaagtttgatccagagaaaatagcagttaagatcacaaatttcaccaatatccctgctgatgagaacca

SEQ ID NO: 72410 - DNA, 299 bp, Glycine max
  unsure (1)..(299): unsure at all n locations
  Clone ID: 700764143H1
tgtcgagccgttccggtcgcgctgctttggaccatgtcggcttccatttacctcacgttgcagcaactaggaagcttggttcgtaaccactcttggaagatgattatgaagagcatataccaggaatttctgcagcacaattagctgatcttcgaacggtgcttcgtgaaaatgacttgagggttttgcagcttgagttggaatgcatttcagtagtgccannagcagattgtcgtatagttnaatactgttcagagttggaagctgagtaattgattctttgagagccatgttccact

SEQ ID NO: 72411 - DNA, 323 bp, Glycine max
  unsure (1)..(323): unsure at all n locations
  Clone ID: 700764144H1
cgctaacttcaacacctttaattttctanaagtaattcagcggctgaataccaagcggagaagatgagtcaggagcagccacggcgtcccaaaggccanaaccccatcanatacggcgacgtttttgtcgtctccggcgaccttgcacagaagctcgtcgcaccggaagatgctgccatgatgcaaagcgcggaaactcgagtgctcggacaaaccaaaccggcggacagcttcgtcatgcatctgcagccacagatgacagctggctgtcagatacggagcacgacgtacgcgacgtgggtacatcacgaactaagtcctgg

SEQ ID NO: 72412 - DNA, 362 bp, Glycine max
  unsure (1)..(362): unsure at all n locations
  Clone ID: 700764145H1
nataaatttggaacttcaacaagtatggaggagttattggtgctttcaactgtcaaggggctggttgggaccctaagatgaagaagatcaagggtttctctgaatgctacaggccaatttcttgtactgtgcatgtaactgaggttgaatgggaccaaaagacagaagcagttcacatgggtaaggcagaggagtatgtcgtgtatctcaatcaggctgaggaactgcatttcatgaccccaaagtctgaaccactccaatttactattcaaccttccacttttgagatctacaactttgtcccagttganaagctaggtggcagcatcanatttgcaccattgggctcacaacatgttcac

SEQ ID NO: 72413 - DNA, 369 bp, Glycine max
  unsure (1)..(369): unsure at all n locations
  Clone ID: 700764146H1
gaacaacaccacaatgggaagaagaccggcgaggtgttaccggcagataaagaacaaaccgtacccgaaatcccgtttctgccgcggcgtgccggagccgaagatccgaatctacgacgtgggaatgaagaaganaggcgtggacgagttcccgttctgcgtgcacctggtctcgtgggagaaggagaacgtctccagcgaggctttggaggcggcgcgcatcgcatgcaacaagtacatggccaagttcgccggaatagatgccttccacctgcgcgtgagggtgcatcccttccacgtgctccgcatcaacaagatgctatcgtgcgccgnggccgacagctcccagaccggcatgaggggcgcttt

SEQ ID NO: 72414 - DNA, 366 bp, Glycine max
  unsure (1)..(366): unsure at all n locations
  Clone ID: 700764148H1
tcgacaacagagagagataagttagtcttgctggaacaggttcttcacaagagggtggttggtcaggatactgctgtaagatctgtcgctgatgcaattcgccgttcaagggctggattgtctgatccaaatcggccaattgcaagcttcatgttcatgggtccgactggtgtcggcanaactgagcttgccaaggctttggctggttacttgtttaacactgaaaatgctcttgttagaattgatatgagtgagtacatggagaaacatgctgtttcacgtctagttggagccctcctggttatgttggttatgaagaaggcggtcagctaactgaagtggtcaggagaagacctactctgtggt

SEQ ID NO: 72415 - DNA, 262 bp, Glycine max
  unsure (1)..(262): unsure at all n locations
  Clone ID: 700764149H1
ctgagaagaggggttgaattaactgcttgcaagcatggcgaagagcaaggaagacataacctatgcaacatcacaagcaaggctttcagaagatgaagcagtgagagtggcctacgagcatggctcaccccttgaaaggaggaagattgctgactctcaaccagttgacttgttttcaagtgcacacaatatgccanagagtggccanacaacaatggattcaaacactagtgatcaatctcagatgcaacgtgatacacaa

SEQ ID NO: 72416 - DNA, 233 bp, Glycine max
  unsure (1)..(233): unsure at all n locations
  Clone ID: 700764150H1
tggtgaatgcgtaganaaggaaaataaagaaattagcgtgaaaaatgttgggtgtgttcagcagctccatagtgtcgccggcggaggagctcgttgccgccggctgccgtacaccgtcgccgaagatgacggcggcggcgctgcggaagtgggttcgagatgagaatccctccgcagtgtcggtggaggtcggagagcatgtccagctcgctttatacccacagaacgagtcg

SEQ ID NO: 72417 - DNA, 350 bp, Glycine max
  unsure (1)..(350): unsure at all n locations
  Clone ID: 700764151H1
gctcggatatcggctcgagatatcgcgtcccagaaacgctagaggaaccctgattcaatcgattcgctgttgccttcgaatttcgttccttggaagattagggagcaatggcaattgcagccccagggcatctgaacgtgaatgaatcacccattggggatctagangctgtgattgcttcgagaaattggagcaattggcgagggacatatggtaagttacatggcanagagatcaagctgtgaattgtgctcgaagaatacgatgacatgagagaagggttctatactgcatagagaatcaaatctaagaactaacagaaatggtcagctgagaatgtgctgatcagc

SEQ ID NO: 72418 - DNA, 329 bp, Glycine max
  unsure (1)..(329): unsure at all n locations
  Clone ID: 700764152H1
taacaatgtcgttgattccaagtttcttcggcaccgggcgaagaaccaacgtcttcgaccccttctccctcgacgtgtgggacccattccatggcttccccggcaacaccgcactctccgctccgcgctccgagacggcgggcttcgcaaacacgcgcatcgactggaaggagacggcggaggcgcacgtgttcaaggcagacctgccgnggctgaagaaggnaagagtgaagggtgagatcgaggnagagggaagggtgctgcagataagcgggacagagacaaaggagaagaggacaagaacgacacgtggcaacgcctcgaacgct

SEQ ID NO: 72419 - DNA, 358 bp, Glycine max
  unsure (1)..(358): unsure at all n locations
  Clone ID: 700764153H1
tgtacagtaatacagaggttattcacgatgttaacattcagcccgatgacgtgtcggcaacgggggaagtaagggacatatcagccacaaagactcatgatatctacgattctgtcacggacaacaacaacaacaaaaccggttctcaggtcggagagtacgcagattacgcttctcagaaggccaaggaaacataagatgccacgatggaagaagctggagagtacacagattatgcttcgcagaaagcgaaggaagcgaagaagacgaccatggagaatggtggagaatacaagattatctgcggcganacctaggagagataagagctactgtgaataagatgcgagagtataag

SEQ ID NO: 72420 - DNA, 237 bp, Glycine max
  Clone ID: 700764154H1
atactttctaatgcttcatccaacaccttagtttcccagtcaggtcttggaatcatggatggagaacagaagcatgaggagcagcttgcagtgttgccttggcttagacccaagacaacatgtaagaatgtggcacaaaatgctggaggtctagattgtttccaacttgcttcttcatctaacaaagatgaatctggataggggtctaatggagaatgtattcacaatgtaactaca

SEQ ID NO: 72421 - DNA, 280 bp, Glycine max
  Clone ID: 700764156H1
cgtagtaagtcggattcggtcgacagaagaagaatccaggcgaggagaaagatggaggggaaggagcaggatgtgtcgttgggagtgaacaagttccccgagagacagccgggtgggacggcggcgcagagccaagacgacggcaaggactaccaggagccggcgccggcgccgctggttgatccgacggagtttacgtcatggtcgttttaaagagcagggatagcagagtttgtggccacttttctgtttctctacatcaccgtcttaaccgttatgg

SEQ ID NO: 72422 - DNA, 133 bp, Glycine max
  Clone ID: 700764159H1
caaccctcacactaactatatctatccattaagggatactcaatgcaattagcgaatgagagaatgaagagccggtggttcgtgtggcgtttggcggtactacgcatcatcggagccacactcttcatagtga

SEQ ID NO: 72423 - DNA, 184 bp, Glycine max
  Clone ID: 700764160H1
taccatcttttggaacatgagagaaaaccctcagatcttgcattaaaagcactgcccttaataactaaaatctcacagttagggggcaagctttctactgcgtcatctgttccagaagtgcaattagctcagtatgttccagcactggaaagacgggctaccatgaggctgctgcaacaggtgt

SEQ ID NO: 72424 - DNA, 359 bp, Glycine max
  Clone ID: 700764161H1
tgtcgagccgaatcggctcgagggcattggaggagctagtgtggcatagtcgctaaatttgagacgataaagaaattaattcagcaacaaatacaatgggttctcttatggcaggatgggactctctgatcttggatcctgaatcagctacaatagagaggaatcgatcactcaccaaagaagagattaatgcttactggagagtaaagaaggagacagagttagaacacctcagagctatgtccaaactatctgagactattcaggcccgaaaatttgaggattcagagattctcataagtaagtaccgtgaccttggccagcataaaggagtccttaggcatggacgttgaccagaa

SEQ ID NO: 72425 - DNA, 219 bp, Glycine max
  Clone ID: 700764163H1
acccttttttttaattccagttaaatcccttatcacattcacaaatatacataaaggggggattcacgaagatttaattactaaatgaataacttacccatgaatcatttccccggggtatgtttcaagttcccttatataattaatgcaaattgggatttgattataggatatgtttccaaaaagattcaacgtactttttatgggtatacgataagg

SEQ ID NO: 72426 - DNA, 105 bp, Glycine max
  Clone ID: 700764164H1
tcggacatcggctcgagccgcaaggctttggaatcggaccagatggcaggtatagatgtgagcgtccagaattcactgaaggcacagctcatgtctaatctttca

SEQ ID NO: 72427 - DNA, 299 bp, Glycine max
  unsure (1)..(299): unsure at all n locations
  Clone ID: 700764165H1
ggaatcggctcgacgacacctatggtgaaccccgtgggattacctcttttggcagagccaaggaaaattaccatcacagctagcagcccccactcaagatacactgatcccaaggttttggtctcaagaacctaccagggaacaatgtttgctgnggctcgattgganaatggacagaactgtagctggtggatggtggatcttggccaagatcatcagcttatgtgcaactactataccctgaggcaggacggttctaaggccttcccgagatgttggaaatgtcagggctcacttga

SEQ ID NO: 72428 - DNA, 297 bp, Glycine max
  unsure (1)..(297): unsure at all n locations
  Clone ID: 700764166H1
aacaaactaccttttgcttttgctctttgttctttgccatggagtggccacaacaacaatggccttccatgatgatgagggtggtgataaaaagtcaccanaaagtttgtctttgatgagcaactccacgaggtgtttcaagactgatgcaggggaaatgcgtgtgctgataagcatggtggtaggatattttataggcacatgcacattggcttcatctctatggaaccatagtccttgtttgattctcagtacctcgactccaatctcatcctattcatccgtagaggggaagca

SEQ ID NO: 72429 - DNA, 261 bp, Glycine max
  unsure (1)..(261): unsure at all n locations
  Clone ID: 700764167H1
gtctaccataagttacaaataataaaaaattacaaaatcatgaaaatatatgggtcctagatcttatttntgtgatatctaaaaaatttcaagcaataaaacaaatgtattgaaaagagtgtataagataaatgtgtgttagcattctatatagactatgttaagagcaaggtctgatgcatacgtggctagtctttatattagtattgagaatacagtagctgaagtcccttggcntcatctatatcatttgggagggga

SEQ ID NO: 72430 - DNA, 333 bp, Glycine max
  unsure (1)..(333): unsure at all n locations
  Clone ID: 700764168H1
tcattactacaccacttgctgaaaaggccaaagctgctggtagcaccactgctcagtatgttggggagaaagcagcacaagccaaagatgctactgtgcaaactggcaagagtgctgcaaatgctgctcagatttgagggacaaggctttggcacagggtggagtgctgcacattattctactgagataactgtggagggacccaagctgcaacaatgttgttagggagtgctgagtagncaggcagagctctgagcttcagtatgtcatggatatgcgaaagtttactgctgtgcactggggagatgccaggagtacactgcaagacagagt

SEQ ID NO: 72431 - DNA, 325 bp, Glycine max
  unsure (1)..(325): unsure at all n locations
  Clone ID: 700764169H1
tcggctcgatgagtncctcacctctctctccgaaatcctcaaattgcctgtgaatgctagaaaccctaggcacgttcgatttgatgctctcccatttgcaatcaagggcgagcgcattcggttcttgcacgcaggctggtactacgctgcatcggctcgatccctgaatcatcattcttctcgcccatctgttctattccgatacgattgtgtagtcgtgttgtgtgtgtttagtatctcctgacgatcatcagagtgatagcacagagaaagcaatcagagcgagagtgtgaaacacatgtctgngacggggccatagatgtgt

SEQ ID NO: 72432 - DNA, 219 bp, Glycine max
  Clone ID: 700764170H1
tcttgatcctggtttcctcaccctagggttacggtttggtccctcttcaattaacttcaatatctgcgagagagcgtgagagttacgtgcctcccgagagacgccattggacgtgatagtgccattgaggaatccgaacgcgtcaacgtcaacatcaacgttcgctgctctaacggctgcaagttttccgttcagattgccgtcgattccaccgatagt

SEQ ID NO: 72433 - DNA, 260 bp, Glycine max
  unsure (1)..(260): unsure at all n locations
  Clone ID: 700764172H1
tcggaatcggtcgagtgccttgtaagaagtatgggtgaaattttattttcatgcggaagtaatagaagggctgtgattgcaactttgagcatttccgagaatgacattcagcgttttgaagggatttcagaagttgaggttgttacaanatcacttcaaggtctttccattgaatctgccttggatctgcaaaaagttcttagagttgaaacatgcacatcacaaaacaactgctttgcaaaggcttgaagcaaatcttc

SEQ ID NO: 72434 - DNA, 293 bp, Glycine max
  unsure (1)..(293): unsure at all n locations
  Clone ID: 700764173H1
gttagctataggggacttatgtgaggataatgtctgtgaatccctatagttctctatatgtgaaatgtgatggttgtgtcggaaagaacagtcagctagaattaagatacacatgtggcaaggtatattggatanaatcatcaaactgatttgcctaacaatgagaatatatacttatagattcaacaanacattagatnatatatgtttacttannatacttcgataanaattaacactacanatagntactttggagtatgcgtgccatttcgcatctgggttatgtctgt

SEQ ID NO: 72435 - DNA, 359 bp, Glycine max
  Clone ID: 700764174H1
gctcggatatcggctcgagtagaatgtggagaatttgtctttctcgccgaaatctccatcctccttgcttgctgaacatcatcatcacgtgagggctccttcagggggtggtaaggcacagactgctgggcatgctgccaggaatgtgcgccggtcgcactccaataagtatgggagggcgaagaaggacggtgctggtagtaagggcactggggggaaattgcttgataaagatggtgaatcccgtatagacaagaacgatccaaactatgatagcggcgaggaaccttatcaactggtgtggatctactgttactgatccattagatgacttcaagagagccgtagtatccatcata

SEQ ID NO: 72436 - DNA, 288 bp, Glycine max
  Clone ID: 700764175H1
cacacacaactactacaagtacttccttacaatcaaaaccaacaacaactatggcaagttatcaaaagcactacgatgatcagggtcgcaaggttgacgagtatggcaacgttgagaagcaaaccgacgaatacggcaaccctgttcatgctgctagtgtcacctatgtagccaccagaactgctgctggtggttacagtgatgacattaataagcaacatgataccaccaatgcctacggcgtagacactggtagacagcattctagtggtggctacgatggtgaca

SEQ ID NO: 72437 - DNA, 341 bp, Glycine max
  unsure (1)..(341): unsure at all n locations
  Clone ID: 700764176H1
nagttccttacaatcanaaccaacaacacatatggcaagttatcaaaagcactacgatgatcagggtcgcaaggttgacgagtatggcaacgttgagaagcaaaccgacgaatacggcaaccctgttcatgctgctagtgtcacctatgtagccaccagaactgctgctggtggttacagtgatgacattaataagcaacatgataccaccaatgcctacggcgtagacactggtagacagcattctagtggtggctatcgatgtgacactaataaacatcatgnaactactggtggctataatgatgacaccaatagacatcatggaactaccggtgtct

SEQ ID NO: 72438 - DNA, 314 bp, Glycine max
  Clone ID: 700764177H1
tgcggaggtagggtctagcggctggaagagcaccgcacaccgcgtggtgtccggtgcgcccccggcgtgccttgaaaatccggaggtccgagtgcctctcacgcccggtcgtactcataaccgcatcaagtctccaaggtgaacagtctctggtcgatggaacaatgtaggcataggaagtcggcaaaatggatccgtaacctcgggataaggattggctctgagggctaggcacgggggtccagtcccgaacacgtcggctgtcggtggactgctcgagctgcttccgcggctagagcgggtcgtcgcgtgcc

SEQ ID NO: 72439 - DNA, 354 bp, Glycine max
  unsure (1)..(354): unsure at all n locations
  Clone ID: 700764178H1
atagaagtatcttntgtggtacttgatgaagctgatcggatgcttgacatgggttttgaacaaatagttcgctctatactgggtcaaacgtgttctgatcgtcaaatggttatgttcagtgctacatggcctttgccagttcattacttggcacaggagtttatggatcctaatcctgtaaaagttgttgtaggctcagaagacttagctgccaatcatgatgtcatgcagatagttgaggtcttggatgaccgttctcgtgataagcgcctagttgctttactggaaaagtaccacaaatctccagagaatcgagtattggttttgttttgtacaaattggagccaaacgagt

SEQ ID NO: 72440 - DNA, 245 bp, Glycine max
  Clone ID: 700764179H1
tgcagaccgagctagctagctagcaagcaagcacagagatggaggcaaagcgaggccatgccctcatagtgctggcacgtgtttcactcttcctctgcgctctaaccctatccgctgctcacggaagcatcacggttcaagacatcgcgagatagttgaaactcgaggacaacgagcttctgcgcacggagaagaagttcagggttttcaatgagaattacgggaggagctactccacagaggag

SEQ ID NO: 72441 - DNA, 304 bp, Glycine max
  Clone ID: 700764180H1
tgagactgacaacacctctctctctctcacctcgttgatcccagatctattaggggtttttattcgatgctattcggcctgaagctttcgtttcgcggattattttaattattatttgtcctgcctatcaggaaagttgacaacaagatggaccatgacaagactggatgcgagctcccccagaaggtctatattgtgcatcaccgctgcggattttttggagtgcagtaccatgaacatgtgttctagtgccacaagacatgtgctgaaacaggagcagcaggctgtagctcatcattgggat

SEQ ID NO: 72442 - DNA, 197 bp, Glycine max
  unsure (1)..(197): unsure at all n locations
  Clone ID: 700764181H1
tggaaactgagaatgtggaggggagtattcaacacccactgcacacggcttcataactanaccgccatcgctatcttcgactttctgcgccccatagatgagaaaacgcaccgtttacgcatggcttgtagcacttctttgcttcctagttctcatgatcgtcacccatcaatcccccagtcccaagaataccatga

SEQ ID NO: 72443 - DNA, 298 bp, Glycine max
  unsure (1)..(298): unsure at all n locations
  Clone ID: 700764182H1
cgaaggatacctatagtgttttagtgtgatggctgtgactagactcaatcgaaatgtttacgtatatcccttttagccgatttttttctctttttatattgcatttagtgttctcttcctctctatgctctanagtctaaacttagggtttgtctaaggcatcatattgtgtgtctggtctgcagttgattacttaatggaatagataacaaagcttgattgattccctattgagtgttttggagagtgaatccctgtatgcattgatacaaacaggttccccaacactatattgtta

SEQ ID NO: 72444 - DNA, 233 bp, Glycine max
  unsure (1)..(233): unsure at all n locations
  Clone ID: 700764183H1
gaacaacgcatcgcttcggattatctagatctaaagaactagtcaaaacaanaaaaaatataaaaaaagatatattatagcaactgaactattgtgaagcatnaagaacaaaatcttatagttgaagcataaaatatcagtaatgagggtgaaacagggacaaatcatgttgatctatagaagctaggtaccataagtatgatactcactacatcaacataaagatataacga

SEQ ID NO: 72445 - DNA, 271 bp, Glycine max
  unsure (1)..(271): unsure at all n locations
  Clone ID: 700764185H1
cttcatagttcagtgtgtcgtttacaaatgtcgcagttgctggatagagccaagaacttcgtgtcggagaaggtaaatgatatggccaagccggaggcgagtgtcactgacgtggacttcaagcgcgtgagctaagataatgtcgagtacttggtcaangtctctgttcgtaacgcttattcaacttccatacgcatttgtgagatcaactactctttcaaaagcgcatccagggagatagcatcagggagaatgcagacccagatcgtga

SEQ ID NO: 72446 - DNA, 343 bp, Glycine max
  unsure (1)..(343): unsure at all n locations
  Clone ID: 700764187H1
tgaaatttgaagagtttgtttattgtgaaaaaaagatgacacaangcagcaaagaaagccttagagacctttaaggaaaccgcagccaccattggcgcctctgccaagtctggcttggagaaaaccaaggccactatccaagagaagaatgagaagatgaatgcagaagatcaaactcanatggatatggctaccaagaggaaagagtaaaagtcaaccagctgagatggaaagcagcaggccgtagtactacgcgctgcannacatacgccaggctgagcacatggcaaagggcacacgacacgccggcctagatcgagactgcaacacatcacatggccgg

SEQ ID NO: 72447 - DNA, 359 bp, Glycine max
  Clone ID: 700764190H1
tgagaatataggaatataagaactaagatggattggatcggagcgtaccgcggaggccagagaagcagggactggtgcgacccttcatcaccattcactgatttgtgggaccctcgtcgtgtcggtgacgctgatgatatcacctcctctctcgcccatgctcacgttgactggcgtgagactgataaagctcatatcttccgtgctgatctaccaggggtgaagaaagaggatctgaaggtgcaggtggaggagaataagatcctgcagataagcggggagagggtgaaggagaaggaggaccagaacgacaagtggcacgcgtcgagaggcagtgcggaacttcctcgccgttccgg

SEQ ID NO: 72448 - DNA, 276 bp, Glycine max
  unsure (1)..(276): unsure at all n locations
  Clone ID: 700764192H1
tgaattaattattggagacagacaaacgggtanaacagtagtagccacagatactattctcaatcatcagggacaacatgtaatatgtgtatatgtagctattggtcaaaaagcatcttctgcggctcaagtggtgaataccttatcagaaagagatgcanatggatacactattgtagtagctgaaacagcggattctccagctacattacaatacctcgcaccttatacaggagcagctctggctgaatatttgatgtaccgtgaacgtcacac

SEQ ID NO: 72449 - DNA, 342 bp, Glycine max
  Clone ID: 700764193H1
agagaagctaagaggcgcagcgtagcaaaagctcgtggaattgctagcaatggcgaggatcaaggtttacgagctgaggcagaagacgaaggctgatctgctgaatcaactgaaggacctgaaggcggagcttgccttgcttcgtgttgctaaggtcaccggtggtgcccctaacaagctttccaagataaaggtggtgaggttgaacattgcccaggttttgacggtgatttctcagaagcagaaggctgcgttgagggatgcctacaagaataagaagtacttgcctctcgatctccgccctaagaagaccaggctattcgcaggaggcttactaagcac

SEQ ID NO: 72450 - DNA, 325 bp, Glycine max
  Clone ID: 700764195H1
tttggatggcgaaaagacaggatactgtggaagatgtcacctgtggtaacactgttgctatggttggtttggatcagttcataacaaagaatgctactttgactaatgacaaggaagttgatgctcatcccattcgagctatgaagtgttctgtctcacctgttgttcgtgttgctgttcaatgtaaggttgcatcagatcttcccaagcttgttgaaggtcttaagcggttggactagtcagatccctatggtgtttgtaccattgaggagtctggtgaacacattgttgctggtgcaggagagcttcatcttgagatctgttt

SEQ ID NO: 72451 - DNA, 282 bp, Glycine max
  Clone ID: 700764201H1
gacgataggaaatcctgtaagaagtgtggaagaaaggaaggaggaatatgaccgggcgcgggcacgtatctttagtagccctagaagctctgaatcaggcgatacctcatccatggttccaatggacgggagaaattcttctactagcaaggatgagaatgaaactagcaagaaccccatggctgattcagaaagatatatcagtgtcagggatagttgttcgactcgagttgccatactcagagatagggaaaaggatcgcagtgatccagattatgaccg

SEQ ID NO: 72452 - DNA, 348 bp, Glycine max
  Clone ID: 700764202H1
acactgtcgttgactccaagtttcttcggcaccgggcgaagaaccaacgtcttcgaccccttctccctcgacgtgtgggacccattccatggcttccccggcaccaccgccctctccgctccgcgctccgagacggcggccttcgccaacacgcgcatcgactggcacgagacggcggaggcgcacgtgttcaaggcagacctgccggggctgaagaaggaagatgtgacggtggagatcgaggatgatggaaaggtgctgcagataagcggacagagaacccaggagaaggaggacaagaacgacacgtggcaccgcctcgaacgctccacggcagctttctccgcc

SEQ ID NO: 72453 - DNA, 147 bp, Glycine max
  Clone ID: 700764205H1
cggctctaagctgcatagtgagctcaacaagcgatccattgactatcttatgactgatctcctgatcatgtcatactcacatgcggatggtgcctatatgtatccctacgaacgcattactatagctactgactcatgtacaccatc

SEQ ID NO: 72454 - DNA, 294 bp, Glycine max
  Clone ID: 700764210H1
gctggttgaggttgagactgttcttcagactcaggaaccagtgataaaaccaatttggaatacatttgctagcagtctcagtggaatttggaagggtgtaggtgctgtgttttctcccatcacagctgaaatggaaccaatggaaataggtagcaagaatgaacaattatatgactgctatactctttctcgcatagaggcagtaccatcagtttcaggtgagcgtacatctcaaatccagagaaaggttaactgggtgactttgaatccttatggcgaaataccacagcatat

SEQ ID NO: 72455 - DNA, 294 bp, Glycine max
  Clone ID: 700764211H1
aagctgttgagcttttttgcgagtccatttggcaaaagggttgaatgggcattgaaactgaagggtgtggagtatgagtacatagaacaagatatcttcaacaagactagtctccttctccagttgaacccggttcacaagaaggttccggttcttgttcatgcccacaaacccatcgctgagtcatacgtcatcgttgaatacgttgatgaaacatggaagcagtatccactgttgcctcgagacccttatcaaagagcacttgctcgattttgggctaatttcgctgagcaa

SEQ ID NO: 72456 - DNA, 342 bp, Glycine max
  Clone ID: 700764212H1
attcttaaagtagggcagcatgacaagaccatgggtgcaacaggtgacactaacgtcttagctcagatgatcgatgaagcggaaggcctggaaaagatcgagaacctacagagccacgataacaatgaaatctatgaaaaggctgtgaagcttcttgagacatactggatggaggaggaagatgacgcaatggctactgccggggaagctgctcctgctgtttttgactttaaccaaggtggcaaccctcctggtgctggtggtctgaacttcaactgatacagtctttgatcagaatggtgttaattccttcagtgatgggcttggcattggcttgtcgtg

SEQ ID NO: 72457 - DNA, 342 bp, Glycine max
  unsure (1)..(342): unsure at all n locations
  Clone ID: 700764213H1
aanaaacattgctcatgttctttcaaagttaccaaacacaagtacacaacacaacagcaacatatggcgtctgaacaattggctcgcagagagaacaccaccaccgagaaggagattcacgttgagaaacacagggttcccaagatggccacccacttcgagcaccttgcggagcagctaaagaatctgacatcaccgctgggaaggatactccgcanggtagcatagaagccttgcaagctggagagagggtcaaagatcatgcaggaaaagccatgggagatattggtggacgtgggaaagccagagagactcacgagctgggtgcacactttgaatcct

SEQ ID NO: 72458 - DNA, 340 bp, Glycine max
  Clone ID: 700764214H1
gtaaataagttgaggcctttgaggacccaacagatccgcaagttccttagggttatggcccaaggcgcagaggcacagaagccccttgacttgaccgaggagcttctgaaatggaccaacagcaccatctccatgatgatgctcggcgaggctgaggagatcagagacatcgctcgcgaggttcttaagatctttggcgaatacagcctcactgacttcatctggccattgaagcatctcaaggttggaaagtatgagaagaggatcgacgacatcttgaacaagttcgaccctgtcgttgaaagggtcatcaagaagcgccgtgagatcgtgaggagga

SEQ ID NO: 72459 - DNA, 339 bp, Glycine max
  Clone ID: 700764215H1
gttgcaatcgcataataataaccatccaaagtttattgagagaaatttgcaagtttgaaaagaaacatggcatctcatcaacaaaacaagcaagagcttgatgaaagggcaaggcaaggagagactgttgttccgggtggcactggtggcaagagccttgaggctcagcaacatcttgctgaaggaaggagcaggggagggaaaacaaggaaggagcagctggggacagaagggtaccatgaaatgggacgcaaaggtgggttgagcactatggacaagtcaggagaagaacgtgctcaagaggaagccattgacatcgatgagtccaagttcaggact

SEQ ID NO: 72460 - DNA, 290 bp, Glycine max
  unsure (1)..(290): unsure at all n locations
  Clone ID: 700764216H1
ttcggctcgagcancaatcacatcagcaacctcagccagaaacactgtctcttcggatcaccaagagaacacaggcagtgcanagccatcaacaatctcttcagcaacctctgcaatagctgatanagccatatcagccagacacacagtctcttccaagctcggatacgctgacaacaacaccgaaacaactcaagcaagccatcaagagaacacacaaccatcaacaatctctgtagcaacagctgcaatagccgatacagccgtctcagcagaaaacaccgtagctt

SEQ ID NO: 72461 - DNA, 297 bp, Glycine max
  Clone ID: 700764218H1
atggcaagctctcacaatactgatataacggctaatacgcttagcccatctaccaactgggctataggctactgctagcgcttctgaaaatacggcatccgctgcataatctgccattcgaatgcactatcgcagctgcgatcctttaacacactcgaggatattctgcacgaacctctcgagaatgatgctctgccgatactgagaatttccacacctcttaagaatgagtcgtaatgatctgtgaagtgagtctgattttacaaaatttccatgtgatgtactagtatccacacc

SEQ ID NO: 72462 - DNA, 346 bp, Glycine max
  unsure (1)..(346): unsure at all n locations
  Clone ID: 700764219H1
gttcctcgaagtggacaaggaagaggtggggcattaagaaggccaggaggaagagggcaaggcattcgaagggatcggggacggggaagaggtcgtggtggaggaggccgtggtgaaaaggtatctgctgatgatcttgatgctgatttggagaagtatcatgcagaggcaatgcaattgaactgaaggaattggccatattttattttctagctattacatctatgattattaggaacttggtgatggaacaccatgtgtttatgtatcttttgcactggcctacttnttagggaaagggaatggatttcccaagttanaacgtttagacttgccatatggagtt

SEQ ID NO: 72463 - DNA, 321 bp, Glycine max
  Clone ID: 700764220H1
ctgatctctctgagtattcttgttatcctagacatgttggaggcttcctatgcctttagttttacagcagctaggggctgaagtcacattttctaacatgtatttgatgcagatattgagcttatgggtactctgtctagtatggctaatacaaaggccaatcatagtgagtctagtgcaacctcaccaaatgagacctctaagaggcatagcatgtcacctgcctctgttgaagaatgtccaagacttattcctaatatcccggatgagttatcccttcagattattgctagacttcctagaatttggtactaccatgta

SEQ ID NO: 72464 - DNA, 180 bp, Glycine max
  Clone ID: 700764221H1
cagcaacacaactccacttaccccctggattccgattccaccccaccgatgaagaactcgtcgttcactatctctgccgcaaatgcgcttcgcaagaaatcgcagttccaataatcgccgaaatcgatctctacaagtacgacccatgggaccttccaggaatggctttgtacggagaga

SEQ ID NO: 72465 - DNA, 292 bp, Glycine max
  Clone ID: 700764222H1
agcttggggagctaaaggaatctgctgctgatgctgctaaaagggctatgggtttcttcaccggtggcaacaaagaccaaactagagaggaggaggaggaaacgaggcggagtatgcaggaggtgagggtgcaagataaggagtatggaacgggacgtggtactggagagaagttggtgataaaaatggaagagtcgcggccaggagcggtggcggatgcgctcaaagcagcgaatagggccatggacggcgatatggaggaggaaggcgtgcttcatgtggagcgtcgtag

SEQ ID NO: 72466 - DNA, 344 bp, Glycine max
  Clone ID: 700764223H1
cgtttaagggttttgttttcatttaggtcactaatccgatatcatgaagctcgatacgactagtctcgaatcgtttcccacactgattgcacctcaaaacgacgtcgccggagaactctccgccgctccgttctttgaccttccgaattccaatgacttcgatgggttcttgaaagacgctattcagatggtgaagcccgcgaagggtactacaactcttgcttttatatttaaagagggtgttatggtagctgctgattctcgagctagcatgggaggatatatatcgtcgcagtctgtgaagaaaattatcgaaatcaatccgtatatgcttgggacaatgg

SEQ ID NO: 72467 - DNA, 184 bp, Glycine max
  unsure (1)..(184): unsure at all n locations
  Clone ID: 700764224H1
agcgattcttgcttcaagttccagagatgggtgtgcgtcatttcattcccgatgcggaggagggtgacagtttattngaatggatacagaactgtttctggttttctgggcatggtcttcttgataagtagggaccagtttcagagattgtaactcgcttaggtggatatcggcgtgcagtcag

SEQ ID NO: 72468 - DNA, 341 bp, Glycine max
  Clone ID: 700764225H1
gtgagtttgtgaagacaaaaaatcactagctactcaataatggccacagtaggaaggaacgttgcagctcctttgctgtttcttaacttgatcatgtattttattgttcttggctttgctagttggtgcctcaacaggttcatcaatggccaaacttaccaccctagttttggtggaaatggtgcaaccatgtttttcttaaccttctccatactagcagctgttctgggcatcgtgtccaaacttttgggtgggaatcacatgaggacatggaggagtgacagtttagcatctgcaggagccacatcaatggttgcttgggcagtcacagctctagcatt

SEQ ID NO: 72469 - DNA, 339 bp, Glycine max
  Clone ID: 700764228H1
cttaaatcagaaaatcagatacaagacaatggccaacagggttatggtggagcaaaggacacaattggtagtgtagaccacattactacaccacttgctgaaaaggccaaagctgctggtagcaccactgctcagtatgttggggagaaagcagcacaagccaaagatgctactgtgcaaactggcaagagtgctgcaaaagttgcctcagatttgagggacaaggctttggccacagggtggagtgctgcacattattctactgagataactgtggagggaaccaaggctgcaacaaatgttgttaagggagttgctgagtatgcaggacagaaggct

SEQ ID NO: 72470 - DNA, 341 bp, Glycine max
  Clone ID: 700764229H1
ctcgagtgcttctgaaggctttaattcaccccaggagtatttgatcatggacacagacgaaacagaagtagaattcaatttcattgatgaaagtttcaataatgtgattgagtttgacccttgtcagtatgataaagatcagtctagcagttcaagtgcatgtggaggatttgctgagcaatcgtttcaacaaatggcacttacgtgtgatcaccagcttcaagattgatcaactttcaaacacacggatgacattttcttgtacaagcgtaacttctgggactaagatacttggttttatgcctgtatgataatgaatcatgtagcatctgaaatgttta

SEQ ID NO: 72471 - DNA, 329 bp, Glycine max
  Clone ID: 700764230H1
gtcttgttttacagcaatagcattggctgggactgggtgcgataaggcaccggtggtgttcgtgttcggcgattcgaactcggacacgggtggactcgcttccggtctgggtttccctatcaatcttcccaatggccgcaatttctttcacagatccactggccgcttgtccgatggacgcctcgtcatcgacctactctgccaaagtttgaatgcaagtttgttggtaccatatttggacgccttgtctggaacctcattcgcaaatggagcaaactttgcagtggtggggtctctactctcccaaatatgtcctttctccgtcatat

SEQ ID NO: 72472 - DNA, 336 bp, Glycine max
  Clone ID: 700764231H1
caaaaccaaaacactcaagttaacttcaacacctttaattttctgaacgagattcagccacagaatatcaaagggagcgaagatgagtcaggagcagccaaggcgcccccaaggccaagaccccatcaaatacggcgacgtttttgacgtctacggtgaccttgcacagatgcccattgcaccggaagatgctgccatgatgcaaagcgcggaagctcgagtactcggaaaaacccaacccggcggacttcttccgtcatgcaatcgccgccacaaggaatcaacaggctggtcttgtcggtcaccaggtacgtcacgacatcaccggcgaccatg

SEQ ID NO: 72473 - DNA, 344 bp, Glycine max
  Clone ID: 700764232H1
gctcgagttgcactgcaacttagccacttgaacccccttcgtaagcctcttcacatcttcacttcttcacttcttcttccgcactaatacgaaaagagaaggaattcacaaaagaggttaccatgttggacgatgagagagaggagaaggaggtggatctcacttctccggaagttgtcaccaagtacaaggagcgccgcggagattgttaacagggctttgcagttagttatttcagaatgtaaaccgaaggcaaagattgttgacctttgcgagaaaggggattcgtatattagagagcaaactggtagcatgtacaagaatgtgaagaggaagatagagag

SEQ ID NO: 72474 - DNA, 346 bp, Glycine max
  unsure (1)..(346): unsure at all n locations
  Clone ID: 700764234H1
tagtgctcctgatctttccctgaggaagctttacattggaagcttatcaccagaagtcacaagtgaaattctncttaactattttgcaaggcatggtgaaatagaggaaggttcagttgcatatgacagggatacaaatgaatcacgtggttttggctttgtcacatacaagacagcggaggctgcgaagaaggccatagatgacctagaaaagacacttgggggaagaaatatagttgtaaaatatgctgattcccaaaaaggtaaaactggccagccaccatttcctgctggagtggttccgatggcagcattacctatgaacccaggatatatgcagcagcct

SEQ ID NO: 72475 - DNA, 342 bp, Glycine max
  Clone ID: 700764235H1
ttgcagaccgagctagctagctagcaagcaagcacagagatggaggcaaagcgaggccatgccctcatgtgcttggcacgtgtttcactcttcctctgcgctctaaccctatccgctgctcacggaagcaccacggttcaatacatcgcgagatagttgaaactcggggacaacgagcttctgcgcacggagaagaagttcaaggttttcatggagaattacgggaggagctactccacagaggaggagtatttgcgccgtttggggattttcgcccagaacatggtcagagcggcggacatcaggcgctggaccccaccgccgtccacggcgtcacgcagt

SEQ ID NO: 72476 - DNA, 337 bp, Glycine max
  unsure (1)..(337): unsure at all n locations
  Clone ID: 700764236H1
gggctgctcgtttcgcggcncgggattcacgcttctcccacaagaacgcgctacagcgctgcctggaacacgccaggctgtggcttaccaagtcggagcagcccattgaacctgatactgatgttacttatgctgcattgagggagaagttgaacaagattatgtcttcggagtactttattaccactcctgagatgaaggctccggttgaagttgctgcggctgctgctgggggtaattacgtgtctttccatgtgccggtgcatgggtctgtggttccagttgaagttgagcaacccgtttttcagtctcaggagaaggatgaaggaactgcaaa

SEQ ID NO: 72477 - DNA, 204 bp, Glycine max
  Clone ID: 700764237H1
gctcggaaccggctcgagcgcttcggagaaaactgcgccagtggcagagaaggccacagactacactcttcaggctgcggagaaggccaagagtgcgggtggcacaacggcgagttacgtcggagagaaagcggtgcaggccaatgatgtcgccgtcgacagtgagatgagtgcggctaagtatgctgccaaggtggctgctga

SEQ ID NO: 72478 - DNA, 341 bp, Glycine max
  Clone ID: 700764239H1
aatcaaatgatcctacagttggattaggagaagcaactgcagtggttcaacacaccactgtgcatcagctacgcttcatcagtgatgatacgatagactgatgcacacgaatcagtatgtacgcagatcactcctagatcttcaatacacattactacggcaatacgtacatctctaactaagctctctgcaacagagatttgaattctgtgcgtgactaatcgaatgatgagtacccatgtcgttcgtcatgtttcagaatgcttcgtcaagccacattgtcccggccaagagtcagaccaaatatgcaacttaacaccttgggatattgctatgctgtc

SEQ ID NO: 72479 - DNA, 341 bp, Glycine max
  unsure (1)..(341): unsure at all n locations
  Clone ID: 700764240H1
tgatatagaaagagagagaagaagaaaagaagaacagagatgcaatcctcaaaggagaagatgcccaacatggcaagtgctgccaaggaacaagtcgacatctataaagccanaatagacgagaaggcagagatagcaacggcaagaacagaagaggagagggtgatagcccatgagcacgcaaaggcgaaggaagctggagcaaagatggagctgcatgaagctaaagcaaggcatgcagcagagaagctaagcgccaaccaatcacattatggtctccaccatggccacaacaaccctcccttagtaggaacaactcagactcactaccagcaagggca

SEQ ID NO: 72480 - DNA, 332 bp, Glycine max
  Clone ID: 700764241H1
ggataccattggtagagtggacaacattactacaccacttgctaaaaaggctcaagttgctggtagcaccactgttcagtatgctggagagacatcagcacaagccaaagatgctacggtaggatcaatggagaaaactacaaaggatgctaaaggaagagaaaaagcaggaaccaaaggtcaaacaaagaagggtggtggtgaggaacaaggaaaaagaagagaagaaacaggagaagaaaaacaatccagcctggaggagatttctaagcacagagctgaagctcaacaaaaagcaatgagttcacttgaaggtgctaaggagagatacg

SEQ ID NO: 72481 - DNA, 337 bp, Glycine max
  Clone ID: 700764242H1
cgggtttccaattcacagagcaacacaacgaaccaacaatggcgcagctcagccgcagtcgcagccgcatcacgggcaagcagcgctggagcaggtgcagtgcttcggtcgcaagaagaccgccgtggccgtgacctactgcaagcgcgggcgcggtctcatcaagatcaacggctgccccattgagctcgtggagccggagatcctccgcttcaaggccttcgagcctatcctcctgttgggtaagagccgcttcgccggcgtcgacatgcgcatccgcgtcaagggtggcggccacacctcccagatctacgccatccgccagagcatcgccaag

SEQ ID NO: 72482 - DNA, 335 bp, Glycine max
  Clone ID: 700764244H1
agagaagcactcttcgttcttcgactgtctacgatctgctttctctgaattgtgaaaatgtcgctcggagaaactgcttgttcatacgcagctctcatccttcatgaagatggaattagtgtaactgctgacaagatcagcaccttgttgaaaactgcaaaggttccagtagactcttattggccaaccttgtttgctaaacttgctgagaagaaaaatcttggcgatttgatagcaaatgcggcaggcggtggtgcaccagttgctgttgcagctgccccagttgctgctgctgctggtggtgctgctgccgcagctccagctgctgaggagaa

SEQ ID NO: 72483 - DNA, 334 bp, Glycine max
  Clone ID: 700764245H1
catcaacactccttcctcttcctctctctcgtccattttagttcaactttgaataattctccttcgtatcaagtcttcctcatcttcaccacctttttgtaagtggatatttatgtgtctaagaacataaactaaaaaaccaaggcgagtgaaagaaaaaaaatgtcaggtgtgtctctagcagtgtctggtccaccagcagcaacagtggctgaagcagcaggtacaaagcctaaacgaagaacagaacaggcaccaatgggtggcatgatgggttcactgcgcgtgatagaacttcagctggtggccttcatcttggtgttctcagcaagtg

SEQ ID NO: 72484 - DNA, 318 bp, Glycine max
  Clone ID: 700764246H1
cgagcaatcggctcagaccgccggcctcgtcatcaagctcaagaccttctgcctccgcaaggacgcgttcggcttcttcgccttcgtcagcgccaagaagaaggagctggacggcctacgcgccgagatgccggtggcgctggcggagtgcgtcgatccggcgaaattcgtgctggaggcgatctcggaggtgtttccggtcgacaagagaggggagaaggccggccacgacttgggctgggcctgcgtccttgtcctggagtcgttaattccggtcgtcgtcgacccgtcatcggaaatcgaggttttggttaccct

SEQ ID NO: 72485 - DNA, 313 bp, Glycine max
  Clone ID: 700764247H1
aaataattgatctttgaaaatgcagggaggaaagaaagctggagagtccatcaaggaaacagctgcaaacattggtgcttctgccaaggctggcatggagaaaaccaaggccactgtccaggagaaggcagaaagaatgacggcacgtgatccgatgcaaaaggagttggcaacccagaagaaagaggcaaagatgagccaggcagactggacaacaggcggcgcgtcacataacacggcgcgaacaggctgccaggcaggcacatgggcaaccatgggaccatcagacgcactatccggcatgaacggcagc

SEQ ID NO: 72486 - DNA, 337 bp, Glycine max
  unsure (1)..(337): unsure at all n locations
  Clone ID: 700764250H1
tgcagatcgagctagctagctagcaagctagcacatttatngaggtcaagcgaggccatgcctcatatgaaacagagangnttcactcttcctctgcgctctaaccctatccgctgctcacggaagcaccacggttcaagacatcgcgagaaagttgaaactcggggacaacgagcttctgcgcacggagaagaagttcaaggttttcatggagaattacgggaggagctactccacagaggaggagtatttgcgccgtttggggattttcgcccagaacatggtcagagcggcggacatcaggcgctggaccccacgccgtccacgggtcacgcat

SEQ ID NO: 72487 - DNA, 301 bp, Glycine max
  Clone ID: 700764252H1
attggtagagactgctagcaatttgtcaaagcagaaggcaactttaggtggtgggtttgatcctctattgttgactggcatgtatgatcaaggaatggtgaggcagcatgtcagcactacccaactgagtggagtgagtgcaagcagtgtggcattgccaggacctgggaagactacaacccctgtgttggctctccccgccccggatggatccgtgcagccagttaatccagatccatttgccgcatcgctgagtgttccaaccacggcctatgtccaaatggctgatatggagaagaag

SEQ ID NO: 72488 - DNA, 282 bp, Glycine max
  Clone ID: 700764254H1
gctggtgcagtttggagagattcaggttaaagttgtattgaaattttcacaagaggaatttcttacagcttggtcaactcaggtgcgtcctgcaacaactctgttagctgatgggtgtccatatgtgtatgctatggtgcatgatagttcagtgtctacaataccaggtgattttgtaattggtgttaagttgacaaccataaacaatatgtgtgcatatgggctcaatcctggtatttcaggttctcgtctgttgggcaccattcctcagtccatttcaca

SEQ ID NO: 72489 - DNA, 285 bp, Glycine max
  Clone ID: 700764255H1
aacaagtcgaagaggaaactcgcgagaaggaagaagaacatcaagagcagcatgaggaggaggaagaccaaaatccctacgtttttgaagaagataaggatttgtcgaccagagtcgaaacagaaggtggcagcattcgggttctcaagaagttcactgagaaatccaagcttcttcaaggcattgagaatttccgtttggccatcttagaagctagagcacacacgttcgtgtccccacgccactttgattccgaggttgtcttgttcaacattaaggggagag

SEQ ID NO: 72490 - DNA, 295 bp, Glycine max
  unsure (1)..(295): unsure at all n locations
  Clone ID: 700764257H1
ggaattcggctggtctcgagcgaattctgctcgactgnatgagaaccaaattgccgcatatttattaaaatatggtccacttgctatgggcgtgaatgcaattttcatgcaaacatacattggtggtgtctcatgccctctcatatgtagcaagaaaaggctgaaccatggtgtgttacttgtgggatatggtgcaaaaggcttctcaattcttaggcttggcaacaaaccatactggatcatcaagaattcgtggggggagatatggggagaagatggctattacaagctctgc

SEQ ID NO: 72491 - DNA, 329 bp, Glycine max
  Clone ID: 700764259H1
cgtattgtgtttctctctttccgcggcctagatctgagcagtttggaaaccctaactgctctcaccaacgacatcaccactctctccgatcaactacctctttcgtcgccctaagtcatggcaggaattgcacccgagggatcacagtttgatgctcgtcaatatgataccaagatgaatgagctgcttacgtccgatggtcaggatttcttcacatcctacgatgaggtttatgacagttttgatgctatgggcttgcaagagaatctcctgagaggcatttatgcatatggttttgagaagccatcagctattcagcaaaggggaat

SEQ ID NO: 72492 - DNA, 315 bp, Glycine max
  unsure (1)..(315): unsure at all n locations
  Clone ID: 700764264H1
cactggaacccccttcgtaagcgtcttcacatcatggcggctctacagagagacgatgttgaactcgttgttcctaangattctttcattaccaccgattacatgacatacatgtttaaatacgacagtgttcacgggcactggaagcatcacgatgtcaccgttaaggatgagaagacccttctcttcggtgacaagccagtcactgtttttggacacaggaacctgaagagatccatggaagtcgactggagctgacatcattgttgagtccaccggagtatcacgataaggataaggctgccgcacatttga

SEQ ID NO: 72493 - DNA, 346 bp, Glycine max
  Clone ID: 700764265H1
cggctcgagcacacaactactacaagtacttccttacaatcaaaaccaccaacaactatggcaagttatcaaaagcactacgatgatcagggtcgcaaggttgacgagtatggcaacgttgagaagcaaaccgacgaatacggcaaccctgttcatgctgctagtgtcacctatgtagccaccagaactgctgctggtggttacagtgatgacattaataagcaacatgataccaccaatgcctacggcgtagacactggtagacagcattctagtggtggctacgatggtgacactaataaacatcatggaactactggtggctataatgatgacaccaatagac

SEQ ID NO: 72494 - DNA, 254 bp, Glycine max
  Clone ID: 700764266H1
gcaagtgcaccttccaagttagcattgcttatatttgcctgtgtcacatttgccaggaaatacatcttttacggagtcaaatattacaggcgctgatttcacggatctaccactaagagaagatcaacgtgaatacctctgcaaagttgctgatggagtgaacgcaacaactggaaatgctacgcgtgatacattgttctgcaattagtattccattgctgaatactcactccaagaccttcaaatgtgtgcat

SEQ ID NO: 72495 - DNA, 158 bp, Glycine max
  Clone ID: 700764267H1
cgaaaaaatgttatcgagtggtgggtctaaggagtgaagatttgagttcggttgtatgtggagaaaattggttaaaggaggacaatccacttaccaatacattcaaatgtctacaatgaattaaatagtgtagataaacaatcgaaaacattcctgca

SEQ ID NO: 72496 - DNA, 328 bp, Glycine max
  unsure (1)..(328): unsure at all n locations
  Clone ID: 700764268H1
gtntatccgggttggagtttgagaccgaggaatatataaatggaaagttctagatagggcctgggattgtttctgtgttttctaacaagcaatggctatgagatcgtgggtgagtcgaggaggatccatgactcgtttgatggactcaacaaatcgaggggctttgagtcggttcttgagcgacaagggtcgcattctcagcgaggaggaacaggccaaagagaatgtctacatccagaaatgggagagggagaagtttgagaaacagaagccactgtctgagaaggccaaggctctcacggacaaagatgcttctgctgctgctcat

SEQ ID NO: 72497 - DNA, 514 bp, Glycine max
  Clone ID: jC-gmfl02220050a01d1
acactaaaaacagtttctcttttatacatactctctgttgtcatttgtcaacactacaaaaaatgaaaaagtaaggtagaatctttaatcattcacaaatatggagcaggctgcagagggcattctgtattctaagataatacatatgaaagatgttacatatataggctattcaaacagtggctggtactggagttgaaggagcaacacggttttcagctggaatttcaacaaactcagacaatatagcacggaattcatctccgctcagagtctccttctccagaaggacttccacaatcttgtcaatggcctcacggttgttccttatatgctccagtgcaatttcatatgcttcatctgagatcctcttgatggcagcatcaatgtcttctgcaagcctctctgacattgagttccttgccatcattctcatgatgacatccccaccttgtgctgatggttccataagtgaccaaggaccaatatcagacattccaaatgtggtcaccat

SEQ ID NO: 72498 - DNA, 510 bp, Glycine max
  Clone ID: jC-gmfl02220050a02d1
gcttatatcttccattgtttcaattgtataatttcatctaaacaatattcagaaaaaatgaaagaaaatatcctcataaatcatgtttgctatctcccctactaaataattagactccatctatacctcaaaccccacgtaggatttatgtacaaacagacgaaagagggggcaaaaaataagtgaaatttaaagaggaccttggacaactttcaataaccaagtttagtcccactctgcctatctacccatgcatcgttaagctaagctatgtactcattcaccttttggctttactttgtattgtttggacctgaagtgacgattgtgatccaccactgagtgcagcagcagcagattcaacatgtgtaagaagatattcatatatcttcttcctcaaccggtcaattgtctctgctgatatctcgcatgattctccctcatccttgctcgatcctatctcatctaaccaatcattaacactctttagttgagtgagcattcctgcta

SEQ ID NO: 72499 - DNA, 433 bp, Glycine max
  Clone ID: jC-gmfl02220050a03d1
cggattcgcttgctcgttacaagtcttatagtaaatgcagaccggtaccatccatgaagaaaaaaaattggctgccgtgccgacgctgtttatggactgctgttgcggctcgacctgccgaagtcatctttcatcccatgcactgaacgcctaatgctcgtcgtaatccgtcgcttaaaagaccatctggtgtggcctgtttgagctgcggaggctgaagctggcaccgaggtagtcggcaaggtgggcctccttcttgatgggggctaaaagtgccttgtcgacagacttttggtcctcaatacgggcctttgcggtctccttcttctcgggcttctcgccctgcttgaagaacgagtccttaccgggcttgcgggcggccttgtccttggtgaagtaaccattctctgtgaccttgtccaagaccttggag

SEQ ID NO: 72500 - DNA, 502 bp, Glycine max
  unsure (1)..(502): unsure at all n locations
  Clone ID: jC-gmfl02220050a06d1
aggacttaaaagaattatcacttgaatgaattattagttcaccaaactgtgaaagctagactttcataattacaaactgtaactaacatcgaccccttatagatatgttcaatatttgttcaataacaagtatatttctcaactgcctgaaggtctagttagtgtataccaatgtgactagcaattgacaggaaatttgccaagagaaaacctttcaggaagaagctgaatgacatgcattttgcgggcaaaattttgatagatcatatttccttatgtgctggcactagacaccaattccgaactttcaacattgcttcctacatttttctgaattactggaggagatgaaggtgtccttgcttcagccaaattcaaccgcaagggccgaccttgtacctncacaccattcatgatgtccaaagcagcccgtgcagattcggcagtttcaaaagaaacaaacccaaaacctcgagatcttccactgtccctctcatagatg

SEQ ID NO: 72501 - DNA, 247 bp, Glycine max
  Clone ID: jC-gmfl02220050a07d1
ctattcgcctaagccccgatgacaagcagcctaacggaaaacaaagagcagcccaccgaaaaaggaaaaaagagagagacaacaaaaaaaacaaacggggaggccgaaaagaggagcaccaacagccgggggacaaaacccaaaaaggaaaaaggaaaggggggcgcactaaaggcccccaaaaaaaagggggggggggggagaaaaaccacacggaggaacgagcaccccgaaaacccggggggat

SEQ ID NO: 72502 - DNA, 96 bp, Glycine max
  Clone ID: jC-gmfl02220050a09d1
cgggactgtgcccaattaattccctggtcgacaggctcactggtcggacggcgcggcctgggcgcttttcttcttaatttgccacatttgagtcct

SEQ ID NO: 72503 - DNA, 457 bp, Glycine max
  unsure (1)..(457): unsure at all n locations
  Clone ID: jC-gmfl02220050a10d1
agttggttggatttatggatcggtgatgtttattttaaactgcgttatctatccgaatcttcccaaaggaattgaagataaccatatattgctgagatccattgatgttcttattggatttatgttttttttttttaataaaccacgttatttcaatgtgatgtgaatctatatgattgagcctgataaacatcctttgcccctactatgactgcattttttttatttgatatggtttggtttcttccactggtagagcttcagttcgaggttctaaattatggttgttgcgattttgttgtacaaacattgacattgtggcctaaatcaaggtcgcacaccattttttaaaaaaacttgttttaagctttgaatgggtattgaatattgnttgtatcagctatggattttaccagctgcagagttctgttgtgtattttgtatatttattctattt

SEQ ID NO: 72504 - DNA, 344 bp, Glycine max
  Clone ID: jC-gmfl02220050a12d1
agaaacgggaaaacatattttttttttatataaaatcccttggaaccccattaaacggaaaaaccccggaggggataaaccagggtaaaaaaaaggctggcagaaccaatttatgcaaaccccccagcatttttatccttcccaaaaaaaaccctttttttttactagcaaagggaagggcttccttagcaaggggatttacatccggaaccggggggtggaccttagcaactttagcaatagcctgggttttttaagggggtccacctttcaaaaagaccccgaaaacttttccgtgtttaaaccagtatggcccaaactttggctttgaaaaccccggattg

SEQ ID NO: 72505 - DNA, 541 bp, Glycine max
  Clone ID: jC-gmfl02220050b01d1
aaaatcagaatatttcttcggagtggatataataattgttgaagcgtacaaaatttaacaaatccaaaaaagataagatgatttgggtgagctttcactgtgacttacgtctatagtgaagagagctacactgaaagcttaggccatagaaatagagctacagaatacacttatacacctaggcattagtaacttatataagtgaatattatggcactattctgagaccttaatgctttcacttgtgagccacatcttcttttgaattataagcactacttcatcatcatcatcatctttaccttgatctacatcatatatggtcacagcattccagtgtaatgctgacaggtatttctttatgtactccaccatggaacgcttatcatggatgatgatgaaaccctttggccttaggattctgtcaatctcaattaataaatcctctggactgcattctttcttaataatatcagaaaacacagtccatgcatggagtagatcgtacgttcgagggtaggttgaaaatgcttcacaccag

SEQ ID NO: 72506 - DNA, 592 bp, Glycine max
  Clone ID: jC-gmfl02220050b02d1
aaaatcagaatatttcttttgagtggatataataattggtgaagcgtacaaaattaacaaattcaataaagataagatgatttgggtgagctttcactgtgacttacgtctatagtgaagagagctacactgaaagcttaggccatagaaatagagctacagaatacacttatacacctaggcattagtaacttatataagtgaatattatggcactattctgagaccttaatgctttcacttgtgagccacatcttcttttgaattataagcactacttcatcatcatcatcatctttaccttgatctacatcatatatggtcacagcattccagtgtaatgctgacaggtatttctttatgtactccaccatggaacgcttatcatggatgatgatgaaaccctttggccttaggattctgtcaatctcaattaattaaacctctggactgcattctttctaataatatcagaaacacagtccatgcatggagtagatcgtacgttcgatggtaggttgaaatgcttacaccagttgtaactggtctattagtcctctgtcgatattatcttgagatttttgtcattttt

SEQ ID NO: 72507 - DNA, 318 bp, Glycine max
  Clone ID: jC-gmfl02220050b03d1
cagcgtggttgtttattttgatagctctatcatatgataaaaattcatatgagaaagctcccaaaataaacaaattgatattctatacctgcccggagcagagcctcaagtgaatttacggttatatgagatcatgggtcatactcaatagacccttttgttcaaaacaagctatttgagcggctaaaccactaataataggcaatggccccgagtctcgatcatataccaaatgacgatagattcaagagtctgaagtctaccatgctgctactgcagttagtgaaccaagccatacaccactaaatacgcttgtaa

SEQ ID NO: 72508 - DNA, 406 bp, Glycine max
  Clone ID: jC-gmfl02220050b05d1
aaggggcccctgtaactcaaaatttttgaggaagacggtccaatttgaaaaattttgtaggatcatctcaaacttagcatcttttttttgcccctaaaacattgaaaatgctaaaaatgttacccgcaagttccattacaacttttaccccttggattagtccaacaacctttacgaacagaaatttttacttgccaagtttgctttgcctccaattcaagactggaaaaaagttcccctctgaatagcatcctcgttagcatttccaagagcagcctcgttcaagtacttgtcagccaattggacttttttgacattctcttgttcttggacaagcttgttaccatacagcaagagcttctccagagtcattttgggctgctcaaaggttggaggcccatctttt

SEQ ID NO: 72509 - DNA, 598 bp, Glycine max
  unsure (1)..(598): unsure at all n locations
  Clone ID: jC-gmfl02220050b06d1
gaactcaatataccaaagcaatcaaacttgcgcttcttgcatatttttgcaaatggacataacatatataattacgtatttaatatatattatgcaaatcactaattagtagtagagctaatagtagtaataatagcactaggaataatatagtaattaaaagaaaaattaagaagctagcatcagatcatacacttgtgattattttgaccctcaggaatgttgactggtggaatcacgtccatcgtctccgccgtgatgttgcccggcactgcccggaggctccgagacgccgttcgccggaatctgcctgtaggcattaagggctgcaagcatgcctaagttactttcattagaagttgagcaccgccgttgccaccaccggcgtcaccgtcaccaacgataccggaacctagttgacctccgggcataaggttcatcggagaagcgaaattcatgaaatgaatgccacctggagcagacatagctcctctatacacaccactattcccaacagagggaantgcccaatgggatattatcgctgctacatgggttgcaccgcgcgttgcacacactatgggtggtgcggaccgca

SEQ ID NO: 72510 - DNA, 516 bp, Glycine max
  Clone ID: jC-gmfl02220050b07d1
gcactatctaatgttgaaataaataaagaaatgcttatttgattgaaaatacattaatttgtaatgtataataataataataatgatatgggggtataggtacaaattttgctaacattttgtacacaaatactttcccgcagaaaaacggtgaaggtgattgattgctctaatcaccgttcaaaaagatcaccatcgaaatcaagccttgaagtccaccatcaatttgttcaacttcttgttgttaattctctgttcgataaaactcttcccgtagtcatcactttgctgcaaggaggaagaggcaccaggcgtcaacttgcgggcgagctgaacggcgtcgtcgtgggtgttgataatgtgattgaaacacaaataacgaccgtaggatgagacattctcgtagacgcagatgtgggcgtcgaccaagaagctcaaatcaacggtcacgaacaccccatcctcggacatctttgcggctcctcttacgtaaggctgtttgaccgagagatcatg

SEQ ID NO: 72511 - DNA, 459 bp, Glycine max
  Clone ID: jC-gmfl02220050b08d1
gcattaaaatcctatatttaggagcaagagtattgaaaaaataacacaagctttctcacttgcgagtgagtacctatacttactgaccctttttgaggtcaaatcaaatccacatgccatttgctcccccatacttggaaccaaaagatgatgcatgaaaataactagactctctttcagaatggggaaacccccctctctgcctcattgacaagattacaaaatctttacaacctatacaaaatttaacagattcagtaactgaagttagaagatgagatcctccattctttctaagtggagtctggataatgaagccatgtaaatgaatgccattacttttttgagaaagtgagatatgggtcttgagcaatggttaatacatctggtctctcagcctgggtatatgttagacaccgtcgaataaaatcctttgcctcattagaaatggtaggtcta

SEQ ID NO: 72512 - DNA, 491 bp, Glycine max
  Clone ID: jC-gmfl02220050b09d1
gcataaacgcagttcatagtttcatatatatctttataaatatcatatggtgatgaaggtggctaggcctcttcattgcagatacacacgacctctaagcatggcccctatagcttccaatggagaatggtggccacatctttaacctaacaaagaagaaaaatgcagtggtgaaagaccataaaaatattacacgttccttgaacaaaacggattgaacttcaatttggaatagagggtgatatgtggagaaatctccatatccacttttattattaggaaattcagcacatgcatgcattataacaagagcaattaattacagagtacattttagataggagaatacttagggaaccaagatgaggtcattgataatggttgatgttcatacggagaaagaggatgcaaggccaaactgaaggccccaaagctcaaaagatcctttaacaaagtcataggatcctcctttcagtgacaatggttttggt

SEQ ID NO: 72513 - DNA, 426 bp, Glycine max
  Clone ID: jC-gmfl02220050b10d1
aaaaccatgtgcaccagagaggtttacatcttgttccaacacacttatttcattagataccgccgttccatccaatgaatctagtgtagacaaagcttttttgggtgcaccaacaagttccataaaatcagcaccactattaagcagatctgtatattttccacattgagtaattttcccatctttcatgaccaatataaggtcagcagcaggtaagaactccacttgatgagtgacataaaccactgtctttgaacataaaaggcctagcaagcattccttaaagaggtgagatcctgtgtgagcatccacagcactgaaagggtcatcaaatagatatatatcagcatcttggtaaagtgcacgtgcaatttgtattctttgcttctgtccaccactcaaatttattccacgttctcctataat

SEQ ID NO: 72514 - DNA, 468 bp, Glycine max
  Clone ID: jC-gmfl02220050b11d1
acgtgattcattttcaacattttatttctccattgagagtgtgacaaaccaaaagttgaaggaataattttttagccctttttttcctgtgatcatactttattttctaactaaaattttcttttctctgatcatactttattttctaacatgaacatgctagccagaatagaaagaatttcagaagtgactaacatactaaccatctaaccaaagccagaatctcctgactattttttaactccctctaatttaaatctatacactttaaatggtagtagcacatgcctcgaccaaaacgagctggcatgataattaccaagcgtttatggatcgaactgccaggacgagcggaatttctaatcatcgcagccaatataatccaccctacttttcattttgacatatttgatgttggtcgaatctcaatattgactttagaataacccgaaaaacaattatacgaag

SEQ ID NO: 72515 - DNA, 379 bp, Glycine max
  Clone ID: jC-gmfl02220050b12d1
ccccgggggaaaaaagccggggggggtccccaaaaggggggggtgagggggggaaacataccaaaaaaaaaggggggcccctaaaaagggatcccaaaaaaaaagacgggggggggaaaaaaatttttccccccgaaaacccccggggggggaaaccccccggggggggaaggcgggaaaaaaagggggcccccccctttggggaaacctttaaaaaacggggggggccaaaaaccccccgccaaaggggggaaaaccccggaaaaaaatttgccccccccccttgggggggggcaaccccccccccgggggggggcgggcgtaaaaaaaaaaagttggggaaaacccccaaaaacattacaccaacgggaagggcccc

SEQ ID NO: 72516 - DNA, 522 bp, Glycine max
  Clone ID: jC-gmfl02220050c04d1
gcatacataactcattatacactacacaatatgccaccggctcgagggtactgcgaattacacataacaatcaaatgtgatcgctttcaccaaatagaattcagcaagcaatatttaatggatacaaaataaaattcgcatagaatgtcataagaaacttcttagctatatcctattcgcatagaatgtattcagccaagtttgttctccacgatacaataaaagagaagcaaccaaaacgagtatcttagcaatagcatagcattacagaagaaaacggaaaaaattggtgcccaacttcttagctatatcctatttgctgctgttgctggggaggttggtaattcgcatacccaggataactgccatacatattggggtcctgtccagcaggggcataaccataattttcatagcccccctgagcatatccgtagtatccaccaccactaccattccactggtttgcatctggttgagcctgtttgtttgaaggacttcggccccatgaaagcctaacat

SEQ ID NO: 72517 - DNA, 503 bp, Glycine max
  Clone ID: jC-gmfl02220050c05d1
ggtgcatcaaatcaacagagataactctctgaatctttatattatagatctattattgattcattacatacataattcagaaggaaaaaaaaaaaaacataacaaaaaaaaaagtgtccgcttcagatttgatcgcatttttcctattgcacaaagcctgcgcatttcattcaagtttcaacagaagcgtaaaaattgcacaagtgtcttagataaccacattagaaaatgaaaagggcaaccaccacccatcattataataagtaaacaatacctacaaattgcactattgcaaggcattggcaccagccacaatttccagaatttcaccagtgatcttagcctggcgctccctattgtacacaatggacaagttcttcttcaactcaatagcattatctgtggcattgctcatggcactcattctggcggcgagttcactcgccaaggactcctgcaatgccctcagaacctggctgttcaaatacaagtgcagcagtgca

SEQ ID NO: 72518 - DNA, 378 bp, Glycine max
  unsure (1)..(378): unsure at all n locations
  Clone ID: jC-gmfl02220050c07d1
atgagattgagttgagacaaagagatgattctcattaaggtcctagagtcctatcttatccaaaaattaggacatgttaacatgcacactagcagtcttataggatttacaaatgggacaaatgtggagtgaagacccacacacagtacacaagcacaaatgacggcacggcaaaatcagcacacaagactcttccttcctacagttcctgcacaacctcccattaccaccaccctccttatccttcacccctgcgcaccccgctaacgtgcgccaaccccccgtttccttttctaaaccgtcctcctcggtgctcccgcagcaggactcggcgtcgtccatctccgcgccgtcgacacggtggcgccttcgncgacg

SEQ ID NO: 72519 - DNA, 447 bp, Glycine max
  Clone ID: jC-gmfl02220050c09d1
gcaataaacaatcctgctattatttctttcattaaaattgaatttatgtacaaaagtattggctgagttattcatgaattaagcatctatatattaacaggctcaaaatgagcaaaaaataatatgcatctacactactttttcacattcaaaaagcttcccaaaattcccgttccctttaaacataatatgtaagggaaatttgaagtggaatgtgtgcacttgttttagcaaggcaagcaagagttgcaagacccatttccagactcctattaactgaaaatgaagttgcacaagttaatttgatgcaagtcaatcctgggatgtggcagaatattcaaaaagaaggcgtttggatggagcagattgtaggagcactcgcaaacgacttgtaagcagatagctcaatgtccattgcattgccatctcggactccttcatttgcct

SEQ ID NO: 72520 - DNA, 509 bp, Glycine max
  Clone ID: jC-gmfl02220050c11d1
aatccaatactcagcattttagcttattgtactagaaccacaggaacaaacctcagagttgtaaattgtaatttaaagtgagctgtcacaaagagaataactctggcacagtgtcaagtcatttctgattgaaaacatcagaacttaaatactgctaaggaccaatttggtccatttgctacataaacaaaatgcacttctattttggaatttcatcaagcgcaattaaaaaagaaattgggtctttctaccagaacacttactcggcttcaaatacctagacatgctttaatttcaaatgatcatagtatataaactattagaaacaaaaaaagatgtttatgtaaaaaaataaggtggaaaaatgaaaatggagcctatacctgtatatctatgtcagtttgtcctccttgagctccaccaagcggttggtgaatcattatccttgaatttggcaagctatatctatttcctttagtccctgcgctaagcagaatggcacccatact

SEQ ID NO: 72521 - DNA, 521 bp, Glycine max
  Clone ID: jC-gmfl02220050c12d1
aatataattatattcatatttatttatataaaatgaaatacaagtgcaacagcctcatataagagtttcccatatgagttggcagtagaaacgaaataacatctgcataatcacacaagtgaagtgaagctacacaacaagttcattgcttcactcacatcataacccccatatttatttatttaggtaataacacactcgacagtaaagataaataacaacagaacataaaaaccagaagtacttatatctccctcacttcatcttcgttctcgtcctcactccagcagcatttcagaatagacctaggagatgcactaccatcgcagccttgaacaaatgtttggtacacaactgcaccacctactccaagctcttcagtgctcctctcaccacagtagtatcctttgatgtctaagggaaatttattaagtttctcaccatgcatgtcaatgtgcaaagcaacagaaaactctgctggacaaaagcaagctaaaatcctttccacaagttcacctaga

SEQ ID NO: 72522 - DNA, 592 bp, Glycine max
  Clone ID: jC-gmfl02220050d01d1
gaaacggcagggccaattgcagccaccgaatgtcccatgatcaataaacctcaatatttgtagcagctaaagttaaaagaggaaaagaaaaactaaataacaaaaatatggatgaatgaaataaagagtcctctagttaaatcacaaattacctctatttatttacattattgtgagccatcgttagccatcaaattacagtatacaacaatctcctcctctccatgccgcaccagctacccattctgtaagatttattaggttgctcaaagaaaatgtgcaaaaataatttcagaaaaacatcccttgatcaacaacttcttggataggacggcgttttcgtcaggcgcctctgccaatgtttacatttgacaaatgttacatgcccagctcaaaatggacactttcatgtaatggaaaacaaattgcggaatcgttgtactctgcttgaacaaatgtttgaagactgtgcctgttcgtgagcacctgaactcttcagacgcaaggctcttcttttccttcttatccgaaacaaaaagtcttcggtatctaaaacatatgagaccctagatgaactgcaagctatcttaca

SEQ ID NO: 72523 - DNA, 511 bp, Glycine max
  Clone ID: jC-gmfl02220050d03d1
aatccaaaaacttaaatttgaatatttctagttctactttctggataggaaaactcagtatacaaacattggttttaatgcatcacttatttctggaatttcagaaactagtccgtcgacaaagataaatacttgctgtcaaaattctgttacaagtgtaaataaaaaggtttgagtagtaatgttttccatcatcttcatcatcctttttctatatttgccagcaacattttaattgcacattgaaaaattaagcaaatggagaataataaattaataatactaccacttttcagctaccttcattttctttattaattggatctgagctcacagttggaagattccttctgtactgctgagacgtcaatctcctttccaatggtgttttcctcttgcttacaacaaatctgttcacccctttgcgcataggcattattgaaggaaaatcttcgtctggaatctgactgagctcagaaatatccttaatctgtgcgacgcgacggaacca

SEQ ID NO: 72524 - DNA, 521 bp, Glycine max
  Clone ID: jC-gmfl02220050d04d1
agagcactgccaatttgaatttgtttctattcattttaactttagaaggcaaaacacacaagaacaatatggcattgccccacaaatgtctagcaaagatgtgactcaaattcatcgcatgctgcagctttctgctagctacgagagatggatcttataccttcactggccaccataaagggtgataattggagactcgagtcatggtgcttgctgacctccgttattgctcaatttacaatattgctttcaggaggaataaaaaaaagtacaacaaaccaactgtacttcaataatgaatcaacagacaagatttgacccaaatcatcctatgacaatatctagtaactgaagaactgttatgcctaatcccgtatcttctggactccaacccagcgagcataatccacccacaatagtgagcccagaaagtgtttccagttctaacagcaaagcaaactgcgcttagcataagtttgtgctggtgcagcaaaggttcaagaatacgttgttcaataact

SEQ ID NO: 72525 - DNA, 383 bp, Glycine max
  Clone ID: jC-gmfl02220050d06d1
aaagcaaatgcgatgtttatccttacagggggtaatctccttgggacaagacaaccgattttttgcccttttcaccaagtccagtcccgaatttagctaggccttaggcaagttttggggcatttaaacaaagctggcctttttgtcgggtttaaggccgttctgtttgatggcttcgggggtttgcaaagtaccctgttggagcctcctttttttttgccttggttgacctcaagcaataatctccttgggatttgtattcgaaaacaaagccttggggatctgctgtacggcaaaacaggcggcaaagtcaatgatcatgggggccgtaaactgggttcggaaccaggactcctttttgaacagttgcaaccaacttttga

SEQ ID NO: 72526 - DNA, 389 bp, Glycine max
  Clone ID: jC-gmfl02220050d07d1
agagaatccaaaaccagattttattagattgaaaagcgtaactgtacattgatagaaacagtaaatcctttatctaatgaacagagttacccccctacaatccccattccagtgatgactccccgtgccaattcaattacattgcccctcatgcataccttttacagtctccactaatcattatatagcatctcaccagcagaaaggaaagtctactgtctggctgcgacaactggccctttcaccttgaaagtggcttcccagatttcctcctcatttgcaggaactgcagtaatcttatttttaggattctcatagcacattaatccttcaacagctggagaggtcaaacattcttgagggaaagaagcaagtgactttgccacaag

SEQ ID NO: 72527 - DNA, 528 bp, Glycine max
  Clone ID: jC-gmfl02220050d10d1
aatacaaaattcaacgatcttcccatacatagaaattgaagatttttttacagtaccaaaaaacttttacgctgtcaataaattctaattacattcaaaaacaaaaaggaaaagcactagccacagaaaaaaacaaaaggaaaatagtaaataatttattttaacaaataagtaaataattaaattaaagatgagtttctaataatgatactcaatttctcaaacaattctgtgctaccagatgaagacattcaacacattttaaagttgagaaggtagcacagggctgtgtaactgcctgcagtcttgagaaaataattgcaagagtgatccctatctgttccattcattgtctgctccatatctggggttggtactattcacttgactatatacctctggctttatggagtttccaaaggcattccaacctagaaggtatggcatgatacaattgaaaagtgaccttaaaacttctaggtctgcccttgtaacagggagaaagatgctttcctgaattcccctcat

SEQ ID NO: 72528 - DNA, 503 bp, Glycine max
  Clone ID: jC-gmfl02220050d12d1
aaaggaaaaaaaataatcccatttctttgtagtagacgtttatttcaacaatgaaatccttttgtctaataatattcaaataatctaacatcaagggatgaaattgctctattgcttgcacgtatgcaatgctcaaacaaccttggtactatagtactaccaacaaaccaaactatgcagcattttaggtgcctccatcatatatattaggacaataaacggcccaaagtgctgtagcagaagcaatatgagttctttcgtacaaacgagtataatcacaaatgtgcatctaagatctatgaatatgagcaaagaactgcattttatgatgcacataaacagcatattggcatcttacactagcagtagtttctttctagggattgcgtgggttaatcctatactagttagtatacttgggaggcaactatgctgtacagtgcaatgtttaaaatatttctcatttggtatcttcattatcagattctatgcttcctttttct

SEQ ID NO: 72529 - DNA, 537 bp, Glycine max
  unsure (1)..(537): unsure at all n locations
  Clone ID: jC-gmfl02220050e02d1
actcatgtaaaaagaaaattttatttctccctctcactgtatttgtgacgcctaactatgtttggaaacacagtagatacatgggcaaccacgtccatttaccagaagatgcagaagcaatacctaccagctctgatctaactgtgaaattacgtcaacatgataccaaacatgctaaaaggcaaggaaaggaaacaaagaaaacaactgaaattttttgacattagatcatcagattcacttcgaaaagtgaatgcatccttaccaaccaagaagcaatacctttaagagagccatcctaatatatagaccattctttgcctgcctaaagtaagcagctcttggatctctatcaacttccactgtgatctcgtcaagtcttggaagtgggtgcataaccacagcatgtttttgcatcgcatctagaacatcttgatttacaatatacttgcctcttgcctcctcataaagttcaattttctctctaaatctttctttctgaatgcgagttngataaaccacatcgcacttagaagc

SEQ ID NO: 72530 - DNA, 543 bp, Glycine max
  unsure (1)..(543): unsure at all n locations
  Clone ID: jC-gmfl02220050e03d1
gatatacaggacaataaaagaagcaatgcattaaagctgaaagtagagtgtatgttcatcttcaaaggagtgtaaaagagggtaatatatattttacagaatttccgaaagagcagaaaaaaggaagtaaagacaagaatgacttgtgactcaaatcctggaagggatcataggaatagtgtcctgtaagtatgcactggcagcagcaactccacttccaagctttacaggatagcccacatctttcagtatcatctccacaccagctagacatcccaacagttgcaactcattcaagttgccaagatgtccaattctgaaaaccttcccagcaactttgttcagtccaagacctaagctcaaattgtatctcttccatgcccttctaactatttcagtactatcaatgtaagcaggaacaagaacagcagtcacagtgtcactgtaccactcttncttttgggtgcaattctttaaaaccccatgcctctacagcaagtctgggttgctttgcctaaacgactgtgtcttgcaatcacattt

SEQ ID NO: 72531 - DNA, 510 bp, Glycine max
  Clone ID: jC-gmfl02220050e04d1
ataatactctatttgtattatttggtacattaataacttttaagcaaataacaacataccctaagatacctttcaaaccttttgttttcctgaatcgcgccctcaaaccttatgttaacacttcctataagaaagacaaaagtaatggttaaaaaagtaagatttgcttgcataattacactatatataggagaaggaatttgctcatttttttctataatactcttaattaattactattttttttctataacatttaaatcttatttttataaaaatatatatatatataaatttgaagttaattaattattgtttttatagggtattttattgatgttgtttgctgaatggggtgatagaaaaaacagacatatctaattttcttggcttggtaactaactgagtaatcaatatatctcaagccaattttatcaatctgcaatacatatgttgaaagtgggtggaagtggattgtttatgaagaaaacaaaactttgcccaatattt

SEQ ID NO: 72532 - DNA, 505 bp, Glycine max
  Clone ID: jC-gmfl02220050e05d1
ggaaggaaatgtagtttatttaggtttactatttttttacccatacaatattacaataagatttcatattaagtaataattgcaaatacaatagaatctactgaattggtctttaaacaattctagccaaactcaattcatcgttatgttcttcagctgtggtcacaaacacattctatcatagtatgtaagcgttcttcgatccttttcttgtgccaataatacatccagtaccatgacctttggtatttatgcatgcaaaagcctcaagctaattcaagccaagcaccatgacaaacctcgacacaattagagagtttattatgccctacgtttttttccactccatgatgaaccaggccacgatagtttgggtacttgttccttactcttgttaactagtctttgtttgacttgttttttaagaataaggtttcgagcttgtttcttcttatcttctgccttcattttggagagactgggcctgtatatgatgagagttcga

SEQ ID NO: 72533 - DNA, 442 bp, Glycine max
  unsure (1)..(442): unsure at all n locations
  Clone ID: jC-gmfl02220050e07d1
ggaactggcaaagatagtctcacatttatattcatgcatgtttatagtatttataaaatgaaagttgaactatggttcttgcggagaatgaattcaattaagtgttagaaaagtgcttgtatcacacgcattaacacctttctttcaacacattctccctcattggtaaaacccataattcttggcattgagtatgatactccttaatccaccaattggtgacagaatcatgagtaggaggccaaatataatgcagatccagttggtgatccaggataagctgaacttcttaggtttgtaaatagcaagccagataatacaggggagaaagtatgttgttggcgcaaatgcaaatcctccaaaaaatccgaggagggcaccaaagaaagggaacgtaatgcccacaaacatttgtaatgcaacatanacattgcgcacaaca

SEQ ID NO: 72534 - DNA, 444 bp, Glycine max
  unsure (1)..(444): unsure at all n locations
  Clone ID: jC-gmfl02220050e08d1
aaaagtaaatatactgatgtcttttgttaggggacattgaatcagaaaactgtgcgaccaattttctcagccatgtatgatgaagaagcagagttggccatataacatgtattttaactttaagcataagtatgcttgagttatataagtggacattatccaccatctatacagaaaccatttagatcatgggacaagacatttgcaaaaggtgcctagttaatccaagatttctagataaaatgtaaaggctttcagctatttgatcaaaaactttgatggttgctctcttcgatttctgcaggctgcttttacgcttccaagcgcttgacaaatttggtcattgattttgttccatctttctttnttttccttttaaacttgtatggcttatatagcatacaccttcattgacagcattacattcttcagtcaagaattttc

SEQ ID NO: 72535 - DNA, 461 bp, Glycine max
  Clone ID: jC-gmfl02220050e09d1
gagtaatagttgttcactagcatgctttcttggtgagtaattataggtatattatatatacaagattttacctatgattctaaagcatttgtgtttgttttctctttatacaaactatgaaagagaagacagtatacaaagttgatttatatttgaagatgccatatgattcaccctgtcattgaggtttggctgccagaatattactgaacttggattgagatctgatgaaagatcttatcctgtcccaaagtgagaaattggaagcgaaatatctgaccatcactgacttttttgaaccttctctgggaaattctaattccctgtcaataatagagtgcttcatactgtctagatcttcaagcaatggtaatgacacagaaccctgagactctaggtttctgatccacccgcgaagttggaaatttatgatctcaggaacttcatcatgagggcagtga

SEQ ID NO: 72536 - DNA, 343 bp, Glycine max
  Clone ID: jC-gmfl02220050e10d1
acaggacaataaaagaagcaatgcattaaagctgaaagtagaaagtacgttcatcttcaaaggagtgtaaaagagggtaatatatattttacagaatttctgaaagagcagaaaaaggaagtaaagacaagaatgatttgtgactcaaatcctggaagggatcataggaatagtgttctgtaagtatgcactggcagcagcaactccacttccaagctttacaggataacccacatctttgagtatcatctctacaccagctagacatcccaacagttgcaactggaaaatatttaaagaattaacaatatcaaaggttgggaatgtcaatataaggttaatt

SEQ ID NO: 72537 - DNA, 114 bp, Glycine max
  Clone ID: jC-gmfl02220050e12a1
tttggttcgagctaatcaggcccggtgcagacaactactctgaaggagcaaactctatcgaggccaagcgttacactcccaagctggaaaaagtgtaccccaaactcttcctag

SEQ ID NO: 72538 - DNA, 564 bp, Glycine max
  Clone ID: jC-gmfl02220050f01d1
gtgcagcaaaaactaatttctcttataattatttatacagaaacttttcctatgagaacttgtaatagagttgaaacaaacagttacaacttaaaaggactagaatttcactccggaactcctgagattgcagatgatgatgactttgagtagcgttcaagcaatgatagtaccttggcagcttttctcctaaggtgtccatccccatatatattcatgccagtgagaccaattaaacgtgatctagctgttgttccatagtattctaccatttcctttgacacaaacaccttctccaacagtcctagagcttctgcctttagagaatcagttccccagttcaaaatgtccattatggaccttattgcattatattcatgcaagacacgagctcccctttgaggaaaatcttccaaaaccaatgtggagagtgtttgtattgcttcacaagcagttgcatgaacctccccatgtaacagctttatcaagccaggtaaagcctttgctttaaaagacaaaatgtggtgtcacactggatacactcccatgtgctgaacataacgg

SEQ ID NO: 72539 - DNA, 530 bp, Glycine max
  Clone ID: jC-gmfl02220050f02d1
aatatgaatgctttttcttatattaactcattttacatcaatatgaacaaaggaaaaaaagaagggcagaaccaaaaatatagttgcctaggcctgatgccaagttgccaacagaaacgtcagaaaagcttctgtagatgttaagatccaagtgtaataaattccaaactaacgaaattcactaaaagtggtggacctgctgcctatggacttttccttcactgttatctggaaaccagtgactaactttaggatttcaaatcagtaacacattctatttgtagatccactcgttggaacgagcacccgactgatccatatctataaaaatgcttactgccttccctatacgaggtcgttccttcgacttttctaggctgatccgaatatgagacacagctccccaacattttaagttgtttgcaatatcatcaagcctcaaaatatactcttcttcggtcaatgggaaggatctctgcttcatgtactttcacatgacattcatcgcacggagatttcttccatgaact

SEQ ID NO: 72540 - DNA, 547 bp, Glycine max
  Clone ID: jC-gmfl02220050f04d1
aattgcaacatctgatcctctccattttccatggtacacagtcccaaatgtaccagaacccagctctcgcaactcttcaagatcttcattctttatgaactgcacagtactggtgtcaaattcccctgctacaaccacattcctcggttcattcttgtcatcctggtattcagactcctgtggtcgtatgttttccattatggcatccatgttcttattttcattgccctttagttgggaatgctcatatttttggtgaaagatacttgcttctgttttagttgctacaggtacatttttctgattttcttcaccaatatttaggtgggaatctgtgcgtcctgccaaaacaccaccagctggttgaggagcagatggctgagatttactatccccctcttgtacttttctcacagcagacgaaaaaccaagattatcctgatcaattagagatacattatcaaacccctctagagccaagttctgaaaatatgaccaacgtttaggctcatgattgtccatatttaagctcaaacctggtctatct

SEQ ID NO: 72541 - DNA, 557 bp, Glycine max
  Clone ID: jC-gmfl02220050f05d1
gccggcggcgtcgccatgccgccgacgctggcgaccgaggcgctcgacacggacgccggcagcgtggccgcgtggctgagcggcgaggcgagcggcgaagtgcgtggcgagacgcgcggcgaagaggaggcggcggcggcggcggcggcgtcgagcgaggcgcgcgcagagagctccaaggcctcgagcggcggcagcctaggactggcgagcgccgcggcggcactgctgcgcgctggggcagtgaggggcgcagacagcggcgaggcggagccggcgggctcgacgatcagtggagcgtcgtgcagcgtgctgttgttgcacacctgcggactctgctcggcagactcgaagccggacacgccatggctcgtcgagctcgacaccgtcgattcgcgtctctgctcgccgagcgcgcgcggcggcgcgtccgcaacagctggagacgcagcggcgctgctgctgggcgcgtcttgcggcggcgcaagcgccttctcgctgatcagcggcgaaggctcgaggccggacgccgggagcatgcctcgtcgacttggcgt

SEQ ID NO: 72542 - DNA, 330 bp, Glycine max
  Clone ID: jC-gmfl02220050f06d1
ggagaaaaggacctggttacagtcgtttttcgttactgtacaagtctggtctatccagagcagagtcacaagcaagttcaaggggaaacttagtttagctagagtacatgcatgatacaaaatgagctttctataaacatactaaaattatgattgcagctctttttaacaggactagcaaaattatgcttatttgcaaacccgttagttccataagcatatcaataacttctggtttctttttctttttctataagtctagcaaaaaattggcacagactaagaagggtgatttcatttcacatggaaataggaccgcctaactctttg

SEQ ID NO: 72543 - DNA, 433 bp, Glycine max
  Clone ID: jC-gmfl02220050f07d1
gggtcttaaacgtgctactgtgtagttatcaaattaaaatgcagcacacaaaatacattacatgcccagtagtggtctccagagtcaacaggtcagctgcgttcagatctccctcgccccaaacaagattatgatgagctacttggactttggtgaggtcgaggtgatgaatttggagatctggatcttgactgggatctgcaaaatttattaattaacaaaactcaattcaatatccacaatgatccacgatccaatattccacatcaaagttaccataaccaaaacgaagaaactaatccaccacaaatcttgagcagcatccaagtggaaaagcaattgaacccagtatcacacgtctatagtctcaacaagtgttaaaaattctattgtcaacagcacatgatatcttgatccaattatagggaagata

SEQ ID NO: 72544 - DNA, 436 bp, Glycine max
  Clone ID: jC-gmfl02220050f08d1
gcaggcggcatcagaatctagttgaatacatgtatgtcatcaataatctattctccgcagtcgtggagcctgatcccacatcaatccacaattaaaccccaaaggcatccctctttgaacccaatcgctcatttcagctttgtcaccgcttataccagcatcccacgctacccacaattcccagccgcactcttaccgctcaaacaaccaccgtccccccaatatcacacagtcccacttcttcgtcccattccagtccttcagcctcagcagccttcttccacctctccaccggctcagtcacaggctcatactgcgcactgaatgcccctcgaaacgtgccgtagtgcatagcgatactcttcttgctcttcacatccctatgaatcgccagcgaatcttccggacttcagtgctgtcctgaccagatggtgcg

SEQ ID NO: 72545 - DNA, 565 bp, Glycine max
  Clone ID: jC-gmfl02220050f11d1
tcgcgatctatactaaaaaagggtatcctgagcaatttcaataatagggttcattgatattcctagtatagtagatgctatcacacatacaatcatacttaattcgatggaattgtttgatcttaaagggggccttcgataatttcgcacgtgaggagttatttcttggtttcgtccagtcattaataacttgattatttttaaataatagtagatagaaacaacactcgtaaggagtcctattgaaactaagaaatataagcctgcctgccatccacaccagaataaataaagttttccgaaaaaacctgatagtggaggaagacctcctaaggataagagacatagggctaaagagagagccaaataaggatctttcgcgtataatcctgcataatctcgaatgttatcagttccggtacgtagaccaaatgatacaatgcaagcaaaagttcctagattcatcgagatatagaacagcatataagttatcatgcttgcatatccaccatttgagtctccaacaattatatcaataattacatatccgatttgacctatggac

SEQ ID NO: 72546 - DNA, 581 bp, Glycine max
  unsure (1)..(581): unsure at all n locations
  Clone ID: jC-gmfl02220050g01d1
gtctgcaaacttaataaataaatagcattaaaatttcatatggtacaacttcatgctgtctgataaggaaataaaaccaatacaataggccaaaactgcaagaattgccccacagacaaccctatattctcacgcaatatggtaagaaaaaacaattgaggaatagaacgagaagctcccacgccacaattccctaacctcctcttttggactcaatcgcactattaacactcataatatacacattctagagaaagttccctttccaatcacaattgactctgcattctcaaaactgatatagaacaccatgcaagaatgaatgatggaaaccatcttatggcaaaaagaatgggtacaaatatagagaccaccaaactggaaaaagcttgttcccaaaaagagcaagacaccaactgccaagccagatgctatgaagaaatgatggatatgcagcaaagcaatgacaactatgtagaaaggatagattgcaatgcangttgttgctgcggctgcacagatgaccaagtagaagcgagtgtacagggtggtaaagttngctggagcttgctgagtaaata

SEQ ID NO: 72547 - DNA, 566 bp, Glycine max
  Clone ID: jC-gmfl02220050g02d1
acaaccacaagaataccacatatatcttttctttttcatttttttttgcattgtaagaagtattaacagccaacacaaaattatatttgaaaattcagagagagagagagagagagagagaatgagagagcttgatcagctcagtcctaacacaaatgtacactacagcacgtacgtaacagaacagaacagaacagggttctatgttctacgttttatccttaattagtaagagcactccattctatgcactcgggccctcagaatcccgttatacaaagccattctgtttgctggcaatggcattccaccactttgtcttctgcagttgcttctttgctcattcctttctcttccatccttcacactatctgcaaatttgactttcttctttttcttgttctttgtctcccttttcttttcctctgaatacaagcaagagcgcaaggtgggtttgttagagtggtgaatttgaaatgaaggcctggagaaagcaacataaagcagggtggtggagagaagcatggcagtggtgagaagaatgccctgtgagatagaagccattt

SEQ ID NO: 72548 - DNA, 497 bp, Glycine max
  Clone ID: jC-gmfl02220050g04d1
gtctataacaatttcattaaaacaaagagaatatgaatacattacactgagttaggagaataatagaccccccttaagataaattttcataacaaaccaagcaatacatcaatgaaacaaatcaatccaattcctcaacaaaagaaacaagccctccaaaaagctcaagcatctgtgtattctatctatttacaaaagcagcatgtatgtagttgtctaatgggtcactttttttttattttgatgatggtggtgtcttggggtgtgaagacttgcctgtaatggccttcttcactttggaaattgaatgcttcacctttgaccctacacctgataggatgccatgagattttttgtgtgaaactttcgtgtcggtgtcttgagagtctctggatatcacactcacactagatgatgggcttattttctcgaattcgtctcctgcttcgtcttctttgtgatgcccggttgagtgatttcggcctctggagtttccg

SEQ ID NO: 72549 - DNA, 592 bp, Glycine max
  Clone ID: jC-gmfl02220050g05d1
agttattccgatattcggacgcatcaacttgttatgaaatcacattgatagcctctactcgtgtcctagctcgtctaagagctagatttgcctcaattgtttgtctcttgccttccgccttattcaaattagcttctgctatttcaagagtttgctgtgcttcttgtggatcaatgtcactacccttttccgcatcatttactaaaacagtgatctcattattgtttattctagcaaaaccgcccatcagagccatcgttaaccattggtctttaagaagacgtattctcaaaatacctatatctacggctgtggcaataggcgcatgatttggtaatactccaatttgtccgctattagtagataaaatgatttccttcacttccgaatcccaaacaattcgattgggggtcagtacacaaagatttaaagtcatttcttcaaattgctctccatttctaagttcgtagctttcgcagtagcttcatcgatattacctaccaaataaaaggcttgttcaggaagaccatcctattcttcagaagaatcaatttaaacccttctaatgttctgtagactaacatatttcccc

SEQ ID NO: 72550 - DNA, 261 bp, Glycine max
  Clone ID: jC-gmfl02220050g07d1
gggggaaaaggaaggggtttttcaacttttgggaggaaaaaacctggaattttaaccccaaaggcaaccggaaaaaggttccaaaaaagccccttttttaggggccccgggaaaaaacaaaaatcccaaccccaaaaaaacctggggggaaatctggggggcgaaaaattattttaccccccggcgttttcccaatctccaaatttctacccaaaaaaagggtgggattttcgccggacccccaaaggggatccatttgcg

SEQ ID NO: 72551 - DNA, 377 bp, Glycine max
  Clone ID: jC-gmfl02220050g08d1
gaaacacaatggtacacgcaaacataaatatttaaaaatataatttgtcccgataaaacttcaattcacggtacaaaaacagttccgtacgatttttttgaagataaaccaaggtcaaaatactacaattttttgaaagggaagaaaataagaaaaagcaggtggcgaaaacagaactccatttggtaattaaaatattctgatcaggaagtagcatttcattataaacacgccaattgcattaggtccttaaacttcagaacttaaaagaaacgccaggccaggtataaaagactgatgcacttatgggggatctagtgccccatgtagggggcgatttcaccaccatactggccttttccagatccaccctggcc

SEQ ID NO: 72552 - DNA, 487 bp, Glycine max
  unsure (1)..(487): unsure at all n locations
  Clone ID: jC-gmfl02220050g09d1
cccacggaaatctttgaaccatatgtcaagttatacacgcacaatttttttgaactttgacagaagaaatgcagtagcatcacacctataatttccttttcacaaaagggaaaaaaagccaaaatcactcgtgctaaatgatatagaagcaacaactaaaacaacagagtgacaaaagaatacaaaaaataggattaaattgaatcaccgcacttgccacatgcatctaactgttgaagggcagaaagaaagcagcgcatgctctgaaagaccaaatagtttcaaacacatgttctgaaagacctgatgaaatgacttgattaccaaaaattgtggcctatgcagcagccactgacggttcctttgctgtcaagtttgaaacagccaaatgaaatttttctctagttttagtacttgcaacatgtncagcctttgccaccttgctaaaagcactcgtaaaccatgctgttccagcagtcacatatct

SEQ ID NO: 72553 - DNA, 484 bp, Glycine max
  Clone ID: jC-gmfl02220050h02d1
aaggttaaatttgtcacatttattcattatcatatatgcatcacctagtatcagctggattattcttaattaagagaaaactaagatccaatatcttacatgctatgtttgatgttcttgaattagaataatttcaccttgataactttcaaaatcctttaatgcaaattaccgaaataaaactctagttctagtacaaacaacacctagctataataattaggggttgataccatagagctttcgaatcccgtctatatcatcttgcgctagattcaccttactagttcgaggtggtatagaaggatacatgatggctcttaggtccgacgagtggcctaatccgagcaagtgcccgatctcgtgcactgtcacagattcaaggtcaaacgcacttgtcaccggtgatttggtgacatcgtcagacgccacccaatattcgtcggctggaaagtggcaccttccatcagtgggagcgaatgca

SEQ ID NO: 72554 - DNA, 526 bp, Glycine max
  Clone ID: jC-gmfl02220050h05d1
ctaatcttcgagatgatgcatttttccactcaacaccatgaccatggccaaacccagcgactcctcgtctattcatctcacctcaacctgcatccctctcaccccgatcttcacttcttccgccagatttaagcggagaagtcagaaacgtgagcgccaatgatcttcttcatttcctcctcaatctcctttgtcaagacaccgccagtgagcttttcgaggaaggccgaatgggtagatttcaattgctcggtgaatgacctttcccaagcgccaatcttgtcaacagggacattgtcgagcataccgttaacaccagcgtaaatcaaaggggccataacctcggtaggcataaggttgtactggggctgcttgagcaactcggtcaacctagaaccttggttcaagaggtatcgagtcgaagcgttcaagtcggaaccgaattgagcgaaagcagctacttctcggtactgagccaagtagagcttgagcgaaccagcgacggatttcatgagtttggtttggg

SEQ ID NO: 72555 - DNA, 452 bp, Glycine max
  Clone ID: jC-gmfl02220050h06d1
cattcgaattcattttatttatatattaatattatattcaaatgaaataaaaagatattaaaagatactaattataagaatttgaaagtgaaattataaagttattaaatgattaatcaatttttttctacctgttcctgtagtaaaaagagttccatctgttcttgaatagcttccttcaaaaggacttctgcttccccagtgaatgtcttggtagaagatatgatttctttgaattgaggtttattcgtgtttaagtaagcacgtaactcaacaagaaatttccttacctgtccaatttctaatgaatcaagataaccattcgttccagtataaatagttattatctgttcttccacggtaagaggagctgattgggattgtttaagcaactcgcgcaatcgttgacctcttgctaattgattttgagtagctttatcgagatcagaagc

SEQ ID NO: 72556 - DNA, 329 bp, Glycine max
  Clone ID: jC-gmfl02220050h07d1
aaccccttgtatgaatttgtatgggggcaaaatagacgtggcaaattatattaagtttaataatgagaaagttaaaaggatgatgagctggcagtcccatagtacatatgtacacttggacctgtttttatgaagcaagatacaacctaagaatacacatacacaggtgcattcattcctggcatatgaaatgtatatacatgcagtataggatggatggatggataatgaattgcatatcatcatgattcatcaggctttggctccagaatgacgggtatcttctccttgggggcaccttttaacacctacacaatcaccttatcacc

SEQ ID NO: 72557 - DNA, 467 bp, Glycine max
  Clone ID: jC-gmfl02220050h08d1
ggccaaagtgaatctaattattcaaatatttccgtttaggcacactacaaatggtaagaagctgttgctgttgatatatctatcttctatacaaaacataacaaactggaaaataacactaaaaccctaagaaacaagaaatgtattgcaaaacgaaaaggcgacaactatgctattatcattattataagcctaagcacgttctccacggatgcggcgtgcgagttgaatgtccttgggcatgatggtcactctcttggcgtggatcgcacaaaggttggtgtcttcaaacaaacccaccaagtaagcctccgcagcttcctgaagcgcaagaaccgcgtgactctggaacctcaaatcagtcttgaagtcttgcgcgatttcacgaacaagacgctgaaaggggagcttgcggatcagaagctctgtgctcttttgggtatttcggatctcacgaagagcaacag

SEQ ID NO: 72558 - DNA, 479 bp, Glycine max
  Clone ID: jC-gmfl02220050h12d1
aagaaaaaagaaagttctaattattaataaattatatctatatatatatatatacagatagatattctatatcttttatcttaattaatatttgacccctccttataatgtgttatagatttctttatttttaggaacttatccattccttttttaatgggcccgacaatccgaaagaattctgggggaggggtcatttcgcttttgatctaaaataaatagagcttcaagaaatgagagaattaagaatacccacgagaaacactaatccaatccataatgatgtaccggaaaatacaacatttttgttattcgaccaacctttaggagaagcaaatacaacaggtacactaatcaataaaataaatgaaatagcaattaatgcaaaaacagctaattggaaagcaatagtcatgtttctaatcctccaatttaccaacaaaagaactttaccatttgatcccccaaccccttgatcc

SEQ ID NO: 72559 - DNA, 343 bp, Glycine max
  Clone ID: jC-gmfl02220051a01d1
aaaaaaaaaaccaaaaattggggccaaaaaaatcttccggaaaaattttcccaaagggccccgggaaaaccccattggccagttcccccccgaaaaaaacccccccttcttttccctggggggggcaaccccgccctgaaaagggggggttttccaaaacaatggggccccttaacccccctaaaaccttaagcccaaaagggcccccccccctggaaaagggaaatgcctcttcaaaaaaagaattttcccagggggggggcaaaattttttggcccaaccttaaagggaaaaaccccttttcccaaacccaagggggcccccattggttttccaaaggggg

SEQ ID NO: 72560 - DNA, 576 bp, Glycine max
  unsure (1)..(576): unsure at all n locations
  Clone ID: jC-gmfl02220051a02d1
atatggaaattaaactctttaagattttttcctttgaaaactaaattacatgatggaacatcttgggaggccaaatttaagcaaaagaaaatcacgggtaggtaaacaaaaagcaaaattgatttgtgcctaggcacaaatccgtgctatctacttcatatctcgattcttcgacaaagccaaaagagatcatttgcaagcggatttttattacaacaaattagctgaagtggtagcatatagtagtcgttatctgcatcatcatcatcatcatgtaatgtagtagttttaaagtaactgttagcacatggatttgaggtggtctctgaaaaccttcaacattccttggaaagtaacaatccccgtcaaggttccatcctcttccacaacccacacgtaactcacacgatgtgccaatgcttgaatcatcacagcaactaaagagctccaacggtagcaaacaatggcttcagaccttctcccaacccttgcagagtaccctccaagcttncaattcttcccagagcaaaactcttcatcagaagaacaactangagaaaaagaagaccatgaagt

SEQ ID NO: 72561 - DNA, 598 bp, Glycine max
  Clone ID: jC-gmfl02220051a04a1
tttcggctcgaggttgatgtatactttcctcctcggaagagatcgcgtgtcaatgctccattcgtttttgatggagaatggttcgagcaaaagcagaaaacctctattgaagccttgccagatgagtgtctctttgagatctttagaaggttgcctgctggcgaagacaggagtgcatgtgcctgtgtttccaagcgctggcttatgcttctaagcagtatttgcaaaagtgaaatctctgttaacaaaaataccacagtagagaaccctgaaaaggagggtgatgatgtagaatttggaggtaagggatacctctctcgaagcttggaaggaaagaaggcaacagatgttagactggctgccatagctgttgggacttcatctcgaggaggattggggaagctctcaatccgtggaagcaacattgtttgtggggtgactagtcatggtctcaaggctgttgctcgtggatgcccttctttgaaggctctttctctatggaacgttgctaccgttggtgatgaaggccttattgagatggcaaatggatgtcaccaactagagatacttgatctttgcagtgccccgcattactgat

SEQ ID NO: 72562 - DNA, 218 bp, Glycine max
  Clone ID: jC-gmfl02220051a05d1
atcatctattttgtataccaacattgctaccggaaaaaaggccaaccaaggctgcaaggcccttaaaaaggccctcaacaaagaaaaccacatacacaaccaaccctaaacagaaccgaggcaagacaaactccaagaataaaagatacaaaagaagaaaaaaaaagcaataaaaccctccattcaaacccgattaaatatgagaaacgccaaagggg

SEQ ID NO: 72563 - DNA, 295 bp, Glycine max
  Clone ID: jC-gmfl02220051a06d1
gccagttaaattttgaccattacttgggcacagaggcattcaaaccacctatttttcaagttgaccaattcgtgtccattactacgcttattactggactgcctgcgtgggaactcgagaactttttttggtcaagcccttagcttagccttggggatctgatcgagcttgacgaatgaggctcttaagccagcgtttcccttaccgagcttttttggggccatggggttctgattcaggcttaaacgggaacccttttcattgtacgacagcttctttcctggggtcgccttgg

SEQ ID NO: 72564 - DNA, 501 bp, Glycine max
  Clone ID: jC-gmfl02220051a07d1
cattcgaattcattttatttatatattaatattatattcaaatgaaataaaaagatattaaaagatactaattataagaatttgaaagtgaaattataaagttattaaatgattaatcaatttttttctacctgttcctgtagtaaaaagagttccatctgttcttgaatagcttccttcaaaaggacttctgcttccccagtgaatgtcttggtagaagatatgatttctttgaattgaggtttattcgtgtttaagtaagcacgtaactcaacaagaaatttccttacctgtccaatttctaatgaatcaagataaccattcgttccagtataaatagttattatctgttcttccacggtaagaggagctgattgggattgtttaagcaactcgcgcaatcgttgacctcttgctaattgattttgagtagctttatcgagatcagaagcgaattgggcaaaagcttctaattctgcgaattgtgctaattccaattta

SEQ ID NO: 72565 - DNA, 439 bp, Glycine max
  Clone ID: jC-gmfl02220051a08d1
attgtctgactttttgctcagaaattggaacttcgattataagaaacaccaaatacaaagtcaccgaaaataaatattattccacacgatacaatttccataatcccaaaaaataaaatgccagattctgatatctaatttgatgcaaagtgccttaatcttccctcagcaatttgcctagttgttaattgagaaacaagcacattttctacttttactcgccactctgcaaaatttagtgaagacaaatgggattctttagtaaccacaagcatggaattccatgacctctagattgatgaaaattaatttcaaaacctcatttgtgaactaagaagtgacactatcttcggtctttggcttcttacttttaggttcttcatcgtcttcctgattgagagctccattaattgcttcatgacccaaaagagagacatgc

SEQ ID NO: 72566 - DNA, 451 bp, Glycine max
  Clone ID: jC-gmfl02220051a09d1
aaatgaaagtgtaaaattaatatttgaaccatcatattagcgacagtttatatgtcaaagtaaatgcaaagcatagatcatctcctgtacttttctgagaaactaaaagtgatttgaaagtaaaggtaattagcatgtatctctgcttaggtgtgctatatacagaagtaatggatcagacatcagagaaaaccactagtcacttggaatacgatatttgaaagagacttgcatgctccagcttcaccagtgcttcagttcaaaagcctacatttgtacatgctatatacatttcttgttcagctttctttggttcacattttaagaaaaccagcacctgaaagtattacctaagcatggaaaataggagacattgatgcttgccacagaagaaatgtcaaatggtgaacccatttaagctttataccccattaatcattgaagcctgaat

SEQ ID NO: 72567 - DNA, 458 bp, Glycine max
  Clone ID: jC-gmfl02220051a12d1
cagtgattaaatacttcaatcaaaaattggtcagggatacaataacaaaacccaaatgggccatatagaaataccaaggtgaacaaaatctcatcccctgcctacaacgtcttgaaaggaatttagtacgtcatgggagccttcaatttattcttacaacaacatggtctctggattttcaatatagcctttgaatgcttttaaccattcggcaccaattgcaccatctataacacgatgatcacagctgagggtcacagacatgaaggaagcaaacttgaactcttcagcacctgaacccggaacgaccctcctctcagaagatccaacggcaagaatgccagcctgaggaggattgatgattgcacagaattgtctgacaccaaatggccctcccaggttagacactgtaaatgtacctccctcataatcttggggtttcaagctgttttctttgg

SEQ ID NO: 72568 - DNA, 415 bp, Glycine max
  Clone ID: jC-gmfl02220051b01d1
gattgccgaaattcaaccatgttatattgagacaatgaatcaagtacacaactcacagcaaaaaggtttataagctgtaaaggtccatgtaaccataaacaaaaatagtctccaagactatagaaccattacattttagacaaattagtcttgttccacttgatcctacgtaaacacctactacaacgggtggggttactgctgcctaacatgtatcatattcactacaaacattttaataggagtagcctttgacgaacaactgcttcttggcttcctcagattcacccttaccggtgtactttccaagctgggcgagcgagttggacttggcacggaaaagaagtgcatcttgtgccggcttcacattctctgggcgggctccccatgtcttcaaggcaatgttttggagggc

SEQ ID NO: 72569 - DNA, 390 bp, Glycine max
  Clone ID: jC-gmfl02220051b03d1
cctaacaaaagcataaattaaactatattacaagttttattttgcaatattcggatgagtccgtataggatacaaatattcacggacatcttaattcataaggcattacaataattaataaataccccaaagcataacaagttaaaaaagaaaaagagcattggaacctatggagattggagtttcaataagaaaaacatccgcctccttctggattctgaaacccaatgttctcaacggcaccaaccgtcttgaacattctcctcttgtgaatctcctccatcagtgatcgttgcagttgttgtctcctcaggtccacgaaggaacggatcctggttagcctgtgcattccatgacacctgtgagaatccattctcatgttgcataaac

SEQ ID NO: 72570 - DNA, 450 bp, Glycine max
  Clone ID: jC-gmfl02220051b04d1
gaacacgaaacagagatcataatcaaaataaattgcaaattaatacatagtacacttcaaaatccagcatgcatttattagtatattcccataccctgcggctcaaaatttaaggacttacaaaacattaagaaacaagacccttttgcaattcacactgactgatacagatgcagatagccactcttaactatctagtatcctagctacaccgctgcaaagtagtctttgctaagtttagggtctggtttcatggacttctccccaggcttccacccagcagggcaaacttcatctgggttctcctgcacatactgtaaggcctggagagttctctttggctcgtaacacttttaccaattgccaagttgtaatggtagaatgctgaataaccccttccttgtcaataatgaacaaacctctcaatgcaattccctgatcaggaatgag

SEQ ID NO: 72571 - DNA, 451 bp, Glycine max
  Clone ID: jC-gmfl02220051b05d1
aagaaactcgagggatacgttcttttagcgttttcaaattttccttaactaattcccccacatcatatgcacaaatacatgtcaaaataactacctatttgaattacagggtagatgaatgcactgaagccccttttaagctttggctgagatgaagcaccttaaaaaaatcctttctattcctcgtcatcatcgtcttcttcaggtgcctcttttagccattgaattaacttttgggcctgcttaacaaaaactttatctgcctcgtcagcatcttttaactcggcttcccaactcaaaatagcatcttcttctacaacatcttcattgtacaagtagtgcaaaatccttgtgaacaatggagcaaattccttagcagattcctcacatatttcttcaaatttaagtattacttcgatctgctcatctatgtcagtcagataggatgtaa

SEQ ID NO: 72572 - DNA, 291 bp, Glycine max
  Clone ID: jC-gmfl02220051b06d1
aggacaaaaggaaaaggccccaaatttaatttaaggggcccctttaacccaaaaattttagggaagacctcccaattttaaaaatattataaaaacatttaaaacttgggatattctttttgcccctaaaacattggaaattttaaaaagggtcccccccggtcccataaaaaattttagcccttggatcaacccaacctttaggaaccaaaatttttacttcccaaatttgctttgcccccaattcaagattggaaaaaaatccccccgtaaaaagcctccccgggagcc

SEQ ID NO: 72573 - DNA, 298 bp, Glycine max
  Clone ID: jC-gmfl02220051b07d1
agaaagggcaaaaacgtaacttttggaacccccaaacggggtaggcccctaaagggccctccaaatgaaccccagggcactcttttacatgggcacttttagccgggggtaactgggggggtcccattcatataaaagaaaaattttctcccggctaagggcagggataatgggattggatttgccctttttagcctccaaaaggggaaccgggtccgacagggagcagaaaattgtgggcatgattgggagttccgcaaaaatgggctcaaaatttttgggcccgaggtttggccca

SEQ ID NO: 72574 - DNA, 451 bp, Glycine max
  Clone ID: jC-gmfl02220051b09d1
aaacttctctacgcttaatacaacatatttaacccttataatgggtgtatatatgttaaaaacgtaaaaacatggtaaaaaaccgtgttgcataatacaaagcccaagcatatctcactgaacttggacatcaataaccttacgttcaaccttggtcttaggaatggtgatataaagcacaccatttttcaactctgccttaaccttgtccttctcgcaattatccggcagctttaaacgggtatcataggaactataggtcctgcttgaccaagaatcatctccaccatgttcttgttcacttttgtggccaccttttataacaagcatatcatcctccactgataccttaacatcttccttggcaagacccggcatgtcaaacctcattctgatttcatgttcttcatctttgatgtcccaaggggcacggaacttccctcctcctatg

SEQ ID NO: 72575 - DNA, 380 bp, Glycine max
  Clone ID: jC-gmfl02220051b10d1
gttgaatgttgtctggggtaaagtcacaggcatatagtagtatatagtacatacaagagagaaacatttagcgcggtaacaaatacatgatgagattcatagtatgatactattacacatgcggagggatgaagtggttggttctggatcaagaataataaaaagtagttagaagaaattttagaaaatgtcgagaatttcgaggatggagcgattgcaaaggggacaagagcctcgattaagccacagttccctggaacacaccctgcaaaaagtgtgtccacatgggatgaacgctgcgcctttcttcctttccatgcacacgcaggacaccgaatcattccccacaacattctcctctttctctttctccttctcct

SEQ ID NO: 72576 - DNA, 405 bp, Glycine max
  Clone ID: jC-gmfl02220051c01d1
ggacaataatttattttatttcaagtccatatcgggtctacacatagacacaacataactcatgttgctagagtagttttctcacaaccatcgtgcacacaggccaaaacatctctgtagtctcttgaaatggtaaaggagtcgtagaccttttcatcactacttttcttgtactcaaacaagagatatgaatgattgaaagcagtcaatttgccaaacccatagtcaacgtccctataaagactccaaatagggggtgatggtgtgaagtctgacaggtgacttcccccttcaccaacaaccacatgaattgttccattcacagtgccagagtagtgatgcttttcttcattcacacattgattctgataaatggggcatactctttcatagttatggacatga

SEQ ID NO: 72577 - DNA, 582 bp, Glycine max
  Clone ID: jC-gmfl02220051c02d1
aacaaataaaacagtagtcttcaattacttcaaccaaaaggtctaacaaactacacgattataagcttaaggcaagtaataaccaactaaaattcaagtttgcaaaactatgatttcttattataaagcccctaccctacattcggggaaacttcaaaaccactatttttcatccaaattattcaatgcaaaggggaagcaacatcattgcctcagatagttgtcgtcgtcattatctgtatattaacctccaccaccagaaccgtatttctttccgaacaagacgagctgtagcttatcataaccagcgagcactccagcacctgcaacagcacgtaatatgtttgcaccggcacctttaaagagtgacttagtaccctcttttgcgacaattatcttgaatgcttccaaagagctcttgtattttacagcttcttcagatgtcatcatcattcttctacgcacagtatcaatggggtaagaggccaagccggcacctattgtgatcccccatcccaagagaaactcgcaaagagctattctgcaatcaccaacaagaccactgttcagagatcttctttc

SEQ ID NO: 72578 - DNA, 299 bp, Glycine max
  Clone ID: jC-gmfl02220051c03d1
aacacgataaaaggcaaaacaaaacacccaaaacaacaataaaaacacacgcaaactaacaacacaacaaaaaacccccacgaaataaaaagcaacaaagccccccaatagcaaagaaaggaaacccattcaagaaaatcgaacccatcacataaaaacacagacgggtcaaccttcataccaacggacccttatcaaaaaggaactaaataactcaaagcacgaactaatcaatatctgacaacagctgctggccaaacttatcacgaaatactctccataaagagccccaaaaaccc

SEQ ID NO: 72579 - DNA, 412 bp, Glycine max
  Clone ID: jC-gmfl02220051c04d1
aaatattccaggaagctaaaattgcctataaaatatgtctagggataatgtatatattcacataaggagtaaaattatatcatcccgcttagaattagaacccttctaaggactataggctattatagcaccaatgctacaaagggtcctaaaatttgattactgcaatatacaatacacattatatatatgcttttttttagtgaatgcatgtcttccatcttccttttggggaactagagatcaaaactgtgactgtggaaatggaacatgggatgatggcgttgtcttggcatactgtgtgacccgatttcttcagcaacacttgcctgaaatgttgaagggccacaaactatgatacccacattaaccaggccccatttctctgacactgattcaaaaaatcctttaa

SEQ ID NO: 72580 - DNA, 461 bp, Glycine max
  Clone ID: jC-gmfl02220051c05d1
acaaaacgagaacagagtacatacattagaggatcagaatatcttctagcacagaagttaaaatttaacatgacattttacctgtttcagcaattcttaaagactacatagataaagtgcaacatacaacagcttaagggttaagacttaagactaaatattaaacaaagggatatgtagcttcttagtcatcagttcaccatcatctgtgctaactagtggagatatgtagcttggtactgatagccatttccaaagtagttgccaggattaggagagatgttataagttgcagaacccatgagaggagggcagtgattgtcagttggtgcagggtacatgtaaggtcggtcatacacgtattgaggatacctgtcagcaactctagcataagaagttatgtcagatagaatgttagtgacacgcgggccatattccacaccattagcacggcgtctttt

SEQ ID NO: 72581 - DNA, 465 bp, Glycine max
  Clone ID: jC-gmfl02220051c09d1
gcaagaacaatctgatcttctttattgtggctaaaagtgatatctcaaaaaacaaataatgtaatagtaacccaaagccaccaccagtgaaaaccacaagttctagatgagataaaacttaaaagaaagtcaacaaatagatctacgaaagttctttggcagcagcaataacagcttccttggtgataccaaactccttgtatatttttcctgctggagcacttgctccaaatcgatcaatgcctatggcctttccttggcttccaacaatcttttgccaaccaaatgttgatcctgcctcaatgctaactctaactgttaccgaagcagggagaacactctctttgtattcatctgactgctcatcaaaaagttcccagctaacaaaagaaacaactctaacagcttttccttccttccttagatcctcagcagcagcagcagcaatttccaactcagaaccag

SEQ ID NO: 72582 - DNA, 450 bp, Glycine max
  Clone ID: jC-gmfl02220051c10d1
aacacgaggaaccaaagttgctttttcaattcatatatgaaatttgacataatgttgcctttgggtatcaattatgaatatgaagcatgagagtcaaacatgctgtcgtttttcacctaagtctcaaacacacctctatcaagatgaaagcaacctactaacggaaataaatggatatctgagggatgtcgatgtcattatcctcatcatcctcgcatgccacaacaacgtccaaatggcgacggtacgcaagaatttcaaacttggctacttcccttgccagatctgcaacctttttgtccattcgatctttatgccgagggaacatgctattatagagcaggcaactcccacaagaaatactgtaagcattcaagccctttgccttcagccactctagaagttccctgagggtaggattgtctccgagaatccatctatcccaaaccg

SEQ ID NO: 72583 - DNA, 445 bp, Glycine max
  Clone ID: jC-gmfl02220051c12d1
atattattatataaagatagtctataatcactagaatttctatatatttatacttagtatataataattctagtgattatagctaagccaatatatatcataatataatatacccttttcttattcaaagaatttatggctatgccttatcatttttagtcaaagaaaagaaattatggaattgaaataactcactcagaacgccctttaaaagattacgcggtacgattgaatcaaataagcccttatggaataaatattcagctgcttgtgaaccttcaggtactgccttattcaatgtttgttcaattactcttttaccagcaaatgcaatataagcatttggttcggcaataatgatatcccccaacatgccaaaactagcagttacccccccagtagtgggagatgtaagtatggatacatagaataactttttattttt

SEQ ID NO: 72584 - DNA, 525 bp, Glycine max
  Clone ID: jC-gmfl02220051d01d1
aaaaagtcaaatttcaatactttttttagtgtaaaacaacaaacttaagacctcatataaattacttaaactcgtctctagactgaccttagtagattcaaaattaatacaataattcccagcagaaattaatggagacatatatttccctttttgctgattgccatccgatactgagcgttgctagtaataagcatcaattaagaatctttgcagcagcaatttgagacgtgaattgcacaggtcccccaaaaaattgaaaatatcgataggatattatttttcatgaacgagaggagaatacacaggataccacatattgcttcgcacatactccacagcctgatcttttgacatatgggaaagttccttgggccccacatcaccatgtccttctgccagttcttcttcaactgctgctcgaagcacagcagccccgacctgtgccgtaacatctcgtatgctatcaacggatggatacacaattgctttcaagatatcttccgtcgccatgtatgaagcaag

SEQ ID NO: 72585 - DNA, 601 bp, Glycine max
  Clone ID: jC-gmfl02220051d03d1
cttgatagaacattataacatgcattattttattattttgatcacaaagtccatctagtagttatatatggctcctagtcttggcacaaagacaaagatcgttcttcttgtgttgggtgagtcctggcaatacttgaacatcaatgtcttcctttatcatcccttgtggcaattcccaatcaaaggaatgaagaagattagcacgaacaagttctaatatcacaactgccataggtaaacctgggcaacttctgcgacctgatccaaaaggaattagttggaaatcttgtccacgaaaatctacgtcgctatccaagaatctttcgggaataaactcttgaggatttttccaagattcgggatctctatgaataacccaagcattcacgtataatattgtcttagctggaattcgatagccatgtataatgcactcttcatttgatactcttggtacaagtagtgtggctggtgggtacaatctaaatgtctcctttatcattgccttgaataggaaagttttgaacatcatttcatctaagacatttttgtgcctccacatttctactactttctgactttctcatactctaggttttat

SEQ ID NO: 72586 - DNA, 410 bp, Glycine max
  Clone ID: jC-gmfl02220051d04d1
aatcaattcaaattaaaggattttatattaccaggtataaataatcaaactgtgtatgatccatagtttcttacaacttattgccaaattggagggatttattcgaaagacaacctaattttaaataaaatatgaccatataactataagcaacttctctaccaatttaagactgctttctgtatccaatatcctctccttcctataagactttttggttcttcttttctgtatcctacttcttggtctttcgattcttcttcggtcccggaacctccaacctaccaacagaacagccacaccttcctctgaggacaagaacagcccttccattggggggtgccatcttcttaagctcggcctcgagttcccggtgatgatcacaaaaaaccttatacagtcccttctta

SEQ ID NO: 72587 - DNA, 530 bp, Glycine max
  Clone ID: jC-gmfl02220051d05d1
aatatatgttgttatatactgatatttgtatatattcaactgtaaatgatagaatacagatagatctatctatatagataagaaaaatagatcattttacatgttaagttctttggttcgaagggtaacacacaagcgatcaatttgatctatttctttatttctgcgtgaattgtatgtttgcaacaacggggacaaaattttctcaattccaatcgactaggcgtattctgtcgattctttttagttatatatctagaaatacccgttgattccttattaacactctttttatcacaaccggtacattccaaaataacaattactcggatatctttacctttggccatgaacctcccttgggtttttaattcacttaactcttttggtttcggattataatctaagaaaaagaaaagaacgaaaaaacgaaaatataaattaagaattagaaatccaattttgaaagatttcgttccatttaagattaggattaatatagtacaaaaataatacaatgatctcgaact

SEQ ID NO: 72588 - DNA, 351 bp, Glycine max
  Clone ID: jC-gmfl02220051d06d1
acattcaaataaatatattgggtataaaatatgaaatttcactagatctacacttcaaggaaggctatacataggcacatgctatgactataagcgtcttcatgaagaatgctggatgcggggctacgtatatacataggccatggagagcctaatgtcagagctaaaggtgtccaatgaagatcagtttacgtgcgacatggtgatacaacaactgatccactgtggttataacttatactttagattcagcactatcgtcatgatgatgtcatgcaccaatttcctagtcactgatgccacatggatttgaggtgggctgtgataacctgtaacgttccttgcaaagtg

SEQ ID NO: 72589 - DNA, 482 bp, Glycine max
  Clone ID: jC-gmfl02220051d08d1
gaagatgaaggcatcttcgtggcccaggattttgtatacaaatatatcactatagcaagtaagcacctcaagtttgagataaaattttgaagcagtagtgcattcaggtcaaaaatgacagacaaggctggcaacccagtccctgtagacaaatatgaatatacaaaatgtagcaaagctaagatggcgaaaaactcacacatgttgagccggttatgtatgacacaacaactgttatgtcatcaagtttgccaccataataacggaacccagcctcttgagcagccgtagaaaatggtgtcggcctattcctgtccagtgctcgttgacgagccagtactgctatcttctgagcagttacttggggttctagtccagctctaactgaatgtaaaacaacttcagtgacctcatcattgtacagattgtcaaacaatccatctgttccagcaacgacaacatctcctggggcaacaggtatt

SEQ ID NO: 72590 - DNA, 460 bp, Glycine max
  Clone ID: jC-gmfl02220051d09d1
attaaaaaaaatagtcattaattccttcatagatggatgtcttctataacgatttataaacatacattaataaaggaagagtaaaaagtaattctaatcagcggttacaaatttctacagtatattagttaattacacctttagccttttttcactggttcataagacgtatccctcaaccaaaaaaatacaaaggttgtgggggaactcttctttggttgccttttgttttttttaatgaaaactaaaagcctaattataataacaatatcaatcaacatgctgcagaaggattggcgaaggggttgaagaagtgaggcttaggggccatggagaatgatgtcttgggggaaccgacggcaccgttgacggcgctgacgacgagcctctctgaagaggggcacatggcgagtgttgcccgaggcataggcatgttcaacggctgagccagtttcagtgc

SEQ ID NO: 72591 - DNA, 448 bp, Glycine max
  Clone ID: jC-gmfl02220051d11d1
ataacattaactttaatttccatttaactgtaaagtaccgtgtgaagtattcatgccataatgtttttcttcttttgagggtcaagtcattatctatcctaattctgatgccggacgtcacattccacaaatatatattcacgccactgccattcatcatttcaattttcatccagtctatggcatggaatggaaacgggtctctatcgtcattaccagagactccatcagcaataatggtgcatcattatatgattatattgatgatgataaacattgtgtcttgcactctaatcttaacaaagctttatcctgttcttggagttggatccaaccaatcccgttatgcgttatcgtgtcccgtgttggcccccccacttgccagttgccaccaaagatatattccctgcaaaacaaacactagaaacaattattaatagcataaaaa

SEQ ID NO: 72592 - DNA, 479 bp, Glycine max
  Clone ID: jC-gmfl02220051d12d1
tcgcgatctaggaacttaatttctaattaagttcaattctcatcagtaaaaaagtggtacacccaaaaatacagataattcgccagctttatgtgcaatttgtgtcccattcaaattatcttcaatacgagtcaagggaataaacccctgttctatggtttccagataaacgatactctcaaaagtactggtacgagtaaaaataccctcttctttaacttctgttattattctgatggagtgaagctcgttcataggtatttcgagaataatacgacgattttttccaggaaatccccaacgaacaaaacgtacctttttcccttttttattgaagatatcaaaaccaccacctatatcccaaaaaataatcgacccaaaataaaaactactaaagagacccgcgattccataaaaagccatcgtggccccttgtggaataaatggaaaataaataaagtccggaataaaagaaaaat

SEQ ID NO: 72593 - DNA, 552 bp, Glycine max
  Clone ID: jC-gmfl02220051e01d1
aatattaaacaataattttggcatcataaattcttccggaataattatacaaaagtgaccagggaaaacccgatctgccagttgcccactgaataaaaacacacatcatattactatgtgttgtcatacatgcattgtaatgagtggatattccaaagcaattggtccctttatccctccttaatccttatgccgtaaatggcaccatcccttgtaaattgtaattgcttcttcagaaatagaattatacaaaggtagttgcaatatctatttgccaaactataaatgtaaagacccttcttcccaatcctagtagtgtcccaattgtatttacaaaggtgggacaagatatgtatatacaagtacaaccatgtaacataatgtaacaataatcatactttggtctttactagtgcacattacagggagttattatgcactgaaacccctttgcagagaactccagggattggaaggaatactgacacacgcttgtgctgaagcctcagccatctggtcattctttatccctacatcgcagatgtttgcaag

SEQ ID NO: 72594 - DNA, 503 bp, Glycine max
  Clone ID: jC-gmfl02220051e02d1
gttgcattaaaagtgtcgtttaaaagggctattgttaatacatgtgcttcatcacaaaactgaaatgagaaacattgattcataacctgcctgaaaattaagatactatcccagaaagatagttgacaaaactgataaaaacactcccctgaaatgaactcagtctaactaaacaatcgcctgagacttgctaaggatcactccctcatatttcacctggaaccacttcatagcatcctcctttgtgacacggtgctggattccaacacgggacttgcaccttcggcgacgtcccacacgatagccaggacgctccagaacaactaagaagtccattccataaataccagttgaaggatcatacttgattcccaaatcgatatgctcctgaatgccaaagcccaagcaaccagtatcactgaagttccttctgagaagttcatattccttcacctttaaaccactttccaacagatgcattgccttgtcacctctgacagtga

SEQ ID NO: 72595 - DNA, 566 bp, Glycine max
  Clone ID: jC-gmfl02220051e03d1
ccaaaaggcttaaacctgccaataaagatgatcattaattagtactaattactaaacctgtctagagatatatatagacagaaatatcccaagcaacaattctagtaaaattaacctggcccagtaatattatttactagtatttatataatacaggctatatatacgtacatatatatagccaaaccaagtattaacccaaatttgcagaaaaagcaaagatggatccgctaattgattgatgtcagtggtaagcaggaaaagcattggctccaacaaagcatgtcctcttcacaaaacgacctttcattctaggccttttctctgcgttcaacttccttacttcatatcttatcttctttgcaaacaaacgagtccttctcttctctctataccttgacactcttgcttctcttccaccatctaggtgccctcttaagcttcttactttcccacctacaccactcaaacccaaggagaagtcataatcagaattgaacttaggtgggtttgaagttgtccatggagaagaaccttggctagaccgcagtaataacctcatcata

SEQ ID NO: 72596 - DNA, 392 bp, Glycine max
  Clone ID: jC-gmfl02220051e05d1
cacgaaatgcttatcatctctttccatttccaagtacttttgcctttaatgagtggtaacaaccagatatgactatctcacagggaatcaattgaccattaaatgaaggggaggaaaaataaagaaaagaaaatgatgaaaagcagcaaagccaatatataagcactccagtcataaaacaacatagtacacggtaacaaacaacatatggtcccatctatccaggctcttgtatacatctcaaatgatgaagaatcacatcataaatcaattttcggagaaaaaccttccatcaataacagtctcactctgcatctggatattacctaattgattcatctgccagctctgatgaggggcaacatgttcgtgcgaaggagtgtagtgctcca

SEQ ID NO: 72597 - DNA, 312 bp, Glycine max
  Clone ID: jC-gmfl02220051e06d1
aaaatggggcaaataactgggtcaattttattaaaaagtcttccccccaatcgttaatccatacccaattttgtagcggtttaacaaacccccttcaatttgaaatttttagttcttttcattttacaaacttgggcatccctttttggcaaatctaattatttccacagtttaggtcctggggaaactgataagccatgaattatgcctgattttgatggatttggatgctaaaattcaactggtccatgcctcacgaaattgttagccggaattttgggcctgtaaattgcccaaactacctgatcagcc

SEQ ID NO: 72598 - DNA, 372 bp, Glycine max
  Clone ID: jC-gmfl02220051e07d1
cattatattggaagcaataaaagtcaaaatgattccaggaagcaccatccacttctcctttgccgtgacatgtctagatctcaagtcaagcaatgccactgctttgccatagggttcttctatggagaattcaacagctgttaggaaattcatttcatttccccgtttcccattgtgtctcagttcatagtctagctttcttccggggaaaattctcacccttttgttggcaccagtaagctcaaagagatgaccatcatttgtagatttgtttggaaggtgaaacaaccaaagattctccaaaatagaccatccattttccataaactcagcaagagtgcgagtttcaccagatttcatgaggccaacaac

SEQ ID NO: 72599 - DNA, 427 bp, Glycine max
  Clone ID: jC-gmfl02220051e09d1
ggtgctggagctctttgagctctagatgaaattttaaagtttaatcgccaaaatgcttgccaacacaacttattctcatacttacatcaaactattctaacaagcataattaccaaaaccaagcaacgtacaattcctcttataacaatagagtaggacagggggataaattatctatttatttgacattaaagtgaacatcagtacagttgactttgtagcaccctgattacaggttcttcattcatttgactctgaatttgaaaccatacatgagtagctacatgtcttgctttggcttccggctcaattctgagtaatgaccacccattagctgcaaaatctgcttccacaaactttctgaagaatctgataaagccccacaaagcaaacttgggctacatgcagcttcataccaataatctga

SEQ ID NO: 72600 - DNA, 458 bp, Glycine max
  Clone ID: jC-gmfl02220051e10d1
aggacaaaaggaaaaggcaccaaattcaatttaagtggacactttaactcaaaattatagaggaagacagtccaatatgaaaaatatagtaaaatcatctcaaacttggcatcttctctttgcacctaagacattgagaattctaagaatgttacacgcaagtcccatcacaacttctagcacttggatcagcacaaccttcaggaacagaaatatttacttgccaagtttgctttgcctccaattcaagattggaagaaagttcccctgttaatagcatcctcgttagcatttccaagtgcagcctcgttcaagtacttgtcagccaattggactctcttgacattctcttgttcttggacaagcatgttaccatacgtcaagagcttctccagagtcatcttgggctgctcaaaggttggaggtccatcttttgagttcacaagcttcttcccaat

SEQ ID NO: 72601 - DNA, 343 bp, Glycine max
  Clone ID: jC-gmfl02220051e11d1
aaggaaaaaagggaaaggccccaaaataaattaaagggggcccctttaaccaaaaaatttaaagggagacccccccaaaagaaaaaaaaaaaaaaaaccttcaaaaagggggagtccttttttgcccccaaaaacttagaaaatgaaaaaaggggcccccccaggcccaaaaaaaatttcaaccctgggaacaaaaaaccctttagggacaaaaaattttccacgcccaaattggtttcccccccaatgaaaaaggggaaaaaggtcccccggaaaaaaccaacccggggggaattccaagggccgccccggtcaagcaccatgcacacaaacgggcctttta

SEQ ID NO: 72602 - DNA, 373 bp, Glycine max
  Clone ID: jC-gmfl02220051e12d1
aaaaaaaagggccaataacaaaaacaacaataaaaaaaaaacccaaggaggggcaaaaaagggccccgctaaaaaaaagaacccgatatacaaaggggggaaaacaaaagaaggattaggcattagggaaaaaaaaaatggcggcgggaaagttaaaaaaggggagacatcacaggggggaaccagggatgaacatgggggaacaccaagcaatacaagggggaaaaacaaaggggaaaagggggccccccaaatccccttaataaggggatctaggagggcccaaagggagagaaaaatttagaaccgggcacctcatatggatatataccgggcttccatgaaaaaggggaaactgcgcaaaaaaggggga

SEQ ID NO: 72603 - DNA, 596 bp, Glycine max
  Clone ID: jC-gmfl02220051f03d1
cacacaatcagaatacataagttgaataacttcaagagctatacattgctaatcaatacaaagaagaaaatccataacataaaatgtttgaacattggcattcataattgggaaaggtcaaccaatcctagtaccaaacctgcatttcacaattgtagcacttttcattctcaacctctctctgacatacattttttcgtcatcatcttcacttttaccacaaggataggagcccatacgcactgagccacctttcccttaactttcaccagaggagcttcccctgatcaaggagccacgacggttgccaccaacaatcacatctttgagtcgatatatgggagcaagcaccctgctcctcgcctcatcatttatactgatttgccatttaagttgtaaagctctttcctgctgccagcgttgaccaagcattacaagacccatcacagcagctgcaatgaagacagaccagaatgcatttgcctctttggcatgagcatataaggaggcagctctccgcttccaccaagcttcacaaggaagatctgaggagttgtattcattatctttgggaagagagtttgacaatgatagat

SEQ ID NO: 72604 - DNA, 461 bp, Glycine max
  unsure (1)..(461): unsure at all n locations
  Clone ID: jC-gmfl02220051f04d1
gaaagccaattttgactgcagaaaaaagttattattttctctatttgaactgcctattcaacagttaaagttacaacgtacaggaaaaccaattcaatttaatttctatctcctatttttctaattgatgaacgaattaaatgtaactcgagtcccctaacagtaagtcgagcatgtcattggaagtgaggagagttgttccaccaacaagcaactctatatcaggtcttccactttcacccaatgccttatgagcttcacgcacctcgagtccattaatgcccccaataacaaacaccaaaatgacattttgatcggcaagacttggtttggcctgaccaaggccaaatcttccaaacccacttttaaacaagcgccccacagtggaagaatgatattctaacccaggcacatcgtacttgcccaacacccttngtagtagcttataagtaatccttttc

SEQ ID NO: 72605 - DNA, 416 bp, Glycine max
  Clone ID: jC-gmfl02220051f06d1
caatcttatttctcagtattcacgtaccagatatccttacaggtgtgctatatataagatgaacgccagtattctattgctgctagtgccactgcatagcatagtagcaaacaactttactatggctcttactagttacaatcccttcagcctttacatacatgtaatcatttggaactttatttctacattctggtgacttatagcgacaaaggggtgtagcctagcaagtaatatccataaacatcaaccatctacttgtgtaaactctagagcatttgcatcgggatcacgtgcaaagattgctggtcttccagaatgactaaatgtgtaagggatccccgctttatcaaagattgctttcagcttggaaacattacgaatcgcaatacacgtgagacgatcttgaccaccat

SEQ ID NO: 72606 - DNA, 488 bp, Glycine max
  Clone ID: jC-gmfl02220051f07d1
atacaaggtgtagtacaatataacaagtaagctaaatgttatacaattctgttgataggaggattataatgaaatcgggatttaatgcagatcaaaaagaaggaaagcaatggcatgatcatccccatcaatgaaacctgtatagaaggatacttcaatcaattatggtcatgaaagggtcacgtaggaggaatttctggtttttcggttaacatctttgagggtttcaacttccataccaacggatccttatcaaaaaggaactaagtatcttaagcaatgaactaatcaatatctggcaatggtgttttccaataattccatgagttgtagtcctcctgctcgaccaaagaagttggaggaaacatgtcattgacgagggtatgtaatgacgtatacgactttgcaccaatacggtgactaatagctacctcacccttacggttgataaataatattttgcccttcgggactccaatctttctgga

SEQ ID NO: 72607 - DNA, 456 bp, Glycine max
  Clone ID: jC-gmfl02220051f08d1
aagtacgtaaaaaaatgatactaggaaacccatatttgaacatccccaaccgtaagatctatcaaatatccccaaagcaagataagaaccacatcaacaacattggcccaagctatatccacacaatacagtgacaatttacaggaaaaaaacaaatacattttaaagcagaacattggttctgaaactatcaaatttactgggggcttccactgtatcaaaaccagacggaccaaccttagttgtcatcatttatccaactggtttcatcttctactagcttgtagatgctgaaatggctgaccctgatcttccactctcctttagtgggatcatatgataaaaattcagcaccttgggcctcagcctttctcttgagcatctccttggatttctcaatcttcggtccttctgtatactgatggccagtttttttgtcgaaacattttatgttga

SEQ ID NO: 72608 - DNA, 462 bp, Glycine max
  Clone ID: jC-gmfl02220051f09d1
gaggaccatataccaaatcactatagctttggaaattaacacgaaaattagccgctaagaaaaccaaacttaaccaacaaagtaaactcatttggaaatgaacattgttcaagaacaattagatcaaagctcaatgcaacaccaaggatgccacaaaaccctcttattttgaaacctatcctatattaagcctctacaggagcaagagctcgcagctctcattgtaccttaatccactgttggctgaaacccaaccataataataatataaagcacaaacttcaaaggaacgaatgatttttgctcaagcatcatcaagagcaaggacaccagggagttgctttccctcaagaagctctaagctggcaccaccaccagtggagatgtggctcatcttgtctgcaagtccaaccttcttcacagcggcaacggagtcaccttcttcaatgatggttgtcactc

SEQ ID NO: 72609 - DNA, 464 bp, Glycine max
  Clone ID: jC-gmfl02220051f12d1
aaaataataatatgaaaagaaaacattaactataacaatagtactagttaaaaaacaataaataaaaaaacttaaaattataaatataattttaaattaattatgaatttatttacataatttattaaaataatatataatttatattaaatatagaatatcttttatatataatttatttacattattattaatttttatatttaaaaaattatttcaaatatttgataataaaaatagttttgttttctttgttgttaaattaattaaattttttaatttttttttaaataaattgactgaatttttatttaatttttaaaaatactagattaattaattttatcttaatattttgattaattttaatattgaattaaattattaaaaaattaaatatttttaaatttagttgtttatttttaatttttataataattgaaatatttttttttatttgataa

SEQ ID NO: 72610 - DNA, 499 bp, Glycine max
  Clone ID: jC-gmfl02220051g01d1
aatatatcggtcttgtgattccccataatcaaatagtcttaatcctaaattacttgcaacaagcaaaaattttccaaccatatcaagctactgagacctaaatttgtggatacggtgaatactccaaagacatcaatgccaaagccagaaatctcgatacttccacatcttaatttgaaaatgtaaaaatgacaaaggaagagtgtacaggtaatttggtgtattgtttaagaaaccttgcctctaccatacaaagcattaagtccttaacggacacattctactgcagttgtttaacagttccaatgatgcttgctgtcctaccctaaagccccgtggacctactgtcccatgttagggggcggaggaggaagacggacaccctgaccctgcataggttgggaaggaaaaccttggggaggtggcattgatggaggtctagcacccatgttgaaacccgatgtcccacttgcaacagggggtggtggtggaatagatg

SEQ ID NO: 72611 - DNA, 566 bp, Glycine max
  unsure (1)..(566): unsure at all n locations
  Clone ID: jC-gmfl02220051g02d1
cagaaattcagtacagtattattcagtgcagagaacaaatagggttatatattaaactcaacaaaaacaaataatatgagatgtttatgagaatttcatccacccaagaccgttgtgttccttaattaatggacaaaagctaaacttagctcaatttcttctatcccaagcatttgagtttcaagcacaggcaaatttccatcttatgaagtttattttgcacacatgtatcggagaatatactacctgttagcaacatatgaagaaaaagcgtgctatcagctatagctacagccatagcatcatattaatttttgggaccgatgtccttcagtgaacagatctgttcttctcccattgcagacataacagaaaccacaagatcttttccttcagaaaatccatctttaatctgagcaagcaatgcctcatcagtaggaagcttcagatcatccttggtatttccattatcagtcaacagactcacaaagccgtcttcagagatatcaataagctgatagtcagtgcgattcacatgtggaacatcacangtgtgggatgatgga

SEQ ID NO: 72612 - DNA, 590 bp, Glycine max
  unsure (1)..(590): unsure at all n locations
  Clone ID: jC-gmfl02220051g03d1
gagtataataatttgctccatttgataaatatgaacaattacactaataagcgatacataagtatgctacttacacttgaaagacagttagaattaaaaagaaaaaaaggcactggatatatccggagtggagggtgggagaaagaatctgaagaaatacaaaaagcctaggcttgaagaaatataaaaggtgggataattcactgggtagtttttctcccaaaatcttgaaactcataggtaaatacacaggcttgtggagaattaacaatgcggtagaaatataaaaaatttcagctcccttatctttcccttatctttcttcacatacatggttatccagctgcgaaaggcttggcgatgtaaagttccattccactcacaggagtgaaaatgatctatttagtgagaaaatttgtgttcaatttccaccatgtacaaaattttcttagaccgacaataaccactaaccactggcggaattaatctctgaccccaataagttgaaagacaatcatgatctctgacccaggattaanaagaaatacatggtcatccagcaacagaaacatgaacattatacctggaaa

SEQ ID NO: 72613 - DNA, 297 bp, Glycine max
  Clone ID: jC-gmfl02220051g04d1
aaaaaaaggggtttggaaaagttcccccccagggggggaccaaacgggggggtttgatcaaaaatccaaacctccgaggggcaagggggggaaaccccgagggaaaaacaactatatgggcccggacggggaacaggcccaattgctccaacagaggccacatgaaaacggtcgtgcaaacgagaaactcccccttggaacccctgtgatttatcaaaacgcccaagggggggataaaaagattcacatggccagcatatgggggtggaaccctcccatttgtccctgtcaagaaaa

SEQ ID NO: 72614 - DNA, 463 bp, Glycine max
  Clone ID: jC-gmfl02220051g08d1
cgcaatggataaaagcaccaaaatgcaattatagaagcacaaattttttagggtaatgaattacagaaaatgtcatgctgtgtattttgaccaaaaattgtgcgtgctcctacaaatcattttactatttagtcatataagggagaaagggaaacagtatgtggtggataatatcagggccatcataacctacacaactctgaacaactcttcataaatatcactgacttaaaatgcaattaggccttcgatttcttccctttggcttcattagatggttggctcttgaaaggcaggaaagtctttccacccatgaatggtctgaggacttctggtatctctaccccatcttccttctggttgttctccagtatgcagcaaatggtcctcttagtagccgttagagtagagtttaacaagtgaacatattgcttcatctgctcattgctctttttctgaccat

SEQ ID NO: 72615 - DNA, 394 bp, Glycine max
  Clone ID: jC-gmfl02220051g09d1
attaagctgtaaaggggcatttaaccataaacaaaaatagtctccaagactataaaaacattacattttagacaaattagtcttcccacttatcgtccgtcaacacctactgtaactgctggggttgctgcctaacaagtatcatattcactgcaaacattttagtaggagtagcttttgacgaacaactccttcttggcttcctcggattcacccttaccagggtacttcccaagctgagcgagtgagttggacttggcacggaatgcgagtgcatcttgtgctgcctttacgttctctgggcgggcttcccatgttttcaaggcagtgttttggagggctttggcatacgaaaatgacacgtgccacgggtttggagattggttcatggcat

SEQ ID NO: 72616 - DNA, 462 bp, Glycine max
  Clone ID: jC-gmfl02220051g10d1
aagtgatgaaagttgataaatatatggaattacaagtaccttaattgagaagaacatggtgacacttcagtattgcatgccacgactatatctttggttctaattacatcagtgactcaaaaagaaaaagataattaaaaacggctgattagagagactccacatcatccacctattccgtgtccatcatttcctttgtcaacgagcatttgatttatgacgaaactctgggattcatagagtaagattatagcatgttttgttttcaagctggcaaacatattactgtctagagcgctttaagtacaccaatacgctaatgctcgttagaacaacaacacctgcaaaaataccagaacggagacgcaatgtactggttttctgtatagtggctgtaccaggttgcagttttgatggtttggttgaattgggaaactccaaatccaactttaaagccttcag

SEQ ID NO: 72617 - DNA, 466 bp, Glycine max
  Clone ID: jC-gmfl02220051g11d1
aaggattaccaaagatttgtaagttggtttaaaagtagcagacaaaaatgttaccaatacgtatgcaagtatttatttggcataaatagtgttaataattatgtggtatatgaatatctagttgcaaggcatagccaactaatctcagaatgaagaaaaaatgacaaatcttggaggctgaaacacatgaattgaattgatggattatatgaagattctaggagcacctgttcatcattgatctgtgaagtgatcaatcaactttaggcctagcagcttgaagcatctcaacaatgagagtcttcacatcctttctatcttctgcacatcgagggaaaggtacacgaagcttgaaagtatcaccctgataaccagccttaacattgaaaccaagactatccaaatctagtatgaaggcaaagtccactggaactgaggtccaatgctgcacaatcactttgttatc

SEQ ID NO: 72618 - DNA, 567 bp, Glycine max
  unsure (1)..(567): unsure at all n locations
  Clone ID: jC-gmfl02220051h01d1
gcatgtaataaaggtatcatagcatatagcatagcataggtatttcatacattgttcttttgaggagcacatgcagcaattcagtcttactacatgattctctttatttagaaaacaaagttttaccaattaaacaaactgatcagctaggctttgcaccttagacaaactgattaaggtactcatccacagtgatgtatttcacatcaggatatagagctgaagcttccactccaaaagaagactcaatttcaaagttagtatgatccccctttacataagaagagtggttaattgacaggatcacattcacgggtggtgcggactcttcaatttgcttcaggagttgttcttctggaacatagattctttcaagagttttaccaatctttccctcccagagagtaacaagctcattaaacgacaaggtattagctggtggtctaatgtagagaattttgttcaaggttcttggatcatccacagaattgattgtataagttccaatatcctcttccttggtaaaacagctttgggggtttcatctnctaggataataactctgtc

SEQ ID NO: 72619 - DNA, 323 bp, Glycine max
  Clone ID: jC-gmfl02220051h02d1
ggggcccccaaaaaaaacccccccccttttctctggcgcaaaaaaaaaatggggggaaaaacagggtccccccggaggggcccccccttaaaaaaccccccaaaaaaaaaaacccccaaaaccaaaaaacccaaaaagggggccccttcaaaaaaacccccccccccctttttttgcggcgcgcacttggtgcaccccactaaaaccccccaaaaaaaatagatacgtgcgccaaaaaacccccccgtgaagcgctccaaaaaaagcccccccccccacgggggcccaaccaccccctccgggaaaaacccaccctctggggg

SEQ ID NO: 72620 - DNA, 520 bp, Glycine max
  Clone ID: jC-gmfl02220051h04d1
gaattgtgtttattataaataagaattaattaataatacatggtgtctgatgtacgtaacagaaggtaaaagtaatagatgcatgcatgtaactttggaatgactgagttcagtcatcaattatcataggtgcggcactcatcagtctctggattgtccttgcagtaattttcgagcgggtcagactgcttctgcttctccctggcgtggctcgccgccgcgctcagctcctccacctcgtcccaggccgtcgcgcattccgcgtcaccgccgtctcccgagcacgcctcctccgcgctctttatgctctcctctaccttctccgatatcttctccggcgtcgcccgaacgggccgggtcttcaccaaaccaggccacttttgaatgggcctcgacagagctggaaacctcacggcctgggccttttgtgctgagtctattcccttagcattagcaaataccctggtaaggcgttgaaagacttacaccaccagctattgtacccatctttcttcatttt

SEQ ID NO: 72621 - DNA, 441 bp, Glycine max
  Clone ID: jC-gmfl02220051h05d1
aaaaggaaaaggcaccaaattcaatttaagtggacactgtaactcaaaattatagaggaagacggtccaatatgaaaaatatagtaagatcatctcaaacttagcatcttctctttgcacctaagacattgagaatgctaagaatgttacacgcaagttccatcacaacttctagcacttggattagtacaacaaccttcacgaacagaaatatttacttgccaagtttgctttgcctccaattcaagactggaagaaagttcccctctgaatagcatcctcgttagcatttccaagagcagcctcgttcaagtacttgtcagccaattggactctcttgacattctcttgttcttggacaagcatgttaccatacagcaagagcttctccagagtcatcttgggctgctcaaaggttggaggtccatcttttgagttcac

SEQ ID NO: 72622 - DNA, 311 bp, Glycine max
  Clone ID: jC-gmfl02220051h06d1
attgaattccttagaaaacgaaatatacaaattacgaccacgggcatgcgaacccctaaagtgactaaacggccaacaaaaatcatgcaacggggcgctgatgaaaaaacgagcgaaggggaaaaccaaggggcacccgaacgggaccacccgagccgcagccaccgtcttgggagcggacgcgaacccaaagaggcccggcccaaccgcccttaaaagaagcacgccccgcccgaggggcacagggggcccccccagctgggggagattaaacccgaccattgggggcgagtcccctggggggaacccga

SEQ ID NO: 72623 - DNA, 459 bp, Glycine max
  Clone ID: jC-gmfl02220051h09d1
agcaactaaaatagtactatcatacgagttatagtgtgattatacatatgatgtgcaaacaaatcaatcaaatttcaaatacacactatacataatcaacatttagatacgcatgccttactgcatcataattctgaattcttcaatgcttagcacaccattcccattcaaattaaactgtttgatcatggctttgcactcatcaatggacttggactctcccatcttcttaagcatacttttcaagctcttgggggttataaacccacaccctttagtgtcatacatctcaaaagccaccttcaagtcattcaacttctgatcctctcccccagcttccataagagcaatcaaatccttcaaactcagcaacccatcttcatcagaatccaatgccgtaattgccatttcagatttcttcatcaaaagctccccacccattattcgaagcccgtgctt

SEQ ID NO: 72624 - DNA, 465 bp, Glycine max
  Clone ID: jC-gmfl02220051h10d1
agaataataaaaataattagaagcatgaatttcacttaatagtaatttaactagaatacttatcaattgagacccaaaaaaatagaaacacttttagccaaattgctaagctaaaacaaacacgaactctaacactcgggggccctattccaactagtggcgccccaacaaattacactaccccactccaaatcaacatataagaaaaagaaccattattctatccctttgaatgtggctcatcgtgcactccaaattcaaattcccacgtgcacatccacgtacccaatggacacacatgcattttcacagccttcacgaatcacaacaacatcaagagaactcaagtgaaggcttttgacgaaaccaatgaataatcgtggccacttgctcagcctcatgtttgtcgtgtattgtaggatttgcagttcggacacttttgagccacaaaatggaactgaacgt

SEQ ID NO: 72625 - DNA, 461 bp, Glycine max
  Clone ID: jC-gmfl02220051h12d1
ggcaaaatctaaaaaagtagattatgatagtgaagaaacaacataatacaaccataactctactcatctaacaaaacaggaaatcacatcctcctcatagaatgactactacaattatatttgtgaggaaggttatctaaatctatacagggatactgctagctgagaatcttcgttttgctatcaaaaactgccattcccattttcagtgaattgcccaaatctgtgaagaaatttattgccggtatggtacgacggaacattgagcaagatactcaattgaccatcaccgtaaggcattcacgaatgccgtcaatgaatcaacatctctcttttctgaagggtacttaattggttgagaagagtgcttggggaagagaagtattgtggggaagcttcccaactgcagttcactctttgcatattccttctgctctccatcggctctgaattttgcaacc

SEQ ID NO: 72626 - DNA, 288 bp, Glycine max
  Clone ID: jC-gmfl02220052a01d1
gataaatataaattgattcaatacgtgaaacactgcctgtacaaagcacatcaatttgtgccgcctaccaatatgtcccatcacataaatgattgcgtgacattaatactacggtcatcatcccgcgggctacgtgctcagactcacaggcgtgggccataaggctaaccgggcatgactaccggggaactaatctactatgcccgcacctgtattgaatggcacaaggatgtacttatgctcaagctttacgccaggatcgcaacgtcctatactactacaccatgc

SEQ ID NO: 72627 - DNA, 262 bp, Glycine max
  Clone ID: jC-gmfl02220052a02d1
attaataaaatggggaaaagattacatgtataaagcataaaagtttgtaaaacaattcaaaaagtcccatcacaaacaacatagaagggcacttaatactccagacaaccacccacttgaaacaggtggacatacttacaaacctaggcaataagcaaaaccggaattgtcttcgggggaactaatgaacaagaactacatactggattgataaggaaaaggctttacagaggtgtaccccagctgcccggatcactgggtc

SEQ ID NO: 72628 - DNA, 452 bp, Glycine max
  Clone ID: jC-gmfl02220052a03d1
agataagatttttttttttacagcattagatatgaattatttattctacactgttcggcatcaatacaatttgattccttttatcatgtcagcacctcaaccgatgatgatctcaccaattatatttcagcaataaaaaaaaagcctaataaaatatttttttttcataaatttattctaaaatctaaaaatgtcatggaggggctgtggcatatcctacatgcaaatatgcttcctcttacattcttactcatcgcttctatcataaataggacacaccctcctaatttcgttgttcctatcataaataggacttttctcaagtagaaggaggaacttcccaattctttggcacaggcccaaaatcatagattatttctctgtggcaagaccatacaagttttatagcctctggtgttccaattcctgcacctctagcatcaccagcgggt

SEQ ID NO: 72629 - DNA, 347 bp, Glycine max
  Clone ID: jC-gmfl02220052a04d1
atagattatatttttttttacatcattagatctgaattatgaataatgcactgtgctgcattaatacaatccgaaggctttaaaaatgtcaacaccttaacccctgatgaacacccccttgatacttcagcgatacaaagaacttctaacaggttctttaatgtttattacgcccttttaaaatgtaaatacgacctggagggcatgcggcatggcctacgtgacactctgctctctgacacattcttacccatggctgctatcgtaacacggacccacactgctactattgctggcgccattatacattggactatcgtcatgttcacggacgtacttgccaattc

SEQ ID NO: 72630 - DNA, 425 bp, Glycine max
  Clone ID: jC-gmfl02220052a05d1
atattgatacatattgaagttcacaacttatagcaaaaggtttattaagctgtaaaggtgcatttaaccataaacaaaaattgtctccaagactttaaaaacattacattatagacaaattagtcttccacttcatcgtccgtcaacacctactgtaactgctggtgttgctgcctaacaagtatcatattcactgcaaacatcttagtaggagtagcttttgacgaacaactccttcttggcttcctcggattcaccctcaccagtgtacttcccaagctgagcgagtgagttggacttggcacggaatgcgagtgcatcttgagctgccttcacgttctctgggcggcctccccatgtctgcaaggcaatgtttaggagggctctggcatacgagaatgacacgtgccacgggtttggagatt

SEQ ID NO: 72631 - DNA, 565 bp, Glycine max
  Clone ID: jC-gmfl02220052a07d1
gatcaatgatatttgtataattcacaaaatttatattgtaaattttttcttagttggacttagacctttcaacaatagacctaacatccaccttgattatcaacaccaattgtatttaccatgccttgtcatctaacaataaccttccaaatcctgctatccaaaaaaatgtggggttttaggaaaagcaattatgtgtcatttttgtgatgaccatgacctggctgaaaatttgtgtcacccctttaaacgaaagttttatttgctagtgttagcagccttgtacattcttggttaacgacgataataaggaagattttccgacttcatcttctttgatcatccgattcttgggattcaacattgttggggggatattatgcaaccccataagtcctctgttagatgatttaatttcaatctgtgtagagaaaagtgctgaaacggggcgatgatcagagaacttgctttcactccgaaaatagtgaagttgctccactcctttaccataccatagaattctatcacaccatgctggagatcttagatttttcccggatctact

SEQ ID NO: 72632 - DNA, 369 bp, Glycine max
  Clone ID: jC-gmfl02220052a08d1
tgatcgatcggtattcccggtacatcagctactcctcgtcggacgaccctttattttcaatttcatatatgaacattgttgcctccttatttcttgaatatgtggaattggaatgccccgaggaattccgatctcattcactttggcttcaggataggcctactaagaaaacaaataattccccttcatatatgaacatttttgcctccttattactcgccaatgtggaattggaattccccgaggaatcccgaactcatttcctttggcttcaggatacgcctaataagataacaaataattccaattcatatatgaacatttgtgcctccttatttcttgaaaatgtggaattggaactccccgaag

SEQ ID NO: 72633 - DNA, 383 bp, Glycine max
  Clone ID: jC-gmfl02220052a09d1
aaatgaaaattcgtatagaaatatgcgggaagctttaaaattagcttttggattaaacatgggaatccaggggaacatttttagccttcaaagggtcatagccctcatacccttccaagggatttgacaaagcaaacttggcaacaaactcggggggggaggacctgcaaacaaaatacctcacagttgggataaccagcctcagcaagaacaaatgggaccgccgcaagaaaccccccatcccaaacactggtttggccaccgaccccaaaccgaacacctttcattcggttacccccccctttgagaacaaaaactgggttaaaaaaaacaagaagttgggctttaaaacaatttttacgggcagacccatttttcccttt

SEQ ID NO: 72634 - DNA, 529 bp, Glycine max
  Clone ID: jC-gmfl02220052a10d1
aaatggataactcgcgtaataagtcttaatagatagtggaacataaccgcgtagacaagtttgtatttacatgctcagatgtggaccttaagcttcgcccaattaaacgaaaaatatgttacacgcaaatgttgcagccataaacactagagatatacacatacaaaaagctgaaactgacaggaactactttcaagaagacctgaatgaaactgaatctccatgaataagagaaggcagaaaaaatctgcttattgtattctcacactatttgcatcaggtatcttccatgcaaaagtagaaacaaatccatgtagcagcaaaatgttgtgtacaacaactcacgtgatcaacatatcttgcattaagtgatatccaattggatttctatggcatgccatgatgccaaaagatagctttttgcaaatcataatatgggcttcactaagtctatccacccaacatagtaaaacaagaacagaagctatgagacaacagagaactgcttctgttgcttcgcatcataaca

SEQ ID NO: 72635 - DNA, 381 bp, Glycine max
  Clone ID: jC-gmfl02220052a11d1
aagaaatcaattatgaacttgaacctttatttgttcaccggggttggagttcaaaactgcacaaaggagacttgatctcaaaaaatgagaaaaggaaaacaaaaatcacatttaaaggatgctcttcttttcactggtgggggctcttttcaataatagctattaacttcagggatcaatgccttcaattttggcttccacttctgaatacaactggctgagcttctcaatattatcttctgaaggttcccaaaaaccacgtccattggcttccaagaatgtctgcaccagtttcctgaaggagtttggattaatgctcatgagcttgttcagaatttgctcattttgaatgaaaactgtgttggcttttttataccccca

SEQ ID NO: 72636 - DNA, 386 bp, Glycine max
  Clone ID: jC-gmfl02220052a12d1
aaatcacaaaagcaccaacattatataatatttttgcaagaacattatatagtcactgaattgatcgaccaggaaacaacagaaggaattcagcatttctaaagtttaccactccctaatggtggtcaaaagcaccaacatgctcatttcatttcctaaacgttgtgcttcatatctccccaagataaatctgcttgtcactgctgcaagatccaataataggctcattgggatgaaaaacacactcattaacagatccattgtgaccgggaagcttatacaagatgcggcgagaagtggtatcccagatgtaaaccattcgatcagaactaccagctgttaccttgcttccatcaggagaccaaccacacttcaacaagttcttt

SEQ ID NO: 72637 - DNA, 209 bp, Glycine max
  Clone ID: jC-gmfl02220052b01d1
atacaggtaataggttaaacactacatgcctaaagcacatcaatttgcgaagccaaccaaaatgacggatcacaaaactgattgaatgattttaatactacagtcttcctctggaaacttgcgtgctcatacttatatccccagaccaaaagtgtaacctgactaacctagcactgaacttatgaactttccctgaataccgtattgat

SEQ ID NO: 72638 - DNA, 95 bp, Glycine max
  Clone ID: jC-gmfl02220052b02d1
attaatattaatatagtcaatatgttatagactgactgttcaaagaacatcaatttatgtcaatcttccaattcgtactatcactaaaatgattg

SEQ ID NO: 72639 - DNA, 341 bp, Glycine max
  Clone ID: jC-gmfl02220052b03d1
aaacaacatttgtttttttacggtagtaaagatgaagtagctgttctacactgggccggatcaaccccatatgattccttttatcatgtcaacgccacgtccgatgatgagcccaccaattgtgttctacctaggaaccataggcctcggaacctgtttctcagaagtaaattattctgaaaaataccgctgtcatggcaggggctgtgccatatgctacgtgcacatatgcgaggctctgacacttcgtacgaatatactactattatgcaataggacacacactgctaatgccattggtcctatcataaatcggactttacgcaaggtgaaggacgaac

SEQ ID NO: 72640 - DNA, 406 bp, Glycine max
  Clone ID: jC-gmfl02220052b04d1
gaacagttaataaagatgtttatattatcgcagcatgtataagattcaatcataacaacacaagaccggcaccagaaaattattaaacaaacaaagcaacaggcacatacggtagagggggaatatatcacacactctcacaactgatcacaagacgtaggaacagcagaaacggactccttatcaggatcatggtgcaccaagaagtgctgaagtcgagcattgcccaaattcgaacagccactaaaagcacccaaggccgatgaagccactatcccatcggaggacccactcatgtggttgtcagcatgaagctcggaaaaacggcgctcgaaatggaaaacaagctacggaaacgccagtagaggagaccctgatggcaaggtgaaccagagatccaaccgtg

SEQ ID NO: 72641 - DNA, 233 bp, Glycine max
  Clone ID: jC-gmfl02220052b05d1
attgatacatatttaagttcacaactcataggacaaggtaaataaagctgaaaaggagcatataaccatgaacaaaaatggactactagactctaagaacagcacataaaagacaaaaaaggcgtcaaattaatcaaacggaaacaccaactgcaactgctgaagtggcagacaaacaaggatcagaaccactgcaaacaacacagcaagaagagacctggacaaacaactcc

SEQ ID NO: 72642 - DNA, 441 bp, Glycine max
  Clone ID: jC-gmfl02220052b07d1
atcagaaaaatagtctaccatactgaagaaacaaagatacatttaccataacatgcactttaatttaatttaaaagtaagcatttaacatagccacatgaacccaattgcagtaaagagaaatgcaaaattaggggtaatccctaatgtcttggataagcttggagactcaagtcttacaaatttaacaaaattaacatattatcataaccaaaacaaaagaaggcattactgaaactctccaatcacaaacaaaaaaagatggcaatccactcagtctcccttcttcctaaaggagcatccctcggttagccttgcccggccaccggttggttgacacaagacagtctggcagtttccgcatacaacaacagtctgagagtggctaaagacagtggttatgttgaagcaaccctggcacttaacattcatgaagaaagag

SEQ ID NO: 72643 - DNA, 546 bp, Glycine max
  Clone ID: jC-gmfl02220052b09d1
caaggtaagaattttattgcacaatgagaaggcagagaaaattgatggttctgtttctcagtacaagttttagaatgaaaaatgaagcaacaagtgtttgtagtggtagtagtagtagtagtaagcatacaaaactacaatggcatggtacatacatataataattgaattaccaattcagaatttgatggctctcacttccacttgttggcaacaatgtcagccaaatccacaaccctttgggagtagccccactcattgtcataccaagcaatcaccttaaccatgtcatctcccatgaccatggtcaacgatgagtcaacggttgaggacacatcagtgcacctgaagtcaacagacacaagtggctcatcacacacagagaggattccctggagctcattgtctgcactctctctgaatgctgcattcacttcttctgcaaggtcttctttgagacctgaacaacgaggtccaccactgagacgtttggtgttggcacacggagtgcaatgccatagagtttgcccttgagggttgggagga

SEQ ID NO: 72644 - DNA, 510 bp, Glycine max
  Clone ID: jC-gmfl02220052b10d1
gtacggtgagagacctttctatgatcacatgacaacaacgtgtagtagtgtacctatctacattctacaatagctgtacacatgctactactactactaggaacaggtcaacacacatgcaccgttggatcgtcgtcgtcatcatcacatagcaaaataccaaagcaaacggtggagccaacacatgcgtttccagcttcaatgtttctttctttcttactttggcctagctaagctaacttgatcaataatcgtatgtgtgtggtcgcacaggcacactcatggaccttgagtctcgtgctaccgtgcaaatgcgaatgggcggcgcgcgtggattttatgtgacatggttttaaattacgattgtggtcgcatggtgagtcagaaaatcttaagagcaattgcggatcgtaatttaaaaccatcatgatgtgctcaaaaggacttgttgggccagtacatgaacatgtcctgcagcggcgacaacatctgattattgccctggaattg

SEQ ID NO: 72645 - DNA, 524 bp, Glycine max
  Clone ID: jC-gmfl02220052b11d1
gcataacatccacatgatttttaattaaaaataaaaaatacacaattttgttgcaggaatgagagggcaacccttgggactataatcttgagaagccacttcggcttccaaaatagtatcccgacttccagagcaaaacacaaggctaataatacaacttgaataacaagatacatgcaggcagaagaaaaatgtttctagtatgtcacgatagaccaaataaaatttttattgctgactagtgacttgtgtgctaagggttctaagtgcgtacataatccctatggctgcataaacatcccctaccggaatcacaaattcacatcagttggaggagtgtatactagcacatacttactagttacataacagcagagtattcaaccactgttcgttcatagatgcatatcaaatcaacaaccttgaaggtcacgccacctgagataaactaaccctgcccgataatgagcgtatgccccagccaccaccaatatatgaaacaattggtgactgtgtcccgcaat

SEQ ID NO: 72646 - DNA, 385 bp, Glycine max
  Clone ID: jC-gmfl02220052b12d1
cattcgaattcattttatttatatattaatattatattcaaatgaaataaaaagatattaaaagatactaattataagaatttgaaagtgaaattataaagttattaaatgattaatcaatttttttctacctgttcctgtagtaaaaagagttccatctgttcttgaatagcttccttcaaaaggacttctgcttccccagtgaatgtcttggtagaagatatgatttctttgaattgaggtttattcgtgtttaagtaagcacgtaactcaacaagaaatttccttacctgtccaatttctaatgaatcaagataaccattcgttccagtataaatagttattatctgttcttccacggtaagaggagctgattgggattgtt

SEQ ID NO: 72647 - DNA, 481 bp, Glycine max
  Clone ID: jC-gmfl02220052c01d1
aaaaccgaaaagatagattgattttttatatgataataattactaaaaaaaatcaccaagtttgagaagactgggtattatataacatcatcatggttaatcattgatcatcccctgaaccattcaaattcgtccatatagcaattccgcttgtccctacagccaaaacaatcaccactattgccatcacttgatcttttgactttgatatcccatgcatgtccctgagaacaattgcagcagggaagatgaatgaggtggaaacaatggctgtggatcccaagaactgtacaaaataccatatgtctgggatggtcacagcgaccaagtatgtgagggctagcaaagtcaaagtgagtgacacaaatcttggggtgtctgatgcaaggggaggcttatttctgtttgagaaaattagttcatctatgttggccctcagggaataggtcacgattgggaacacaagtgctagatggagtgc

SEQ ID NO: 72648 - DNA, 445 bp, Glycine max
  Clone ID: jC-gmfl02220052c02d1
ggatgacaaagtagtttcattgatatctaaacacctacttagaggttaaatattagattctcaaaaataaaagtaaaatcgagcccagcatgctatggctatatgacagcaaagacacgcagcataagggtgatttagtggacaacttatcggtccttttggccatttaccaatctattaaataaaacaacgggctactgccaaaccagtacataaatttttggggtccacattggaagcgcacgaagatgttacagaacaaaaaaaataatcatacttcggccataagaaatccaaaactatatatacacattaactcaacttggacaaaaaaatattttaacgaagttcagaaacgaaaggaaaatggccaaggtgtaaaattgaatttatttcggacacgaattacaaatgtcaccttcggtctcctagatagaatgtcgga

SEQ ID NO: 72649 - DNA, 276 bp, Glycine max
  Clone ID: jC-gmfl02220052c05d1
gactaggtcattgttattgctacccatatacgggtacatgaatggcatcgaagaacgagttcacaatggattttactgaaatagcgacatactcatgtaccatatttggcaaaaagggcacataagtgaatcaggttctggatgtgtaaacgggagtatcaaaaggttgcattttaactctagaaccactgaacagcaataagggagtcttgcgaaacaccgggagccccgagtatagttaccaagaccgacacataagtaaaactgctaactctg

SEQ ID NO: 72650 - DNA, 126 bp, Glycine max
  Clone ID: jC-gmfl02220052c07d1
atgcatgtaactgttctttggtttttgttacgggatacggtgtccattatttgttgagcacgaccgatcactattataaacagtgtcaaatgagatttcgcgcggtgacgcttacttgtctgtgac

SEQ ID NO: 72651 - DNA, 240 bp, Glycine max
  Clone ID: jC-gmfl02220052c08d1
aagcatgaaacggtacgaagtacgaggttggggaacattgtgtacataatctgtagagcaccaccattctctacgttaaagactattaaatgaccttgcagccgtcgacacggatttttaggggacactatatggaggagtaggaataggcgacgcaggtgacggggccagatcggagtatggtgaagaacaaccctggaggatcaccggtcacggcttaccagtgcaatgaacttctgc

SEQ ID NO: 72652 - DNA, 320 bp, Glycine max
  Clone ID: jC-gmfl02220052c09d1
gggttatatgttctcattcaatcaagtgacacattagcacatacgatcaatatgctgggaacaaacaccctaacgagcataataggatcatcatacaacccggacatctcgtccagcgtccactgggcttatctagcaatgatgcgtacacacctcttagcatatcagatgtggcacatgatcaggaatcacttgtgggggacaacctctcgggctaagaagccacttcaggcttgcaagagttatgggcacttgggaacgcctttaggaccccgcattgtgcaacagggactaggaccacccacgctaaaaagcggggc

SEQ ID NO: 72653 - DNA, 526 bp, Glycine max
  Clone ID: jC-gmfl02220052c10d1
atgtaaaatgtaaccatacaataaacttataaattatcacatactatcattctcgatgataaaaaaataataataataataatactatcatcatcctaaccggtcaaaaacaaaattaataacaaatattaattaattaattaattaattaattaactaactaactaaaagcttgctctctttagggaagtaatagtaacggaagaacccaagggagaagttcccacttgaatctcgaaggaatcatagcgaagaaagaactccacaacgaaaagcctcgaaaccaaggtgacgaagtcttttccggcgcattgcttgttcccaagtgttggagactcagtctcaggcccattggaccacagcacgtgcttgaggagcttctccccttccttcccgacgaacctgtccccgacaaactcctcggccctctcgaagatcctaggatccttcgtcgcgaatggttggtacccgaacagcatctacccttgcttcacctgaaacgcgtggtcgtggctctcaatgatca

SEQ ID NO: 72654 - DNA, 497 bp, Glycine max
  unsure (1)..(497): unsure at all n locations
  Clone ID: jC-gmfl02220052c11d1
acaatataataataactttcaaataataattcgaatccaaagataatatacaaaccttaatttaaaaaaaaaaaacggacacaagaaccaacatctcctgtcagtattcacataacataaaaagacattcaatatgccgtgagcacttggtaactggcgtagaaaacatacgttacaacaagagggtcaataataaacttgatacctactccgggccttgcattggaaccatcatatgtcgaccctgagaattcgggtaagtaacattttgtgagaaagaaccttgatgagcaagctgagcattaggacttggctgaacatctctcttagcagatgagtctccacccttggcagagcccttcgtatcaccctccatctctcggtatctagtgaggtaaattttaagaggatccatataatcctcgaaaccgagagtgngccatcgccagagcaaatcatcggcgttaatagtctttctcttttctctctgacactta

SEQ ID NO: 72655 - DNA, 416 bp, Glycine max
  Clone ID: jC-gmfl02220052c12d1
accaacataatttaccttgttattatagtgataaacagaaatgtgactaaattgcaggtacttgtctgaagatagcatatatctttttctaaaagcagataaaaatagacaatgaattgcaggtttaacagattaagcagctgctccaacagctacaccacccttgagcctggatttaccatacagggtttcttcaaaccggattatctcattcttggacccataagcaacttgagttctgtcatcaatgttactgatgactttgtctagcacagactgatgaccatcactgctgtaacctccagctttttcaatcaagaaccccaaaggagctaccttaaacaacagtctcagtttggctttggctgatggtgatgacacgttggtgaagattcccttttcttttacaataatct

SEQ ID NO: 72656 - DNA, 207 bp, Glycine max
  Clone ID: jC-gmfl02220052d01d1
gtcttagggtgtcaaactagtatcattgctatatcaacacctacatatgggttacagcttctgtcccaatcattaacacagtagataaaccgagcctgccttagagctttcataacttcggcgcgcaacatgatggtgcaaaactgtacaacttatgcggtccttgaggccgcatactaccatacattagaagctagcggtctggtg

SEQ ID NO: 72657 - DNA, 450 bp, Glycine max
  Clone ID: jC-gmfl02220052d02d1
ggaacttaaaaatatattttattcacaagacacacacatgcattattttttcaaacacataacataatatatataatagatgtctgccttgcatggcaagcgtctcagctcttaatttgcagatgaaacacatacatatagcaagcccctatagcactagtatgggtcttattccatagttacgtatagtacatatagctagcaagctagctttattattatgacccaatcttattccatagtggtacatatagctagcatttattattatgacccattcataaaactacctctaataattgtaactaataacttcttgcccttaagatattatttcaagattcacacatcatacatatcacataacacttctgagatgcgtgttcacccttcatgtcatacctcattcatttacaggcaggccacaattaaatttcagggatccacttg

SEQ ID NO: 72658 - DNA, 191 bp, Glycine max
  Clone ID: jC-gmfl02220052d06d1
gaatctataattcttattgattcccatttagggggacatcaagatgatagaatcgcggatttacaatttacttgatagcaaatcccacatactcattgacataaaatgcaccaagggactttcaattaatcatagccacaacttctataaaaagtaaaaaattttgcattaaaactctctaagcatatagc

SEQ ID NO: 72659 - DNA, 442 bp, Glycine max
  Clone ID: jC-gmfl02220052d09d1
gccaaaaaattaattcaaactatattaaaccagggaaacaaaaaaaaaaaaaggtttatgatacaccatcaactatatctaaaagcaacctttttcgagtacaacaaaataaaattactatacatagttaaaacgaggtcaggtgcggtaagaataaaaatacataattcctgccttcctgtgagaattctaatagccaaatagcctctattttaatatgatcttcaaggaaccttgaatccccaacaaccaaatgataatctcatttgttagttaaaattccatgtactgaaagggtggagggcttgttttggtcttagaaccactaagcccacggatctccacttttttccattcttgcacaagggcacagcagcaacacatcaaatgagagaggaaatcatcaataaatccccctgtgatgttcaacattttccgaagc

SEQ ID NO: 72660 - DNA, 501 bp, Glycine max
  unsure (1)..(501): unsure at all n locations
  Clone ID: jC-gmfl02220052d10d1
atggtaagaagaaaaacactgtaatgtatggctgaaaatccaatattaagatttgattctgtatgaaaatgaaaatgaaaatgaaaataaagcggcacacagggctagctagctaggcaataggcaataggcatgtagaaggatccatcatactaggagggaagaggccttggcggaggagggagtagctgatggaggtttggaggagtctgattgtggttgggcagcggcggagcaatgaaggggtgttcgagcaacctggaagcagaccagcggcgagagggatcgcgctgaagacagcgcaagatgaagtccttgaagtgaggggaagcagaaggaggagcctcgggaggctgagacatacaaatggcgcacatgagactggcccaatcgccctgcctnccaaccgcgaaggggaaccttcccatgtagaactccagtatgctaaccccaaagctccatatgtcccctgcgtacgcgtcgtattgcccgtcgttatgt

SEQ ID NO: 72661 - DNA, 287 bp, Glycine max
  Clone ID: jC-gmfl02220052d11d1
aaagttgccaaagcttttatttattgcaaagcagagcaacccttattaagaccaaaaactggttcgtttcttacaattttaaataacagttcactttaagaattcatctatctctggttttgcaacaaggtttactaaaaacaatgttcaccctcaaaatgaaaatagaaaaagaggggaaaagaaaacataggttaacttaaaagaattctaagctattgattgcccccgcaaaaatttttggctaacggcgaacttggggtagactttacggggaaataaccttt

SEQ ID NO: 72662 - DNA, 455 bp, Glycine max
  Clone ID: jC-gmfl02220052e03d1
gaacaaataaaacagtagtcttcaattacttcaaccaaaaggtctaacaaactacacgattataagcttaaggcaagtaataaccaactaaaattcaagtttgcaaaactatgatttcttattataaagcccctaccctacattcggggaaacttcaaaaccactatttttcatccaaattattcaatgcaaaggggaagcaacatcattgcctcagatagttgtcgtcgtcattatctgtatattaacctccaccaccagaaccgtatttctttccgaacaagacgagctgtagcttatcataaccagcgagcactccagcacctgtaacagcacgtaatatgtttgcaccggcacctttaaagagtgacttagtaccctcttttgcgacaattatcttgaatgcttccaaagagctcttgtattttacagcttctccagatgtcatcatcatt

SEQ ID NO: 72663 - DNA, 371 bp, Glycine max
  Clone ID: jC-gmfl02220052e04d1
acgaaaaggaggggttatataggaaaccaacaatgtttcacgtaggagatcagattctacattatccctagaaacatactagtagataacaaaaccatcatgctgtcaacctgaatcacgaatctactgacacgagctaatacagcattttaaactacatgctgccgcaaagtgactatgggacccagtccactctatacactacaggctaactgctttaactctaattaagagagaagtgtctgacccaagtagccatagtggatgacatgcaattgagcagtgcctggagtgaggttgtatctaggtgtttactatcactggactccccgacgatcgttgccgttgcatctgcatgtactcgagctaca

SEQ ID NO: 72664 - DNA, 451 bp, Glycine max
  Clone ID: jC-gmfl02220052e05d1
aaactgatattaatcaaatttcatattcaaaagcacatacatactataaacactttttacattgccaattaatattagctgccaagccaacaacaaaagcaaactaaccttaaaaaatcatgggtgctcaagcaatggtaactttaacagtttttgattttaggggaggaggaagcttctcaacaaccacagtgagaaccccattttcgcatttagctgtaatggctgacacattagcattctcaggcaaacgaaacttcctctgcaaattctgaggccctctcctcttcaacctaaaatactggcacccttacatcctatccatcttgacgcttcctcttcccattgcttcttataacaagagtgatcctatctttaaccgttacctacaaaacaaattcacacatgccaatgcaccataacattaatggaggggaagaaaagaatattg

SEQ ID NO: 72665 - DNA, 490 bp, Glycine max
  Clone ID: jC-gmfl02220052e09d1
ctctcaaatttttagttctgcgatttacacttaataatttcacatccgtttcgtgatgccaaattgcaagatttatatattcaagcatcaccatgccgtggagacaatttcaaacttattgtaaatttagatagaaacatactgcagaggtagaaactcttgatttgcttgataagtctgctaaaaacattttatcgatgtaaaacttaagctaggaccatggtttcaactgttgggggttgaatcttttgctgttggttgccatcttcaatctcccaaatttcaggtaacgcttctttgatattatgaatgctgttcagggcatgatcagctccagggaccaaatctgaatggcccactaaaacagtgttaagtccagttatttttgcactttcaacatttctaacactgtcatcaaagaaaattgttttctttggatccacattagcaatccgaatagcagcttcaaaggctttcacagatggtttac

SEQ ID NO: 72666 - DNA, 375 bp, Glycine max
  Clone ID: jC-gmfl02220052e12d1
aacgataatgatttttatgagctgaccagttaaacaactaccatgtcaagaaacataagtaaattgaaactaatggaatacaaaaacattgggcccctattgggacccctttggaaaaacttggcccctagtttaccggaaaataaaatccgtagctttatgggttgacttttcccttaaacaatttcaaaaaatcaaaaataaaattttacagcttgggaaaaatacctgaaactggaattttcactttataacatactttaatacaaaagggttttactctaaaagggatgatgaaaatttggaaatttaaagccgctaaggaaaacaggtgtctccagttacaaaaattttgattcacttgagctgactttg

SEQ ID NO: 72667 - DNA, 431 bp, Glycine max
  Clone ID: jC-gmfl02220052f01d1
ggattattaatactaactttatttaaggtagcagtagctagcatgatttttatgatgagaagagtccagcgtacaaactccaaattaaaatcagaaaacataaagatctcaacaggattccactgagagaagagaagcagcatcatcagtcatcatccatacccaccaataatccaacaccgtgtggatcaccatgtctaggagagttgtccggagtcagcaacaacaacgggcttggaggtcttaccggagctggaacccaccttctcgatgtccttcacgacgtcaaggccctccaccacctgcccgaaaaccacgtgctttccgtcgagccactccgtcttaacggtgcagatgaagaactgagacccgttcgtgccaggtcccgcgtttcgcatcgatagaatgccgggacccgtgtgcttctttat

SEQ ID NO: 72668 - DNA, 277 bp, Glycine max
  Clone ID: jC-gmfl02220052f03d1
cataatctatccaagccaaaaaattttcgggccctaaattagaaatttggccaactaatgccggctcttacaattccttcaggggcccttcccttctggttgaatatgactttacccccaaacgaaaggaccatttcaggcttaccccccaggaagggtatacggcaaatacccctttacctcaatttcgtcgaccccaatttttcggccagatctttagccccctgtacatgggatgcctttgtcccccgacccggttgaagctacagcctaattc

SEQ ID NO: 72669 - DNA, 431 bp, Glycine max
  Clone ID: jC-gmfl02220052f04d1
gaacgcaaacaaagagggaaataaatccctacgagggacacatggcaattgaaacactgaaggtataaaagcccaaggggtcaaaaccataagctaagacggccaactgaggataagcttgacggagctggagctccagacgtaacgacacccggacagaataatactgacactcactggaacgactcttccatgcttacctcactacagcacgtaacaggcgatctaggtgaaccacagatactaagactttccgaattctcaggtggacaacggaacgcgacattgcaaggcctgaaacgatacatcctacacgacagtatactttctgatccctaaagcttgtgtgcaagaccgacgagcttgcaccatacgcatgaactgtgacactcaactgaccttggaagaaacatgcgggtaccctctgaacc

SEQ ID NO: 72670 - DNA, 542 bp, Glycine max
  Clone ID: jC-gmfl02220052f06d1
caccaaaacagtatttcattgcaaaattttacattactttttacaatttgtcttaccgccctagtaccaagcaaacgagtatgttctttgctttgattattgaaatgaggtactaaccataccgtaagtacaccacccaagtgctgatcaagccaatcatccacaatcttgtgcttccaagatcaagcaaaggttcatttggtttgaaaccaagattgctttgctatcacatcctcagtacccatggcaacggacatccaactgatcaggtacaatggatgttccaatgtgtggccttgcaacgcttaccgctcttcaaactcaagcgatcatgtcttcagaggtagtactcaagcaagccttagcactgccactgctagcaatgcggcggctctgaagtaaacttctcttaggctcttgtcgaccttttgaatcatttgctcatctttcagtccaagctttcctgcattctggttcatgcagacaattgtatcccttagcttattaacttgccaagaaagccaaacagcccaaatccaaac

SEQ ID NO: 72671 - DNA, 436 bp, Glycine max
  Clone ID: jC-gmfl02220052f07d1
gaataaaacacccaaattggtgaaatttgcaatttaggtacacaattgttcaagtatccatcagacaagaggaggctgaaccagccacattattctatgagtcctattaaaattaagcacttgactaagataatgacaaaagaagcacagtgcatacaaaaaccaaggggtgaaatattgatcatgaaactaagcagtatgagaaggttggtgctcttcctggactacttcatgttgctcttgctcttgctgtggtttttctccttgccaggtccaaacaatgtccttaaacgctggtcttatatcctgtttaaaaagcttctggtactccatggtgtcaccattggactttctaagttccaccatatggaaggtggggtaatctcaaaaatcttagcatcaacacccaaagctgcttatctgccttccttggaac

SEQ ID NO: 72672 - DNA, 449 bp, Glycine max
  Clone ID: jC-gmfl02220052f11d1
agcatatacaatgctattttataactgatatttgaagcgggagcattaatacaggccattatgtaactatgaactatcaatatacgatcgttaataagtccgaggtacacacacttaaggccatggtacacttatgtgatcaacaacaacttcccccttattggatacattatgccaaaaccaggtaggagcattttccgtaatacaaaaacccttatctttggcatgatttatcaattctggcatcaggatacgctctaaactctgatgcatgacaaggaggtagccaccaggggccatattgatatgcaaacaatgccacaatcggataggatgcactattcgcgtgaccacacatgttctgacacaattacctcttgaagaagccatgttcaccccagctctgaacccatgaatttcttatgagccaatttgggacacccttttta

SEQ ID NO: 72673 - DNA, 466 bp, Glycine max
  Clone ID: jC-gmfl02220052f12d1
aaggagcaaggagtactaaaataataatagggccaacgaacatcatgaattataaagtaacaagagattgaagaaaacaatggtaataaatttaattttagcccctcgacagggtccaatactgacactcaatgatacaatagtactatgtaacagcagcactgaagcctaagcctctgctctagaagaacaatacatgggcagcccagctcatggctcatcatccaatgaccttattcaagcacctgatggttgcagctccactgtggacctaagatacagctggaccaggagacatggaatgctggcttgatcccggagctcctaccggaggaacggtagggccaagcaatgacggcgactgtgctggtgcagtgagcttcatactctattttgtctacttctttgacttgtgagcggctgccggaacctgagcgctgtgtgctaccacgggtgcgggagacgt

SEQ ID NO: 72674 - DNA, 514 bp, Glycine max
  Clone ID: jC-gmfl02220052g01d1
cattaaaaaaatatttcttataatgccgtgttcaactcaaggcaattacacctctcatgccacggtcatactattcaaaacaatttttacaagacaccaatatgtatatatatagctgaagaccccacaccctaaactaaattactgtgtgacttgcacttcagcaatttcattaattgatcgtcgccatatccttctaggagacgtacttctcttcacagaataaaattttggttcttccaactgaatttctagattggacaaatctaatgttagcttttgcttaatgaaagcatccaaatcaaagtcactttttccatttgcatcatcatcatcctcgtcttcactagaagaatcaactctgtttttatttgttcccgcaatgttcctcaaagaatccagtggcatgttgtacgaatttgggttcagcttgaggattctctttaaactgtcaatagccgggtctaaaatacctaggaatcccataacccatgaagcatcatctacaacttct

SEQ ID NO: 72675 - DNA, 424 bp, Glycine max
  Clone ID: jC-gmfl02220052g02d1
cattaaaaaaatatttcttataatgccgtgttcaactcaaggcaattacacctctcatgccacggtcatactattcaaaacaatttttacaagacaccaatatgtatatatatagctgaagaccccacaccctaaactaaattactgtgtgacttgcacttcagcaatttcattaattgatcgtcgccatatccttctaggagacgtacttctcttcacagaataaaattttggttcttccaactgaatttctagattggacaaatctaatgttagcttttgcttaatgaaagcatccaaatcaaagtcactttttccatttgcatcatcatcatcctcgtcttcactagaagaatcaactctgattttatttgttcccgcaatgttcctcaaagaatccagtggcatgttgtacgaatttggg

SEQ ID NO: 72676 - DNA, 451 bp, Glycine max
  Clone ID: jC-gmfl02220052g03d1
aaagaaatcagataagatagcacaattacatttcacaaggaaaggaactggtcaacaacattacaaatcaggcacattacattaataagaggaaaccgaacccaacaaccccgcatcaaaactctgtgtggaccctcccctccttccagctaaggcttaggttttccccttacagaagcaatctaagttctgaccatttcaggccaagtatacttaactactatatgacatgtagacgtttacaataaacaaaggctattttgcctgaggaaataagatccatcagtagcaacagagaatcaaaaggtatacatattttgatggatcaactgcagccatccagcaccccaagtctcagtccaggttcagcttgaaactacactggtcaagccacagaacatgctaaattagacaaaaataatggcgccacttttgattaacttatcaacta

SEQ ID NO: 72677 - DNA, 452 bp, Glycine max
  Clone ID: jC-gmfl02220052g04d1
aaagaattcatataagatagcacaattacattttacaaggaaaggaactggtcaacaacattacaaatcaggcacattacattaataagaggaaaccgaacccaacaacctcccataaaaactctgtgtggacccttccctccttccagctaaggctttggttttccccttacagaagcaatctaagttctgaccatttcaggccaagtatacttaactactatatgacatgtagacgtttacaataaacaaaggctattttgcctgaggaaataagatccatcagtcgcaccatagaattaaacgtgtttacatattttgatggatcaactgcagccattcagcaccacaagtcttattccaggttctgctcgaaacttcactggtcaggccacagaacatgctaaattacacaaaaaataatggcgccactttagattaacttatcaact

SEQ ID NO: 72678 - DNA, 163 bp, Glycine max
  Clone ID: jC-gmfl02220052g05d1
cccctatataacttgatagattattgaccatcaaaagcaagaccgaacacgatacaggacaaatggcaattacatatcggttcacccgaggctcaacgtcgctggggtataccatgcagggtctgtgtacactttgacagctatatacgatgcggaagccgaa

SEQ ID NO: 72679 - DNA, 467 bp, Glycine max
  Clone ID: jC-gmfl02220052g07d1
gaataaaacacccaaattggtgaaatttgcaatttaggtacacaattgttcaagtatccatcagacaagaggaggctgaaccagccacattattctatgagtcctattaaaattaagcacttgactaagataatgacaaaagaagcacagtgcatacaaaaaccaaggggtgaaatattgatcatgaaactaagcagtatgagaaggttggtgctcttcctggactacttcatgttgctcttgctcttgctgtggtttttctccttgccaggtccaaacaatgtccttaagcgctggtcttatatcctgtttaaaaagcttctggtactccatggtgtcaccattggactttctaagttccaccatatggaaggtggggtaatctcaaaaatctcagcatcaacacccaaagttcctttcctgccttccttggaaccttccaatttgagcaagccttcatcttttct

SEQ ID NO: 72680 - DNA, 510 bp, Glycine max
  Clone ID: jC-gmfl02220052g08d1
ggctgcttaagataatgacaaaaggctatatatgcatattatctaaacttgtacagttcatatcagtcactttatgtgttaatattgtagctgccatgaaacttgcagaaaaagttatcacgaaaacaaactggttgcacgataagtagctctccaaattacacagacaaataaacctaacaattgtcccacatgtcatactcatagtccaaaagcacatattcctcaagatgaattgtgaaaataccagtttgagcttgcaagaaacattgtatgcatctgatgagaattcaacccaagttcaatcttctatttgataaaatgaccatgagcatgatagagctgtgataaggagcagctttcacttggcattagttactatcagcaaaactgaaactcacctgcaaggctcatgtagaggatgaatcggaggcaacggcctcttgtcttggccttctgcgtcagggggagggccatctctccgtctctcataccttctactctcattct

SEQ ID NO: 72681 - DNA, 447 bp, Glycine max
  Clone ID: jC-gmfl02220052g11d1
agcaaagacaatgctatcttataactgatatttgaagcgggagcatcaatacactacaatatgtaactatgaactatcaatatatgatcgttattatgtctgtgatacacacaattaaggccataatatacttatgtgatttacaacaacttctagcttattctatacatcatgccaacccaactaggagcaattttcatcatacaattacacttatctttaatcatcattcatcaatactggcatcagcaatacgctctaaactctgaagcatgacaaggtggtagtcaccagggaccatattgttatgcaatctatgccacaattggataagatgcacaagttgcaacaccacacatgttcttacccaattccatcttgcagtagccattttcaccccagctttctacccatgaattgtttatgagccaatatgggacaccattt

SEQ ID NO: 72682 - DNA, 429 bp, Glycine max
  Clone ID: jC-gmfl02220052g12d1
ggagcaaggagtactaaaataataatagtgtcaacaaacatcatcaattataaagtaataagagattgaagaaaacaatggtaataaatttaattttagccccccgacagggtccaaaaaagacaataaatgatacaataatactatgtaacagcagcaatgaagcctcagcctcttctctagaagaacaaaacaagggtagcccagctcaaggctaagcatccaatgaccttcttcaagcacctgatggtttcagctccactctcgtcctcagatacagctggaccaggagacatggaatcctggcttgatcccggagctcctaccggaggagcgggagggccaagcaatgacggcgacggtgctggtgcagtgtgcttcttactcttctttgtcttcttctttgacttgggagcgggtgccggaacc

SEQ ID NO: 72683 - DNA, 408 bp, Glycine max
  Clone ID: jC-gmfl02220052h02d1
aacagataaaatgttcaattaaataataattcttaaaatggcgagtttaacggaaggcaatgacgcctctcatgccacggtcatactattcagaacaaggtttacccgacaccataatgtgtatatatagctgtagacccctcgccctaaatctaaagttactgcgggactggcactttaccaattgaattaattgatcgtcgccatatccttttcggcgacgtacttcacttcgcagaatgaaatgctggatcttccaactgaatctgtagaacggacatatctaaggccagctttcgcttgatgaacgtatcccaatcgaagatactgtaggcattgtgattagcctcatgctggacgaccctagatgactcaaccctgcatgtatttgttcctgccgtgttcctt

SEQ ID NO: 72684 - DNA, 416 bp, Glycine max
  Clone ID: jC-gmfl02220052h05d1
aatctaaattaaaattctggcgacaaaataagatattcaggattcctccatatggaagtttgaatttgcattgtacattaaaaaaaaaaaaaaaaaactatcagaaaggagaaagggagaaagaaagggaaagggtcaatcgaagtcgcacaacgaagtgccttgttccttgccagtctttagtttcgttgccaaggagggaaggcgtcatgctttatatgttgtgaatgccaggcagcagaacgataagcctttgacctaatacaaataatgaatgcctccattaagctcactgacccttgataactcgggaatgttaattctttcccacccttattgggggggagttctgggcttaaaaggtatgttgccaaaaccacatttccctttttttttaaaaagaattaaattttttg

SEQ ID NO: 72685 - DNA, 477 bp, Glycine max
  Clone ID: jC-gmfl02220052h06d1
agagtaatcatgaacgattaaaattaactattaaggagggtcataaggagaatagataatgaagcatacaaagtatcatctcacatacacatctcgtctcatcataaaaggatcgtgatttttagctccagttcatatctcaggtctgggctcataatttccgcagctcaagccaccaagggcgagtgcaagacaaacttcttccacattgcggatgcttcgtgcgccaaagaaagtgagcaccgcttatgccttcttccccttgacaacaatcttgccgtgctcgcacttgagactgatctcctcgccgaaggtgtagtagccgtactcgtgctctggctctggctctggtttgggcgtaggcttgggctcgggctggtgctcgacgggtgggggtgggtgaggagcacgggtaggcttgtgctccggtggtggaagtgggtgtggcacacgagtgggcttgtgctctgtggtggt

SEQ ID NO: 72686 - DNA, 552 bp, Glycine max
  Clone ID: jC-gmfl02220052h07d1
gatctcttgttcttgtaatatatttataaaaatttttcttattaacatgaattttttctgggtatttgtgataaatttttcgtttattcttttgaattaatgaaagacctatggtttgatacataaaaaattgtttattgttttttctagacaggcgaactggttcgataacaaatatttcttttttcataaatttgttatttttctttttccttaagcctagaagaattaaattcttctgattttgaatcatcataatatctagacctagttctcctctttgaatagaggctattgtaatttctcttaaattttttaatctaatcaggagacaatatactttgacattgttaaatattctttgacctaagaaattattccaatttaaatgtaaaatcaaaaaatttcttaataagaaattaagttctgcctccatctatgtcttgtctttctttttctttatacccttactattcttttactgtctgatcctacataatcggtttccatatctttttcttggcttgagatagatgattcaagattccgttg

SEQ ID NO: 72687 - DNA, 422 bp, Glycine max
  Clone ID: jC-gmfl02220052h09d1
agttcctgcggataacccatcatagggtctaccatccaacaactcgcacccctgagcaacccaaccgagcctcacagggcttcccaaaatgggtgggcaaaactcaaccccttttcatcttgatggcctgaagccccagtatttgccacccaatgatcgctagactgtgggggtttattgtcaagggactgctatcttgcttagtatcaatcccaatctctggcatccattatcccttgaaatgaccgagccttcggcaggagtcttcgaggataacccggacctcacattgaggctgggacaggggctcctgtcgggcggcctacttgaactgagctcctaacaatgagcctgcttactggcaccgggtacagctcgcattgagaacggaccggccccttttttgaccgacaagtcccctt

SEQ ID NO: 72688 - DNA, 478 bp, Glycine max
  Clone ID: jC-gmfl02220052h10d1
acatatataactaaagaatcttgttttgttctattatttgttattttataatattctaatgaatctttattttcctttttattattagttattagaatattttttattattagaaagaataaatagaattggcaaaaataaaaaaaaaattcaataaaatcaaaattatcgcgggcgaatatttactcttttattatcaatcaaattcagatgtaatgtagggcacaactcctaaaaaaaggattgctttttggtttcttccgccatcccacctaatgaatcattaagatttgtttttaataaaatcttaagtatttgcaggtttcgtcgttcccatcacttctcgattaatggttaggtctgaattcgacaatggagcctttctcatatcttaaaattaataatctttttttttttcgaatattgatttggtttttcgtgaatcaatattctcagtttttatcgattcagagctctt

SEQ ID NO: 72689 - DNA, 386 bp, Glycine max
  Clone ID: jC-gmfl02220052h11d1
caaaaaaattactacgtaaatagcatataacgagaagagatgcacatagctggggtggggaattttcctacgttttctatattctttaagaaaaaaaacaatgggagcccaattcataacctgaatctctgattttacattgaaaattattacgattacacaatagacacatccaaaagtagaaactgatcaatcctttggtgaggggattgaaatgaaaattacatagacatattaagcagtgggaagaaccttattaacaatctcctggctaagagctgcaatctgggaatcaagggacttgatggtttcttccttttgattctccaagctagacagagccttctgcagctcagcctcgactttcttcctcccctcagcaatct

SEQ ID NO: 72690 - DNA, 477 bp, Glycine max
  Clone ID: jC-gmfl02220052h12d1
aaacagtaagtcttagttgtaatcataattaaccttaaaaaataaacaataatcataaaaaatataatattttaatttattggtagaatttaaaactacaacatatataattaaattagaagtacactttaaaataaatgatatgatttttaattttttaatccatattcttaaaataataaagaagatgaaggtgaatagatcttaaacaataggtgatggcgacgctgggtggtgctgaacacacgcggtgatggtggtggtgaatgcatgacatggttgaggaggcagagaaagagttgggcggacatgaagaagaagcataagcggaagtgaaacgtagaaagaaaatcgtatctctcttcttaagtttttagttgacaaatatcatacacttgggttggaatcactcaaacctaacttcccaaaaaaaaaaaaacattataatttcataattgaaaatcagacgaaaagaat

SEQ ID NO: 72691 - DNA, 425 bp, Glycine max
  Clone ID: jC-gmfl02220053a01d1
cttagaaagccggcccggaacgggcggcgggggaaccccttgaagggtttggcatttggttgaattggccccgggcaaaaatgggggcccccctggggggacccactaccggacagttttgagcaagggcccggggatccctgggggggaaaatcgaacaaacgggaggggaaagaacccctatggggtaaaaggccaacaggaacaactccgggaaaggcccattggccccactccaaaaatacgggggaaaaatcggggatggcccccccaatttaaaaccccgggcccaaaaggggatggcccaagttaaacggtgtacccaaaaggttttaaaagcccaaagccggggtattgcccggacggggcaaattttaaaacgccaaaagaaaccaaaccgggccaaccccgaacgggaaaacaaa

SEQ ID NO: 72692 - DNA, 479 bp, Glycine max
  Clone ID: jC-gmfl02220053a02d1
gccttaaaatgtaagattattgaaacggtcactttctggttgaaacttgcaacagaaggaccagagagcaccaaaagttggtggaaaggatttaaacacgtcaatacattttttggtgaccaaccaccataccatcttcatctattaaaaatatacaatactgctatatactaataagctacagttaaaaataaagaatacttacagtaatgtacctatactatcatttctttgtacttaaattatatgatttgtatatatcaagcggatataccattataccccccgtgtcaaaattctgcttcgcatgaaggtttcttaagtttctaggctatgctcagaataatgaatgattggaacatgaatcagttttgctcagaaaaactttgaggcttactgctggcaaacgccaaccatatgatggtaccagtcacattgaagaagatcgatggtgcaaatagtgatatactccatgaatg

SEQ ID NO: 72693 - DNA, 531 bp, Glycine max
  unsure (1)..(531): unsure at all n locations
  Clone ID: jC-gmfl02220053a03d1
gcaagcagtaacattgtactgtaaagataagtatttaaataatcttagctgtctgctaccaatatgttttgagggtttaaaaaaaaaacaaaaatacccgaatcatatattatatggtcgggttcaatccaaaatttcagacattttaatacaatcttaagaacctggcataccttaacccagctacaaatttaaaaataatactacagtttaggggagagcaataaaatccatcctacttcaacacacagttctgctaataagccccgttaggaagcaccttgaattgcagcagcaggttgcatggctatatcctgattctgtctcacagcaaatccatggccaccataaccctgatgaccaccataatggcctccattggaatcagatctccaatgcttatttcctggactgcgaccccaagaaagacccactgtctgcttnccattactgtcccattcaatccctgaatgcttnctcagcattctttctgtcagcaaattgaacaaattcacaccctttaccaactgg

SEQ ID NO: 72694 - DNA, 453 bp, Glycine max
  Clone ID: jC-gmfl02220053a04d1
aaataaattgaaaaagtgatagttgcacactggtttatttatttatttatacatgcaaaagtagtcaaaataattgacatacttgtctacatcaaaagttgacgaggaaaagtaaacctgcgtagctagctagctgtcccatgtacacttttatttaaaaattgaaacataaaaaaatcttgaaacgaagcagctaatagaatccattatttatatataacaataaactactatatacacatacaatgtattctagtttagtcccctaaaacacgagcaagttattctgggtgtcgtagcccaacttcttcaaattcggctggactgcaaatcgaatcataggtggcggtccacaagtcaatgccaaggtatcaggagatgcatttggaatatgctccgtcaggatactttcagtgatgaatcccacactgtattcccacccttctcttatgc

SEQ ID NO: 72695 - DNA, 590 bp, Glycine max
  Clone ID: jC-gmfl02220053a06d1
agttgataactcttggaactttacatagtgatcagtagaataatactcaaatccaagttcgtttggtcacttttaatgacaacatactgataaagaacctgtcaggtaatctacatgtctcctctcctgtacaattccatccaccttcagtttctgcaggtaaaatacaagcaattcttccctcaccaaaagagaaactcaaatgacaattttgtattgaagccagctatacaactcgaacccatgttccaccacacattggacatccataagcccagcggctgatccaccaaatctcccggtcattttgactgggaagattggtggaagctggtgaggcaaaagcacaagtctgccgcagacatcttatacacttgtaccagatcccttcaaggccagttttccacaatgcagtaacaacatctcttcgagatcccattataccaaggtatgctcccaggcccacagaagtgttcaacccaaaagctgcatctcgttcagacatcctgcgcttccttggccataagccattggctccatagtagacatcacaattttccaatgagctggaatcaagtggatttaaacta

SEQ ID NO: 72696 - DNA, 539 bp, Glycine max
  Clone ID: jC-gmfl02220053a07d1
caataaaaattttaaacataaatattattctgtgtcgacccggagctaagatatagttttgattggtaatcttgtgaccaataaaatccacctttaaaaggcaaagcataaatacatgagtgtctaattttaccattgatttaaaaacaaaatttgcaccatcttataagaaatatggaacgcctgtcctgggccctctcatctgattgttctcctctgtttcggtgaaaaatttaacttctctttccatattttcattgaaactcagaatagaagctacatttccacatcggtaacagtaattaggtgcataccatacagttacaaggcctttatcttggaacatatacttaaggccttcctgaacgagttggtgcgctcgacaaacaagatcaaggttatttatgtgattgaactccgaactgaccctggatccaaaaagccaacctgctccacggggactgactgccatgtttcattatcttcaggatcactccacattagatcacagaaaggaccctcatgaggaatttcacagt

SEQ ID NO: 72697 - DNA, 410 bp, Glycine max
  Clone ID: jC-gmfl02220053a09d1
aggtattccgatattcggacgcctcaacttgttatgaaatcacattgatagcctctactcgtgtcctagctcgtctaagagctagatttgcctcaattggttgtctcttgccttccgccttattcaaattagcttctgctatttcaagagtttgctgtgcttcttggggatcaatggcactacccttttccgcatcatttactaaaacagggatctcattattgtttattctagcaaaaccgcccatcagagccatcgttaaccattggtctttaagaagacgtattctcaaaatacctatatctacgggtgtggcaataggcgcatgatttggtaatactccaatttgtccgctattagtagataaaatgatttccttcacttccgaatcccaaacaattcgattgggg

SEQ ID NO: 72698 - DNA, 482 bp, Glycine max
  Clone ID: jC-gmfl02220053a10d1
atgaaaaagagaatatggtatcaataagtttaagattaattataaaaaaatatacagattagtgacaaatttaacatcactagattaactacacttcttaattcttgtgcagatgccctacatataggacccagagggagtacataactatgatgcgcgatgctttttaggcgagaaattcagcttcaaccactttgatctgatcttatctattagtagacatactcatatattagccactttttgatagagcaccagccgcaaaaagaagattccttcgagaaaaccgcaatgagtaaactggagtagatttggttggtagagttttcagcgatctaagtctgttagcactcccacctttttcttcagccctagaaaccttggtgctcgtatttacatcccacaattttacagtgcaatcagcagatccagatgctatcacagaaccttcagaactgatagcgagggaccagacacatgat

SEQ ID NO: 72699 - DNA, 522 bp, Glycine max
  Clone ID: jC-gmfl02220053a11d1
gcaagaagccaagagcaatcccttttcaattaacactattacattgggggtatataatgaagctgattatgatgcttgcagcatcaataaagcagtatataatatatacagattttttgcaaattagaggatccaaacaaacaagctaatcaaacaattttgaaagaatatatttttttcttgctttgtaagaatatagctcctctattccctgttcatggtaaccttatctagattacatctgttgaccttgacagtggcacaaaatctatgaggaagctggcattggaactcgaagtacttgttgcagaaagcgtgctgcaagacgttgagtgatcccacccataacacgctccccaagtctgcgtgcttcaggttgctgaagaacctgtagtataggtagtaaaagatctggatcataatcattagaggatcgcagaagttcccatatcctaattacttgatctctaagctctatcaagttttgcatttcaatttctgacgttataatgggtccatttg

SEQ ID NO: 72700 - DNA, 336 bp, Glycine max
  Clone ID: jC-gmfl02220053b02d1
gggaaaggcccaaattccaagggtttgaaaaaaccttaaataaacccggaatggccaaaaaaaaccctaaaaatccaaaagggtccaaaacccccccaaaaaaaaaacccccaagggttaagggcccaaggggttttcaaaaaccccaatctcccccccctcgaaaaatcctgaaaatgggggcccaacaaaaccggtgccccctgggagggaaccctgacccaaccgaaaaaccctggccctttcgctaacgggggaaccctttccaaacccgggaaaaacctcaaatcccggttcccaaaaaaaaacccccccaaaggcgaacccgcctttctt

SEQ ID NO: 72701 - DNA, 401 bp, Glycine max
  Clone ID: jC-gmfl02220053b05d1
aaaccaaaacagcaaacaagttcaggggagaaattgaacataacagacatgacatacaagaacccttgaaaaaagacacgcttaaaacaagaacccttggaaaaaaaacacgcttaaaaaccaccgcgaaggcgaaggacgagatgcaagggggattccttctgaatattggaatctgccaagggacgaccatcttccagttgcttcccagcaaaaataagcctctggtgatcagggggaatgccctccttggcctgaatctttgccttcacattatcaatgggatcagaactttcaacctccaaagttatggtttttccagtcaaagtcttaacaaagatttgcgtgccaccacgaagccgcaacaccaagggcaggggagattccttctggatgttata

SEQ ID NO: 72702 - DNA, 553 bp, Glycine max
  Clone ID: jC-gmfl02220053b06d1
atacaaactgttctacacatgtatcttcaaaatcattgtataaaattcagaccctttacttatttataaacataagcctgatattgaccaccaaagtaaactagtttgttttgtttatcttgtcaaaagagagcttccttctttgataagaacaaacacactgccaccatcgccccttgagatacgcaattcttcgtcgaggtatgtggtgagtaaccaggactgagcattgctgttggaaattgggatcttcaagggaggcctacttgaaattgttttcactaccgatgtggctgtgtcttggacagaggtaaggatgcctttgaaaagtgtaaggtcaatcttttgacccagaaattccacattttccggtatctctaatgagtccgtaagctgtggagtgccaattatgccttcctcaaactttatctgcacacgttttggacttcgaacatcaaatttggcattagtactaattgaggtggtggccaaaggaccagcgaactgaacagagttttggacggtaaaattcagcgagtcaataatctgggat

SEQ ID NO: 72703 - DNA, 543 bp, Glycine max
  Clone ID: jC-gmfl02220053b08d1
gaacatcaaatacacatgacaagttgaagagtaacattattattgatttgtgtgagttaattatgagctcacatgtattccaatacgatggaaaatatcataacatgaatctatataaattcatgatgctattatttattcttaatatgtatggtatataactcatcatcttaaatggtagccatctcgctgctacaaatgtaacaacctagtagggtctttggccaacatagttgccaggaggagcatagttgcaagtgatgaaagtgcctccattatcacatgctactttggcacatccaagacgcacagagtctctccaaacaacctgagtgtaatgcagacactctccaccaacacaggaattagaattgtagtcatagttagacttctcatcaacccacaatttcactgcatctgtgccacttaggtcaccagtgctcatagcaagattctccccgtattggccaccaccaccagagtggatcagttgacaatcacctttacgttgattagcatagttctgtgcaaaagcagcaaccg

SEQ ID NO: 72704 - DNA, 473 bp, Glycine max
  Clone ID: jC-gmfl02220053b10d1
aaaaggaatccatatgcgctccattataatccttattggccacagtataaaaaagcccatccaccataaatagaaaggcgcccatcatcataatcattttgatgacaaaagtgtaaaatagccctccaaaagatctattgtacggattcgacgaccattacaaaaaaataaactggtaaatatcggagactctcaagtccatataactgaatttttattgggccccctggtttcctttgggcaagatattttctgtagaactgtggtaccttcgaggggggttttatcaagaaagaacaggcctagctcttttttcaacattaaactgtgcgtccacaaggcctgtaacgccagcagtaattgtttgaccctctttgacagggccaacacccgggggagtaccagttagtatgacatcccctttaaacaatgtgatgacagagccaaggtagctaattagaaatgggatctta

SEQ ID NO: 72705 - DNA, 466 bp, Glycine max
  Clone ID: jC-gmfl02220053b12d1
aaaagacaacctccaacggctaaaagaaaaagaacaccacattgataaattgacttaactagttaaattatctttcccagtcaaaccataggttcttaacaaaattaagccacataacctatccagccttcaaataaacatcaaaatgatatcgcaaattgctagctcaacggcgactgcacggtagcaaaacccatgaaagttgatacattctctaagcaaccagagtgctagcagttgttgattcgtacttccagactggtgggagcttcttagtcttcttgtaatagcgagcaagtcggtggattctgctctcaacaagaatcaacctgaacttggagtccttgtccttcctgttcctctcaagatgcttcctaattgaaactgccttcttaatcaaatggtacaggtcctctggaatttcaggcgcaagtccgtgagctttgaggatgcgaaggattttgct

SEQ ID NO: 72706 - DNA, 507 bp, Glycine max
  unsure (1)..(507): unsure at all n locations
  Clone ID: jC-gmfl02220053c01d1
gacaactatggattattttatttatataccaaagtaatcatacaaataaaatattttgaactaagatggggtacatctagattttgtgtaccaactccttaaaaattgtctctataccctgcttctgctattggaagcaatggaaatcctctgatcctgaagcatgttcaagttgggagccagcaaccgtgtgtaccggtcaaagtacaagagctgtttcaggagaagagcaaattctctaggaaacttcaatccatatgattcactaacccgaaccacatcaagaaagagtgcattcatctgcctctcatcaacaactatattagcagcaacagcagttgcatttgtggctgttccagttgtagttgctacaactatttcagtgtccaattccttaattgatgagaatactttntccaaatctcttgcaaggccttagcatcaacatcctggtttgtagcacccatttcaattaaggagatgccattgagtcataatcttcaatgc

SEQ ID NO: 72707 - DNA, 547 bp, Glycine max
  unsure (1)..(547): unsure at all n locations
  Clone ID: jC-gmfl02220053c02d1
ccttatcgtatacccataaaaagtacgttgaatctttttggaaacatatcctataatcaaaatccaatttgcattaattatataagggaacttgaaacataccccggggaaatgattcatgggtaagttattcatttagtaattaaatcttcgtgaatcccccctttttttaattccagttaaatcccttatcacattcacaaatatacataaagggggaagttctattagaaacttgcgttttctctttctttttttttttaccaaaaatggatcgaagtttctcatataattcgggtgttagaaagattaccatatataacataaaacttctccgccaattctttctaatcgagcctctcgatctgtcattatacctctagaagttgaaagaattacaatccccatgccccctaaaattcgagggattcgttgataattagaatatattcgtagaccgggtgtactgatccgttttaaatttaaaaaacttttatatgatccctttctatttcttctatanccgagagttaaaactaaaaaaata

SEQ ID NO: 72708 - DNA, 469 bp, Glycine max
  Clone ID: jC-gmfl02220053c04d1
ggcacaagaacatatcagtgttcattctataggggttaggcaaaattaaatgtttatgtacacagcaactgggataattggaaaatcctacaaggttccccaaaagaccttgcaaagtgagaagtgaggagactaccaattaaccttgaccaacctatctaaaccaagttcaaatatctacaccagataaagtaataagttcacaggaaacaagagcagaggcaagttttccctaaaactccatattccagatcttattgaaatagtaaaaaacaaacactcttctcaatagcagtcataaaagtttcctgccgcagagggaacagaaaaatcagtctgtgtctgttcaagattcataagtccgcactgaatctcgaatctcctgacgacaaacaggacatttgggtgcaacttcacgttcaactgatatggcacacccttgtgaacacacaagatgcccacagggaat

SEQ ID NO: 72709 - DNA, 436 bp, Glycine max
  Clone ID: jC-gmfl02220053c05d1
gtaggaagaacccaaggccttttttgaaaaaagagcaaaccagtttttttttaaacccaaacaaacaaaaggggtagggtgtaatcaaccccccccctttttgtaaaaaatttgcccgttcccggatttaaagccgccttgaaaaaaaaaaaaaccttgaaccccccttgggggtcgttttttttggttgggccccccacctcaaaggggggggggggtagggccccccttccgggtataatttcccccatcaaagggaaaaccaaaccccattgggcccatcttcccccaaaaagcccggttggtttcgggaatcccaaaaaagggcccggaccaagaccaaaaacttccctgaagcctttggctggggggaaaacaccccccgggggggggtcggcatcaaaaaatttttcacggcacctaaacccccaatggg

SEQ ID NO: 72710 - DNA, 419 bp, Glycine max
  Clone ID: jC-gmfl02220053c08d1
atataagtacaaatattattcttatcgttaaaattcggtagacatacattttatgattttaatatattgcttttgaacttttctaaccttaacatgaaactaagtgcaggttaaggtgcgcaaggtaaatttatctgcgtatgataataaaaaaaagagagtctttaaccccatagctagattggtaacaattaagatggtccaaaaatattgggtggaagggttgatggtagagagagagacaaggggtgaaatatgtatgattctagcggtgatttgaataacaaaatttaacagcacagttggaagttatgaaatacaaccagggcagtgtgccaagccattctcattacaattggggcacctctctatgtgaagaagcttgcgactaccagcacagtcgaagaaggaacgaacct

SEQ ID NO: 72711 - DNA, 406 bp, Glycine max
  Clone ID: jC-gmfl02220053c09d1
aaaaaaaccccccccttcccccatttttcccaaaataaaaagggggggggaattttcaaaaaaaccgggccccccccacaagggggggcggggcaaatcccctttttgggaaaaacccccccccccacaaaaaaaaaccccccttcccaaacctggggggggttccccttttttaaaaaaaagggggacacccccgggaaaaaaaaaaacggggctaaaaaatttccccccccttttaaaattttgagaaaacccccaaaaaaaaaaaaaaacctgtaaccgggtgggggctgaaaaaaagaaaacccaaggccccaaaagtttattttcccccccaaaaaccccccttttaaaaaccttttttgggcccccccccctttttgggaaaaaaccatccccaaaaagg

SEQ ID NO: 72712 - DNA, 257 bp, Glycine max
  Clone ID: jC-gmfl02220053c11d1
ctctctccaaaacacagggggggggacaccaaattttaccacaaacccccccctctcagaggatgcgaccccccgaggggggggaagggtgcaacacccaccaataaaaaaaattgggtctttaagacctattttccacaagcgattatccgttagaaaaaacccaacaaaatttgggggcacctaaaaaaaaaagggctcggccaataataaaaaaaaaatctcccccccccccccaggacaccaaaacccccaca

SEQ ID NO: 72713 - DNA, 348 bp, Glycine max
  Clone ID: jC-gmfl02220053d01d1
aaaccaaaaaccgagctaacaaacacaagcaaggaaagggaaaaacatacaaagggggcacccaaaaaaaaataactgggcggagaacaaaaaagaccagacggggaaaaacctgacaaaaccgaaccaaaaaaaccaggggcaaaacccccttaaaacagaggggggaaaaaaaaaaaggcccgaacacgaaagacaatcccaaaagggggaaaacccgaagggcaaaagggacgcccccagaaaggggcaaaaagggcggccccaaaagaggggtacccccaaccggaaagggaaaagggccacccccaaagggccccgaaaaaggggggggggcgcaggcgaacc

SEQ ID NO: 72714 - DNA, 473 bp, Glycine max
  Clone ID: jC-gmfl02220053d07d1
aaactaaaaatacttttattttttaaataattatgctgttcaaatgttttctcatcgtacattataagctatttctcaagtcaccactatattcctaccatctgaaaggagatataacggggaaaggaaaattcaatccagtaaacacgtaatgagctgtttttttcttacatgcgagactttgcctgctgctccaaagaggcactcagaggaattcctttggcagctcttgcagccaagtaggcacaaggcttgaagaattccccatacaactctgaccatttctccaatcttgaatatatgtacttggatccaagagaatcagcccagaatatgatgcctcccctgtaagggggaaaacccatgcccatgatagcagaaatatcaagatctgctgctttgactgcgataccttcatcaaggacccgacaagcctcattcaccacaggaaagaatatcatctctatgatatc

SEQ ID NO: 72715 - DNA, 476 bp, Glycine max
  Clone ID: jC-gmfl02220053d08d1
caaaaaactatattgatgttttattgaaatatccatcatacaagcactacccaagcagaaatcaacagtatgcgtagacgccacagcatacctttaaacatttcccatcatgacaccttaaaatcacaagagaacattagaaatttcgaatcatgaaggttgaactatgaattcttaacatattatctagctaaaattaaacaggttttcacatattatagaccgaaggaacaatttgttggtccaaggaagaaagcacatgcaagaggggtctggagacaaatgatatagtgatagaaccatccagcattcatcgccgaaaagcattgctttcaccaccagatcttccttgagaataatatgtccgacgacggacactctcggctattgatgcactccccccttcagctgcaccatatacacttttctgagcagtatccaagaaattcttgccaccggcattatcattctggatt

SEQ ID NO: 72716 - DNA, 580 bp, Glycine max
  Clone ID: jC-gmfl02220053d09d1
gttgtgagatataaattgtttgacattgaatctaatttgcaaaatcaattgttctatggcgtaattgagttctatcaattacatctgaatcaaaaaaatgaaaattagggtacaaaattaacagaaggaaaatgatcccataacatgggcagatgagaaatcctgcttactaaatgtaaatctgatgccgcccctaaaccttaatgatacaattctgctacaaaaccttatctttccttctcccctaactgattttttcttcttttcttttcctgttcttcgggcatatacagatacatcgatgagtaaaatatcccagtgttggtggactttatactgtgtcaaaaaacacatccttggcaagttcaatatatcacaacacgaagtaggcctggctgagtttccgtgaagtcaatgccctcttcaagatgaaaacgctgtgcagctattggaagtcttgcaggagtgcgagaacccctggtatgatgacctgtgcccacaagaatataaacctgcagacgctgctcggcagctatggcagtgcttttcagcacactcaactcatgtttcagcacatgaa

SEQ ID NO: 72717 - DNA, 474 bp, Glycine max
  Clone ID: jC-gmfl02220053d10d1
gcaggatataaatgataactgtcttataaatccctctttgcagtaattaattaaactggggatgcacccctagttctaatttgccaggagctaatggctttacaatgattagtatccataccatctccactaaaaccaagtgtatgtttggattaccgttccaatccttccaaagttattaactcaaaagtaacaaaagcatgcttctccctacttactttgaatatagattcaccacctgcaaacggtaatccaaacattatgagagcttcattttagaactgatgcagaattcccgctgacaatgtggtttgagagcttaccatcagatccccaaaatgctgcacactttaaatcatcctgaaccattaatctggagaactcctcatggttataactcattatgctctttccacccagttctttgggcagattttcctcatcagaataagacttcatgacctgcacactatc

SEQ ID NO: 72718 - DNA, 443 bp, Glycine max
  Clone ID: jC-gmfl02220053d11d1
aaaggaaaaggcaccaaattcaatttatgtggacacttaagcggaaaacgcttgaggacgacagaccaatatgaaaaatataggaaaatcggggggaacttggaatcctctttttgcaccttttactttcgagaattataagaatgttacacgcgggtccgatcacatcttctatctctcggatcagcacaaccttgaggaacagaaatattcacttgccaagtttgctttggctccaagtcaagattgggagaaagttcccctgccaatagcatcctcgtttgcattttcaagtgcagacaagttcaagttctcgccagcccattggactctatggacattctctagttggtggacaaggatgttaccatacgtcaagagcttctccatagtcatcgggggctgctcaaaggacggaggtccatctttcgagttcacaagct

SEQ ID NO: 72719 - DNA, 428 bp, Glycine max
  Clone ID: jC-gmfl02220053e01d1
gctgaaatgtaatttcctccttcacaacaaataatatcgttaggttacagtttagaaagcacccacatgcactcatttcaaacatatatcctacatctaactgctacaactcagtaaacaatattagataacaccaaagagaaacaaggaaagcctaaaaagtagatttcctaacactaataacacctaacacaaagcgaacaatttctcaagtcaaaaccaacctgacactcatccatcccactataagtgtcatgttaattgtcagcatcagtcaagcatgagcccaaaaggggtttgacactgtagaacaccaaatacttggcagggagcatgtttagcatgcaactccagcatctgcatggctggggttggactcattttcagggaaagaggctgaatcatcagaagctgagttcccagagctt

SEQ ID NO: 72720 - DNA, 385 bp, Glycine max
  Clone ID: jC-gmfl02220053e02d1
ggtcggcgggggtggggggaagggggaaaacaagaaagacaaacagacaagcagaaacaccagaagccgaggggcacgacgcccgagcgccacacacggggggcaggacgaagaggcccacgggggggggggggggaaaaaaggacgggaggggcggggggggggggggggggggaacgcggggggagggggcacggggggggggggaccaagcgcgggggggcgcccgggagcgggaacgaccgggggcccgcaggggggggggaaaaagacacccgggggggcaagggggggggggccgcaacaggggcggccggcggggagggcaccccggggggcgcagggacggaggcccgggggcaaccggggggggggcaccccgggg

SEQ ID NO: 72721 - DNA, 475 bp, Glycine max
  Clone ID: jC-gmfl02220053e05d1
gaagaacaagcaaatattgctttattaagcattgctagaaagaaatatcttatggagatgtctttttgaacaccatatgaccagaatcatccacatcaaacaggcgtccaacaaattcattccaattttgtgctcgttttttgtgagacaaggaggaacctaggacacttgatcttccagaatcctccccaacatcaatttgattaaatgttccatataatgaaggtgaatatgcttgtggaatatccaaagcaactgccctcttaagggctgcatggtactcttcactgtgttctcgggctatagattcatgcctctccatcttctgctcttctgggatctccatatgctgctcatctttatctcgcattaaatcgagagcccgtcgggattctctctctatccaaatgatggcatggtcagaagttgcattgcatgaaagaactaaatgctcaaacctcccatcacaggtact

SEQ ID NO: 72722 - DNA, 408 bp, Glycine max
  Clone ID: jC-gmfl02220053e06d1
acggggaaaaagggaatgcccttataaaaaattggtgaagccccccatttcaaatttaaacatggaataaaaagggaagagactccttagtttaaaaatctaggccatggtcacgggctgcttcaaaagtgcttgaacacggccatggtatgggtatccacctcgatcaaaggcaacctttgggatccccttttccaaacaggattttgcaatgatctcacccctcctttttggtacttaaactggtgggcccgcggagttatttaactcattaacaaccgttttttggtttggttacaccgaaacaagcgtgcgccttggggtgtcatcaatcacctgcacagaaagatgctttgtttaccggaacacggacagccttggccttttgggcgtcccttcaaccttttt

SEQ ID NO: 72723 - DNA, 421 bp, Glycine max
  Clone ID: jC-gmfl02220053e08d1
ggcgaggaatgtaacaagattttacaaaatagggttgcatggcgctctccctacagggatatgcgcatgcggtatccctaacaattgtacacactaactattgacatggacgggtagatgcccacaatagacatgtggcaaattacaattgagttcgtgatgtccttacatttctttgccatgcgtgacatccgttttcaaacagaaaggggaagaatggaaaaatattaccttacgaaatattaacaaataaaaataaaaattgggcagttctgcaggaaatgtctttcttgaatatacgggagcccattcaatgactactacatgcagatgcaataaaacagtctcttctaacagtgtactactcaactccggcatgcagaagatacttgtgaatcaaaatcttcttcccaccacgtgc

SEQ ID NO: 72724 - DNA, 526 bp, Glycine max
  Clone ID: jC-gmfl02220053e09d1
gtatattctttttttttgatttctacttcataggatctcatgtctcaattaagaggagtcatggaaagaactggttcaaaatctcgatcaattcctttttcaaatcctgcggcagctgcgcgagctcttcccgcgtgccataaatggcctacaaataggaagaatcctagaacaaaatgagaagtagctaaccaacttctaggagaaacataattgactgcattaatctctgtagctacgccacccacggaatttaaggaacctaaaggagcatgagtcatatattccgcagaacggcgttcttgccaaggctgtatatcttttttcagtctactcaagtctaaaccattcggaccccttagaggttctaaccaaggagcacgcaaatcccaaaaacgcatagtttctcccccaaaaataacttctcctgtcggggaacgcattagatatttacctaaacctgtaggtccttgagcagatcctacattagccccaagacgttggtctctaactagaaaagtaaatg

SEQ ID NO: 72725 - DNA, 457 bp, Glycine max
  Clone ID: jC-gmfl02220053e11d1
atccagcaggccactttataatagttttgacagtaagtacattcacttccgacataatagtagatgaaatgctagctcgtacattacaaagtttctctcgatatatctctataatagagatggttattgcatttgtaggacacttcacttggaataaacgggcattttttgcccctacgattaagttgtaaattaaagtttttaacccacccttctctctctctctctctctgtatatatatatatatatatgcagattcatcctctaatttgcttagcttcattccatttctcaatgtttctgagtctggcgtacatcttgcgaattcggtttagtttttgagactcttgagcaatcaaattagccgctgaagggctctcatctaagaccacctcgtaaccgtctcgataagaatccattccttgagccataagttgccaaaacaggccaccaaca

SEQ ID NO: 72726 - DNA, 478 bp, Glycine max
  Clone ID: jC-gmfl02220053f02d1
gaacaaacattattatcaaccctaagctactatacacttgtgaaaaacgctaaaaaatgcatcgctcgaaagcacatacaactattatacaacaaaggaaaacccggctggtctagccaaagatgcgtacacacctcttatctttcaagcggtgtagcatgatcaggaattatttttgggatacaacctctctgaactcatcgtctctcagtgataatatcggagaggaccaataccgatgccttccagccccccgactttctagctttgtcttgatccccccaagtataactcggtgttgctgatgccgaatgggtatcccgttggatatcaaaatgcaatgctcaatcaatcggatcaatctttttcccacaagtgaaacttcggcttgttcgttcaacttccacctcacgatcaatccttacgtcgcgtctatttctttccgagaagaccgccgacaatggggatgttgctgaca

SEQ ID NO: 72727 - DNA, 500 bp, Glycine max
  Clone ID: jC-gmfl02220053f03d1
aaagggaaagtcgtgtttataatcaagtacaaaatttcatcgctaatctactatttatgaacaacttttgacaataatccattgtatactagacacctagcaacagagcaagccccaaagatatactagttgacaagaatttgttttcggaacccactctcgtcccccacaaaaaacaaataatgtgcaggcaaggaacggaattgcatatgacacaatgatctaactatcagcggctctgaaaatagtgagcagagacaggaagaggttaatgatgtccagatacaaggagatcgaagcccaaatgtattcatcgtacgagtatctcttgatcaggttgtctgtgtcatagatgatgtagccgcaaaatataatggctgccaagcaaccatagatcatcacggacaatttacccagtggaaacagaacctgaatcagagcaaagaccataagaactagcactgcaccaaacaagaagggtccaaggaagttgaaatcat

SEQ ID NO: 72728 - DNA, 547 bp, Glycine max
  unsure (1)..(547): unsure at all n locations
  Clone ID: jC-gmfl02220053f04d1
agtagctagttgataaattcacacttaaattccaagcaaaatatcaaggggtacaacacctaaaaatgctgaagtgaccctacctctgcaaattgctggttgatcaattcaatcatttgcactccaaggaacatatcaagggtacaagtacaacacacaagaatcctgaagtgaccccagttttgctacttgctacagttgatcaattccatcatttgcactccaagaaaaatatcaaagtgtacaaaacctaagaatcctgaactgaccctatctttgctaacttctagttgatcaattcaatcatttacattccaatcaaaatcaagatgtagcttgatggatactgctagaccttggatagaagctacagaacaaataattcaagtacaaaagcatatatatacgtaagatcacaggagccaaaattgtcagatatccttacctcttttatcttaaagggttgcacaattacaggaaattgattntttcttatttttggtttagctaccaggaaggagctcacaataacattacttaaccaaac

SEQ ID NO: 72729 - DNA, 477 bp, Glycine max
  Clone ID: jC-gmfl02220053f07d1
gggggaaatgtagggactaatgatagtataacacgttaaatccaaataatgctaccggttggtagcaatttatgtcctgtataagtactaactactaactaactagcactttcactttccttacctaggtaataattttctatacaaccatcttcagtggttggaaacatgcacattatggaactgtgaaaattgaaatgtgtatgatatgatatgatacgtcacctctccaatgaaactattaggccaaaagctcatgtcaatggtctctctatgtatcaacaaccaccaccatcagctggctcaattgaacttagaaggccgtttcctcttaactgcatgcagtggtcttcagcatccacttgagcacatactatcaccactgctagtccattataatgtgcctcctgcatgatgttaaccgcactatcaattgtcattccaggtatcaccttcatcaacacttgcacaacatat

SEQ ID NO: 72730 - DNA, 533 bp, Glycine max
  Clone ID: jC-gmfl02220053f09d1
ggggctcccttgtatccaggtgccacagaaatgctaatttctgcaactaaatcaatcacatgttctacctaggagcagcaatagaaactttacctgcaatggaccaggacggactattgtgtatccaaggccagatcttcttaaggaatcttcaccagccctcttggctttaagaacctgctcccgcctggaaggctcaattcctagtccagaacatgaaactaatacaaaatcggtttcttgcccagtaggcaaggctttaatatattccaatataagcttaaagcttcttaaatcctgtttcattggtgcatttccttcaacaggcctctgtcttctaggctcaaagcgtatggtcaaagtatgcacaagaaaaggatctaacactggatcatctggtttcactgggcggaatgatgaaaatggtactctaaccctacaaaatcccacttttgtactaattcttgcaaaatacaatctactctgacttggatctgccgaaggaccagcttctagaattaatacataagatc

SEQ ID NO: 72731 - DNA, 515 bp, Glycine max
  Clone ID: jC-gmfl02220053f12d1
acataaatgaatcattatattcataaatgctgcatcaagtcacataaattttctcggaatccaaacactttttactattgcttggttgggagaaggaagaggagtggggtatactttaacacaattttccaactctatggtttttttagctttccataatctctatgtaacattaaaatataataacaatgtgtatacaatatccatagaaaataaaaagtaaaaagtagagttaactaattaacaccaagcagatgcgacggtgagagttcttcccatccagccaaagcaaatcccaccgttctctacttttaccgcgactcggttcccagcgccaccgagtcgcgctttgatcgactcagcgactcgctgactcagcggcttcaacctgaacccagccatgctcatacgcgctcgccactttccaaacacctcgcaccgttccacgcggttccttccttcgcacgccaccgagttccccaccttccgactcagtcccttctcgatcctaactc

SEQ ID NO: 72732 - DNA, 315 bp, Glycine max
  Clone ID: jC-gmfl02220053g01d1
ctaaaccaaagaaaaaggcgacagggcaaaaagcgccgtaggaaaaagacacgccccagggggaccggaaacggggccccgaaaagaaacggggggggggggaaaaagaccaagggggggggcgggggggccaaaaaaggggggcaaaaggggccgaaacgggggccccggggcggggcccctgacgtgacgaaaacaccgacgggggggcaaaaaccccaaatggggggggcgggggggcaaaccctgggggtcggggcgaaaaaagggggaccggggcgggtacaggaagagggcccgggctttcgggggggg

SEQ ID NO: 72733 - DNA, 515 bp, Glycine max
  Clone ID: jC-gmfl02220053g02d1
aaacaacagaaaactctagagttcattcaaacccaacataaaagataaaactatccaatataaacaccatgtccatgtaaattgaacccaaaggagtaagtaacataaaaaatatgaatcaatggcctcagacattgtagacgcggatcaattcacagaacaaaagaagaaccatttctcgagcaataattaaacaaaaaccaatgctcaagaggcagtaatatttacactcccgcgtccaccataacaacaaattcaacctgaaaaatcgcatacaccattcaccaatctttctttaaccaatcaagaattcttcgagtcacgaattttctttgccacggcagccaaattgtcacgcaaagccaaagccttggaagacacagcctcaccatccaacatagcattacaaggctcgccataacaaccttgattacaatcctcaaactccgaagccagagcggaaaaatcctccctcatcagcaaactattgtgaagaatggagcacgcgccaatgt

SEQ ID NO: 72734 - DNA, 407 bp, Glycine max
  Clone ID: jC-gmfl02220053g03d1
aaaaaaggacccaaacaagaaaaataccccccccaaaggggaagggcccaggaaaaaaaggggaaaaaagggggccccaaaagggataagggggggcccccaaaagggggaaaaaaaaaaggggaacccaaacccggggggaaagcaaaaaggggaaaacccgggggggcgggaaaaaggggggcccaaaaaacacaaaaagggtaaaaaacgaaacagaaaaaaggggacccccacaaaaaacccaaaaagggcccaaaggggggcaaaaaaacccccaaaaaagggggggaaatggcttgaacgggggggggccccctttggggggccaaccccctcccgggaaaaaaaggggaaacccccaaagggggggggggcccaaaggaatgggggaaaaaaacggggcc

SEQ ID NO: 72735 - DNA, 507 bp, Glycine max
  Clone ID: jC-gmfl02220053g08d1
cattcgaattcattttatttatatattaatattatattcaaatgaaataaaaagatattaaaagatactaattataagaatttgaaagtgaaattataaagttattaaatgattaatcaatttttttctacctgttcctgtagtaaaaagagttccatctgttcttgaatagcttccttcaaaaggacttctgcttccccagtgaatgtcttggtagaagatatgatttctttgaattgaggtttattcgtgtttaagtaagcacgtaactcaacaagaaatttccttacctgtccaatttctaatgaatcaagataaccattcgttccagtataaatagttattatctgttcttccacggtaagaggagctgattgggattgtttaagcaactcgcgcaatcgttgacctcttgctaattgattttgagtagctttatcgagatcagaagcgaattgggcaaaagcttctaattctgcgaattgtgctaattccaattttaattta

SEQ ID NO: 72736 - DNA, 490 bp, Glycine max
  Clone ID: jC-gmfl02220053g10d1
atgggaaattcttggtattaatgacgaaattattctcaaccatagacatggcacatggaggctcaaaaagaccacttaaaaattcctaactaaacatcaccttgcaaatataaatttttagatcaaatgactattgaacacaatttttagtggtccaaatctagagactatatgactgtttttcatggtttccagaggatggtagtctctgcgatcatggaggtgactacatatggatccatattagaagcaggccttctgtcctcaaagtaacctttgccatttttctctgtgtctcttccaactctaatggagcttccacggtttgccacaccccaagaaaaggtgttgatgtctgcagtttcatgtcttccagtgagacgtctctcgttgccttctccatatgctgcaatgtgctccttgtgcctcaatccaagcttttcaatggccttcttaatcacctcataaccaccctcatctctcatggact

SEQ ID NO: 72737 - DNA, 412 bp, Glycine max
  Clone ID: jC-gmfl02220053g11d1
agggattccgaaattcgggcccctcaacttggtatgaaatcacattggtagcccctactcggggcctagctcggctaaaagctagatttgccccacattggttggctcttgccctccgccttattcaaattagcttctggtatttcaagaggttggtgggcttcttgggggtcaatggcactacccttttccggattatttactaaaacaggggtctcattattggttattttagcaaaaccgcccattagagcccttgttaaccattgggctttaagaagacgttttttcaaaatacctatatctacgggtgggggaataggcgcctgatttgggaataccccaatttggccgctattagtagataaaaagatttccttcacttccgaatcccaaacaattggattggggg

SEQ ID NO: 72738 - DNA, 338 bp, Glycine max
  Clone ID: jC-gmfl02220053h02d1
aaattaggtgcttgttataaacaacggaccgaaaaaaccccaagaaaaaaaaaaaccggcggacgaaccaacctgcaacaacacacagacctgcctgccaaatgaaaaccccgcgtgagaaacccacctgaggaagaaatgagcttcgcagacaccataaggatctggggcacaagaaatgcaagggggaggcacacgaaagaaggaccctgaggagggaccaaccaaagcaggctggccgacagagacaacatgccaggaatgccaagccggaaggggacccaagcaaaatagggaacaaagtcagggcgaacaaaaaagacgagcggcccaaaacc

SEQ ID NO: 72739 - DNA, 529 bp, Glycine max
  Clone ID: jC-gmfl02220053h03d1
gaatatccaatatatactaatatatgctaatatatgctaatcgaatatctatctatatctatctacctatatctatatagatataggtagatagatatagatgtttactaagtagattatattgagccgcaatatatgtgcggcaagctaaacgaaaaggactattttgtagaaaactggtcaatgatggccttccatggattcacctatataagccgcagctaaagtagcaaaaatgagagcttgaataccgcttgtgaataatccaaggaacatgacaggtataggaactactaaaggtactaaagaaacaagaacaacaactactaattcatcagctaatatatttccgaaaagtcgaaaactaagagataagggttttgtgaaatcttctaagatgttaatcggtaaaaggattggggttggttggatgtatttattaaaataagctaatcctttttttgaaagacccgcatagaaatatgcaattgatgtaagtaaagctaaagcaacggtagtatttatatca

SEQ ID NO: 72740 - DNA, 485 bp, Glycine max
  Clone ID: jC-gmfl02220053h05d1
gatgaataacatgaatcacttttcttgttgaattgttacaaaattgatgtgttggtatgaaaataatatttacaagtatgattttaaactaagcaaccactatgatcttcccaccaaaaatgggagaaaaaacagaagcatgagagtagaatcatctaaaccttttcccttgataaaaacatcagggactaaattatgccagttcatttttcacggacacattgccatccctctgatctatgctcaatgctcctctatccacaaaatttaccattctgtgggaaagtacgcgagacttatctatacatgtggcatgacaagtaccaatgatcaatgaaagtaagttattccaagaccttttcaccagttgaaaaaagattaaacaccacagttccaaccaaatacaacacaactgaaaccttgaaaacatcatcccaggagccatgttgtagaatgtaacctgttgctgctgttccaagacacca

SEQ ID NO: 72741 - DNA, 510 bp, Glycine max
  unsure (1)..(510): unsure at all n locations
  Clone ID: jC-gmfl02220053h06d1
gaaatgcaaagctattgagacacacgaactatgtaggaataatcttacaagcaatccaatgatgcacacagaagtgttacacactctttaacacatactttctgacaccacactctcctactagttgaaaattatcagaaaatacaaaataaggaggttcgttaaatatgtagcatccaccaatttgtgattttcaatcaataagaaagattgtgttcaaaagagtatttgagagtattttcctaacatttctcgtgatacaaatatgatgataaaagcctgctaagaagagaactgtgaatctcccaacaagtaaatttacaccaagccctccagatagcacatacccactctgtattagcagaataagttgcctgagataaatgaggagcatgtctagaatcgacggatgtctttaggaggcctgaagttaaggggatgggtttctggagtggcactctcatcttctttccacattnttatcgtcttgtcagcttcgcaggttatgag

SEQ ID NO: 72742 - DNA, 488 bp, Glycine max
  Clone ID: jC-gmfl02220053h07d1
gacacaagttatgaatatataaggtccacttttttttacagtgaaaacagttgaaacgaagttgttaataatagattgccgagagaaatgggtaaaagaaatttccacccaagatttaataattgatctattcttagcctaggcaaagtccatcttgttgcgatagaaaggaataagaataaataagttttagctagtgtaataaagataccaattatcgttacaaaaactccatatgtttgatttatttcaaaaaagtcagaaacgaatatgtatggaatagagatatttgaaccaccaaagtaaagaactgttacaaataaggaagaaatgaataggtttaaataggaagcaacataaaataaaccaaatttgatacccgagtattcggtttgataacccgctactagttcttcttccgcttccggtaaatcaaaaggtaatctttcacattctgcttgggacgagattagaaaaacaatgaaacc

SEQ ID NO: 72743 - DNA, 445 bp, Glycine max
  Clone ID: jC-gmfl02220053h08d1
gaaactggagccaagtgggaatgttaaaattattgaaccaattttttggagaaaaccaaaagggggaccccaccccacattttaatttttaacaaaagaaaaacccgatgcccactccttgcccaaacaaaacatgcttattaaacccagatgggttctctatgtcagaaaccaacgggatgtttttccccttacccgttccacccactttaacagaaattcctcggcaatcaaaaataaaaaacgctaaacgggggcgaccccttatctgaaaagtttaacaacaaaacttccaaaaaatggataattccacactcaatccgattcataaacccgggggggggtttccctctctttcccgtgataatctcaactactgaggacctgtaatgaccaggcttgtattgaccctaaccaggcccactgacgtaaccagcctggggcg

SEQ ID NO: 72744 - DNA, 523 bp, Glycine max
  Clone ID: jC-gmfl02220053h09d1
gattaaaaagttgccaatcagctttttattgataaaacaaaatttccaagtatcagaacaaaacctactataacagagaataaacaaatcccgaatgcacttattatattggcaaaaaacaaaatgatttgaatgaccaaaattctaggcaatgaagttataaactattaacaatatgatgtccattgtccagagctttggctagacaaacactcagatggagagacaatatcggttatttatttcctaactctattcaacgaactgaagcacaaatggactgttggttgtacaattctgtgactccatttgtgatcttctgcctgtttttcctcctctttgagacaactataaacccttcaccatctccattcttattttcagtaactcctaatttctctggctcaacgctatcactggaatgaggcactggcttattcttttcttcatttccatacataatgtttatgacagcacggtctttggtaatttcatcagaacaactttcaagttctcaattttt

SEQ ID NO: 72745 - DNA, 520 bp, Glycine max
  Clone ID: jC-gmfl02220053h10d1
gataagtcgcaaaagctttgaattgaaatcattcaccttcgtcaataaattaatcctgacttattctcattgaaaacacatgttacattgggaaaacgagactactcaaaagtttacatctctcctagtatttaatgtgggagagacaaacactgtaaccaaaataatgcaccagtaattggcggagaagcagcaatgttgcatttgcagcaagaagaacacagccctaaaaataacttcacagtggacttggtccaccttcctggttaaaagctctcaaggactagtaactaagacttttctgcttcaatttgttgatctagtaggtatacaaaaaaatgaaactagtgttacactgatttaccttggcgttaaaccacatcttcaggactcctgcactcccaaatactgggagttagaagctgccaggagggctgctccaattccagagccatcattagaatgttcaatgccaactgtctcatctgcctcatcacccaacaactcctttagtgtactc

SEQ ID NO: 72746 - DNA, 469 bp, Glycine max
  Clone ID: jC-gmfl02220053h11d1
gggaataaggatgattcttgaggaccaaagacgttctaatatccttacaataacacggacatgtgcacgctaaagtataagccttcaatacaaaacattatttaactacttgtccactgaacaagacaagattcttcactctttccaacatactatcccatgttatgtaccaagaactttacagttacatcccaaacacaatatttcccaacactgaaatattcaatttaaggagacacgaaccgtaatgggtctaaatccatcagcatgggtaacaatgccaatctgttttcagtaataatcatgtcaacgagggctgtaactttgcattccctttattgtgcagaggctctttcaagtcgctcagactcaggttgacctgaattagttgaggattacgtcctatacggagaccatagcaggaatgatgccctgacgcagatattttatgaccctgaagaagatttat

SEQ ID NO: 72747 - DNA, 541 bp, Glycine max
  Clone ID: jC-gmfl02220053h12d1
agagggaatatttcatatcaatgtcatggtaactaaaaaaacaacatagagaaagttaataaatttctcaaaattaagaatatacaatgagtgaattaatgcagcagcagcagtagtcacacaagtatcatcatataatgcttaaaagaaattaagcatagagttttccaaatacaaccttaaatgagttctccaaaaaggaaaagaaaggaggttcatgaaacacatatagaactgtttcctccattgttctgcaccacattatacaaacttggctcaaatgaggagcaaatttttcataatcttggcaatgcgcggggaagaatgcgaggttggtcccaatcagtgacaatgtgatcacgagtgatatccttgagtgaggtgcaaccactcaaggccatggttagctcaaactcctcacgtagcatccgcagcacgtttcttacaccagcctattctttagcagccaaggagaacaccacagggcgtccaataaatatgccagaggcacctagtgctaatgccttgaagacatcagttc

SEQ ID NO: 72748 - DNA, 568 bp, Glycine max
  Clone ID: jC-gmfl02220054a05d1
tcactgctcggtggccgcccttttttttttttttttttttttttttttttttacggatcactacccaaatgaaggaaactggagcataccctaaaatagttcaaacaacttgattgcttctaacggttccctatcacctttaaaatgtgaggatgtgaccaactagttggagttggaacacaagctggtacaatttgattaaccgaccataaggatgtgaatcaatgaaggacggcaacgccgtactcaaaactcaaggcatattacaagattgttcctggcttgctgcttgaaatatcatgcgtcaaacaatggcaactttgcttaaatgaaaaatgtcaataagactctctaatacattcttttaaacacactctattattgattaaaatttattgaaaattacaattttttttctcacttctttcttgtcactatttgatgaagtcatctcactctttgtaatttcccatatattttaaccaataatcaaatgtgttaaaaaaagtatcttagaaaatgttttgtagcacttctactaaatcataatatgcctagaaacataagc

SEQ ID NO: 72749 - DNA, 344 bp, Glycine max
  Clone ID: jC-gmfl02220054a07d1
gcttaaatgttttattgaagttatgcacatttactaaatccaaaacgtgactggtttatcaagctagttaatacataagggcaattgatctcaaaccccgaatgctctaatgctgaaggaacataaagcttcaaatagatacacatgcatatatgtaaaatttacagttcacactagaatctatataccacaactaggattagcaccaactgatttggctatagactattgaattctaagctgtcaggaggggcatggcggaatttggactttgacatcaccttctagcatctgtgtcacagatctcattgatgggtctaagaccatggatcctcttgctcaca

SEQ ID NO: 72750 - DNA, 510 bp, Glycine max
  Clone ID: jC-gmfl02220054a08d1
cattcgaattcattttatttatatattaatattatattcaaatgaaataaaaagatattaaaagatactaattataagaatttgaaagtgaaattataaaggttattaaatgattaatcaatttttttctacctgttcctgtagtaaaaagagttccatctgttcttgaatagcttccttcaaaaggacttctgcttccccagtgaatgtcttggtagaagatatgatttctttgaattgaggtttattcgtgtttaagtaagcacgtaactcaacaagaaatttccttacctgtccaatttctaatgaatcaagataaccattcgttccagtataaatagttattatctgttcttccacggtaagaggagctgattgggattgtttaagcaactcgcgcaatcgttgacctctgctaattgattctgagtagctttatcgagatcagaagcgaattgggcaaaagcttctaattctgcgaattgtgctaattccaatttttaattacca

SEQ ID NO: 72751 - DNA, 493 bp, Glycine max
  Clone ID: jC-gmfl02220054b01d1
atgagatgattttcctgccgtccatcgtttttagagaatccttatatgttgttcagctcctccgttcaatcgtccattcgtcagatcgctttgtttgtcatatcatcgagacgtcctttgggcgaacgtcaggcacgagctttgggagtcgtgctaaaagtcgacgtgctgtcgagaggcgtctatgcgccaaggctggggaaagcgctagagtcgctgaggttaggggcgttgccgccacgaccaccgttaggagcgccagcagcagcaggagcaccacgggcttcgccgcgaccacgtccaccacgaccctcaccgtgagcgcggtcaccaccacggccacggccctcaccgccacggaaagatccacggccctcgccacggccacggtcgtcacggtcaccgcggccaccgtgcgatccaccctcacggggagggggcgcgagcatgcgcttgctgtcaagctcgacgtgaaccttctccttgcgctggc

SEQ ID NO: 72752 - DNA, 555 bp, Glycine max
  Clone ID: jC-gmfl02220054b02d1
aaacaaatcacgggtgaatttattatatgatgaatccatcttcaattactgagtttttcaatacaatggtaaccccagaacggatgtaaaacccttccgaagatctatcagcctcttgtataccctctgagtttgctattacaacattctttccgattctagcgtttttgtcaataatacagtccttgatttttgtattttctcctattccaattggaactcttccttcagctaagagtgctgccacttctgcatcggtttcataataatcagcaccaagcatcactgtatcctttaagtgaatatttgagtttattctggatctgattccaacaacactgtgctctatgaaggaattattcaagaagcttccatgtgatataattgaatcaacaatcttgctattgtcaatctttgatggtggtaagtttctccgtgatgtatacattggtttggctgcatcataaaagctaaacctgggtggatgctcagtgagggcaagatttgcctcaaagatgatctgtagtacctatgtttccagtatcattgatagat

SEQ ID NO: 72753 - DNA, 537 bp, Glycine max
  Clone ID: jC-gmfl02220054b03d1
cccaaaaatcagcatatatttcctctataacattggtcctatattcctagaccatatattaactgatccgttaacttaatcaattccagaaaatttcatacgaacaaatgttaaaatgcatatacatacatctttcagaaactataatgctgtgtagccaattagattcaggatcgtgtctaattgcgtgctctatgacaatatcattgaattgagcatgttgatcttctcggtggtttgatatgaaggagctatcatattcttccttgatcagcctgtggtccaatgtatctagtgccattaatgattcacacaggcgtaaggaatacccccaaatcgcatgatccttgaccttcaacttcgtgaggcaaattcctcagattggaggatacatattatcactttcaacttcactttcaatttcactatcattttcgctattataggtcttgagatatgcctcatcaccctgctcaccatcctccacctctgagttctcatcatcactaggataggcagaatccaatttgtcataca

SEQ ID NO: 72754 - DNA, 352 bp, Glycine max
  Clone ID: jC-gmfl02220054b04d1
aattgaaccacattttattgaatccaatatctatgatgactacaactattataatgttcgagctcttaaaagcttacttttcaaggaagtgctgctcttgaggagcgggttaaagcttacaggactttcagcccctcttgaggagatttggccttaccatgcaccttcactataggactgccaacgatgtcaccgtcagctgcccataccggtaccctgtatagatgctcaggttttgaacatccttgccaactgggagggtttagtttcagcctcttggtttcctggagaaagaactgaacgttgcccctaaccgatgcccgggctacaacgacccccactgtgctcacag

SEQ ID NO: 72755 - DNA, 449 bp, Glycine max
  Clone ID: jC-gmfl02220054b10d1
acagaaatgtaacttgatattcaagtgcctcttggaccctgtagatggaaggaaggagattcagggtaccgtgcttcaattcaaatccttatacatcctttaaaaaaaatgcaaaaactaaaatcaataaacacttttttttgctcggcaaaataaataaacactgactaatgagagcatcaaacctcaggagtacaatacaaataatgacccggataaaccatttgtcactcaatccttgaatctctgaagtaaacaccaaatcaggtcctcttcctagcaattacacagatacaacacgagccttgtacatgattatatacgccatgtgccaatcaccttctccggatagtctagttatgtcttcttctagttttggtttgggattggcatcgtcaaactctatccatttgccattttcttgctagacccaaccaacataatgtcct

SEQ ID NO: 72756 - DNA, 381 bp, Glycine max
  Clone ID: jC-gmfl02220054c01d1
gaaaaaaaaaaacattttttaagtcggccaaggaaattattgtcccccacaaaacgtgttctcaacccccggggggccccttggtttttcaaaaaaggaaaaattgctccaaccaaaaagggggcccccaaaccaaaggcccaaagaactggggcccaaaaaatatttccccccattggggttccgggattaagggtctttgtataaaaaaaggggccccccaaaattttgggggggggtggccttaaaaacccaaattgaaggtcaccccccgggggaaaaccccccggggttattggggaaaagggaaaaaaattgggcccaaaaggtattcaaaaccttacataaaaaaagggcccttttggggaaacccccgggggg

SEQ ID NO: 72757 - DNA, 523 bp, Glycine max
  Clone ID: jC-gmfl02220054c03d1
gacattcatagatcagaatatcagacttacatacgggtgaacatgatacgggtgaacatgataggagcacaatactatacataaaaactgacacaacaccctattagatatgaaaaactagatagcatccaattacaaaacttaagcatacataagaaaattatgcacacataagtttgcacgtttatttgtcaatgagaggtacgttggaaggaaagaaaaccacacaccacacaccacacactctcattagatagagatgctgttgggaattcctctgaaagtaaggccttccccactggtaggaagaagcacagtgtagggcatctgcgccggtccattacggttcctaaggcttgaattcttgttcctccctgagattttgtcctcaatttccttcagcttgtttccaaacttcttaaaggcttgaattgcctttgtgtcatcagtccaatttggattgtccctctgtccaaggtagacctcatcagaagcatgccttgacaatatctctatcactgta

SEQ ID NO: 72758 - DNA, 415 bp, Glycine max
  Clone ID: jC-gmfl02220054c04d1
cccaagtgaaaacaattgggctgggcatttacaatcaaggtaaaaaggtacaccacagggtaagatatttgaaatcctggggaaaaatggtggggcgacaaataaatggacccaattgttatgtgaatccactggctgggaaaacaaattgtttgggggaccaaaaccttggggcccccctttttttggttcgaaaaaacgagctggtaaaactgtacccggaaccccttgccaaggaggccccaaacgtttttgccccctgcgaagggcccttaggaggggcgaccttcctgtcccactgaaaggctggggttaatcccaactggggggaacccttggcccccaacggggccaaaagggtttccaggggaagaattttgggaaccacgggaaactggttttcaaaggggggtgg

SEQ ID NO: 72759 - DNA, 541 bp, Glycine max
  Clone ID: jC-gmfl02220054c05d1
cagaagagctcgacaacggggactcaacgaaatcccaatcacttaagattaaagtagcaactcgtcaccccaagaaacaattattttccttcgatttttctctttgtgaaaccaaatttaataatttattctttaatctaggaaggaagcaaacattggttgttacattttctattgtagaacatccaacatatatgctcaacacttggctttctcatagacgtgccattgactttggagtagatgaagcaggtgcactcaagggaatgcctttgagtgctctttcttccaaataccttgagggtttatagaagttaccatataattgtgcccatttttttaggctggtatatatatgattggccccaaccaagtctgcccagaaaacaatgccaccccggtaatttgggaagctcattccaagaacagatgcaatgtcaaggtctgatgctcgaataacaactccatcttctagaacacggcatgcctcattaactactgggaagagtatcatcttcacgatctcttggtcagtaacaga

SEQ ID NO: 72760 - DNA, 414 bp, Glycine max
  Clone ID: jC-gmfl02220054c06d1
cttcgttctttttttttttttttttttttttttttttttttttttttttacaaaaatggactattaaaaaaaatagtcattaattccttcatagatggatgtcttctataacgatttataaacctacattaataaaggaacagtaaaaaggaattctaatcagcggatacaaatttctacagcttattagctaattacacctttagccttttttcactggggcataatacgtatcccccaaccaaaaaaataccaagggtgtgggggaactcatctttggtggtcttttgcatcttctaatgaaagctaaaagcctaattgtaataaccctatccatcaacacgctgcaaaatggttggcaacgggcctgaataattaaggcttacgggccacggggaatgatgccttggggga

SEQ ID NO: 72761 - DNA, 548 bp, Glycine max
  Clone ID: jC-gmfl02220054c10d1
tggtcggcgttcgtccttttttttttttttttaaatgaaatccatagttacattctcaacgagaagacattatttaattacattggaaccaacagtttgattacaagtactaacaaaatgaggcaaaaagaaaacaaacatttttttcctgataaagctaaagctatagccatttttgaagcctggacaaaaagtgcaaatactaaatactaattactaaaaaaacatatgacacaaacacacacatgaacatggaagaaaacttagtatgcccaggtccaaagggcgtgatcttcctcagaaaatccaaaattacaagaactttcaggcgggtcggagtaatccacatcttcttcaagtttgggaaagaggtacgaagggtagagacttttgctgaggttatcttcttcatcttgtgacatatccgattgatcatgctcaaacacataagaagaatcaccatgctctagcagtgcggagttaactccatcggtgtaatgtggactatctgaatccaaaatatcactcctggctgaactgatatcttc

SEQ ID NO: 72762 - DNA, 408 bp, Glycine max
  Clone ID: jC-gmfl02220054d05d1
tccttaatttctgctgtttactgtatccataaggaggagcgcgttcacaattgacgtggagccccacctgttgtttgaaccaattgcaggggaaagcgctcttgactaacacactggactggctggtgatcagtgggcatggggcgaagaatagcattatcacactacatgaaaatacgggttcaaccggctcatctgtatcgacagcctttacactaaaatacacgccctactacagtgctgtgaaactgtcgatgtgcgtccctggatgactgaactatacgaaactgatacactgtagacattatcgagaaacacaaagtccgggcctgttattgggcacagagagcaaagccacatgccaactcgtgcagcatgcgttgatcttatagataacagtgtgagctc

SEQ ID NO: 72763 - DNA, 423 bp, Glycine max
  Clone ID: jC-gmfl02220054d09d1
taggccggcggtcgccctttttttttaaatttttaaatttttttatacttattaactttattctgagcatctcgggccgctcgagggataaaggacttgaactgaacttagaagcatgaggaaacacacgcaatcaactgaatagtatgcatagaaacaagatgacgtaactatatatattagaacgaaaattcctaaccattttcaaaaggaaaaacatgaaattctaaggctccactgttgtgacctgctgccattccccatcaactgctgccttccacaatgtgacattgacggttccatcatccacagacaatatgattcctgttaatgaccatgagaccctccaaacacgggtgttgaaatcattcaaaacctttggttaccactgatcccactgtttcaccagggagcatattatca

SEQ ID NO: 72764 - DNA, 501 bp, Glycine max
  unsure (1)..(501): unsure at all n locations
  Clone ID: jC-gmfl02220054e01d1
agttattcagttaaaccaatgattcgttattggagcagatagcaacaaccatctcatctgggaaaagccatctttttctcaacaatgtctttgtcatttgatccaatagcgcttcgttagataggaacagatttgataaatattgataactctcagatagagtattagaacggaaaaatccattagataatgaactattgattctaagccatctctggcaatgaatcaacaattcaaaatgcttttcttgcgtattcttgataaaccagtgtttatatatagatgtaggaagatctgtttgggaagtaagaagttcccttgacatctcttcatctgtaaagaattgtcgatgtgaaaacacagagacaaaaggctgatctttgaataggaaaaagagtggatccgcggggtcccaaatgaattggcttattcgaaaaaagccctgttctttggaagatctatctcgtgtctggtactgcatggntccaccctgcaagaact

SEQ ID NO: 72765 - DNA, 523 bp, Glycine max
  Clone ID: jC-gmfl02220054e02d1
agaaacgaaataacatctgcataatcacacaagtgaagtgaagctacacaacaagttcattgcttcactcacatcataacccccatatttatttatttaggtaataacacactcgacagtaaagataaataacaacagaacataaaaaccagaagtacttatatctccctcacttcatcttcgttctcgtcctcactccagcagcatttcagaatagacctaggagatgcactaccatcgcagccttgaacaaatgtttggtacacaactgcaccacctactccaagctcttcagtgctcctctcaccacagtagtatcctttgatgtctaagggaaatttattaagcttctcaccatgcatgtcaatgtgcaaagcaacagaaaactctgctggacaaaagcaagctaaaatcctttccacaagttcacctagagccatgtcattaaagtcataaccaacagcttcaaaacttgcgtaactgaaaccatcttcaggagtgacatggatggtggatatagcac

SEQ ID NO: 72766 - DNA, 369 bp, Glycine max
  Clone ID: jC-gmfl02220054e08d1
aatccttaagaactacaactcctaggccaaacagttccctgaatttattatttctcgctgcatgaaagccacgatagacagtcaagtcaagcattttgatacatcaaaccccaaaataccagacaacactactcagctgagcagtttttatatcgtactttgacatgaaagtgtcataaaggccgataaaagcatatactgttaactcacacgaccttagggctaaagcccagggcattagttggacttaaacggggacacgttctagcaatttttgttaaaacactgctaattttcggaattggttcaaaatccaagagccttgtttctgagaaaccgcacatgtttgtgaaccagccaccaccacca

SEQ ID NO: 72767 - DNA, 528 bp, Glycine max
  Clone ID: jC-gmfl02220054f05d1
gttgtaaacttcatttctattacacccgcggatttaatagtgatatatatctaacttttacatgatctgcatcataggtatgccctaaacatagggtctgtagatgttaaaactaaactagttctttggtgaactaagtacaaaatcagacaactaaaactgctctatactattaatcatctctgctttacaagttctcttgtaatgtccagtttgattacaccgactacaatgcactgtatgtttctcgcgattaaggtcatccacacacatccgtttctcagggcgtcctggtggtcgccgtaattttggtggccttacaacaaggatattatcatccatagaagagttgcctgttttactccattcaagttttccggggatggggtgtatagtctctgcataggtatccctgaaacttgcagcagtaaaacacttctgggaaaatgcatagacatcctttcgacatgagataagagcagcagcagcatgggaacatggaataccattaagctgccaatcacggca

SEQ ID NO: 72768 - DNA, 448 bp, Glycine max
  Clone ID: jC-gmfl02220054f08d1
aattgaaccacattttattgaatccaatatctatgatgacaacaactattataagttcgagctcttaaaagcttatttttcaaggaagtgctgcttttaaggagcgggttaaaacttccagttctttcagtccctcttgaggagatttggcctcaccaagcaccttcactatagcactgccaacaatcacaccatcagctccccatcccgctacctgtttcacatgctcaggttttgatattccaaaaccaactgcgacaggtttagtagttgcctctttaatttcctgtagaagggactgaacagaaccactaacagatgcgcgggctccagtgacccccactgagctcacaagatacacaaatccttctgccacatcaacaatggctttcattcggtctggtggaatggtggctgttgtgaggagtaccagttcaatccatgtttc

SEQ ID NO: 72769 - DNA, 489 bp, Glycine max
  Clone ID: jC-gmfl02220054f10d1
acatcaaactcaattttttattctgaaaatcagttctagaaaatcaaattgatttatttgattttctttacatgccctaatgttgtaagacatgccccacaacaaatttatatctacttttaggagtacttccccacatccaaaatttcaacttccttcacatcctttcccttccccaattgctgtaaaatatttagcgaattcgacatctcacatttcagttagctggacaaaatccagccacagagaatacgagctcgacttggtacgctaaaaaaaggaatacatgaaaaccaccctttaaaagcctaaacaacaaaacttgaaaaaaggggaaaattttcacacccacaaaataatcccagtatttgggaataaacccaattttgatgcctcctattatggcatccccttttcccaccttaggtcccaaagaaaccagcacctcatcgtcttcttcagcttttacactcttcagcactttcgata

SEQ ID NO: 72770 - DNA, 499 bp, Glycine max
  Clone ID: jC-gmfl02220054g01d1
caatccaaaatcatttcatattcaggacttaaattaaattgaatatttaaacagttcttacatggacgtacacaaatagcatgttcattactcctctacaagtcacaatgtagaaaatgaactacataatgtcgaaatgcagaaattttcatgaaatgaaatgggggaagggaactcataataaggcatacattttgtctcaaataggattaagcaggctttgcttccacgacggactcactaggtaagccttttaccgtgatggttatatgacaagtgcgctttttaattggatgggcacgccctcgagctacaggttttacccttttcattgttttcccttcattaacctctgctttactgataactaaacttcctttgcttaaacccagattattgctagcattagctccagccgaaaacactattttgagaatggcttcacaggctcgataaggcatgagttctaataccataagtgtttcgtcatatttacgtc

SEQ ID NO: 72771 - DNA, 437 bp, Glycine max
  Clone ID: jC-gmfl02220054g03d1
gaaaacaatacttgagacgaccttattctgattgtttcatgctacctgatgaccatgatgcaagctagggccatgacacgatggttgcttgttggaaaaaaccgccctctgctgggaacaggagcccagggcttatcataaattcgtaataactacggcatatttacacgacattcattcacgatcctgcttgcttcaagccatgcatattacatcactatcaaagaatggaccaaatgttccaccacagatgccaccagggacttgttatcggcacttctagcggagcaattgtaacgatttttgccttgcatgccggtgagctcattatgctggcccatcatgcgcatacttgagacccgattctccaaaaccaggttctggttgacggtaaaggtggtgacaatgcccttattatgcggatcagtgtccaagtc

SEQ ID NO: 72772 - DNA, 489 bp, Glycine max
  Clone ID: jC-gmfl02220054g06d1
aaagttaacaaattgttattatagaagtcacttaataattaataataacaaattgttattaataatacaccacaaccaaaaagatcggaattgaaatttatgaactcaagaaggtgtgtcgtatcccccctctcaagtaattattcatatcacacactgttagagctgcagcatgcagctctaattttattattaattagtatacgtagcgcagaacacgatatttaatacatgaagttgatcatacataaattaatcagtagttcctcgttgaggcatcgaaattaccaccaataaagcctccattgccatgtccctggaaattgccactattatttatagcaggaccaccaccgtagttgttggtggcgtgatgagtgttaccatcaccagaatatgcaccactgttggtcttagtgccagtgatgttctgaaacccatcgccatggttggtgtatgtgttcactttacctttgggatttttgggct

SEQ ID NO: 72773 - DNA, 472 bp, Glycine max
  Clone ID: jC-gmfl02220054g07d1
cccaaaagtcagacatatatatcctatataacattggtcctatattgctagaccatatattaacggatccgttaacttaatgaattccagaaaatttgatacgaacaaatgttgaaatgcctatgcatacatttttaagaaactataatgctgtgtagccaattagattcaggatcgggtctaattgcgtgctctatgacaatatcattgagtagctcatgctgatcttatcagtggtttgatatgaaggagctatcatattcttccttgatcagcctgtggtgcaatgtatctagggccattagtgattcacacaggcctaaggaatacccccaaatggtatgatcctggaccttcaacttcgcgaggcagattcctcagattggaggatacatattatcagtctcaacttgactgtgaatagcactatcagttatgctatcataggtctggagatatgcctcatcaccct

SEQ ID NO: 72774 - DNA, 400 bp, Glycine max
  Clone ID: jC-gmfl02220054g08d1
aacgcacatgtacgtaacacttaaaaatacatacacaaattaacatgggcatgtctgttgagatggacgtcaccacaaatatagtaaacataaattaaataaacatagtgacgaggatatacagattattccaatccaccatgtataagcaaattaattaagaacacaattaaatgaagcatgtctctcgtagctcaaatagcttggccagaattacaggtttgaggagctcctgaaagaccctagagcctttgctgcttgggcccttaacacggactggtggtagaatgcagcatgagcagcaccgatgaagggtccaacccagaagatccactggtcatcccaagccttctcgttggtgaatatgacagcaggcccaaggcttctagctgggttgatg

SEQ ID NO: 72775 - DNA, 368 bp, Glycine max
  Clone ID: jC-gmfl02220054g09d1
taggtcggcggtcgccctttttttttgtttttttttttttttttttttgtttttttagggggaacccacttttaaagtaggtatcaacttgtgaccctgattctgagaaactacaccgcaactcattttgacgccatactagtctaatatttatgaccataaggatggggcactttagtggagacgatacatcacgaagtgttattaccaatattaataatgctactaatattctagagggtaattttcgggtgcctgaccacacaaatgtacgttcagaccttgaaggatcatcaattcggggaggtgcttatgctgtaaggtgtggggactcgagatttgacgaggagctaggacgcattgttggg

SEQ ID NO: 72776 - DNA, 521 bp, Glycine max
  Clone ID: jC-gmfl02220054g10d1
cacagcgaagaaaaaaatttgtatattgaaaataatagaaaaacgtacaatggagaacactcattttcttttgtagaaaaaagcattatccttgcttacggtaaaatcatcgagggaacaagccctaatattggaatcccaactcatgcctgaccatttactagaaaccagtaataatctccaatcatagctcgaaaaagtcattctggaagatgcacaaaaattgtaaaactataatagtcctcccttccatataactgcattagttcagcttggaaaagttgagcatgtccaaagagcaagactccaatccttccttacacaatttcattgttggcagtggaccagcttggagaattcgggcagaatacaagtcctagaacagtgacaaaaatataggaggcatcccttatgcataaaatgacgcataaatgattacatggggcttatgtctatccggcctttgtggagttgaaaagctggagtgatccagcttccacagctgcatttgatgcctgacc

SEQ ID NO: 72777 - DNA, 506 bp, Glycine max
  Clone ID: jC-gmfl02220054h01d1
gtagaagtagaattgttgattcgtaattatatacaaagctatgataccgttgttgcaaaatccctaggatgaaaaaacagtagataatacaacatactctgacaagtttaaaaaattaaaagacctgccacttatatatctcaaacaaaaatatttttatctcaagagaatgtatcctctcgatctccctcagcagttatctccacttcctccatattgctgaactctaagaaatgggttggtctatggtcctcgtggtaatattccctaggagtcccaagcttcactccatatttcatccctgatgcgtgtctcacccccatgaagttgtaattccatggaccattatcaggaaccatgtagaaaccaaggaagcgatcactaaggagcatctgaaccttctcataatgggtgggaaggtaaccatgtggattgcttcccgtatccttattaacacgcccccattcataaccagatggagtgagcttatatgcagttaaagaaca

SEQ ID NO: 72778 - DNA, 570 bp, Glycine max
  Clone ID: jC-gmfl02220054h04d1
aaatcttaaaacaactcaaactaattaacttcattcttccaatcacggaatactcaatggatcacaaacgtcaaggaacttagtgcattatgaagcacaatttatcaactgtatagtatgcaaagaaacaagatgccgtcaactatatattgtaaaacgaaaattctaaccattttgaaaaggaaaaatatcatattataaggctccactgttgtcacctgttggcattccccatcaactgctttcttccacaatgtcacattgatgttcccatcatccacagccaatatgtttcctgtcaatgaccatgagacccttcaaacaggggtgttgaaatcattcaaaaccttgccttaccactgatccccctatttcgccacggtccatataatcactttaccgtcctgtgatgcgctagcaatggtagatttagggagccctatattgggtgcccaagcaacatctcgaacccaatccgtgtgcatctgaagagcagggaagcagtccatctttcagagtccatcggttagcttccataccttcacagtattatcacaaccaccagagcac

SEQ ID NO: 72779 - DNA, 536 bp, Glycine max
  unsure (1)..(536): unsure at all n locations
  Clone ID: jC-gmfl02220054h05d1
aagaaaaaagaaagttctaattattaataaattatatctatatatatatatatacagatagatattctatatcttttatcttaattaatatttgacccctccttataatgtgttatagttttctttatttttaggaacttatccattccttttttaatgtgcccgacaatccgaaagaattctgggggaggggtcatttcgtttttgatctagaataaatagagcttcaagaaatgagagaattaagaatacccacgagaaacactaatccaatccataatgatgtaccggaaaatacaacatttttgttattcgaccaaccttcaggagaagcaaatacaacaggtacactaatcaataaaataaatgaaatagcaattaatgcaaaaacagctaattggaaagcaatagtcatgtttctaatcctccaatttaccaacaaaagaactttaccatttgatcccccaaccccttgatccctttatctgacaanaaatttatataaaaaaacgccagagggttctatcatgaattca

SEQ ID NO: 72780 - DNA, 349 bp, Glycine max
  Clone ID: jC-gmfl02220054h07d1
ggttccaaatcacacggtgcagtaaccattattaggaaataattgagaaacacatgaaggaccaaagtctactacataaccaaacttgaccccaaagatgcttatctaaagccccacactatgttgcgctatcctccaattcatctgatctataatccccaataacccttttccttcacctgtttaattacactcaatatatcagcaaagattcaaaatcttgtatttcacacactacaagatccaacctttagatcaatgactacttggagggggtatgaaatattcagtgaagaatctggcactactgaactttatcatgaggggttcaagaggagcactaggttgg

SEQ ID NO: 72781 - DNA, 509 bp, Glycine max
  Clone ID: jC-gmfl02220054h10d1
actatattgagattgaagtttcaattcaaaaataacataaccactcttctctcctttgaaccaatagaaggggaaaacagtggtgattaacatcctagacagcagaggtatagctggcatggggcgaagaaaagaaatatcataatccatgaaaatacaggttcaaccggcacatctgaattgacattctttattttaaaatacatgcccaactacagtgctgtaaaactgtagatgtgtgtccctggatgactgaactataccaaactgttccattgtagtcattatcaagaaacaaaaagtaaggcttcttattgggcacagtgagcatagccacatgccaactcgtgcagcatgtgttgatattagagataacagtgtgagctctccaacttacaggaaacaaaagcagccattctctggaaaatcgcacattaagacactataaaagaaggaataaaaactaagccctgggaaccttgtctagcaaaacattatctgaagattta

SEQ ID NO: 72782 - DNA, 497 bp, Glycine max
  Clone ID: jC-gmfl02220055a01d1
gttcttgaattagaataatttcacctcgataactttcaaaatcctttaatgcaaattaccgaaataaaactctagttctagtacaaacaacacctagctataataattaggggttgataccatagagctttcgaatcccgtctatatcatcttgcgctagattcaccttcctagttcgaggtggtatagaaggatacatgatggctcttaggtccgacgagtggcctaatccgagcaagtgcccgatctcgtgcactgccacagattcaaggtcaaacgcacttgtcaccggcgatttggtgacatcgccagacgccacccaatattcgtcggcgtcaaagtggcacctcccatcagtgggagcgaatgcatggcccaatatcccacctggaccatcaaaaggatacggatcaccgtggttcttactcgcgaaaagaatcttaatgttggctgtttcatacgacgtcgtctcctggaacgcgatgttcaccactggg

SEQ ID NO: 72783 - DNA, 359 bp, Glycine max
  Clone ID: jC-gmfl02220055a09d1
gtcgccctttttttttttttttttttttttttttttttttttttttttttttttttttttttttggttttttgggttttttttttttttttttttttttttttttgttttttttttttttttttttttttaacccccggggggggggggaaaaaaaaaaaaggggggggaaaaaaaaaagggggcccaaacgggggggggggggtttcaccctccccaaaaggttatattttgcccccccccaaaaaaaaccctttggtaaaaaagggggggggtttaaacccccccccgtttttggggggggaggaaaacttttaaccccccctgccaaagggggaaaggttccccccggggggcctc

SEQ ID NO: 72784 - DNA, 441 bp, Glycine max
  Clone ID: jC-gmfl02220055a10d1
aaacaagagttatatattattgctttattcatttatttgacattttataacttgggaattgtatatgaaaccagacactacagataaagcatttgcttagtaatggctattgtacatatattgatatatagcacttaaactgcagtgccatatatatgtatatatactaaccagctagtggctaagtttagtactagatgcatttttacacaaacttgtgcgtcctcttttggtggttataattaggtgagaagggtttaaagtttgatatgattgcgtggttgcttaggttgtttttccatgaataagaggcaagtcaacttcatcacaccactcgatgtacctagtttcaaaataagaaccctttgcttggttgggcaaatagctaacccaaaactcttcccctattctccacttcagcacactcccttccatctcttt

SEQ ID NO: 72785 - DNA, 412 bp, Glycine max
  Clone ID: jC-gmfl02220055a11d1
aggacaaaaggaaaaggcaccaaattcaatttaagtggacactgtaactcaaaattatagaggaagacgggccaatatgaaaaatatagtaagatcatctcaaacttagcatcttctctttgcacctaagacattgagaatgctaaaaatgttacacgcaagttccatcacaacttttagcacttggattagtacaacaacctttacgaacagaaatatttacttgccaagtttgctttgcctccaattcaagactggaagaaagttcccctctgaatagcatcctcgttagcatttccaagagcagcctcgttcaagtacttgtcagccaattggactctcttgacattctcttggtcttggacaagcatgttaccatacagcaagagcttcttcagagtcatcttgggct

SEQ ID NO: 72786 - DNA, 257 bp, Glycine max
  Clone ID: jC-gmfl02220055a12d1
gtcattcaaaagtctcaacttcactctagcactaaataatttacaagattaattcaatttggtctctgcactaaataagaaataaattaaatcgaattaaactgaatacaattgacagaccaatatcattttgcatactcagatattattaggacgtctacaaatatggtgcattattcgcaaaattgattatttaccactctatagtctatactatactgaatatttactacacggtgatataaactatgtgttct

SEQ ID NO: 72787 - DNA, 537 bp, Glycine max
  Clone ID: jC-gmfl02220055b04a1
tcggaattcggctcgagaaaagagcctttgctttttctttaggcctttccgaattaagtacttgtttcattttctctcgaagcaagaaaaatgttcatcgagagtttcaaggttgagagtcctaacgtgaagtacacagagactgagattcagtccgtgtacaactatgaaaccactgaacttgttcacgagaacaagaatggcacttatcatggggttgcgacgtcctaagactgcctatgtgcctttaaaaccaacacccatgtccctaaactaggggtaatgcttgtggcgtggggtggaaacaatggctcaaccctcaccggtggtgttattgctaaccgagagggtatttcatgggcaacaaaggacaagattcaacaagccaattactttgggtcgctgacccaggcatcagctattagagttgggtctttcaaggggaggaaatatatgccccattcaagagcctgcttccattgtaaaccctgatgatgttgtgtttggtggatgggatatcagtaacttggacctggc

SEQ ID NO: 72788 - DNA, 444 bp, Glycine max
  Clone ID: jC-gmfl02220055b09d1
aaaaaaatcaatagagtttctttaaaatccctataaaaggaattgtaactttaatcattttcatctggacacaaaattaataacattacaacatgcaaatctaatctggaaccagctgccaaagaagatggaaaaaaaacgccactgtatacttagccattaaaaggaaactcaatcagccggacatggaagatcactcaagttaccactcaaaaagagctgcggctaggcctatcctgtgcaacattcactctgatagccctcccgtccaaactctgaccatcaagggcagcaattgcatcattcatatcagtctcactagacattgtgacaaagccaaaaccacgtgatcgaccagtctctctgtcatagaccacccgagcatcctcaaccttaccatgttcactgaaaatttgctccagccgagcatcgtaacttcccatg

SEQ ID NO: 72789 - DNA, 513 bp, Glycine max
  unsure (1)..(513): unsure at all n locations
  Clone ID: jC-gmfl02220055b10d1
ataactacattgtattcagaaatgaatttaactaaatgcaatattaggatacatcaacaaaacatttgtgttcaatatctgccgatgttggcatgctgcaggtccacaatgagagttgcaatagaagaaataagatgaaaaacatgattgatccattagttacctgcacaagccatagtacttgcacacaacatatatagtacgtaaatttatacatatctaagagagaacaagcaaattagaaagattaaatctagaaggaaagctgcaatagcattacaaagccacatccctaaccatggcggatgatgataccagctgcaacttcagtctgacgtaagacaggaaccaaacaaattcaaagaaccaagtgctagccaattntcagagcatcactgattntcccactgtttgcactgcaccttgagcagatactaaaaaatttaataccatttcaccagttctcttcttgtggtagattacgactgtagaatggaaactcgaagagaaaag

SEQ ID NO: 72790 - DNA, 562 bp, Glycine max
  Clone ID: jC-gmfl02220055b11d1
gaaaacgaaattaaaattttatttataatttccattgatcactgatcagctctataacattaatttccaactgaacacttctcaattccattgcagccactttctatttgaatagattattaagtatgcatgatatataaagattcaacagcctacgttggaaactttcctccaactcagtatcttgaggaattaaagtactcatgcaactatcactctaaaactttctgcagcatgattctcaaactctcacgtcacatactgtaattaaggttaacaatgctttattttattaggcattgttccaaccttctgattcatccttcatggggttcggtttgtaggaatggagcatgaagttgcacgcaccaacagcctcttcaactgtcagatagatccatttttgccccagttcatcaaggaacttggatttgttcagcttcttcatcacctcgcttcctggattcaccaaagcaggctacacacatatgaaggaatgattataaaaaaacaatgtctctcaagtaaaactatttagcgaaaaatattagcttaatgagaa

SEQ ID NO: 72791 - DNA, 404 bp, Glycine max
  Clone ID: jC-gmfl02220055b12d1
aaggacaaaaaaaaatagttaaatttttttttctttaataggatccaatttttaatatataaaagggaaaatgcataaacttttatccaactgaaaactaaaagggacaatttaaccccaaacaaaataaagcatccccccataaaaaggttcaatcctgtttgaaaaaggaaacaatttggtcgatcaaaacctgagcattttcacaattgggtttgaacaaatgaaaaacatggccctaatccttggtctccaccatttccgaaacaccagaccacccatttttttaaagcaactccttatagtacaaacccctgtccctaaccaaatccttttccgcaacacaaagaagcaatttttcacaagctaacttccccagcttcggatccttactcgggttaata

SEQ ID NO: 72792 - DNA, 452 bp, Glycine max
  Clone ID: jC-gmfl02220055c01d1
accaacctcatgaatttttataagctagaaaacaatgacgtactccaactttacattaaaagcaaaaaaaaaaaaaaaaaaagggtaaagcggagagatgaaaagaaggaaaagcaagagttaattacttttcctcctttattacagatcagaaattaacacaagggaacacaggggggatcatgaaattaaaaatcaggggcgaaaggggcatgctgggtggggatgaaggcataggtatagataagaccagccaaaccaccaccaataagagggccaacccagtagatccagttgtcatgaaagtcaccactgacaacagcagggccaaaggagcgtgcagggttcatggacccgccagaaaatggccctgctgctaaaatgttggcaccaacaatgaaaccaatggcaatgggtgcaattgggcccaatgaacccttcttagggtctgc

SEQ ID NO: 72793 - DNA, 491 bp, Glycine max
  unsure (1)..(491): unsure at all n locations
  Clone ID: jC-gmfl02220055c09d1
ncgccctttttttttttttttctattttcattcgaattcattttatttatatattaatattatattcaaatgaaataaaaagatattaaaagatactaattataagaatttgaaagtgaaattataaagttattaaatgattaatcaattgggttctacctgtgcctgtagtaaaaagagttccatctgttcttgaatagcttccttcaaaaggacttctgcttccccagtgaatgtcttggtagaagatatgatttctttgaattgaggtttattcgtgtttaagtaagcacgtaacttaacaagaaatttccttacctgtgcaatttctaatgaatcaagataaccattcggtccagtataaatagttattatctgatcttccacggtaagaggagctgattgggattgcttaagcaacttgcgcaatcgttgacctctcgctaattgattttgagtagctatatcgagatcagaagcgaattgggcaa

SEQ ID NO: 72794 - DNA, 390 bp, Glycine max
  Clone ID: jC-gmfl02220055c11d1
ggatcactaactatcgatacatgattcgctgattataacgtgctatatacagacaaccgacgcgccgcactgacctaactcgtcctgttcttcttgagcaacttgccatgggctagcaggaggtacagcctgaaacacaacttggcaaagtcattctcatacaggtccttggggtaatccgctccaagcttgtacgccgcggccgttccggagatgacggcgacttcgtgggcgttgacgagggtccaagcggcggcatatgtcgtatgcttgctgttcctgttcaaagcccagacgaatggcacaacgaaagcgtattgcgtccaggaatgcatcaactgatgccaccagtcttcccggatgatcttgtccttcttgatctcatccttt

SEQ ID NO: 72795 - DNA, 489 bp, Glycine max
  Clone ID: jC-gmfl02220055c12d1
ggaatagagggtgatggagaaatctccatatccacttttattattaggaaattcagcacatgcatgcattcataacaagggcaatattaatttcagagtacattttagataggagaatacttagggaaccaagatgaggtcattgataatggttgatgttcatacggagaaagaggatgcaaggccaaactgaaggccccagagctcaaaagatcccttaacaaagtcatagtatcctccttttagtgacaatgtcttgttcaccaagccatctctaacaaatgggtatgttagaaggtttccaagggaaacattcacagcttccttctcacagtgtgagcacaactcagcaaaaggtgcatccccatgttgtgtcttcacctttgcctttgcaggcaagccaattttgacccactcctcaataaaatcagtagagtaggttccatcatatgggaaagacagaagccccttaataccaccacaagcact

SEQ ID NO: 72796 - DNA, 501 bp, Glycine max
  Clone ID: jC-gmfl02220055d01d1
agaaataaactgagggtatcattaactaaggaaattgtataaatgaattttacaaaacttgtctattgacagcatagcatttgggaattatgcaaaaggaacaaataatttaacaggcaaaacaagatatatgaataaatgaatggaatcgtacttcaagtgagtttacgccaaagccctcccttggttgctgttaagcacttcacacgtcgaaaaacaaaacctgcctttggaggtcttccatcaacaagtgaattctcatatatctctttgcactcttgaatgacctccttggcatccttccgaggaatgccttctcgtagaccaacaagtttctcaacaacttcaggcgggcagtcaggttgatgttcgagtatatttgtatagatgagtgtaaaggtatccaggctctctgctgaagcaagctccctcaagtcgctaagtacactcactctgttttcaactttagaaacactgatatgttcccttaaaaagtccatg

SEQ ID NO: 72797 - DNA, 522 bp, Glycine max
  unsure (1)..(522): unsure at all n locations
  Clone ID: jC-gmfl02220055d10d1
nnngncgcaacatccttcatcctgtaatgactgacttgaaagtcaaacagcttcctttgttcactcttctggtccgcaaactgagcgagcagtcctgcgccgctaccgtttgtgaggctgagataacgggtgtctgtatggtttgatgattcttgaggcacctcgtaatcgacccagagttcgtcgacgctagatgctgtgtacttgcccacaggttgtgagagcttgctatcgcggtaggtctcgccgaagccgcggccaaaccattcgactcgttggaattgcttaggaagctccataacgagaccgatgcgtggaagggtccgaggtaggttctcaccctttggtgtaccgacaacatggacagacagagtattgttggcgctgaaagtgtacgtaagaacgcagtcgacagaccaagagagaactggaggtgcgacacgttgatgcacggtaaccttgagggtctctgagtcagactgtgaccattcgaccttgcgagtcaatggtttcgcgtgatgc

SEQ ID NO: 72798 - DNA, 548 bp, Glycine max
  Clone ID: jC-gmfl02220055d11d1
gttcagtgattcaccaaagtttctatactttgaggtggccaatatgtgaggaaagtttgcataaatctcacaagatatatactacagaatacattacttcctcctttcatctattttgtcttttgatcattactgggtaatccataaaagtattacacacaaattcttcaactgacaaaaaattgagcttgaacacttttcctgtgtccccctccctttttttccatccccttgtcctatataaattaaagcacttcaccaggttgataagccaacatgactcatgcacgcctgtactcatctccacaatcaccaatcactttaagcagatcctttcctttcgctgtggcttctcttatgctgttcacgtcatcttcatcgagaacaagtgaaaagatagcattggtatcttgaatatgttctgccaagccaagtctgacaccaaccattgatcctgctactgcaggctgatctagtatatacttcacagcaacagttgcgatcgatacgccatgtttagaagctacttgtttaagagtccgaagcag

SEQ ID NO: 72799 - DNA, 490 bp, Glycine max
  Clone ID: jC-gmfl02220055e01d1
gaacagttaaatgacttctatctttcataggaaaacaaattgcggttcactaaaaacagtaaaccatgataacaagtaaagaaaatcacctgatctatggggacaaaaaaattatctgacttgagaaagtagctagcaagcttattctataagagcttatatataaacctacaacaaatagtttcatctaacacttctctcaaaagtgctctattttttcattctgaggcaatttttcacagaaagaagagcacatttaattgtgaggagtcgatgcttcagatggactacttgaggagtcacctgaggatggattcaatggtgaaccagctgttagagaaccatttccaccctcactctcagccaccactggtatcttgacagtggctgctctttccatctctttctcgagttcttcctctttacgcaatgcagtaaactgggtatccaaggatttcgccgcagctagccaggcagaaacaatcagcag

SEQ ID NO: 72800 - DNA, 531 bp, Glycine max
  unsure (1)..(531): unsure at all n locations
  Clone ID: jC-gmfl02220055e09d1
ctcactaaagccaaataaaagaaacataagatgatgtacaatgctaaaagtatatgtttgtcgttaattagataccctgctaacttaaccatattcaaacggcaaaccaaattgatatttaacataaaaactgaacggaaagtgctttttcatttgatactgaaccagattaccagcccatcagtgttcttctaactttgtcaacaatctgagttcttgcttggcttctggtcaatggaaagtcacggctttcctccaacaaaaatctatacacttcccattgacgttcttgtgttgaatgtctaacaacttcagccgagaaaatgcctactcccaacgcttttaaagtcaacgtaacatcatagaatacacggggtctcccctttccactcagctccacaggattagcaaccagaagttctgtgtctggaccccggttcactatcgtcacccgcaacggatgaagcatctcttctttaagcatgaacacaaggttntctggctttaggatctatgatctttttccatcgt

SEQ ID NO: 72801 - DNA, 447 bp, Glycine max
  Clone ID: jC-gmfl02220055e11d1
gcaaaatatatagaaagtgttgattgattaatttgacttgtttaagtgttcaatatagctgatgaagccatcgctctctctctctcccaccctttccttatacttctgcttatattctcctatagccaattctataaagaaaaagatggctatttggagcagcaattattgagacaaggatgcctatatatacatgattggccaaatgtatttgtccaattgatacaatcaattatcagtcagaagcggggtctcttggcttccctctatgtcattactcgaactagtatcagctggcttcagcaagcaagcaaaacaaagagaaattatcatgcatatggatgcacatataatgctaaaacctttgcattcaaaaggagcattgctagataaaaaccatgaagtcaatggacctcatagcataggagatagcaaatcagatataga

SEQ ID NO: 72802 - DNA, 500 bp, Glycine max
  Clone ID: jC-gmfl02220055e12d1
gacaactatggattattttatttatataccaaagtaatcatacaaataaaatattttgaactaagatggggtacatctagattttgtgtaccaactccttaaaaattgtctctataccctgcttctgctattggaagcaatggaaatcctctgatcctgaagcatgttcaagttgggagccagcaaccgtgtgtaccggtcaaagtacaagagctgtttcaggagaagagcaaattctctaggaaacttcaatccatatgattcactaacccgaaccacatcaagaaagagtgcattcatctgcctctcatcaacaactatattagcagcaacagcagttgcatttgtggctgttccagttgtagttgctacaactatttcagtgtccaattccttaattgatgagaatactttttccaaatctcttgcaaggccttagcatcaacatcctggtttgtagcacccatttcaattaaggaagatgccattgagtcataatc

SEQ ID NO: 72803 - DNA, 476 bp, Glycine max
  Clone ID: jC-gmfl02220055f01d1
acaaggacaaacagttacctgaatttattatttctcgcagcatgaaagccacgatagacagtcaagtcaagcattatgatacatcagaccccaaaataccaacaacactactcagctgagcagttattatatcgtactttcacatgaaagtgtcataaaggcagataaaagcatatacattcaacacacacgaccataaggctcaagcacaaggcaatagtatgacttaaacggtgacacatttcagcaattattcttaaaacactgcagattttctgaatttgttcaaaatacaagagccttgttactgtagaaccacacattcttgtgaaccagccaccaccaccacagtagggtgttcgcttgtgctgactgcatcaacttcttttttgacactttgaacattgacatcctccaattcaccacagccaatggcttcaaaaacaagatcattgacttcttgaaacctctcttga

SEQ ID NO: 72804 - DNA, 61 bp, Glycine max
  Clone ID: jC-gmfl02220055f07a1
tctgaattcggctcaaggagctaataacttcattgctttttcaccacacatcgcatgatgc

SEQ ID NO: 72805 - DNA, 491 bp, Glycine max
  Clone ID: jC-gmfl02220055f09d1
agttattccgatattcggacgcatcaacttgttatgaaatcacattgatagcctctactcgtgtcctagctcgtctaagagctagatttgcctcaattgtttgtctcttgccttccgccttattcaaattagcttctgctatttcaagagtttgctgtgcttcttgtggatcaatgtcactacccttttccgcatcatttactaaaacagtgatctcattattgtttattctagcaaaaccgcccatcagagccatcgttaaccattggtctttaagaagacgtattctcaaaatacctatatctacggctgtggcaataggcgcatgatttggtaatactccaatttgtccgctattagtagataaaatgatttccttcacttccgaatcccaaacaattcgattgggggtcagtacacaaagatttaaagtcatttcttcaaattgctctccatttctaagttcgtagctttcgcagtagcttcatcga

SEQ ID NO: 72806 - DNA, 407 bp, Glycine max
  Clone ID: jC-gmfl02220055f11d1
gtaaaaagcaagtaacattaagttggattgggatacacaagataattcacattatctgaagtacattgcaataacatatacttcaccaaacacaaatctaaaaactctcaaaagtccacaagtcatccttttctttcatgctcacttgccggggacgaagttggtggcgtaggcccaggcattgttgttgactgggtccgcaaggtgatcagcaaggttctccaatggacccttaccggtgacaatggcctgaacaaagaacccaaacatagagaacatggccaatctcccgttcttgagttccttcaccttaagctcagcaaaagcctctgggtcatcagcaaggcccaatgggtcaaagctgccaccagggtagattgggtcagtgacctcaccgaggggcccac

SEQ ID NO: 72807 - DNA, 489 bp, Glycine max
  Clone ID: jC-gmfl02220055g01d1
agaaaagagccacaataaattgaattaacataaaccaacccagatgtgtgcctatgatacattacaggttaggttcaaccactagacttataaatatcatgatgagggtgtaacagatctggtgttccgtccaaagccaagacctaagcccaagggagcattgtcatttctggttttgccatggttattattatggctacaatgcgtagaatgaacatgaccatgatttgttttggagtgggtactgttggaattggaattcacattaataacatgatggccatttccattgccccttgcatattcggaatggttatgcgagtctccatttgctaagttcgagcttcttgccatgtgcatcattcctataccctcctctgagctacctaattcttcaatgcactcaatatcttcgttgtaaccattgatcaagaaatcagaacagttcttcttgataccatgatcatatgggtttctgaatctaccacc

SEQ ID NO: 72808 - DNA, 447 bp, Glycine max
  Clone ID: jC-gmfl02220055g09d1
gccataattacatcaaattctatacccctgctttattgacatcaagtacaagaagtagcagcttcactctaataatttccccaccttattacctcaaatatacttacaatataagtaaaaaaaaacctgttggtaatggtattaatattcatatccataaaaactttcaacatgacacagaaaaaaaaatggcagcttatccttaaactcaactatatataaaaaaaaagggttacatgaattcaagtgccgatggaatcagcactaacccaagtccaataatgcttcttaacagaaacagcttcatccgcaacaattttgtcttcaaaaacccctccatactcatccacctcgtaggtgcaaaaatccccttcgggcaaacactccacggtggcactgagcgtgtgcaaaacgtagcaaccgggcaaacccgggtaagaacccgaa

SEQ ID NO: 72809 - DNA, 510 bp, Glycine max
  unsure (1)..(510): unsure at all n locations
  Clone ID: jC-gmfl02220055g10d1
aagttgaaaggcgttgatttatagtgataactaaagattaatcgttaaacaattaccaataataaaacaaaaacaagtgaaagaatttactctgccatcaactcagttatctgatttaacaacacattttttcatcatataaaacgagaacgccgtattttaatttctttcaccaagctaccctgtaggctgtgcagcatttagaagcatttcctgtgtacaattgaaggaccagcctcatcgtactcagcctttgcaatccacatctgttggaaagtgctgagagaagccaagatagagccaccaatccagacactgtactttctctcaggtggagcaaccaccttaatcttcatgctgcttggggccaaagctgagatttccttgctcattctgtcagcaatacctgggaacatggtagaaccaccactgagaacgatgtttccatacaagtccttcctaatatcgacatcacatttcatgattggaatgtangtggtttcatgaatg

SEQ ID NO: 72810 - DNA, 452 bp, Glycine max
  Clone ID: jC-gmfl02220055g11d1
cattgattgccgagattcaaccatgttatattgagacaatcaatcaagtacacaactcacagcaaaaaggtttataagctgtaaaggtacatgtaaccataaacaaaaatagtctccaagactataaaaacattacattttagacaaattagtcttcttccacttcatcctccgtcaacacctactacaactgctggtgttgctgctgcctaacatgtatcatattcactacaaacatcttagtaggagtagcctttgacgaacaactccttcttggcttcctcagattcaccctcaccggtgtacttcccaagctgggcgagcgagttggacttggcacggaaaagaagtgcatcttgtgccgccttcacattctctgggcggcctccccatgtcttcaggcagtgttttggagggctctggcatacgagaacgacacgtgccacgggttt

SEQ ID NO: 72811 - DNA, 441 bp, Glycine max
  Clone ID: jC-gmfl02220055h01d1
aaatagtcttgcatgtcatctttaaagtaattattacaggaggtgagattttcaattatataacaatctaggatcatataacaaagtaaaaaatacacacttttgggtcttggaaaaggaacacagatattactaagccaattcgtcttccattctttccttcttctcttctcttggtccaacaactataagaaactaaatcaagctagtaaaaatctcccatgttcatcagcaaaaacccctaatttaacagaacatcttatttgccaaatatgtcactgcttctacttgcaagttgcaacactctactctagaagaacatgggcttcattttctcctcactctatggttaagaccttccctacgagttgaggaagatgaggaagacaccgtagatgaaaaaccagaatggtatttcagccatatccttgtgaaatgcct

SEQ ID NO: 72812 - DNA, 492 bp, Glycine max
  unsure (1)..(492): unsure at all n locations
  Clone ID: jC-gmfl02220055h10d1
acaaaaatgattgaaatttatgacttaccaaccaattaacctttgcacttgtctagattcccaagagatagaagcaacttgatttctgtacacagacattgtaatattacaactatatattatgaaactaaacacataacttgcgagcctcaagctagccctagtagtattaggtcttcattcttgagatcaatttgattctctcaacgtggctttggatccacaatctcagagaaaacagtcccagacatcaacttatcactctctttgtagctactactaagctcttcgctatcagtactcacactcaccacaccgctactcttgttaaaatccgaaacctggcccacactggttccagtactaaacaaatcatcactagcctcctnctctcttctctcattaatntcattatcaacaatattagtattttcacgctgctcagcactctcctgcaactgcaacgcanactccagcatccaaacgacgtcg

SEQ ID NO: 72813 - DNA, 441 bp, Glycine max
  Clone ID: jC-gmfl02220055h12d1
aaacacactcattgcacatagtaatgcgctttatttaagtgaataaaatattacatactagttcacaaatgcaaaaggacacttatcaaccagatatttgagactcttacagttctcaagaagtcgcgtcagcatagggttagtggcgttagaactcagaatttcattcttaacgccaaaaagaacagccagtaaagctactggaaaaggatcaactctagtaagaaaaacaattttcttacctttcccaagtgctgtgcgaatccttttgttgatatctgaggagcgattgttaactgcagaactaatccaagcagtgggtgggtaaaccaccacgttcactaccacatgtaacatttacaacgacagcttctgaaggtaattgacttacaggataaagacaattcacaaaattggtaaccaagaatccactggaaaatt

SEQ ID NO: 72814 - DNA, 485 bp, Glycine max
  Clone ID: jC-gmfl02220056a01d1
aaaccaaatcctccttagcacaaccacattcattatattacagagagttggcatgcacaattgcaccataagtgcaagaggctgtctaatgccatacatacagagagaggcaatgtatctgtgcctgtgccctccccagagttttaattattattattattattaaattgggccaggagtatgtatcttagcaggagaatacataaagcttaaggtttctcccaatcatgagatatacattataatacaagattaagctggaacagcttccggcactttgccattgcttgagagtactaagctatcatagtattcaaccagtaccttccaaccaccagggcacataaatccatcaggagggctttctttggtccttgccagtgtgcgcatctttgtgcctgatatgaacaggaagtcctgaggccttgaagggtcaaagaatgccattttaccctgagtcttgtcatatgcagcaaccctgaaag

SEQ ID NO: 72815 - DNA, 525 bp, Glycine max
  Clone ID: jC-gmfl02220056a05d1
ggatatccaaacgaagccctatttcttgtcaaccagggcctctgaaaatttttaagtgcatagcatattttaactgtcatggtaaattattattacctacttcactgttccaaagaacaatctgattatgttttacagcacggaaaggagcgcagataagcaaagaaatggatttgtattatatactgtacatgatgctccacatccatgcaaaggagaaattttttccatcaagttgcctgcaataattctctgatatcgtacccttgaagctgcagaaaagtaagaaataatataactcctgagttccaaaaagaatggatagtgatgggagtgagaaggttgtgagtttgagcatatgaaaaccccaaagcagtccctagaacaaacaattggggaaattcttcaggagtgagatgtgcaagggcaaaaacagcagcactaatgacaacagcaactggcgtaggaacccacttagtgagggaagtcattaaaaatccccgaaaacagtcttctcaggagtgg

SEQ ID NO: 72816 - DNA, 353 bp, Glycine max
  Clone ID: jC-gmfl02220056a06d1
aggggaaaaaaccaaaaattccggggaaaaattccaaaaccccatttcccccaaagggaaaaaaatccccaaaggggggggcccgggaatttatccaatttttccccaaaaaaaaaaaaaaccccattttcgggaaaaaaaaaagggcccccgcccatggcacccaaaaaaaaacccctttttaaaagggccccccattccattttggggaaaaaaagggcccccaaaaaccagtcccccccattaaggggccccttttaggccccccgaaaaatttgggggccccatttccaccccccacgggggcccccctaaaacaaatgggcccccaacccatttttggggcccccccc

SEQ ID NO: 72817 - DNA, 428 bp, Glycine max
  Clone ID: jC-gmfl02220056a09d1
acaccatcagtctgacactaacaattttatatattttttgcctgtatgtataggatagaaaacgacagcgtttgtctagatggcataaatacccccataaagaactatccaaagggtttattccagtccctaaataaatcagtaaattatcattgcatccaggttgacacaatttacactatattcaaaagttgggatttgtctataagagaaattaatctcaaactaccatgtgagtttctttcaaagttgatgggatccccacgtccagccgcatggtcgatttatattgctctggttaaccagcaccagcctgaatgcacatttttactactgcaagcgcctggccataaaaattcctaagctctcgttctagcggtgcatttacattaggaacatgccacacaaatcttggagggatcaaatca

SEQ ID NO: 72818 - DNA, 426 bp, Glycine max
  Clone ID: jC-gmfl02220056a12d1
gatacgtaaaacaacgctttgaactttccatctttacatcatgcatttacaagggttttgagggagacatttgaagaaacagaacaagatacagaggaaacctttctcgtctattgccccttgacacaacatataggaaaaactatatgaatatagtgagacaaaatgattaaaatgaactatggacagctatagggaactgaggatgtcttttattattgacaaaatagggttgccaaaaggatattcttccaatgtctgaaactttattccatccatccgggcttgaactccatcagaaaatgtcaagccctgaagcagttcctttgccgttctgtcagctccaacgagggaactacctacgcctaacaaaatctcgggtagagaacggcttgctctagagatctccacaagtgtaacctgtct

SEQ ID NO: 72819 - DNA, 308 bp, Glycine max
  Clone ID: jC-gmfl02220056b02d1
aatggtaacatgcaagtttttattatatattgttatgtatataacacatactagacctgccaagcttaaaatatttagttctactaggcctacaggattacatgtgaagaaaattgcagtgaaaccttttttggccaaaggaacttcacatgatcaggggtgccaacccttttggaaggaaaataaagagtccatgatagatgataatgatgatgaggtttccagctttaagctgtcattttcactgataccaaatagagatatctgcctgtttctgaagagcattcattccttcttcttcttggata

SEQ ID NO: 72820 - DNA, 432 bp, Glycine max
  Clone ID: jC-gmfl02220056b04d1
aacaaatacaatgtcagtgaagttttattattaaatagaatacatggcacactgacgacaaccttacactacaggtagcaaacctgtattcacaaactggtaaacgtttcatcagatgtaatatttacagagggaggaagaatggtaaaagaacatcaccaactacctaatcaaagtacaattttcctaccttgatacccccttcaccaccagattgccaaacgatttggatattctctcaactcaatttcaactgatgacagaataactcaattcgtcaacaacctaacgtaaaatggagtaataatgtaacatgctgataaaatttgttaactacggagaccattacaatgaaaactagatttaaatccaactctggggcatggggtaacctttgattgggttaaaaggatcacttactagaccttttcc

SEQ ID NO: 72821 - DNA, 365 bp, Glycine max
  Clone ID: jC-gmfl02220056b05d1
cccctattaattttggggaaaaaaccaaaaaatacggggaaaaatttcaaaacccgatttcccccaaagggtaaaaaacccctaaaaaggggggcccgggaatttatcccaattttcccaaaaaaaaaaaaaaacccctttttcgggaaaaaaaaaagggccccagaccagggcacccaaaaaaaaacccttttttaaaatggccccccattccattttggggaaaaaaagggcccccaaaaactaggcccccccattaagggggccctttaaatcccccggaaaaattggggggccccattagcaaccccccagggggcccccaaaagagaaatgggcccccaaacaatttttgggggcccccc

SEQ ID NO: 72822 - DNA, 452 bp, Glycine max
  Clone ID: jC-gmfl02220056b06d1
ggggaaataaaaaggcataatggattaagaaacattttccttccctttccctcgtacaaaaaatttaaaaccacacaacactgctatatgtatacatgaataaaagaaaggggagctctggtttcttgatactcaagtaaaactttctgagtgtttggacttatgggaacgccgtgcccattcaatggatgctcttggtgtggatccggtgcggttgagggattctggttgagcatctgatggtcgtggaacaagcttacacccgattttcctggcaaccaaccgaggcgagcttcgtgaactgtgagattttgtcacacttttcatttcttgctttattttactgaactcttcttcaagttctccaactctagaactcatcctatccatatccaccttcaaaacctggttttcacgcacaacagtcacccatccatccctttgtacaattt

SEQ ID NO: 72823 - DNA, 334 bp, Glycine max
  Clone ID: jC-gmfl02220056b08d1
aaccaaaaagtcaagtatagcacattaaaatttcttgatagaacattataccatgccttattatattatttggatcacaaagtccatctagaagctatatatggctcctagtcttggcacaaagacaaagatcgttcttactgaggcgggggagacctggcaatgcttgaacatcaaggtggtcctttatcatcccttgtggcaatttgcaatcgacggaatgaagaagattcgctggaacaagtgataatatcacaactggcataggtaaacctgggcaacttctgcgacctgatccaaaaggaattacttggaaatattggccacgaaaatc

SEQ ID NO: 72824 - DNA, 347 bp, Glycine max
  Clone ID: jC-gmfl02220056b10d1
ggatatgcagtaaggggactcaggcttaccgcgagactcgcttttcccaaatcgctgttcactattaagaaaatgggacgaagatgaaatgcccacttgttttatagcagttgtccttaatcggagttggattaagggcaatctatttacgcggacgggtaacagggcctcccgcacacttataaatcgactgatgaaacccatgtttgaatagccaaatcggccccccgattggaaccgggggcaacgcccactaaaggagcgcttggatttcataaagaggcgcttatattattccacggcacattcatccctatctcaaaaccctcatctattaccagaaatac

SEQ ID NO: 72825 - DNA, 437 bp, Glycine max
  Clone ID: jC-gmfl02220056b11d1
aataataataaatagtgaatccagttgcgatatggacaaactgcataagagtactttgcaatattcaacagtttaatacagatttacaacggttgatgattcccacatttgtgaaaaatgggccttagaagaaaaaaacaaaagaggaaaaaaaaacacacggaaaacctgtgtagggcaagatattggcgccctctatcaggaagttcaaatactgagaagggttatataatgtagtataatatgaatgataacccctgaccggcacttggatattctggcagaaactttgaaaataaatgagctggaagaggtaaattttggagaaggggaaaatacagaattatttctcaggaatgtcatacaaaaacaacaactactaagctcaaaagcccaaaatagcagactgaagaataggagccagatacacccacgtt

SEQ ID NO: 72826 - DNA, 496 bp, Glycine max
  Clone ID: jC-gmfl02220056c01d1
aagtgaagaacccccattttttgtctgataacacaaaacagttacaaattcaactagtaagggataagacgactaaaatggcactcaaacgcaaaggttgtataaatcacaaatcataataaaacacactggaacaagcaaagcttgtcaaaaggtgcaatagaattttatgccacaacttggaaaattgagagtttgggaccataactacccaagttgaccatcccacaaactaggatattttccatatgagtaactaaggcttcaggggtgctgctcccaccagaaagcctactattttatataatcattttagttggcacggcttttgaacacatcaagacccatctcagtaggatcagttgcttgcaactctacttgaattccatccagctccctcttgaatctgtctttggagcttgcataaatcatcttgctcctcacccttgatgtgtcaggggaccacgcaatgaaaaaaattctgcttttagggaca

SEQ ID NO: 72827 - DNA, 338 bp, Glycine max
  Clone ID: jC-gmfl02220056c02d1
aaggaaaaacagcagtcatctaatattattggtcaatgaagattcaattattcaaccctgatattttgtaggatcataccggtggaaatggcaagtctagtaaaagaaagaagccaccacaatttttagaatccaagtctggttggactgcaatgaaatgcaaacctccacaagcttttttagcagcttcccaagcttcagcttcactagttgtctcaggagttttcttatagggagaatagatttcccgggtagaaattcccgcaaaaagaatcaggcgagcccgaggagcatccgtttccaccggggaaacctccaatccttttatcaaagctgcc

SEQ ID NO: 72828 - DNA, 405 bp, Glycine max
  unsure (1)..(405): unsure at all n locations
  Clone ID: jC-gmfl02220056c04d1
aagtaaaatactgattagatcaagccataagcacactagttattttgcaaacaagtagttcataggcatattacagattacagagtcaagcttatttattgatttcatttaaaattactaaggaattacttctccatccagaaacgggttaaagtggtgtgaaaacgtcttcacctttgctttgagttccctcagtcctcttaaatcttccatccatatactgtaacttgagttcttagcaagaacatcttcagacacctccttattatcaataagttccatagcatacttctcaaatttctcaatgttatcccacagcacagccaactttgttgtgtcactctcacttctaacactattcagccagtcccttgcttcctncaccctttgccaaaagcatgaatc

SEQ ID NO: 72829 - DNA, 446 bp, Glycine max
  Clone ID: jC-gmfl02220056c05d1
aaaagcaaccgtaaatttacatacatactgaatctcaagttaaatagttcaaatacaagcatgcatgaaattatacaatcacatgacagggtgacaagtcccgcacattctatagatgcggtaactatttgtgattcacactattaattgccaaaaagtggggtttaataacctgcgtttgaatcaggaacaaccaaaacatcttcttacagagaaataaccagttggttgcggatctgcgtcagactctgattttttttgaggaagctgcttaaaaaatgctttcacagcttctgtcactccatcctaattttccatggcctttgcaggttacattgcacgttcctttaccttgggatccatcataagttttattgcatcaaccaacttgggaagtgaaaactcatacactgggatatgttgaggaccagctactctagcatgta

SEQ ID NO: 72830 - DNA, 559 bp, Glycine max
  unsure (1)..(559): unsure at all n locations
  Clone ID: jC-gmfl02220056c06d1
aagaaaaaagaaagttctaattattaataaattatatctatatatatatatatacagatagatattctatatcttttatcttaattaatatttgacccctccttataatgtgttatagttttctttatttttaggaacttatccattccttttttaatgtgcccgacaatccgaaagaattctgggggaggggtcatttcgtttttgatctagaataaatagagcttcaagaaatgagagaattaagaatacccacgagaaacactaatccaatccataatgatgtaccggaaaatacaacatttttgttattcgaccaaccttcaggagaagcaaatacaacaggtacactaatcaataaaataaatgaaatagcaattaatgcaaaaacagctaattggaaagcaatagtcatgtttctaatcctccaatttaccaacanaagaactttaccatttgatcccccaacccttgatccctttattgacaaaaaatttataataaaaaacgcagaaggtttatcatgaattcattgatttttttactattatcaaccttt

SEQ ID NO: 72831 - DNA, 510 bp, Glycine max
  Clone ID: jC-gmfl02220056c07d1
ctttcgtctctttttttgaatatatccaaaatggaagttatatatttcaacaaatagtaaataaccatatagttctgtaacgttgttcagatagtcgtaaataccgaaaggaaacattgtctggtaatgctaggtaattgaattacaacatagaagtactttagcatagacgacacataataatggcaccaacaaacagttctaaaataagctactaaactaccatcttcaattggagtcactatcatcccaagccaactatttttttattatcaactctcatacttttttataagcgcctaaagtagaaacatatctcatctccaacactgaaagcattgtctctcaaatattggtaccaaggttcagcaacacattgtaggcctttttgagcatcgtgcatggtactaaaatctgacagaccaagtctttcccaataattcatcacaatagggagggaaaaccttgatctcatcgccacttgcaatctactcttggagacattgatcg

SEQ ID NO: 72832 - DNA, 454 bp, Glycine max
  Clone ID: jC-gmfl02220056c08d1
ctttcgttcttttttttagggagaacccaatattaaagtagatataactatgtgtaactcatacagagaaataacaacgcaacacaatttaaagctatccaatacaaatctctcatacaagaggagaggggcatataagtggagccctcatcaccctcgatcttattcttaatattaataatgctactcatatactagtgagtagtttccggtttcctgcgtccatgactttctcttcaaaccttgatggtagcgcagacggtggaggtgctgatcttgtaggggatggagactccgcatttgccggggagcgaggcggcgttgttggctttgaagccggagatttggctggcggccgacttgaggcaggtgcacgccgtctggcggacggcggtggtcttggcggcggcattgaggctcttcactcacgtgcagcatgccgacggcggcgttc

SEQ ID NO: 72833 - DNA, 407 bp, Glycine max
  Clone ID: jC-gmfl02220056c10d1
aaaacaacatagttcaatattgccattcagtttaggtccctaacaggggcagtgaagcataaaagccatgcttccaaattaaaaccccatggggactgggacccatttgaaccttaaacccaacaaaaaacagaccccaggaacaagaatctgaagttgattttagtagtcttcatcctttttcgggcccttaccaaacttagcacccactttttaaaaatccttttgaagggctgcaagggccttacgggcttcaaaaaattcacctttttccataccctaacccacgtaccaggggacaaaagcacccttggcatacatgagatccaacttgggatcaatgcgggcaaacacttgaaccacactgggggagtttgaaatcatgcaaactgcccctcgagcccaat

SEQ ID NO: 72834 - DNA, 440 bp, Glycine max
  Clone ID: jC-gmfl02220056d01d1
aaagaaaaacatcagtcatctaatattattgttcaatgaagattcaattattcaaccatgatattttgtaggatcatacaggtggaaatggcaagtctagtaaaagaaagaagccaacacaatcttcagaatccaagtctggttggactgcaatgaaatgcaaaccttcacaagcttttttagcagcttcccaagctttagcttcactagttgtctcaggagttttcttataggtagaatagatataccgagtagaaattccagcagaaagaatcaggcgagcacgaggagcatccgcttccaccggggaaacctccaatccatttatcaaagctgccaatgctgtagcattagaagacgcaacggacagtccagggatcaatgtcttgtcatcaatgtcaagacccaataattcaagatctagcccagaaccacaaact

SEQ ID NO: 72835 - DNA, 415 bp, Glycine max
  Clone ID: jC-gmfl02220056d02d1
gccagtgaaggataatttttaggaataagtaggctatacttcaacaaggagtttatatagtaagaaaggtacatccttggtaaaagcataaagcaaagctaatctaatggcacacacaaccatgagttcatgaaatccagtcattagttacattcgttgttggtgtgacaatatcttagtaaagtactcaaaatataaattaatagatataataaagtatctaaatgatggttcccccatcagacaaaagaccagttcatgaatacgaaggcaaggcagtgattggaatcatcatcatcgagaactttccatgcaatggcctgctcataagacactggtcgattcatacttgatacacatattcctgctggcagatatgcaaatccctgttgcattatcttggagaactcaatgc

SEQ ID NO: 72836 - DNA, 505 bp, Glycine max
  unsure (1)..(505): unsure at all n locations
  Clone ID: jC-gmfl02220056d06d1
ggaaatctggcaaaactaaaaacgtagattatgatagtgaagaaacaacataatacaaccataactctactcatctaacaaaacaggaaatcacattctcagaatgactactacaattatatttgtgaggaagattatctaaacctatacagggatacttctagctgagaatcttcgttttgctgtcaaaactgccattcccattttcagtgaattgccaaaactgtgaagaaatttattgccggtattgtacgacggaacattgagcaagatactcaattaaccatcaccgtaaagcattcacgaatgccgtcaatgaatcaacatctctcttttccgaagggtacttaattggttgagaagagtgtttgnggaagagtagtattgtgggggaagcttcccaactgcagttcagtctttgcatattccttctggtctccatacgctctgaattttgcaaccttcactcctgacccagctaacttttctgccaaatcaacatatg

SEQ ID NO: 72837 - DNA, 530 bp, Glycine max
  Clone ID: jC-gmfl02220056d11d1
acaaagtgaaagtgagaacacactttattatatgaaaaccgagagcatccaaatacaatagtgcagaagttcaggcaataattacgcatagacatgcataaagtctatgttattcagaagtacaacatagataaggaaaccacaaactctttttaattagatagagatactgttgggaattcctttgaaagtcaacccttcctcacttgaacgatggagcaaagtgtatggcagctgaactggcccagtccggtttctcagacttggatcactgttccttgcattgatttttgcttcaattccagtcagtttgcttccaaaccttttgaaagcttctaatgccttcttatcagtagtccaatttggagtctccctctctccaaggtatatctcatcagaagcatgccttgacaatatctctatcactgaaagatcaataagggtctcaaacttgggtgtgattgttctcagataagccttttgaggattcttcaccatctcatcatactctggggtccttcagctgggat

SEQ ID NO: 72838 - DNA, 190 bp, Glycine max
  Clone ID: jC-gmfl02220056d12d1
tgtcgggcggccgcccttttttttttttttttttttttttttttttttttttttagcagttcaacaattgaaattacaccagcattttgtcaaaattggaagtgtatgttctgatttctgaagtccatgaatggtatctaccgtttttccacctgaactcattggcatggtgtactgccatggaaacaac

SEQ ID NO: 72839 - DNA, 437 bp, Glycine max
  Clone ID: jC-gmfl02220056e01d1
actggttcattttccattttttagttattcccatatttggacccataaacttggtatgaaatcacattgatagcctttactcggggcctaactcgtttaaaagccagatttgcctcaattggttggctcttgccttccgccttattcaaattagcttctggtatttcaaaagtttgctgggctttttggggaacaagggcactacccttttccggatcatttactaaaacagggatctcattattggttattttagcaaaaccgcccattagagccatcgttaaccattgggctttaaaaaaacgtattctcaaaaaacctatatttacgggtggggcaataggcccatgatttgggaaaactccaatttggcccctattaggagaaaaaatgatttccctcacttccgaatcccaaacaattcgatgggggggcaa

SEQ ID NO: 72840 - DNA, 150 bp, Glycine max
  Clone ID: jC-gmfl02220056e02d1
aggtataaccgggacctcttccatttaaaatgtatccccaaacttgaaccccttaactccaagtaaaaacacattgactggcgggtctcgtgtcttaaccacttaatacacacatgtacctaaaatgaatagctttcacattcctgctta

SEQ ID NO: 72841 - DNA, 396 bp, Glycine max
  Clone ID: jC-gmfl02220056e03d1
accatacccgctgctgtagcattatacacattattattactcttgctcccgtcaagataaatctgaccccttcccctgttcccacctacgtatataggatattttaagaaatgaacatctctctgagtagtgggatccggggaaagaataggaaaggttatttctttatatttttgaccaggaacagggcctaccacaagaatatttttttttgtaggacgatagttttgaaaagacagattgcctatcttctctttaatctcaggcgaaatacgatcggggggtgccaattcaaaaccttccggtaaaataagaacagcccccacattcaaagctccctttttaccattagcaagaacttgtttcacttgcatatcataaggaattcgaacaact

SEQ ID NO: 72842 - DNA, 158 bp, Glycine max
  Clone ID: jC-gmfl02220056e05d1
gaagttcaccacaaaacaaccagtgtgagtttgtgtcagtattccattaatatatgcaattgacaataaatttccaatttgtttcgggcaacatttgatgcccacacctatcctttgaaatgttcccaaacaattctgtacacataatgcccaggagc

SEQ ID NO: 72843 - DNA, 458 bp, Glycine max
  Clone ID: jC-gmfl02220056e07d1
gaattaaaaattctgatcgcatattaaattcccaagtcgtattcaaatccttatcaataaaaccatgaagccaaattaaaatatttctagtacacacccaaaaattcttcaaaagaaacttccgggaatctagcacgaccaaaatcataaattaatgaaattctaacccatcgataattaaatttgatgggaattatgatgtagcagtagcacacgtctcaccattaaaatcaaaataccaggtcaaagtttcaagtaacttaggacagaacgtaaaaaaaaactagattaaatgagtagatagctcggtacattaagtcacttagcacttgacctcctttaaggcatatgcaaagtacaggaatgttggatcagcagcgccgtccttgtagtaggcaaagaccaagcaagcatcatcacccatgctctcaccaacaaaaaattggaaatctttaatc

SEQ ID NO: 72844 - DNA, 485 bp, Glycine max
  Clone ID: jC-gmfl02220056e09d1
aggccaagtttccgtattttctcattgcagtggtagacaaatgccagtgtaacaattttgaaacaatgaaaagcattatctgacaagtatatttggatggcgaccaccaaaccagtaagttgacacatgaatcattctttcctttatatctacaaagtgaaaagaagaaatatatgtacaaaggttaagctttttatggaccccctccaagggggtccactgattttgtgaagggccacacagtacatattgtgaaattaattaaaaagcctcaagaaatgtcttctcttctgctattcaaatttgtatcaactgtggaatgagcttcaaaaggaaagacaactcctgctgtgaaaattgaagctttgagtttccctgcaccttcccacaacccttaaccaaaccctctccttgaccaccctttggtggctttatcatatccgcaactgcctcagttatttcttgaaccaaatccacaattaccc

SEQ ID NO: 72845 - DNA, 506 bp, Glycine max
  Clone ID: jC-gmfl02220056e10d1
acgttctattatatatatatctatctatattctatatatagatatattgtttaggttatcaagtattaatctgaaataaataagaattgctgcttctaatacttataataattactacaaattctaataattactacaaaagggatatatgttagataaaatagattaattaatctatttcacaaaaaaataatgtatccatagcacagtttcgtcttataatacctcgggtgctaatgaaactattttagtgaaatttaactgtctcaattcccgggcgattgcacaaaagattcgagttccttttggatttccttcttgatcaatgacaactgcagcattatcatcatactgaattattataccgttgctacgtttgagttctttacaagtacgtacaattacagctctgatcacttctgatctttctaagttcgtatttggtactgcttggttgattacagcaacaacaatgtcaccaatataagcatatcgtcgattactag

SEQ ID NO: 72846 - DNA, 408 bp, Glycine max
  Clone ID: jC-gmfl02220056f02d1
gtgtagggaaaaaaaatgaaaaaggttaatttaattagacctctaccaaacacttagggaatgtgtttctctaaaaaaaaattggactaaaagttcttagaaaatcttagacctctcccaatcagaatacacatagtccctcagagaaaacagaaattgccagattgagttccccaccgaaacagggataaagaaccaaagtaaactcagtactccaggtagccagccaggcacgagtagtagtagtagtagtagtaactttgattagagattataagccattttcatgctcaaaagaaagcagttttcagtactaaatacaatatgtaagaagcaatgaaaatccctcctttagccaaaaatttaaaaaataaaatacaattcccttcctttcttttcacaatattc

SEQ ID NO: 72847 - DNA, 499 bp, Glycine max
  unsure (1)..(499): unsure at all n locations
  Clone ID: jC-gmfl02220056f05d1
ctgaagctagaacttttattgaaacccttttaggagtacatatactttatatagctacccctttacattttacaagattgatgaaccaacaaatacatttacaaaatatgctagcagttgccaacaatccaccacagccccaacttctaaaatatgtcagaaatatgggattcaaacacttgaagctttttgcagactagcagcatattgtcgagcccattggtcatagtgaataatttcttcgagtgacggagatgctactaattccttttgatgttcctgacaagttagttccacaaccttgaatatatccagataactaatcttttcttcaacaaacatttctacagctttctcatttgctgcactaagaactcctgtcatggtgcctncagcacgtcccgcagcatagcaaagattcaccgatggaaacttcttgtcatccggtgcataanatggtagagaaccatacttgctaagatcaagacgagggccagta

SEQ ID NO: 72848 - DNA, 303 bp, Glycine max
  Clone ID: jC-gmfl02220056f07d1
gcctttcgtctttttttttttttttttttttttttttttttttttttttttttttatttttttttggtttgcttattttttcttttttttttttttccttttcattcttatttacaggggggggggaggggaaaaaaagagaaaactgttccccccaagcacacgacaaaagagggcttgaaacacacggggaacctaacaggggccagcgggtggcgcactatattcggaagcccccgtactgagaacgggaaaaaaacgctggggccgcagaacgataacccttcaacgttcccagaaaat

SEQ ID NO: 72849 - DNA, 541 bp, Glycine max
  Clone ID: jC-gmfl02220056f10d1
aaaataacacacacttcacacatcattacgacaattaaaagaggtgtggaaattttcaaatagacagagcatactcaacaagagggtcatgtctaatttcctttattgaattaaacaaacgaacaaacgaaagaaaacacaaattccagatcatgcagaggattccgcattttcagaagatctggcagtagcctgtggaacagaaaaagctggcataagagtattaccagcaatttcaaaatcttgagaaattcccaagagaatatcaaaaactgtagactgtttgggattgtcaataaggaaactcaagtgccatgaagtttgatttgcccactcagaactccacatttcaaaaccattattaggaccacatacctctattgggaagatcaattcccaggaatgtggttccgattttggccacttacatgcatcgaaatgctctgtactggtgctgtttgttaaaaacacttgtaccaatgaggcccaatcactccttttgactgctgcattcccagacatcacaattttaaccattaaa

SEQ ID NO: 72850 - DNA, 288 bp, Glycine max
  Clone ID: jC-gmfl02220056g03d1
aaggaaacctggaaagttcctatttccggtaaattcgattaaataataaccaaaaattggtacctggtaccctgtcaccttggaattccaaattgcacgttaaggttaactcccgaattggacccaaaaaacaagggaaaattaattccccccggtttttttcttttttgggggaattttcaaacttttccaggggaaaaccctagggagcccaatttgctttaaccttttggaaccggcaattaaatgccccagggctgttatttttccccaaaaaggattcgtttt

SEQ ID NO: 72851 - DNA, 385 bp, Glycine max
  Clone ID: jC-gmfl02220056g04d1
aaacgaccactccatatacatggcggcagattaaagaatgttactagaagaaaagaaaaagacttcagagtcgtctttcacaccggagaggcatatcctaattggacagcacctagacagtctgcgcaacgggattctcgcccgcgacatgcgacgtgcccgcggcgatatgggccttttcgccctgttgctgcgcgttcttgatctcgacggggagcttgccgcccttggtgagacccatgtcggccgcatacgtcgagtgcgggacccagccgggcgacttgcgcggcgagccgacctcctccatcatgcggtcgacttgttcgagggtgaggcccttggtctcccacacaaagaggtaggcgtagatgaagcacaggacgca

SEQ ID NO: 72852 - DNA, 282 bp, Glycine max
  Clone ID: jC-gmfl02220056g07d1
ataatgaacacttggaaagctatataccatttgggcttagtgattaaaaatactgaacaatacataacattcacacacgatcttatcggcaggctggatgaaaacacttttcgcaataaacacagcttttgttgaaaaatttttgctatggccgaactgtacgaggatgttaacaatttgggctacaacaggattgcaataactgggttgctccatgtagtgtaagtccacatcatagcttatgcatggaatgaatcaactgctactggctgcgtgttttca

SEQ ID NO: 72853 - DNA, 534 bp, Glycine max
  Clone ID: jC-gmfl02220056g08d1
catcacaaattagtcactactcatgtttcacttgagactgagactagtttatttaaatgaaacatcgttaaaaaaacaatatatatacatggttcctgatttgaatggtatattataccttgtatgaacataaaacagtgataaagaattcagccacccaatctgaaaactgtacaattgagcagtaccacaccgcttgcatagatgcaaacctttatctattttagtgtggtcaaacctctgcacgtatccaaagaaatgaaagccagttatgtccagacgcaaacaatcccattcttatcagctgaagctaggggttttgcaattccgctccacctacaacacagaacagaggaagtgtgttccttcagagtactgactatatcacctttagatattgaccaaatatagacagatccatcagcagacccagcagcaacatgattgtcatctgggctgatacaggagcgactccaattagaagccactctgtttcccatggctttaatgtgccacaaacttccaagatcgaca

SEQ ID NO: 72854 - DNA, 199 bp, Glycine max
  Clone ID: jC-gmfl02220056g11d1
accctggatagttatgataaactagcgatcccaacatgggagcattgactggagcaatttctggctgggatcttgaaaagcaaatgattaaaaatggaaaagaagggggtacataaaaggcccaatgcaagacaaaaagacatgatcgaggaaccaagtaatgaatctctcccattttagagtggggcatacccttttt

SEQ ID NO: 72855 - DNA, 447 bp, Glycine max
  Clone ID: jC-gmfl02220056h01d1
aaaataaaaagatgcatatatgactcgggggttatttttgattttgcaaattacacaatcacagccgtacatcacacgtgagctgggccttttccaacttaaaagcagaggataacattggcccatgacgcaacacatgcaccacctaataatcataattttacatctttacatacaaaatacaaagactttaaattaaaattaaaaaaaaaaagataaacagatcatcttgatgaaatgaaaccgaaacccagaaacattggtttgattttttttggtggtcccaacttgattaagcatgaacggtttgattgaatcacttggacttgaagggaatggccctgattacgacctggtggtaaagtgctgcaagtgcagcaccaatgaaaggtcccacccagaagatccagtgatcattccaaccaaggtccttgttgaaaatgatag

SEQ ID NO: 72856 - DNA, 458 bp, Glycine max
  Clone ID: jC-gmfl02220056h02d1
acaacttgaaatgattttctcaaacaattttatgtaattaccattttttggcttgtaatgcattcaaatttcccatttcccatttgcatacaggcacgtactatagacatgaattacccatttgcatgatcataggaataattcagcatccattccctaagcaaaacgggttcagttatttaacgagctggggccccgacccgccacaaactccgctccacctctctgcggttcaaccgaacccgtcatcggtgtaaccgggtgaaccggaaccgaaccggtattcggcacgggatgatacccatgctgcttcaaaccatcatgaaccaccgcggcggaggggctgtaaggttgcagtggggtcacgtgcctcacgcccgccccatataattgacccgaacccggaaccaaatgatggtacccgattggaacctgaggtggcatcacagcatgatatg

SEQ ID NO: 72857 - DNA, 489 bp, Glycine max
  Clone ID: jC-gmfl02220056h04d1
aatgatcatcaaaaattatttaatggaaaatcttgatactttaaaatatccaaattcacaaaaacataatatgtcaccacttaatattttctcaaacaagggaaccaaaggatgaaaatgtataacaaccaaaatcgattaggtaggcaaagtaaaaggtggcataagatctaatagcactagagaaagacataatgaacagtctaatcctcgtcttcctcgtctccgtctccacctgcggccttcttagcagcagccctttggtttcttctcttcactcttccagggcgtccgccaccaaggggacttgtaagtgagaagtcaatgtgcttctgtgagtcaaccctcaccaagaaagatgggatgttcaccacttgcctcccaaccctgatatgtctctgcttgatgagaaccctggcgtggtgaatggacttggccatcccggatttgaagacgagcgtctgaggcggcgctcgaggaaattctcga

SEQ ID NO: 72858 - DNA, 377 bp, Glycine max
  Clone ID: jC-gmfl02220057a01d1
aatacaggtaagacctgaaacacaacatgcacaaatcaactcaatataccaaaccaagcaaaatgaccgatcacaaaactgaataagccactgtaacaatacggatatctttcggagactcccgaatacctatacacatgcgtggaccaaaggcgtaaacgggcttacactggactgacctaccgaaaatgcccgggatacacgaagtgaaacgcactatgctcagcatatgtttaaaccttactgtagcaccagggagtttaaaccaccaaacctaccatctggctgacccggatcttacacagcggatcccactatgcgggagtcaacagcctaagacaccggcaccttgacaaattgtcgaagcgcaaccagat

SEQ ID NO: 72859 - DNA, 437 bp, Glycine max
  Clone ID: jC-gmfl02220057a04d1
accaacataatttaccttgttattatcgggataaacagaaatgagactaaattgcagggacttgtctgaagatagcaaatgatttttgctaaaagcagttagaaatagacaatgaattgcaggtttaacagattaggcaggatgatacaacagatgcaccacccttgagcctggatttaccgtacagggcttattcaaaccggattatctcatgcttggacccataagcaacttggggtctgaaatcaatgttactgatgactttggctagcgcagactgatgaccatcactggtggaacctccagttttgtcagtccagaaccccaagggggctaccttaaacaacagtcatagattggctttggctgatggtgacgacacgttggtgaagatttccttttcttctacaataatttgagtgacgtctggcgccatt

SEQ ID NO: 72860 - DNA, 289 bp, Glycine max
  Clone ID: jC-gmfl02220057a07d1
gggtgggaaacacagggaacaagggagagagcaattaggaaatgtccaaaatatcaatccaaaagtaaaacctgaaggcacatcgtaccttgagggtacaaatggcgtttaagtcacaactccctcattgggtttaccccctgtactaatgttcacaatggtggctgccttgcacagtccaaatgtcacatatcccatggctgagatcttccggaggcaaggactgaatccaccagcggtgatttgggaactgaagttgcctgcttcctggagccggtcgatccgagcc

SEQ ID NO: 72861 - DNA, 340 bp, Glycine max
  Clone ID: jC-gmfl02220057a09d1
ctattgcaaagtttaaacttgcacgattatcatcagaaaaaactatacaatattactatggaaatcaccccgtaacacaatagacgacttgctcatatacattcccaaaatgacaacactatataaacagtgatttctatatgcagtaaaatacaacaaaattgatatttcagccttcgtttccagaacagcatatatctgaacaacatgtgatgcagccgaagcatcctagaccaatgcagagttgtgtcaatgcagttgcacattggttgtttatccgggtacaacactggatgcagcacatgcaacaacagtaactgcacaaggtttcacaacaatt

SEQ ID NO: 72862 - DNA, 511 bp, Glycine max
  Clone ID: jC-gmfl02220057a10d1
ctctccttccgttcttcttcttcacgtttttccttttcttcttcttcaagaagtttcatctgcttttctaatgtaatgatttctttgcatgctacatgaactcgttcttccagtagtttcagtgcaagacaaacaaatatgctgtgcgcattttggcgtgctgttccttctctgaaagccttttcaacctgttctttaaatataacggtagcagcatctagaagaaattctcgagcaagttcaggactctttgcatgcttttgaggacgggagcattctccatcaagctcatttccctcttcatccatcaaatcatcatcctcttcttcttctgcctcttcagcatgctcaaagaatcttctgatactttccccttttgtaattgtaacataaccatcccctacaattagcctgcaatgtacacatcgttgaccttttaatgcatgagctttaacagaaagttcagtacagcgtccgtctagcttccaagcctcgagggtgatgaagcatg

SEQ ID NO: 72863 - DNA, 431 bp, Glycine max
  Clone ID: jC-gmfl02220057a12d1
ggatcacaaatcatatatcttcaattttttacttcaaataataatgtacaaaataaatccagcagaagggtatataatgacagtaatacatctgaccatgcaatcaagagatatatgggttccacagatccttggcttctcatcaataaatgcagaatcacaatacagtctcccatattctgtacagcaacatcacctgccaaaaaatagtctagaggctaaattttgtaccaatttcactttttgtttggcatctatatgaagttctaaaagaaacagttgacattgcataaattctttaactgaacgaactgcatacatatgattagaagaagtcattctttgagctaatcttaacattaatcctatcattctcatatcttaggtaccagagagaaatccaagctccctacttagcatgcactgatgct

SEQ ID NO: 72864 - DNA, 502 bp, Glycine max
  Clone ID: jC-gmfl02220057b02d1
agtggtcggcctgttcgttctttttttttcatcacaaagtttgtcactactcatgtttcacttgaaactgatactaggttatttaaatgaaacatcgttaaaaaaacaatatatatacatggttcctgatttgaatggtatattataccttgtatgaacataaaacagtgataaagaattcagccacccaatctgaaaactgtacaattgagcagtaccacaccgtttgcatagatgcaaacctttatctattttagtgtggtcaaacctgtgcacgtatccaaagaaatgaaagccagttatgtccagacgcaaacaatcccattcttatcagctgaagctaggggttttgcaattccgctccacctacaacacagaacagaggaagtgtgttccttcagagtactgactatatcacctttagatattgaccaaatatagacagatccatcagcagacccagcagcaacatgattgtcatctgggctgatacaggagcgac

SEQ ID NO: 72865 - DNA, 224 bp, Glycine max
  Clone ID: jC-gmfl02220057b04d1
actggtaatttaaaaatattatgagtctaggataatatacaatcatacataacccaagtagcggggttacagaccaaccataccacagactaatagcactcgagttagcatccagatacacgcacaatttgtgacttttgattttctcactcataaatagatcacacgatagggaaaaaggaggaagagagcgagagagagagagtgggagagagagagagaga

SEQ ID NO: 72866 - DNA, 532 bp, Glycine max
  Clone ID: jC-gmfl02220057b07d1
gccgagattcaaccatgtttgttatatattgagacataatcaatcaagtacaccactcacagcagaaggtttataagctgtaaaggtacatgtaaccataaacaaaaatagtctccaagactataaaaacattacattttagacaaattagtcttcttccacttcatcctccgtcaacacctactataactgctggtgttgctgctgcctaacatgtatcatattcactacatacatcttagtaggagtagcctttgacgaacaactccttcttggcttcctcggattcaccctcaccggtgtacttcccaagctgggcgagcgagttggacttggcacggaaaaggagtgcatcttgtgccgacttcacgttctctgggcggcctacccatgtcttcaaggcagtgttatggagggctctggcatacgagaacgacacgtgccacgggtttggagattggatcatggcattcaagttgagggtagcttcaacctcagactgtccaccagacaaaaacataattccagggac

SEQ ID NO: 72867 - DNA, 185 bp, Glycine max
  Clone ID: jC-gmfl02220057b10d1
aaggttataatttagtggctcaatattatccacgagaactatgaccgtatataggtacagtacatgtacaagaaagaatgctgactgacaaagggatgcttactcaagcggacttcatcgttagcacagtgcactcctttggcatctaccgttgatacacttgatcatgagccactcctctgatg

SEQ ID NO: 72868 - DNA, 470 bp, Glycine max
  Clone ID: jC-gmfl02220057c01d1
aaaaatataagatacaagtaatataaaaatagactcagcacaattcaatatgtctaaagaaaaagaatggctgaggctttagaaacaagtttattatcccttattttctacaagttgagatactgaatagaagaaaaaatgatcaaggagccaaccggtcaaccttccacagccgttgtccattgatctcatggggagtatattgcaacctgtcatgcaagcgagatttctgcccttgccaaaactggaaaagatgtggtgtaagcctatatccaccccagttcttacgtttagggattaaacttgcatcagagtattattcttccagctctttgaactcctgataaagaacatgcgtacccggcactacagtactctgcttgctgactattgctccaatctgactacctctagggcgggtatggaaatactgctctgattcctcatcgtagactttctgaacaggccct

SEQ ID NO: 72869 - DNA, 365 bp, Glycine max
  Clone ID: jC-gmfl02220057c02d1
gatagtcgtattttatcaaaaaaatatcaagacaacatcgaaacagagaaatgttaaacagtttctgtcacatccataaacacagttgataaaactagtctgacttagagtctccataactccggggtttaacaagatcatacaaaaatatataacttttgcataaatgaaaacagcaaactaccagcaattgaggctagttctttggcccaatatccttcagtgcacaaatctgctcctaacccattgcagacataactgacacaacaaggtccttaccctcagcagacccatcctttatctgagtaagcagactctcatctgtaggtaacttcaggtcatccttgggtgttcccattttcagt

SEQ ID NO: 72870 - DNA, 260 bp, Glycine max
  Clone ID: jC-gmfl02220057c04d1
tgtcgggcgtgttcgcccttttttttttttttttggcaaatgcattctttattaaaagaaactaatgctgaatgatgttctatttggctttacatacaatcccatcacatgaatcgaagtcatagtttcacattattgtgactgataggcctaagatacattcctaaaataaaatagcagcagcgattatgcgaattacttttttttgttacctgtggttggatgaaacttaagagcagtggatgatcatcattatcaca

SEQ ID NO: 72871 - DNA, 547 bp, Glycine max
  unsure (1)..(547): unsure at all n locations
  Clone ID: jC-gmfl02220057c06d1
aaacccatgatcattgaatctccacgtcataattgttaataatggatttaattcatacaaaaccttaaagttaataataataaaatgcaaccgataagcattagaaactaatagcagggcaaaaagattcattaaagactgcagggtggagaaaggggtggcagaagaaagattgagggggaaccaaagtatcatagacaaaatcatgcagcaggctgctcctcagtggcaggagcttctttctggggttcttctgtgaggccattagaggtggcatcctttggctgtgaatcaggtgcaccttctgctgcagatccagttgcttttgatgctgctttctcttttccatccttattatctttggcgtctttagcaggagccggtggtggaggaatcatgtgaggtggtggtgtatgcttcagctttaacagtattngccggaacctagacagatccgtgggttagccaagctttgggcctcggatgaccgtaattgatggcttcttgtactgatccattttgactcttttcttttcaatggtgggaa

SEQ ID NO: 72872 - DNA, 435 bp, Glycine max
  Clone ID: jC-gmfl02220057c08d1
agcaattggatatcatgctttgatcttaaacatagtaaatattccgtacaaaagtaacattttaaccaactggaaatgaaacaaaaaaaataaaccaaaggttgatctatgcaatctatgggagcttcctaaatcatcagccatccctgccgtcatgggacatagaagatccaaaatttggatgacggttcattttacagttccgttacaggatttgtagcatggttgaagtcccttaaacgcaaaacacccaaatcttcataatacctagccgtagcagttctacagccatctagagccatgggataacagccagatccagcttcatcagttgaagagcaaagcagggaaattgattgacaccagggccaacttcccatacattcacataagcattgtaaaggccggcagtaactattttgcatggatccatgt

SEQ ID NO: 72873 - DNA, 454 bp, Glycine max
  Clone ID: jC-gmfl02220057c11d1
cctatcaacgcaatctgtgtaaaaagcaacagttgttgctttcccttcctattttatatatatatctgcatgtgccacttaactcctttcaacaaattagtccatttttaaatatcagacaactaatattatggacacgtaccgcagtaccaattgttcaaacatagttacctagaaaccaacatggggacatagtttatacattgacaaaagttgctgtagtttgtgactttgttacattattatcacaatattttctctcaagtgaatctaacatgcgattcatggaactcgatgaattcggtatggaaaacgcaagattacgaaaagcttaatgggatccatgttcactggagctacctgtagacaaacttctcaacttctgccagaactgccttttcttcccaataattagaggccctgaacgagaatactgcctgaacgactcaaattc

SEQ ID NO: 72874 - DNA, 318 bp, Glycine max
  Clone ID: jC-gmfl02220057c12a1
ttgaggtctctgttacagttcagtctcttgttaaagcataacggtcttagaagagtgtgtactgcatgatgtgaggctatcctcagttgggccatgccgggccaccaggtcggaggtgttccacagaccgggtggcttggacttggccatgaagcttcactatcttaaggtggtgtacttccttgctagtgaggctgcacaagacctaaccattatgaaaatttacgaggccatgttcactttgcttaaccattacttcatcacatgtggccgcttccggcgatcagatttcggtaggcccttaatcaagtgcaatga

SEQ ID NO: 72875 - DNA, 409 bp, Glycine max
  Clone ID: jC-gmfl02220057d08d1
gctgtaatcaattgtttattcaaatgtacaacgcaagaaaaagaaaaagaaatccatgaattgtaaattaatttatttaattaattatttctttacttttccaactttttttaatagcccacgattttcaggcggctaatataatataaccactacgcaacaacgcgggactacagaaaaagggtccacccgcgttatcctgtgatgccgccgcaccggatcgcgctggtcgccggaatattccttcgccggaaaactgccgagcactccggcaactcgccgagatcggcgaatagcgactcgtcctcttctctcatcggcaccggcacgtcatctacctcgccgcagatcgggctctctaggacgccggtggacgctacgtcatcgaaccacccgaagtggtggtggt

SEQ ID NO: 72876 - DNA, 457 bp, Glycine max
  Clone ID: jC-gmfl02220057d09d1
gtaaaaagcaagtaacattaagttggattcggatacacaagataattcacattatctgaagtacttcaccaaacacaaatctaaaaactctcaaaagtcatttcgttctttgacgctcactttccggggacgaagttggtggcataggcccaggcgttgttgttgacagggtcagcaaggtgatcggcgaggttctgcaatggaccctttccggtgacaatggcctgaacaaagaagccatacatagagaacatggccaatcgtgcgttcttgagttccttcaccttaagctcagcaaaaggccttgggtcatcagcaaggcccaatgggtcgaagctgccacctgcgtagatcgtgtcagtgacctcaccgagggggccaccagcaatacggtaaccttcaacggcacccattaggataacttgtgtggaccagatggcgaggatgctctgggcgt

SEQ ID NO: 72877 - DNA, 487 bp, Glycine max
  Clone ID: jC-gmfl02220057d10d1
agagaaaagggggttataaatttatattatacaataaaaaaaattcagcatcctttggtcaacgtttctccaagtcttccctgatctagaagttggaactcccgtttgaatctctggattaacctgaactttgttctttgcaacatatgtcatcctatccctaataatattgtgtaatattggatagtagaagcatttcagatgaataaaatagttaaataagtaaatcaactttgtgagaataaccaagaagcattgccatggcagccctagctcatgctaccatctgctcctgctctatatacagctgctccatccatggtggaagcatctctttactgagatcatattggtgcttctcagcaccaaatatctcagacctctcggagggaacatctttaaccaatgaatgaacccatgagacatacggctcagcaccaaattcaggctgtgctatgggggatgcagttaccccactgattctgaa

SEQ ID NO: 72878 - DNA, 300 bp, Glycine max
  Clone ID: jC-gmfl02220057d11d1
aagtagaaaaggtacaagtaataatcatcattaaaaatagtgtccaagactatataaaccacaaacacaatttagacaaattaatgttggatccttgggttactgtagcatgtgtggcaagatgatcttagtaggagtaacctttgacgaacattccccgagtggcttcctcagattcaccctaggcagtgtactttccaagctgagcgaatgagttggacttggcacggaaaaggagtgcattttgagcagcctttaagttctcaaggagtccaccccatgttttcaagcaagtgtttt

SEQ ID NO: 72879 - DNA, 324 bp, Glycine max
  Clone ID: jC-gmfl02220057d12d1
aacacaggataaataacattttattacaaagtcctccatagcatacaataacaaagttacatggaaattcattaactaccactaacaataccgttatagccgggtcaaaatgctgaatttaaacaaaactaaagagatgaagcacatgtacatttatttttatttttatgaaacttagattgaaacaatacaacttaactatatgttgatgctttgccaagtgattctgcaatcttactggcaatacagtaagatgtagactgaatggttaccatggggttgacaccaactgcactaggcaaaacactcccatcacacacatac

SEQ ID NO: 72880 - DNA, 268 bp, Glycine max
  Clone ID: jC-gmfl02220057e01d1
aaaaccaattagaatgacgtttagattacaaagcaaaaaagaaatggaacaaaagcgaagggacaagcaagaaggaagcaagagctgatggacgagatcacgagaagaaggacccgcgagaatgcaggttgaacatatcaggcggtggggtcaagagcgagaccgccctagacccgggagttaccattgagggtagccgaagaccggatgaccaaagcgctgggccctggaagaagatagagtgtgctgtagaatgcaaccggcgagc

SEQ ID NO: 72881 - DNA, 358 bp, Glycine max
  unsure (1)..(358): unsure at all n locations
  Clone ID: jC-gmfl02220057e03d1
accatacccgctgctgtagcattatacacattattattactcttgctcccgtcaagataaatctgaccccttcccctgttcccacctacgtatataggatattttaagaaatgaacatctctcttagtagtgggatccggggaaagaataggaaaggttatttctttatatttttgaccaggaacagggcctaccacaagaatatttttttttgtacgacgatagttttgaaaagacagattgcctatcttctcgttaatctcaggcgaaatacgatcggtgggtgccaattcaaaacctttcggtaaaatangaacagtccccacattcaaagctcccttttaccattagcaagaac

SEQ ID NO: 72882 - DNA, 481 bp, Glycine max
  Clone ID: jC-gmfl02220057e06d1
gccacgaacaaaaaagttggctttttctaaataaaacctttttaacttttcaagtatatatacataaaatttaaatgttatcactcgtacaaaatcacttggctgataataagactaacctgtagggtccaaaatctaatattgtttctcctcttcactgccatcatctccatttgtcttatccccatccctgatttctccatcactcaactgcatatcagcagagttttctcttgctggacttgactgcctttgtattaatggttcgtcatcatcagattctgataatgcttgccttcgccgggctatgcttgaggaaggtgcaggcgcttcctcatctgcatcggaatcttcaagcccagctgctgcaagaagaccctgagcattttcctcagcatcatcattcatctgagtttggggctcctctctgtagtttatgtcagcttcttcatcctccatttcctgatcatccatcatatca

SEQ ID NO: 72883 - DNA, 330 bp, Glycine max
  Clone ID: jC-gmfl02220057e08d1
aacccaataaacaaagggggggcctttttaaaacgtttttggccccctttaattccaaaagggagccaatacctacattggaaatattccccaaacctttaggggcattaaattttccccccaaaagaaaaaatggccccagaaaaaaaaaaaaaaaaaactattgtatgaaattagaacactgttatataacccccaaaagttttttttataagtatggcgctttttcttacctatctaaacgtttttaccaaatgagatcttaaccgggagaaatttgatcaaaggacaaaacctttggggatttcgcagggaaggaaaaagggaaag

SEQ ID NO: 72884 - DNA, 303 bp, Glycine max
  Clone ID: jC-gmfl02220057e12d1
atagagaaatctacacgaatatcttttattaaagcatatactcactaaagaatcacattgtaaatttaagaattataacagataaaaatcgctgtaaggctactaatttaatgtgataatttgaacgtcgaccaaagttcaaacttgcaagaaatttagaaaatcttgctaatgatcggacgtgctttacattgggcatccaatggaatggccttgggcactatagttccccccccttcgggcatatctactgtttcctcaccaatccttttccactcaaaacattgaatcaacgaaccttaa

SEQ ID NO: 72885 - DNA, 400 bp, Glycine max
  Clone ID: jC-gmfl02220057f02d1
acaagggcaaacagttacctgaatttattatttctcgcagaatgaaagccccgatagacagtcaagtcaagctttatgatacattagaccccaaaatcccaacaacattatttaggtgagcagtttttatatcggactttcacatgaaagggtgataaaggcagataaaagcatattctttcaacccacccgaccatgggggtaaagcccagggcaatggtatgacttaaacggggacccatttcagaattttttttaaaaacactggagatttttggaattggttcaaaatccaaaacccttgttatgggaaaacccccctttttggggaaccagcccccacccccaaaggggggggttcgcttgggctgactggataaacttctttttggaccctttg

SEQ ID NO: 72886 - DNA, 233 bp, Glycine max
  Clone ID: jC-gmfl02220057f04d1
ggcggccgccctttttttttttttttcaacaattttgctgttttatttgaggaatcgcacaatgcaccatactaacgcaggacgatcgcaggaacctaaaccggataacgagcaatgcaagcaggcccgggcccaccaaccggggccatggcgcttacgcagggctgtcacacagcactgacccatctaaaggcacttccacaatctatctggcacaccatgtcaccctcctt

SEQ ID NO: 72887 - DNA, 341 bp, Glycine max
  Clone ID: jC-gmfl02220057f05d1
aagggaaggatgggccgtacatatctggtatgaaaggcccaaaaacagatgggacccctatctgtacatgtgccatatctggcaaactaagggaagattttatgatctacccagggacaagttagccttgaaagggttttgggggcaaaaagattttaaaatacaatacccccaaacaaacacacaaattttttaataaccttttttttttagtttgcaggaacaatacccggctgaataaaaaggtgttcaaacaaagatgagaggcgagcaacttttgcttttaccttttaaaaacattcagggtaatgggggccggggataaaacggggggcttttta

SEQ ID NO: 72888 - DNA, 390 bp, Glycine max
  Clone ID: jC-gmfl02220057f06d1
ggaggcatattgcattgaaaaggggaaaaaagggaaagggacatatatacctggatcactctactttgggagatggataaaaatcatttacaattcagtagactaaaaatttaaatagaaataattatctaaactgaatcaagtgcaggaatcaccaaactcaataaacaagaacttcaaattttgagaacaaaaaatgtcactcagacctccataatctggttctatatggacaaacttgctgtcaataactacactacactgtacaacattttcctgatcaagtaaaagtgagcacttctcatataaaccttcctttggcgctagattcaataagcaggatctaggagcagacactttatactgcccaatactgaaactttcttgatc

SEQ ID NO: 72889 - DNA, 404 bp, Glycine max
  Clone ID: jC-gmfl02220057f09d1
ggagggaatgtgcatgttactagcatttctctttatccatatacaatacaataaccctgctgctgatgaatttgatgaccataacacagtgacaaataagatcataagatgcaatgatttttgatatacaggacaataaaagaagcaatgcattaaagctgaaagtagagtgtatgttcatcttcaaaggagtgtaaaagagggtaatatatattttacagaatttccgaaagagcagaaaaaaggaagtaaagacaagaatgacttgtgactcaaatcctggaagggatcataggaatagtgtcctgtaagtatgcactggcagcagcaactccacttccaagctttacaggatagcccacatctttcagtatcatcttcacaccagctagacatcccaacag

SEQ ID NO: 72890 - DNA, 404 bp, Glycine max
  Clone ID: jC-gmfl02220057f10d1
ggagggattgtgcatgttactagcatttctctttatccatatacaatacaataaccctgctgctgatgaatttgatgaccataacacagtgacaaataagatcataagatgcaatgatttttgatatacaggacaataaatgaagcaatgcattaaagctgaaagtagagtgtatgttcatcttcaaaggagtgttaaagagggtaatatatattgtacagaatttgcgaaagagcctaatataggaagttaagacgagaatgacttgtgactccatcctgtaagggatcataggaatagtgtcctgtaagtatgcactggcagcagcaactgcactttcaagctaacaggatagcccacatcttttagaatcatctccacaccagcttgacttcccaacagtt

SEQ ID NO: 72891 - DNA, 452 bp, Glycine max
  Clone ID: jC-gmfl02220057g02d1
aacaaaaaatacaatcttcattctattagcttaagcatcggcatctacaatcatacatactgctgctagtcaatctcgcattcagtatcagatatcttggtatatatgtagtaccattttcaatacaactgattatgcaaattactcggggacaaattgtatgggaataaaaatggaaaagcctaccaatttggagagatgcctattgcctatatattaagatataatatgtcacaatgtcatgcagatagatccgattatgcaaaagaaatattcgcacgtgattctacccaacagttgcatcactatcttacaagttcccaggcctctttagacatgtcataaattacaacacagccattctcaaacatgatcgaacgtgttcgggcatattcatcacatcgctcaatagttccaaacctgtcatttccaagtacgtgtatcctaataac

SEQ ID NO: 72892 - DNA, 152 bp, Glycine max
  Clone ID: jC-gmfl02220057g03d1
agcattagaatgcaaacacagtacatacccatggacactgacacactcagatatgactgcacatgtaacaaaaaatcaatatatatactacgatagcaatcaatttatcggggcctgtaaacgtgaaggggctagaaagggcgatcatcata

SEQ ID NO: 72893 - DNA, 473 bp, Glycine max
  Clone ID: jC-gmfl02220057g06d1
aaggtaaatttgtcacatttattcattatcatatatgcatcacctagtatcagctggtttattcttaattaagagaaaactaaaatacaatatcttacatgctatttttgccggacttgaattagaataatttcacctcgataactttcaaaatcctttaatgcaaattaccgaaataaaactctagttctagttcaaacaacacctagctataataattaggggttgataccatagagctttcgaatcccgtctatatcatcttgcgctagattcaccttcctagttcgaggtggtatagaaggatacatgatggctcttaggtccgacgagtggcctaatccgagcaagtgcccgatctcgtgcactgccacagattcaaggtcaaacgcacttgtcaccggcgatttggtgacatcgccagacgccacccaatattcgtcggcgtcaaagtggcacctcccatcagtggg

SEQ ID NO: 72894 - DNA, 234 bp, Glycine max
  Clone ID: jC-gmfl02220057g08a1
gcaagcttggcacttgccgagaatggatacccacctgtacactcttgagtacatgaactgatggtcatccctacaagctgtgtgatcagatatctgatgcagtgcttgatgcctgactggagcaaagaccctgaaagcaaggttgcctgtgagacatgcaccaagaccaacttggtcatggtatttggagagatcaccacaaaaggcaatatagactatgagaagattgagcgc

SEQ ID NO: 72895 - DNA, 517 bp, Glycine max
  Clone ID: jC-gmfl02220057g08d1
tgactgctcggtggccgcccttttttttttttttttcatccaaaagcatttttgcagattcttttcctttccttcaacagaaaaatagaggatgtatttattacaagtagccatatattaacaaattccttaagtaacatagtatctcttcatgaatgggtccatgctgaaataatcatggaagaacatctgaagaggtatagaagagtctgtcaaatcttcaggaacaagtttcaatgagctttttagccttgaaaggacccaacattggatggaaatatacaaatgtaatcaacatgtgtagacatctcaaaggaaaggtatcagggcagaactaagacccttgaaacaagaaatctgctgaccacacagttcttcatttcctttttcctgaaccaagtgacaggagttcaaagctcctgagtgtatcatcacgaccacctcttgttgctgaagcccgtgataaagatgttttggattcaaaaccaggttgaagtctctgagttggtgataagtc

SEQ ID NO: 72896 - DNA, 505 bp, Glycine max
  unsure (1)..(505): unsure at all n locations
  Clone ID: jC-gmfl02220057g09d1
acatatataactaaagaatcttgttttgttctattatttgttattttataatattctaatgaatctttattttcctttttattattagttattagaatattttttattattagaaagaataaatagaattggcaaaaatgaaaaaaaaattcaatgaaatcaaaattatcgcgggcgaatatttactcttttattatcaatcaaattcagatgtaatgtagggcacaactcctaaaaaaaggattgctttttggtttcttccgccatcccacctaatgaatcattaagattcgtttttaataaaatcttaagtatttgcaggtttcgtcgttcccatcacttctcgattaatggttaggtctgaattcgacaatggagcctttctcatatcttaaaattaataatctttttttttttcgaatattgatttgatttttcgtgaatcaatattctcagtttttattgattcagagctcttaatttggttacgttatanattaattca

SEQ ID NO: 72897 - DNA, 385 bp, Glycine max
  Clone ID: jC-gmfl02220057g11d1
atctaacacatattcataaacaaaataagctacaatgaggatgcagcaagttacaaagaaaattgaacatcacgagacaaaatcaagaggagaggaaagcaaaacagacctcaaggatccgcgtcaaatatcctacattctatacattttttgtgatttttaggtacaagaatcctccaccttaccacttcacgtggtggcatcatcttcatttcaaatcactagcctttgtcattcttccacttattatctccattgattgtttgcttcttcatttcgtagtcttccatttctatggaagcataattaggctatgatatcatctcagtttctattttcatcacagcacccacaaataaatgatgggggcaacaagttactcagc

SEQ ID NO: 72898 - DNA, 242 bp, Glycine max
  Clone ID: jC-gmfl02220057g12d1
gcaattgaaattcaaccttctatgcaaatattatcacaaccttcaaaagaggatcaaacgagtcaaaattaagaagttgaattcaacaagcattgtgtaaagcacctatcacaaatcagccagttcaaagtcaaatttgaagccagatgctcttttgaatgataagctccaatctttaaggggtctcgcgaagatcaccatgggtctctaggacgaccatttgcgcttacaggaagaatgac

SEQ ID NO: 72899 - DNA, 484 bp, Glycine max
  Clone ID: jC-gmfl02220057h01d1
atccagaaacatttattatttattgctttctaccatctctgcatctctaattgctgtaaaaacactggctctttggaaaactcagaggatgcaattcctactgattgcaaagaaattgacgcagtaattttgataataaaaaccaatctgttattgtacacccatattattgccacatttaagactagcccgtctttatatccttaatgctctcttattgccaaaatcacaatatgtaatcaagttcaagccgcaactttcttggatgtgactgaattgacaatggtagcaaactcaggaccctttaatgaagcacctccaacgagaaatccatcaatatcttcttgctttgctagctcagcactgttccctccatttacagaccctccataaataattcgcgttttagatgcaacttcatcagggacattcttttttagccaatctcgaacagctacatgtacttcctgagcttgctggggag

SEQ ID NO: 72900 - DNA, 323 bp, Glycine max
  Clone ID: jC-gmfl02220057h02d1
attcttatcatgctttactttgacgtttatggaaaacaaagcgaactcgaatccagcaagcgaacaaacgagtgattacaccgggggcatatcctgcgggagaagacgattttcagaacaacgggcaatatcctgtgggacacactaagctggcatacgaggattaccagcaaggtcaaacacttgagaaattcccaagagattatcaaaaactgaaaactgtttgggatcggcaatacagaaactcatcagccgtggagtgagatttggccactagaactcccctgctgggaccattaatgcgaccacataccccgattggg

SEQ ID NO: 72901 - DNA, 363 bp, Glycine max
  Clone ID: jC-gmfl02220057h05a1
tcgaggcaccactaccacctttccgacttcagccgttgcaaccaccagcaaatggctgggcttcgtggcggccgtgtggattcaatgcatcttcggcaacaactacactttctcaaactactccgacgccctcaaatccctcatgcacctcactcagctacaactcaacaacctgtccgtcggtaaagacgttggcaaagcctttgggcttctcgcgggcctggccttctaccgcttacccacttgggccattctcctcataggctccgtcgaaggcctaattggctacggaacccaatggctcgtagctcgccaaagaattcaacccctcccctactggcatatgtgtgcgtttctgtgcat

SEQ ID NO: 72902 - DNA, 379 bp, Glycine max
  Clone ID: jC-gmfl02220057h08a1
tggaggcgaaatccgttcccctatctgcttttggagttgttgctaaagagtgatggactcaccgtccagcaatcaccacgcggtcgacggagacgccaacgacgtcgatagatccttttcccaccgcgacgacgatgaagacggcaagccccaaccgatcaccggggactgcgcctgtcctggaaagatattcatagggggcttagcgagagaaacgacgattgcgcaattcatgaagcactttggtacatacggctagataacggattgcgtcgtcatgaaagaccggaagaccggtcagccgcgtggcttcggcttcataacttacgctgatccctgcgaggctgatacagtgattgaggacactcacattatcaat

SEQ ID NO: 72903 - DNA, 425 bp, Glycine max
  Clone ID: jC-gmfl02220058a02a1
tggtcgtgcggatactgcttcagccggcttagcttaagcttactgatcagcttgacacgatgcacatctataaccagatgcttactcgagcaatggcgtacacaagttataccgatgacaaatagctgccagagacagactacagatcgctggaagggatagatcggcttgtagaggcacgcgtgcacgacctgagttgtctgattcattaggaagcactgacttggaagctttagagattgaagagggctctgctatgagtcacgggtctgaaaccccatgttcaagggccagcacttctgattccgagagtcatggatcttttgctggtgcacctaataccaataagcaatggcggcgtttctttaaactgctcaggacaggatcacaaaagcctttccaagcgtttcacccgcttaaaaatg

SEQ ID NO: 72904 - DNA, 339 bp, Glycine max
  Clone ID: jC-gmfl02220058a02d1
ggagatcattctttgatcttagacagggagatttcacttgagaaaaattcctgaaaaaaagaaacattctaaccaactgaaaacaaaaacaccgagcagacaatggagggagctacctacattatcagacatgacggtcatcaccggacatagaaagccaaaaaaaagaaacagggcggtggaaaaaatcggaacaggattagtggcatcacggccgcagtccctaaagcacacaacaggggaatcttcagaagggctagttgaagtaaggctacacgcacctacaaccatggcatcacagccagaaccagcaccatcagctaaagagcagagcaagga

SEQ ID NO: 72905 - DNA, 449 bp, Glycine max
  Clone ID: jC-gmfl02220058b01d1
agaaagtatcatgcttgattactgattgatggacagtctaaataacaatgtaaaaccatcgtagttcctctgtacatgaaaatagacggatcataacaatcatgcccaaatcacttctaaaaattcatccattcaggattacacgagaaggacacaggcttatccatgtcattggatacaaacttagtagccacgaattgtattgatgatggtgttgtgccacgggtcagagaggtgctgcaataggttctcaaatggtcctttgcctgtcacgttgtgttgaactatgaatcccaagaatgccaacatagccaatctcccattggcaagttccttctccttggcctccaaagtaggtgcaaagttcaaggggttaaacacactaccagggtatccacactcatgttggggcaagctgtattgcttgaagatggggtcttggttgacag

SEQ ID NO: 72906 - DNA, 404 bp, Glycine max
  Clone ID: jC-gmfl02220058b02d1
attacgaggtttctttttttaacaaattccttaagtaacatagtatctcttcatgaatgggtccatgctgaaataatcatggaagaacatctgaagaggtatagaagagtctgtcaaatcttcaggaacaagtttcaatgagctttttagccttgaaaggacccaacattggatggaaatatacaaatgtaatcaacatgtgtagacatctcaaaggaaaggtatcagggcagaactaagacccttgaaacaagaaatctgctgaccacacagttcttcatttcctttttcctgaaccaagtgacaggagttcaaagctcctgagtgtatcatcacgaccacctcttgttgctgaagcccgtgataaagatgttccggattcaaaaccaggttgaagtctctga

SEQ ID NO: 72907 - DNA, 494 bp, Glycine max
  Clone ID: jC-gmfl02220058c01d1
aatggcggaacaatacaacattttttttacacagcaaagctatggtcaaacaggaagtttggtatcttttgctttccacgagaatttgatatcaaatattttaatgaacggcgtgtaaccaaaacagagaaaacagagcactctttttaataaacaaacacagctttagttcaatgaaaaacttttccagactcttgatgatgatggatggatgttgcgggtgtcgtgctggtatactttcttttactaatcaacaagtttgctgcctttgacatccactacaaacctgtatctcacatcgttcttctccaacctttcaaaggctttgttaatgtaatccatgtttaccacttcaatcatcgaactcagacccttctctttccagaactccaacatctcctctgtctccttcatgctcccaataaagcttcccgtgattgacctcctccctagcatgaccatggggctaacaaattgaagaggggtgttgatga

SEQ ID NO: 72908 - DNA, 396 bp, Glycine max
  Clone ID: jC-gmfl02220058c02d1
ggaaaggatccataggatttgccccttaggacattcattcccagttctatattgatcttagaaattttgcttcaacgccatgaaattattggaaaaaagagtctccctttcctttctcacctttctggtatgcataatcccctataatgactaaaaaatttaacttattctatgagaacatagtatgcctaatcagttgtccaaggatcgctctctgcaatgacttcagaaggttcataaacttctggctctgaactttcttcacttgtgcttgaatcagcagcttcaacagaagcatctgcctactatgcttctgatctaccccatcttcctcccaaggccaatgccatcatttcgtaaatcttatttcctaactcagcagggctgtcaggagaa

SEQ ID NO: 72909 - DNA, 310 bp, Glycine max
  Clone ID: jC-gmfl02220058d01d1
aaaacccatacaaaaaaacgtttaatgaaatacaaacatttataacaaggggaaaccaaaatttccccaggggaaaatttaacccttaaaaacatcttaaaaaacaaccagagaacggaatttattattgctaaaagtaaaggcaagcgttttgaaccattatgcccaaaacacccaaaaacaggattaaggggggccagttttacaagcttttttcaaaggaaggcgttctaaggggtgataaaagcaaatccgttccctacgggcccttaggggtaaagccccatcaaaaggtttgggactaaaacgg

SEQ ID NO: 72910 - DNA, 379 bp, Glycine max
  Clone ID: jC-gmfl02220058d08a1
tccacagcctacgtatgctgggaatgcggatagagatcacggaccgctttccgatccattttctgagaaacaccctcatcaccctcggctccggcgcccgacacgatattcttcggttaccctacagaagactacatgctctgtacagcacctggtaatgcctactataacgatgagggctactatgtggtccgacgtaggagccggatactatggctactggaaatacaagcaccaaacggaggtcggccatgcatatgaactacagaagaaagggggagcgaaagaggaaaacgttgaagtctatatgtgtggcgacattgcggtcgatgaagaggacccacggtctggattcgttgttaacagttcacactgcaaa

SEQ ID NO: 72911 - DNA, 516 bp, Glycine max
  Clone ID: jC-gmfl02220060a09d1
aaatcaaacttagcttactgcaacaattcctattaaaaaattttacaattgtgatttttacgagtctttaaacaaagaaaacatatctaacttaacctacccaacgtagcaaaattatacaggttacagggggtaaacactacatcaaaactgcagaaacatggctgcaacactgaacgcttcaaataataccaaaaatacaagtaaatctcacaaagaactaaacagagaggcaacatctaacttaacatatacatgataagcaacaaacacttgatcaagcagctggtacctggtcccttccccggccacggcctcggcctcttccccttccacggccacggccacgtggtggaggtggagcatcatattcaccatagtcatagtaaccaactggctgcacaccatagcctcgtcctcgtcctcgtccccgaaaagcatgcccccttgcacgaccacgccctcttcaccatagccacgttcaccatcccaaccatcaccatattccatacccca

SEQ ID NO: 72912 - DNA, 599 bp, Glycine max
  Clone ID: jC-gmfl02220060a11d1
gagccttaaagtgacctagatatcattaacattctcaaaacaagacgaaaagtaaatcctatcaaccacgttatttggtatggaatagaagagtaaaccattcagattttgactgacaaaaggaccttcatcctaatctaaagacggattaacttaggtcttcattacatttgttgttcttgttcttggataagcaccaaagtgtgttctgcttgaaggttgtccaaattccttaaactgtataatgctgttggattgtatcaatgtcaagtcccttcagcttcactactgattcaacatgtcctttcagagtatgaagctccctgagccttgcaacctcggcacgtctcttagcttgctcagcaatctctgaaagctccctgtaactgttcttgtcattgaaaaggttggttgtttcaggtggctgaagaccatgaagagtcctctgagcagttgcccactgtgcttctctctcttctttgccatagtctttctttgtagtgaaggcagtcttgttctccaaaagattatcccaagccttcccacttcagacgtatcggattgcaaattgagatatcaagagggattatgtgactaac

SEQ ID NO: 72913 - DNA, 544 bp, Glycine max
  unsure (1)..(544): unsure at all n locations
  Clone ID: jC-gmfl02220060b10d1
gcaagatagtaagactgctaaatacaactataatatgagaatctacatagaaacagagtgaaaatgtaaacttcaagctagcactattacaaaagggccccaaaaaataatacaaatctccttgcctttgtagagtcctcaatcaaaattacatatggttcttctctctttagaattaagatttctggcacgagatgaaccactgagtaaaaaaaatgccacctcttagaactcaaagcaaggatatcatcgaattgctgaagatttctcgtgatgaacaaagcacatttagttccatgaggacatttagagatgtttctgatgcctctttatagaatcaatccagatattatgcctttgaccgtctaaattcaaaccatatctcatagtgattgaatagtaagctatcatgagtatgcttcccaagatactcaagccccaaacttgcaagcctctttgtgcattcctctccttccaaccttgaacagaactttatattatgtgatacanagattcgtccttcataaggttccatttagatgct

SEQ ID NO: 72914 - DNA, 499 bp, Glycine max
  Clone ID: jC-gmfl02220060b12d1
cacaaggaataaaaaattatttgcttagtaatcaattatttagacatcaaaattcaaaacaaataatttagaacttctagtgcagtaaaccatcttaagcaccacgaagtgccttaaaaaactattaaaatacatcaaggcttccgttccagacatgaactaccagcagagacataagaaatccttagcagctaattaaacataaccagataccgctatttagttgctatatataatataatccaactcttcacttgaaacattaaggtgaatcctactacagccatatgttgaccacctcattctttgccatctgcagctcgaagtgagcctagttgaactggggcttgagtctgcaccactttggaagacccatacacagatatatcaataccttgagccttctccttctcgatctgctccttaatccagaagtatgtgattctcaacccatccttcaacctcatagttggagcccaaccaagtttttcttttatca

SEQ ID NO: 72915 - DNA, 451 bp, Glycine max
  Clone ID: jC-gmfl02220060c09d1
gtcagtggactcatcaggatcctcatcagcaatcctacggatcatatcaagggctttcctaataagtttcttcttgattgtctttagactactatgttgctgaagcatttctcgcgatacattaagtggcaatgtgtcagaatcaacaagacccagcaaaaagtttaggtacttaggcaacagttcattaaattcatctgaaatgaacacacgtctaacatacaacttcaggttggatttgtttgcgttataatagctctcgtataaatcttgaggtgccttaggtggtacaaacaggactgccttgaactcgacatcgccctcagcagtgaaatgactccatgctaaaggtttctcatcactgaaatccttggcaagagagtggtagaacttggtgtattcttcttctgtaaccttctttggattcctcagccatatagctttcacatca

SEQ ID NO: 72916 - DNA, 527 bp, Glycine max
  Clone ID: jC-gmfl02220060c10d1
aactagaaccaagaaaatttcaattggttatcaaacacagctttctttcatcccctttaacaaatttctcgatatgattttgttacacagattcctcgtaaggtgaggattaccacaactagaacagttctatgtttcccagcctaataatcttaaaatgggtatgtacttcaccaccaacactcacttccaaagattgagatacataatttaccagtccaacaaacccatgttgactcaagcgaacacgcatagggacccaagtaaaaactagtacatcactaaagcatcggacacataatactgctaaatacaatccctcatttgtggcgtccaatctttgctaattcgaagcagggacaggaaaccgacctcgtcctattgcgaagccacgtgttccatctggcattcttggtccagggggtggcttcgatgcttcggcagcatgagttgatggtgtacttccatggcccattccatttccagcacgatatttatggtttcttgatcttccttgatttctatac

SEQ ID NO: 72917 - DNA, 474 bp, Glycine max
  Clone ID: jC-gmfl02220060d09d1
gtgagatgataatggttttttattcttttgcacgagaccgtgcatagcaagctatgtcacagacatagccttaaaactaaaaacattaaagcagcacctaaataacagctgcaaccaacgagttcaacatacactggacataacaacagagaattcaactaatattggacataacagacagactcagaaaccaccacgaaggcggaggacaagatgcagggtggattccttctgaatattgtaatccgccaaggtacgaccatcttccaattgcttcccagcaaaaataagcctctgctgatctggtggaataccctccttgtcctgaatctttgctttcacattatcaatggtatcagagctttccacctccaaggttacggtcttccctgtcagagtcttcacaaatatttgcataccaccacgaagcctcaacaccaaatgcagagtggattccttctggatattataatc

SEQ ID NO: 72918 - DNA, 515 bp, Glycine max
  unsure (1)..(515): unsure at all n locations
  Clone ID: jC-gmfl02220060d10d1
attaaaattagaaaaatcttattatgagtcatttcaaaaaaagacagactccatcttcaactgcaaaaacacaattccagaaatatctagtctcaaccaagaaatccccacaatgggtttgaccttggaacacttattacagaagtcaagtaagattaaaaaaatgacaccaacaaatttcaaaagaatccaacgatattatcttaatatcgcgccactgttgaatatattacacagattgctctcctgtaattaaccttccagtgctgaagctccagagataatctctatcaattcagtggtgattgatgcttgacgagttctgttataggtgagggtgagacgatcaagcatatccccagcattcctgctagagctgtccattgcagacattcttgctccctgctcactacaagcattctccaacacagcattgtacatgacacangaaaactggaactcagccagattctgaagaattcagcttttgtctgccaccttcaatctatatgaat

SEQ ID NO: 72919 - DNA, 511 bp, Glycine max
  unsure (1)..(511): unsure at all n locations
  Clone ID: jC-gmfl02220060d11d1
aagtatccaatcaccattacatatccttactctgtggctcaatgcgcaaacaaatcccgatttagttacaggatttacaattaattatacatcaataaggtatagcgtgcttgtaaactcttgagaagtaagaaaatacaattcagacataaaaatcatatataactattaatttcttaaaattacatccaaacatgttgtataaatgtgaaaccaatcacgataatagtgacttactatttgatggacataaaatgtaagcaataaaagcctatgagagaatggatcatctgggagactttaaagattcaatttgagatttgcctcgaggtcctctcattctaatgaagagtctgtattcatcgaaggtcattgctgggtagagtgagggccttttcggtgttacaagctcttttattggttctatgggtatgtcacttttggggttgtagaaaaacgcaagagagactctctctttatctgaatntactatcactctgtgctccacact

SEQ ID NO: 72920 - DNA, 381 bp, Glycine max
  Clone ID: jC-gmfl02220060e09d1
cccaaaagccaaaaaaaacaaattttcaaaaaacccaaaacccgggggaaaccccccccgggtgaaaaaaaccaacccccaaaccccgcccccccgaaaaattttttaacggggaaaaacaaaaaaaaaaaccggggccccccatgccccaagggcccttccctacccaaaggcaagggggggggaaattgccccccccccccccccggaaaaaccaaaaggggttttcccggatccaaccccctgcccaaaaagtccccaggggccaattttcccggggccccaaaaaccaaagattatttaaaaaaattcccccccccgggaatttcaaacccaagcccaaaaaaccatttaaaaggccgcgccaaaaaaattgccccc

SEQ ID NO: 72921 - DNA, 589 bp, Glycine max
  unsure (1)..(589): unsure at all n locations
  Clone ID: jC-gmfl02220060f10d1
aaaagcacaaattgcaaccaattgttccaggttcatagtagtaacccaaaaaagatgaaaagtgaagtacaaatgcatggtgagacacatctaatccaagctactaaaacaaggacagagcaaacaagtagaaaatactaatgagcaataccaataaataaaagcaaacaaagccgaccaacaaaaactaatgaccccaaatgaagattgtcctaatgaaaatataattctcatcaaaacttatctgccctgtcttttttctgttcaggtgtttttcaatttttttttgttatggttgattggtcctcacttggccatcatgactttgacaaactcctcatagttgatctgaccatcaccatcaacgtcagcctcgcgaatcatctcatcgacttcctcgtcggtcagcttctcaccgagattggtcatcacatggcggagctccgctgcagagatgaagccattctgatccttgtcaaacacgcggaaagcctncttcagctcctnctctgaatcagtgtctntcatcttgcgagccatgagattcaggaattctgggaaatcaatggtaccattccatcagcatcaa

SEQ ID NO: 72922 - DNA, 396 bp, Glycine max
  Clone ID: jC-gmfl02220060f11d1
aaaaaaaccttgggttttttttttttggggggaaaaaaggggcccccccgggggcttggccaagggggggatttggccccttttccccaaaaaacccggggccctttttcagggggcaaaaaaaaaaaattccaccctcaaggcccgattgcaaaattgggggggggggggccccccccaaaggggcccctgattggggggctcccccccaagggggggccaccagggggggggggggggaaaatccccgaaccctttttataacagaaaagctgggccaaagggttttaggttttttcccccccttttcccaaaacccttgggggtttttaaaaaccccccggggttttaaaaaaagggttcctaatgggggcggggccttttgggtttttcggg

SEQ ID NO: 72923 - DNA, 434 bp, Glycine max
  Clone ID: jC-gmfl02220060f12d1
ggctaatgatccaccacattatataaaaagtgaacacatgatgataaatactggaagaaagaaagaaattaaataaaaaaaaaaaacaaaacaaaagggatacaaatacacccttgacataaaagcattcttatctacaaattcaagagccccaaacccacggtatttggcttttgccccaaacccacgggtaagcagaaaagccaaaaaggaaggaactccaagaattgaactgaaacactgttattgttttgggtgacacaggacaaatgatcataatttaggtagtggagattattaattaagggttgctcctgaatgatccaagagctttgattgcagcagctctaagaatgtattgatggtagaatgcagccaccgtagctccaacaaacggtccaacccagtaaatccattggtcgtcccaggctttg

SEQ ID NO: 72924 - DNA, 540 bp, Glycine max
  unsure (1)..(540): unsure at all n locations
  Clone ID: jC-gmfl02220060g10d1
gcatacgaataaactgtttaccaatttgtttaagtgcaagtaaaacaaattttgtatgttggtatgctatcatcactgtcatatacaatccttgaaagcaaaaatagtgtaagttcatgaatagtttttacaaggtggcatctgaagttaacaaacatttcatccaaaatgtgtgagccagaagcaatgaatgatcaccaaaatgtcatgccctctgatgaagcgccactataatatacagaattggccttggcagacggattagaaagcaacttaatgcttagaaatcctggggatgaaggaacattatccagctcatgtcaactcaagctttttctttggaagatgatgatagtaaatgatttaatgttgctgcttgaatgacagcacttggacttggttctctcacacgggaagaagtggctcctctaaggccaaaattcttctccacattgcttctttnttgtcgtgaagaacangaaaggaatcttactaaccgtgtagaaccaacatgtaaaatcacaccaaccataataagta

SEQ ID NO: 72925 - DNA, 408 bp, Glycine max
  Clone ID: jC-gmfl02220060g12d1
ggaataaaaagaattgcatatgaagcttttttttccaaaatttctacaaaacatagtaacgggttacccccataaatgggaaagcccgggattctagttggaaaaggggggctgcctggaaatgtttttagggtcaagcccccaatgggtttcaccaaagatgatgccgggatttaaaaaaattctggccgggctctttttaaccaagttggggggcccaaaatctttgttgaagcccactgactggcttcctgaggggcaaattttgggggggatgccttggactatgctatatcaaaggggggagattctgcccggaatcaagaaatggttatatatccgggtagctccaagggggtcatcaatcccattttctataagggaacaaatcctgctagctggactttt

SEQ ID NO: 72926 - DNA, 399 bp, Glycine max
  Clone ID: jC-gmfl02220060h08d1
ggaacctaaatttactttcgttgcagtttattataattactacattattacataatcccctctgccaataataacactccatgttctaacagcgccatgctgacgtggcaacaatggccctatcatgccagaaaagcaccagttcgttctggcgttttgccacgtgaaatcctctgatttgagacttcgctaacaggcactctgcttgaaaaaccggaaactggcttaactggaccgggcttattccggcgccgtaaaacgccttccttcacgggggaacccggcggcacgcactcttcaccggcggcaaaatcttcggccgcagctgcatcatctcgattctcctcacccactcccctccggcttccaccgtcgacgcgtccagcgactccagcatca

SEQ ID NO: 72927 - DNA, 478 bp, Glycine max
  Clone ID: jC-gmfl02220060h09d1
aaatagaaaaaataatactcctcacacataatttgctcctgatgcacgggaacatgcactagtaaaagcatataataaaaccaccaacatcctagttctcaaactaaataattggcattctcttatggaaactaacacattttattttccatgtaatttgccaaaccacctagtgaaaccaatttttttggtctcccctagtgccacttagtacttagccgcaagctgaaacaacagcatcaggtaaatgagcaaatacaatagagaaaggagcaacccttattggctctgatgaattcacatttataggctccaaaggaggaatatcaccatctgagcttacactcagagggtttccatttagtaccatgatttggctatgtatatccccatcctgtggagttagatggtactcttctcttgctggttcacttgcaagaggtagttccatcacttttgaatgagtagacatctttct

SEQ ID NO: 72928 - DNA, 515 bp, Glycine max
  unsure (1)..(515): unsure at all n locations
  Clone ID: jC-gmfl02220060h11d1
cgtcaatatgcatgttccgaatttatgatcaatcatctaacattccttgacgaaacaaagtacaaaagagatccatgacatgtttcttcagcacgagcccaacttgaacaccatcattcccatccttgctctctgcaaacccaatggttaaggctctatccaccgatgctatctccaccttagcaggctttccccaaccaaaatcagttccataaactccaaaccggttagaccctgcaattcccatgatttcaactccgtcttttcccaaagactcatatctagaaaacgcactttccatcccatgaaaaatcccctcatctaatatcatctttattttactatgaatactctttgcaacaatagcaaaagcttcttcctttatgaagtccaatggttcagcatccaccacatgcccccacacacaattgccaaaataattatcatggattggaggctccaacctngccctgcaatccactgtgaacgcaaaagcaaatttctctttctctttt

SEQ ID NO: 72929 - DNA, 513 bp, Glycine max
  Clone ID: jC-gmfl02220060h12d1
gacagcaacactgatgacattccattaattttagtgtcatattcaagagtagcagctatgaattctttcacattgcctttaaatccaggtcccacgagcatttcttccacatcaccaagttgagatgtgataataccacgtagtgtccaagaaactgggcagagataatggaaccacatccaccatacaggtatatgagattttggaataagaaatccggatacaagattccatagagagtaaaatgcagaagaaataacagctgcaaagtgttgtgtaggtgtaatgccaacagccatcatgccgtaaaaggtgaagtacataaatgtgaggaacatgaacacaagatagaggaaaaactttccaacatccctttcaaaattgaccatgaaatatgtgattacaccaaatactattgtctgaagagcaacatatgggatctccaccagcccctgagctattgcgtatgagattggagagtacattccagcagccttctctctataaaacact

SEQ ID NO: 72930 - DNA, 402 bp, Glycine max
  Clone ID: jC-gmfl02220061a02d1
gattgaattacaaatccaaattaaggcacattgccattttttttggtacatagctcaaacaggtttacatcccatagcttttgcagcagcaataaatgaggatttaaattttcagcaatccaagccataaacccaaattgaattttgtatcaacacttagggggggccttcatgaaatcaaggaaatgggaactttatgggaggggaaataaaaataggatttggaagcttattttaaaatatatttttggggacaaaaaaattccccatgagcaaaattagtggaaaattgccccccccaattttttgatgagcccaattaaatgtcccggcctttggccccctttggaaaaacttgagggtaacgtttgcggcccgagcaatttttgaaaaaggggaatt

SEQ ID NO: 72931 - DNA, 265 bp, Glycine max
  Clone ID: jC-gmfl02220061a03d1
gaaacaaacgatttttttattttgtttctttgtattttttttaataacgtgtttaaataaaatataaaaattcattctacggggggaaaacagagacaagataaaaaaaaccccccataaaaccaacagtacaaaaccgggaaaaaaccagacatgaacaccttcagttagggaaaaaaaaaaaagccaaccccacacaagagacagaaaaacaaagtatatggataaccgaccccaacccaagggaactaagatgaaacaccca

SEQ ID NO: 72932 - DNA, 456 bp, Glycine max
  Clone ID: jC-gmfl02220061a04d1
aggataaaaatatacattaacataaataatttgaataacaagattcctcttggatcctacatatttatacatttgtacatcaatgagatgagattagcaagtaagtgaaaataacagacacgatagagttaattaagtaacatagcacatgataataataatagtaattcgtaataacaacaatagtaagctaactgtacaaaaggcttcggatactttcaatttcccaaatcaatagagcgatgttgatgaatttccaagacaaactccccaaaaaagagatccttcacttcttctcttcagtctttacccaaataccataccataacataccacgagatagaataaaaaatatttacacagactcgcatctcccaaaataaatctgcattgctaaatattaataataatatcagttaaccagctccgagacccacccaacatccggagcaccac

SEQ ID NO: 72933 - DNA, 446 bp, Glycine max
  Clone ID: jC-gmfl02220061a05d1
gacaagagagtcaggaaggcaagattgaaaattgaagaaccaaaagccaaacagaaagcgaattcttttttaaaacaaaagaaaggaagcaagaaacagaaagcagctgagcttcatccacaaactacaagctgattcgcgaaagcatagataaatatttattattgagaagggtagaaaaggcaacaaaatgtttgttgtctgaaatgtgttttaccgtttaagcgaccaaataaaatagtccaggtggacttcaatgagcctccacaaacgtgccatggaagccatagggcactcttgaaggcagcatgacagtggcctccaacttcaaatcaagtgcattcagaatctgcaactcggactgccacgtcatctcgtcatgcacaaaagccatcacgtacccttcatcctcattcccattccctccacgtgttggcaagaagaat

SEQ ID NO: 72934 - DNA, 420 bp, Glycine max
  Clone ID: jC-gmfl02220061a07d1
aaagaagcaagctaggatcttttgtcattactaaaattaagagtcaagggtatattacaaatattttacaattttagaaaaattcagtatgtggagagctacactacattgcagtggcatataggctattcaaacaacaactggtgagggagttgaaggagggacccgattttcagcaggaatttcaacaaactcggacaggagagctcggaattcatctccagacattgtctccttctccaatagaactttcacaattttgtcaattgcctcacggttgctccttatttggctcaatgctatttcatatgcttcatctgagagtctcttgacagcagcatcaatgtcttcagcaagcttttctgacattgagtttcttgccatcattctcatgataacatcactttgagctgatgagtc

SEQ ID NO: 72935 - DNA, 421 bp, Glycine max
  Clone ID: jC-gmfl02220061a08d1
aataaaaaactatatatttgaagtaataatacgaaatatgaatttaactatgatacgatattgatatttaattcttttggcgaaacgagctcaatacatcatattaaaacataaaaagcagcacctaaaccagaacagcaaacaagttcaagggagaaattgaacataacagacatgacatacaagaacacttgaaaaaagacacgcttaaaacaagaacacttgaaaaaaaacacgcttaaaaaccaccgcgaaggcgaaggacgagatgcaaggtggattccttctgaatattgtaatctgccaaggtacgaccatcttccagttgcttcccagcaaaaataagcctctgctgatcaggtggaatgccctccttgtcctgaatctttgccttcacattatcaatggtatcagaactttc

SEQ ID NO: 72936 - DNA, 546 bp, Glycine max
  Clone ID: jC-gmfl02220061a09d1
agcacaatcaaaatgatatgatttaatgaataattgaactcataatatctgaaagaaacaggatatagatcagcaaaaatttcctttatacaatatcccttctttgatttatgtccataattcgcttctctcccagcttttggcatagtaggcatactcaaagcatatctacatccttgcagtcagattaaagtttgtgctctatgatatgctgctttctatcttcaatgctgtcataaagactctcaacaaggtgaagcaaaaatttatctgcaccatgtctggccaccagagaaattgataggggaaggttattatacatccctagcggtatgcttacctgacaaaatcctgatactccagcaatggacagcaggctaaaagcccttgcacgaaaaatttctaagtcggatgtatttgtttgtagttttgggggaggacctggaactgtggggatcattagaacaccaaagtccccaagatgaagccgaagagcatcgtgtagttcccttttatagactaacagatatcaatgttctcccccgt

SEQ ID NO: 72937 - DNA, 434 bp, Glycine max
  Clone ID: jC-gmfl02220061a10d1
accacagtaggtaaaaaaatttctattctaggttaaaaagggtttatcaaacttacatgctatattattttatagttcaataatcatattcttttggcttcaatgaacctacgttattgatttgaattcaataaatctgaaccttggtttcaaaaagattgcatagcgcaactttaacacaacttaaccaaaaccggtttccctcgaaacatttggtaaaaatgaaagcccgatgttaatatccattccattttataaacaaatggcccaaaactttgtcagcctttttacacgtttacagcattccatcagggccttgatcgatttcttatcctgggagatcgagaattaggagacccaaaaccttagccggaaccggggccaaaaggggaaccagaacttgaataatatcttctggaacctctactacttgg

SEQ ID NO: 72938 - DNA, 420 bp, Glycine max
  Clone ID: jC-gmfl02220061a11d1
aatatatatctatatagatttttgaactgtttgacgtgtctaaaatattctgaactacatatcttcagtagtgcacaatgtattcctcaaatttgcagaacaccccagttgcatcaatcacaatgatgctttggctgttagatccgcaaatattacatgacaaaaaaataacaaaccccgccccattgctaaccaagcatatgaataaattcacactatacacgcgggcagaaactcaacgaataggggagagagatgaccctctgtagaaccttttattcttcactattttgaagagtctgctacgacaaggtggcaagatattcaaaggacaaagttctgaattatggtaaagtagctctcacttctttcctatcagcaccaaatgtctcaactccgtaacctttaacatagacattg

SEQ ID NO: 72939 - DNA, 397 bp, Glycine max
  Clone ID: jC-gmfl02220061b02d1
aaaaaaaaagggggaaaaaccccccccaggttacccccaaaaattaaaatccccccccaaaaaaggtggaaaaaaagggggccccaccacccatggcccgggggggccccttaggggaaacaaaacccccaaaaaaagggccccagttcctaaaaacaaaaaaccccccccccgggaaaacaggggttttcagactgtaaacccccccctaacatacccaaccaggtttaagggggtcgcaagtaaagaaccctagcttggtccaaagcccaaaatttccccctgggggggggggaaaaccccataaaccctgggggggcctttaaaaaaaggggcccccaaaaacaaaaaggggcgttatgccccccttgggaagcatggggggggggacccaaaa

SEQ ID NO: 72940 - DNA, 437 bp, Glycine max
  Clone ID: jC-gmfl02220061b03d1
agccatccatgaactttgatatcaatcatcctatgaagaaacagagaaattaaacaaggaggcatccatatgcctaatgaggaattaaaagtatagaatttcaagccaggaataattaaatgagaaagaaacagaaaacagatgtaacatttttgaagaccaaattagtactacccttattgatcctaaccataccctcactgataataagattcataacactagtgccgtcaaattctgcttcagttgttgagaggtgcaggatatctgttgatgcaatcaagccaagggttcctagaaggcttggtgactcggcgcatggcgcgccaaaccacactgttgcacttgaagccagagccaaatgcgagttgccaaacacggtctcctcttctaacactctcttttgcttccatgtaagccaactcataccaaatgct

SEQ ID NO: 72941 - DNA, 483 bp, Glycine max
  Clone ID: jC-gmfl02220061b04d1
aaaatccacggtaacaaaatttatatgattgaaatatgacagaatatttatcaacgcactggcaaactgtcaaaaaagtaaccaccttagctggaggcaccaaatgccgacgaaaattcagaatgagtatttgtgctcaaaacgacaatcatagtactcaaatatctctagcaagagtagaaattaatacataacgaagtaacaaactatcatgggtgtctactgttgcttaacttcaactttcttcttctgccacaagcggtctagagcactgtcagcatcaccctgagcacggatgaatccgcagagggcaaaagtggagaaatggccattgtagacgccattctcatccacatgcccaatgttgatctgaaccgaagcatggtccttagcggtaatcaatctgtttgtggcggagcacttcctaggaatgtaaagctcagtgatctgtcctttcttcgtctgcatctttggttgaacgct

SEQ ID NO: 72942 - DNA, 489 bp, Glycine max
  Clone ID: jC-gmfl02220061b05d1
gagaatgctaatagcaaattttatagaaagataagtaggtatattatacacaataactttggttaaaaattacagatcgttgagaaaacagccaaaaaactgttatttagtgtacaagaagcctagccgagccaaagaatggggaaaggaaatgtgatggacagattcatgacatcaagccagagcaactcttgtatgaatacatagtgatgaacttctagtacatagtacatggtgataaagaattaaaaaccgtcgttgagtgccgtgtgagctatcaactcacattatataatattataattcaaggtgctggaagtgctcaaaattgatcaaacaccacagtatgtaaacgtacgagtacctgaagattccaggcatcaggttcgaattcattgtgctgaaactgctttctgaaagaatggatgaatacttgctcaaacatagccctatcaaattaaaaaacagagctttggacgagtttactct

SEQ ID NO: 72943 - DNA, 472 bp, Glycine max
  Clone ID: jC-gmfl02220061b06d1
aacaattaacgatgttgatataagatatataacatgaacagcagcaaatgttgcaccaccaaaacaatgttcaagtagttaatgtatgatctaacatattttcttgctaaacattgactttgacagcacccacctaatttgttcagtttcttggtccttttattcttaaaattgattaaaaagttattgtaacaataattcccaattttgctaacagaaagccagtcttagccccatgctttatatctatttacttttgtatttcttaatttcttgctataccatgggcaaaaaatttcttcataaatacaaacacttatgagactattacaacagaacatagactatgacaaaataattattacggttttggaagtttggactgtgtgtcacttggggaaggaattacccggccaaggtgaagaagcttctttcacacttgcagagacagggagggagaaaaaacagacct

SEQ ID NO: 72944 - DNA, 409 bp, Glycine max
  Clone ID: jC-gmfl02220061b07d1
gtacaaacttccttcattttattaccatcggaaagattaaaacagacattgacagtcaatgttatttagcatgaaggtgtacatcaaacaactgtagcatcctcaagccatgctctacaatgtatgatgagacaatctaccggtttttctggttttgctatgatgtaccaccatactcgaatacctaaacaatagacaacacaacatgagctgtaggtacttacaaggtgtaaggttacaaatttacaagcagtcaaggtacatgtaatttctgcgtcgattgaactgtagaaggcttccataggtgcgatcccaaacaccaataaagagtgattctgtgtcagggctgaaggatacaccagagatctccccaaaaaaatcgatctcttgctccttctcaaacccatgc

SEQ ID NO: 72945 - DNA, 469 bp, Glycine max
  Clone ID: jC-gmfl02220061b08d1
ggtggccgcccttttttttttttttttttttttttttgccagaaaaacacccctattacataacagattgtccacaaatataattctttttccactatgcccaagtcaatcaacagatagaaaataaacagaagactaaattaagacgaaaaactcaaacttaaaatccaactatatttttcagtatttcccaccttgcttctacccctgttgaaagtaacaaagtaaagctgctctgcaacaaagtagatctaaatttacaagacaggaaacgaccaacaaagtgaaataaaagaaagaaaaaagaaaaaaggcaaagagaaggataaacccgaacaaaaaccaaaagatataagcatcttaggcagaaaccctaaaacccaaaaaaccctatgagtaaagcctgttaggagctaaccactggtaacaaaacccaatgagaagggattggtgctagcattctatgaag

SEQ ID NO: 72946 - DNA, 445 bp, Glycine max
  Clone ID: jC-gmfl02220061b09d1
acggccggcacgcacctattttctttttttttcttttctttattttttattctctttttatcttttatgactttttttttgtttctctgtcattaattttcatctcctctcattttcttgcttaacatcaattctgtttttgtgatactactatataatcccaccgaaacccacgcccagaccccaaacaccaccaacacaccgacataccacccaacaaaaaggagaaaaaaaaccaacgcggaggcccgccccgcaaaaacaccgaagaagccaaaaacaagaaggcgccaccccccaacaacaaaagggaaaaaaagccccccccacccgcacgcccccccaaaaaaaaaacaaaaaaccacaaggggggcgggccacacagcaacaaaaaaagagccccacggcccacccggaaagggccaccaaaacagggggggggggc

SEQ ID NO: 72947 - DNA, 452 bp, Glycine max
  Clone ID: jC-gmfl02220061b10d1
gcaaagaaatatccatgaactataattacaaacttcctagggtattatttacacgccccataggccataaatggctttatttgaattttatcttcccatatcttacagtttaaatactcactcaagaatctgttcactcccagacattcacaacaataaataacttgaataaaaagaacatatacgaacgaagttgtcgagcaggcagagacgagaattcacaatttcacaccatctggacccaaataccgtggcttggaacttcttgatggaccacaaacagcagatagaaacccggtggcgcaagaacagcggaagccggcgcggtaacttaacctcgtgcgttgattctccaaccccactcaaatggtgcggcttcagcaccaacagcctctgattcatggagaacgagtgcgtgttaaatggcggcgccagcatggtaacagacaccg

SEQ ID NO: 72948 - DNA, 433 bp, Glycine max
  Clone ID: jC-gmfl02220061c05d1
acaacaagtaaattacataaatataattcaattgtttatacagtagaacctgtaaggacaaatctaaaactaaacaaaaaagtaagaaatgaatattatattgaggtacttatttatttaacatttatctgtattctgaaatataaggttggcaaaaagggggacaaacacgaaaaattttcacaggctgccgtttcatggataaaccgaatttggcaaaggaatcagcagcataatcgttatcgaagtataagtgatttgtagcagaggttagagctttcaactcatcacacagtgggaaacaatgctccagcgatgtagatgtagggcatccatctaacacaaacccaatagctttctcagagcccgattccactattattttaccaaaatcatgctgccttgcaatcttagcacttattggaatgctatg

SEQ ID NO: 72949 - DNA, 523 bp, Glycine max
  Clone ID: jC-gmfl02220061c06d1
attccttgtataaagttatttacatgcttacaaactacagcacctgaaacatgaacatgtttatgtaaaacggtctatgacgatcacaggactattactacaatcaaaatctgccaagtactgtagaaacactcacttggaagactgtatataagaacacgggtatgaaatgctggagaaaatatgctatatgctacttgaaactttcttcagtaggacaaaccgatagaatctcttttatctgtgcccccatttcctctttatcatgctccacttcagcagatttaacaacttcttggctagacctgtcaggggagcatgcattttcagggtcatctttttcattcgtgattttagctgtggcttcattgtccaaattagtgtttgatggaactatttgaaccacgttcaccccagaaccaggggaaccattgctacctgagaccacagcatgagaaccaactggagtttctattacatctatgggagattgagctgcaatagattcctcgtcagaagagtc

SEQ ID NO: 72950 - DNA, 496 bp, Glycine max
  Clone ID: jC-gmfl02220061c08d1
atctcgtgtgtttagtatcataaaaatattggagacctaggcgaattctagcatgcgaaagtgaaacttcttttgcacgtacgaaaataaatattaaccgtttgatactctttaattttcatcgcatgactcaaattttttaacatttttgcttttcttttttctctttttatgcctatttttccttaattacccatttcttctactttccccttctttgttctttccctccagcaccccagatccgtcatcatcctcatcaaggtcgactccccagtcgaccataccatcgtcgccctcttcgaccacctcgaccccgacgactacatcatcgacaacgacaacgagtggtacaagaacatcgagcgccgcatgaaccaacgagggctccctccctctcacgagccaatacacttcttgcgacttcgttctctccctccagcggcccaaatccgtcatcatctcgtcaagaccggctccccagttgaccacacca

SEQ ID NO: 72951 - DNA, 514 bp, Glycine max
  unsure (1)..(514): unsure at all n locations
  Clone ID: jC-gmfl02220061c10d1
gactcacttatactccactctaacattgatgttattaaaaatacaagaatcatctgttgtcaagaggatcatgaatttacaactgctctatatcaagctcattgagaaaaatataacatgttgaattcaattacttataatgttaaaaataattgaaaaaaattagccttcaaagggcctcaatcaactactgtagtgtacaaaatggcgaggattgcagcccccacagtaatcaaataaaactaaaccaattgaagaagaatctacttctgaacccgttccatcttgactctgatcttttcttcgatcaaggaagtttctgtctcaagatcatacattctgttaagggcgcgcatattctcaagtacttcactcagactactatcatttttcccatcacaccttacgtgctgcatgggaccatgaagtagcttattcacaatacccatactaagggcataaattgcatctttgtgttgctttgagacatcanggcccatctttcgacaacact

SEQ ID NO: 72952 - DNA, 303 bp, Glycine max
  Clone ID: jC-gmfl02220061c11d1
aaacaagcattgtaattccacttatagaacgtagatttgaccaaaaataatccgaatctcagataattcacccattaccaatttttccagcaaagaatcccagcatcaactctcacccacgacgatttttccaggtacaattcaaattgttatacaaaacgtagagaccagacaaaatcaacaaaaattaagcagagcctgtgttctctggtttgtcagtctccattggttcagcagatgctggtggtggggctggattagcattgtcccctgccttttcattagtactggcattaggattct

SEQ ID NO: 72953 - DNA, 408 bp, Glycine max
  Clone ID: jC-gmfl02220061c12d1
acactagataaattcatgaaattttattttgatgtagtatagcactattcacaatccctgttgtgaggagggtttttaagacgttgctaccagctggctaaaatctaattgattaatatttataggtaatgtttgcaataaaaaaaagtttaaggcattgcaaccagcaaatgagaatactgtggtcaatcaaaactgttcagctggctcaactgaactgtttttgccactggctcagagtccatattgagagttgtgaagtagaattagcttcaaaccgcttgcaactccctttgatggcttccttaaacgacaaaatttctcccttaagactacgtcgtcttggcaagaccaagtctgtcctcgaggaatgcttttgtcccacaagaccttttagagaatggattc

SEQ ID NO: 72954 - DNA, 418 bp, Glycine max
  Clone ID: jC-gmfl02220061d03d1
aaaaaagcccactgcatattcatcaaagcatcatcaaagcacactgcatcctaacagcacacgtacgtagaaaggggaagttccaggtcttgcgcaacatacacaacacaccataatttattttatatccaatcttatggcgcccaaaatgcacatgcatggactaattaaacaacaacgttagtctgataggcagtgtccatagataaattgggttcccataaaatggccttgcttccaaggaaatggcacacagggttagttccaggatcaactcccatgagttcatgaagcctgtgatgattcattccagaagtatctgagtggcaaacagcatgtgcctgagacctgggtccatatccagccaccaatggaaccatgaaagctgttgtttcacggactttatggcacgaaaata

SEQ ID NO: 72955 - DNA, 428 bp, Glycine max
  Clone ID: jC-gmfl02220061d04d1
agaaaattaagtaacatttttttaatattgagactcaggaatcacttagtacttcccaccatttatatatatatatatattcttcgttgtaattttatgcaaaaagggaagtttcttcctccctttaactttctaattccccaattagatattgaggaatacgaaattaaatcacaattacaataataaaaaagggacataatgaaactagcatgcgaggtgcatagacttattggtgtcttcatgtggtaatagcatccaaagccaggatggtgctgaggttcattgggttcatgtagattttagaacctgacataatttcttccacaataagcctattggccttttcagatggatggaatgcatcccaaaatgcatattggtctctattggggcaaaggttggagagtggtgtgcatagcccaaga

SEQ ID NO: 72956 - DNA, 502 bp, Glycine max
  Clone ID: jC-gmfl02220061d05d1
gctcaacacaaaagatccgttgcatttccaacaaaacctacataacaaagcagaatttcatttgattgaatgcacaatttcttcacattacaaaactctctaatttgtacaaaaagtcaatgaatcctgatttctgacaaatttagaacattgcagcttttaatcttcttcccaactcctttctcatcaattgcctatcaaaacctgatgcagccaaaagccctctattttcttcagcccttctcagaaggtaaggcataaccatatctaccggcccaaatggcatatacttgctaacttgaaaccctgcattgctcaaaccaaaggaaagtgcctctgacattccatacagttgtgcaaattctagcttgtggtttacctttccaacccccaattcatatgcttttgctgcagccaatttccctgattcaatattgtgagttgcaagaacaactgacatcgaaccgggtccattagcaatcttctcaagaagaaatgatga

SEQ ID NO: 72957 - DNA, 555 bp, Glycine max
  Clone ID: jC-gmfl02220061d08d1
gactcgatcttcgtcaaactgatgttgcgaaacgcgaacgcggaaagcactttgaaaagcaccgaagttcctttgtcgtgtgcgaaaacaatgctcgtcttgaaaggacggtccgtgcgcgggatgataggctctctcgcgagcatcacaaaccgcgtgacgttgctcggatcgtcttggattccgtccgccatcacgttcaggccgtagagctccgccgcgcgtgcgctcgcgatggcggcggtgtcgcggagattgttgctggcgacgaactcggcagcgccggcggtgtcgtccacggcctcgcgcgccacgttcaggccgagtttggtgagagtgtgctcgcactgcgcgagtgcctgcggatgcgaaatcacgcgcgtgaggaactcctttcggacgccggggagagcgaggaggcagtgatggaccgggagctggacctcgccaactatgtgaaggcggtggcggatgatgagatcgtagttccggtggatcgaaccgtcgagtgagttttcaaccggtaaaaccgccgatcggcgatccagagcttca

SEQ ID NO: 72958 - DNA, 460 bp, Glycine max
  Clone ID: jC-gmfl02220061d10d1
agaaaagaaaaacattgcatttgatttgaatttgaaacgaaatgatttttaaccagtacaattcaagggaatacagcttaataagaagaacattgtaaacttcactatctcatttatctgctggaaatattcaacagggcagattacctctaattattccctcagaaagaaacaactttttcaaccttaggcaaacagcaaatcattcacttggcttaacttggggaacttcggaaaaatctttagaacaaacgcaggctaataatgggttttgtcgcattataaaccaaactagcttgcttgatagtgaactcagaactctagcttgcttgatagtgaagtgaactcagaactctagtgaaatagcaagggcgaaaaccctgaaacggggcccgtttggaagaaaaatagataacctcgataggatttttcgcctactattaattgatcagccccaggg

SEQ ID NO: 72959 - DNA, 411 bp, Glycine max
  unsure (1)..(411): unsure at all n locations
  Clone ID: jC-gmfl02220061d11d1
atcaaactgtttcttttaatttaataagaaaaaaaaacatcatcctgttttttaatgtcaaaaagttacgcgaggcctaacaagcctatctatcattattatcatacaagggattcttaaattcactaaaatgttcaagtatacagaactaaagaaaccacatacttgacaaatggtgggcttaaaggaaatgcccgagtctctaaccatcagttaaaggcaaaaaattgctcattctctatgtacaagaggccaacatcacaatagtctcgaaagggtaaaaatattcctatcttcatcaatctttcacttaataattataatcaaagaaagggatcatgaaacacacaatgacacctncgaatcatattttacgaaagcgccagtcccaacataaatcgaattcaaact

SEQ ID NO: 72960 - DNA, 316 bp, Glycine max
  Clone ID: jC-gmfl02220061e02d1
ggggccaaacaaaaaaaaaaaccccttttaaccgctaaaagggaatgataaaccaatttttttgatcccaaattaacccgattttaacaagaaaaccttaaatcaaaccaaaaggcctacaagagaaaaaccccccttaactaaacagtggggtcttgaagtcccaaaaaaaaacccccttttttaaaaaattcaccttttggaaaaacaacccatttacggggggggccgggaaaaattttttggaaaccaaaaaattgtgtttcaggaaaagcccagaccccctacaaccgggggccaaaactattggaacccc

SEQ ID NO: 72961 - DNA, 402 bp, Glycine max
  Clone ID: jC-gmfl02220061e04d1
aaaaaaagggtttccacccaggggttaccgggggccccccggcaaaccgggttaaaaaacccgggggtcacttggacaaaaaaacggccccggtatattaaaagggggcccccccggggcagggtctggggggtaaaaccttccggggaaacgctttatagcccataaaaaaaaaagggacccccatttaagggtttaccaggggggttaaacccaattgggggcggggaaatggccccccctttttgcgggccgggtacaaacttttaaagaatcagaacttaaaacccggggggccccgggggggcccttatgcccaagtttcttgggttcaagggggttttaacccactcaggaacccccctttggacagggtggggggggacccaaaggggttccccc

SEQ ID NO: 72962 - DNA, 372 bp, Glycine max
  Clone ID: jC-gmfl02220061e05d1
aataataaaataaaaaaatatatattgggaaaaaaattgacaaaaaaaacataaaaaaaaccaatgaaccaaaaaaaaaaaaaaaaaaaaaagtttcaaaaaaaagggaaaaaaaaggaaataaaaaaaaaaaaaaaaaaaaataaaaaaaaaaaaaaaaagaaaatgtgaaagggaaaaatgaagttaaaacaaaattaaacctgtgaaaattttcccaactagaaaaaaaattggggaaaagggggacccccaaaaatggggccaaagaaccttaaaaaaacccgggaaatttattgggggggcccaaaaaaaaaaagccctataaaaaaactaaacacccttttaaaaaggggggtccccccaaggggg

SEQ ID NO: 72963 - DNA, 416 bp, Glycine max
  Clone ID: jC-gmfl02220061e07d1
ggttgttatattgacacgttcttacgggaaaaaggactccccccatgagaggaaacaaaagcaaccacccgggagggagatgattcttgcccccccgagaaagaaaaaaaaatggctccatgaagaaaaaagagccgatggggcaaaaaaaaaaacgccccaccacacaaaagaacagtggagacccccactttgcccgggaaacgtttttgcccccaaaggaaaaaacagcaactcaaaaaaactgccgactgctgcagaaaaaagaatgactttttgaaaaacaaatcccgccccggaaaaaagaagcccacccaaaaacagcactgggccgggacaaaaataccccgactgttgccaaagacacgaccaaagccaagagctttcagcacaaaaacccccccataggccccccc

SEQ ID NO: 72964 - DNA, 373 bp, Glycine max
  Clone ID: jC-gmfl02220061f02d1
agagaaaacacaattaccttgttgatcgaatcatgtaattatttctcctgaaacttatatacaagaacaaaacaaagcaaagatgtatgggaatagatagattgaatggatgtgaaagaaatgaatttaagtgagagcactgaagccaccccctttcatcatttgcttgaactccttgaaatcgaccatgccgtctccatcaacatcaaccttggatatcatgttcttgcagtcttggacggttctgccctgcttcaagccgagggaggacaggacggtcctcaactcgtcgacggtgatgaagccgtcggcgttctggtcgaagacgttgaaggcctccctcatgtcctccttctcgtcgcgctcgtccatg

SEQ ID NO: 72965 - DNA, 371 bp, Glycine max
  Clone ID: jC-gmfl02220061f03d1
gggccgcttaaatttgcccttgcaatataattaatattttctgcaaaaatagtccccctatttggggactggaatataatttaccccatttaacatactaacactggttccagagggcctaaattccacagacccatgcaaaagttacaagggactttaccaaagaaaaatgggcctagagcaaaattcccaaaatccaccatggtctctctggatctgggactttgcaatttttaaagggtccggccaatttcattggtgctttaacaagacccaacaatgcccttacccaagttcctgagtgaccaggagctccaaatcacatgggttgaagaaattaactccaaaagattacaaaaatcttacttggg

SEQ ID NO: 72966 - DNA, 473 bp, Glycine max
  Clone ID: jC-gmfl02220061f04d1
gtcaaatgtctactaggaatgaacttatacaatatattgtttcctaatcaaaagcacgttaaaggtagagcttgtacatatgaggatcggctaaagcacaataaaagcaccgttgaaggctctaactaatttatattcgcctaattcaaaatgggaggagccactctaagcatcaaactttgaacaaaagatatcatcgaagcaaatccaatgcacattatactgaatccaggaaaatcaaaaggtgccttttcagaaaggaatagagctgttaatggagagaaaaccaagggagaaacaatatgtgcaattgaacatatgcctgaaatgcaaccttgagcctttccctgctcatggggaccagcttctttagatacaatacttcgtatacaagggtgtgagaaaacatataaaattgagaacatggcggaagcataaggaaccaaggaggaccatgccatgctgtaaaggaa

SEQ ID NO: 72967 - DNA, 445 bp, Glycine max
  Clone ID: jC-gmfl02220061f05d1
aataaataaaatatttattaattcattattcagtactcttagtcttagaacacgaatttacaaaatcttgtagttaattaaacttattttctataaaatttagtatgagaaaatagtgaaccattatggaacttccttcaatcagtgaggtcaatttattttaggccaacctagagattaaagaaaatcatcataaagcaatgacttgacttgctcctctagccctggaagggactgtttgtcgtcataactatacatcaatggtaccatccttgcaagattgagtgaggccttagtgaatgtcgaatggaaatggttaccaaacaagcactcttggttgaggctcttccatgcatcggagatcttactcatcaccctttttcttgctgttctcgtcgtgtagtgtgggtgatccatcatgagacaattcacgtacgatccatca

SEQ ID NO: 72968 - DNA, 529 bp, Glycine max
  Clone ID: jC-gmfl02220061f07d1
gcacaattaagaactcactactttcgcatcttttacaacatatataatggtacaaagccatcactccgcaccagttacttcaatctgttctgtacatgtatgagaccattgaaatttagaggaacataaaaacggctaaaatgtactaaaaacatttttattttaaaggacaagtgctccaccgaatcagcgaaagctaaaatcgaaaagaaaaacactagttaccacttactagttactactagctaaccactaagctatgagaatgaaccaaccattgatgatgaagaggaagaagaactccaatcactcactacaaaaccaaaaacaaactaaaagatttgatcaacctcctccgtgtgaccgcaactcctccatagcagccttgatctgatcctgaaccagctccaaccgctttgagtacacttccaactccaatatctgttgtttcctccatttctcatccaccatttccccaccggcaaaactccaattcatcaaaggcatagggttcaagttcaacgaaaac

SEQ ID NO: 72969 - DNA, 410 bp, Glycine max
  Clone ID: jC-gmfl02220061f08d1
ggacaacaaaaagctttcttcttgcgaatggactacaaaacttttgatggtacagaggcgttattccggtccagttccttaaatgtggtgtgcacatgcatgagaccttggttatccagtggcacttaccctcgggtctactgaactataaacaaccgtatgtaaagggacaagcgctcaagcgagttagcgctggctaacgtaggcatgcttagcaccagcgaccacttaccatgccctactagctaaccactaagctatggctatgatccagccatggacgatgacactgaatacgaacgtgacatgagttcctacaaaagcaacagcagactaaatgctgtgatcaactgtttccgatggaacgctactgctccatagcatgcatgatctggttccgatccagctac

SEQ ID NO: 72970 - DNA, 455 bp, Glycine max
  Clone ID: jC-gmfl02220061f09d1
ccataaacctttaagatgttgggctttgttagctgtagtagtaacatatgacatgtctatgaacaaagcaaacagaagggaattacttcccgcaaatagggagcgtgcaggaagtaaaagcccaaacataagcgtatacataaggctaggcccaatggcgtattgcactgaatatggtaacctaggcccagtacgtcccacccgtttattttggcgcactcgtgcattataatctatgctaattatacatattatcatgcacaaagggcaaccttatgctatatatttaattggcattgaggtagcgacaatcctttctgatttcaccttcatctcctgttaaaggattggtctctgacaacaaaagaatggcccttgagaattgttggttgaaataatcattgtcgttggccatcttttggacataaggtgcagttattgggtcagtggcaagc

SEQ ID NO: 72971 - DNA, 464 bp, Glycine max
  Clone ID: jC-gmfl02220061f10d1
aactccaacaattttattaatgaagatactttacaatttcagcacatatacacgggcatgaatataattttgcaggctataatcatcttttgtgatcacaaacaatggagtagtgctcaacaaattaaagcacaaaccaaccaacaataatcatagttttagttacattagtttatacaagaaagtaaatcaacgtaataggcatacacgtgtcacgtatatggggaccattttttttatatatataataatatgcaacattgaattgaataatgaacattctcaagcaatggaacattctggagggaggccttgtgggaaacgtctaatatcagtgcaatagttgtaaatcatgtaattcttttgcacccaatggatcttggccagccccgtggcgtccagtgattggccagtggaggaagaagttagggcattgaagtttctgtatgaggctgtgaatgggg

SEQ ID NO: 72972 - DNA, 316 bp, Glycine max
  Clone ID: jC-gmfl02220061g02d1
caggccaacacaattccatacaaccaacaacattggaatttcagcatatttaaagtcccctttgttattggggaagggaattactttccacacgattttattttaaaataataatagaaattgctctggtctctggtctgcataagtggctcaaaaaatgatccaaaaacaaggttttaacaaacaccatttattttcttcctgtccatcacaaacttcttccaagctttagggattaccctttgggatcctatttcactctttttggaaaacagaacttttccggcatttttttcacctgcttttcctgtaacca

SEQ ID NO: 72973 - DNA, 450 bp, Glycine max
  Clone ID: jC-gmfl02220061g03d1
aattaatattcaaagaaactgattaataaaatgctactaattattaacaatttgtacacattaagatccttgcaaataatataagaattgaagaaaaagagaaggaagttaagtaagtgatagtaaaaaggtacacgggtttgttgagggtctaccacaagtctttatttaagagaaagacaacaaagttaccatattattatttcacatttttttctaattcttagaaacaaggttaccattttttatctaaatcgggcaccagcagaaagaccctacactacagtggaacatggtacagaaatccaaaagttgcatcgaaacaaccatgaaggaaaataatgaagctattcccagattccgacctccatgaagccattttcagtggcacagcccctaaacatgccattgcaattgaaaccataagccacttacccagcgttggacaca

SEQ ID NO: 72974 - DNA, 475 bp, Glycine max
  Clone ID: jC-gmfl02220061g04d1
attgaaagtactaaattcattaaaacatgattgcaaattgtacacattcatagcttttcaaggtccgctaatggacccgggatgcacacatacacaaagttcaggaacatataaaaagaaaagaccagattatagactttcacatacttcagttcacaccaaacaagggacctgcagaccattctcaaactcaaaacccaccacgaagacgcaagacaaggtgaagagtagactctttctgaatgttgtagtcagcaagagtccttccatcctccagttgcttcccagcaaagatcaacctctgttggtctggggggataccttccttgtcctgtatttttgccttgacattatcaattgtgtctgaactttcaacctccaaggtgatagttttccctgtcaaagtcttcacaaagatctgcatacctcccctcagacgaaggacaaggtgaaaggtagactccttttgaaatgt

SEQ ID NO: 72975 - DNA, 315 bp, Glycine max
  Clone ID: jC-gmfl02220061g05d1
aacagttctttatgttgttgggggggggaaaagccaaagcgggacacactgggcgccccacggccaatggataccctcccccccccccccgaaccaaccccacaaacaaaccggggggccaaaaggggaccaaaaacaaaccccccccccccgggggaaggggaaaaaggggcacaaagggcccccccccggggggggtcccccccccccctttttgccgaaccccaacccaaaaagggggggtgctttccccccaaaaacaaaaaaagcccccccggagaatgccccaccggggcaaaaccccccccctggggg

SEQ ID NO: 72976 - DNA, 373 bp, Glycine max
  Clone ID: jC-gmfl02220061g07d1
atagaaatgtcgttgggaaatattatcgtaggcaaattaatgtcgagccatagcagttgggtttagatttaaaaggcatacccaatcacctgatgatttctaagctgataatcaaaatacaatttccttgaagcgcttacacaattttggggggagggagggaagggaatcatataaccaacgggcattgtgagaaggaattgcagcaatcagaacccaaaaagatggtgaaagtatcagtgagcaggattatggaattttgattacaatttcccaacatgatcacacatttacctggaggcaaaatttacaagcactgacagctcctccctcaaggattttttaaggaaaactcctctctttttttttcaaa

SEQ ID NO: 72977 - DNA, 490 bp, Glycine max
  Clone ID: jC-gmfl02220061g08d1
aatccaaaccgcaaatgcatatgtaatagatacaacatgttatgctaatccatactacaggcattcagatacgaattaaagtgaaaccggaagtcccaagaacataaacttccttagaactctgactaaaacaaaacatctaagacacctgtaaataaactggggggaagcgtacggaatgggaataactggaaagcagattccagtcaaaagactagaggaatctaagacccaagattgtcattgagagagagtgaagctagatgatcagctgggttagactgctgctgagcaacatttcttaacacattcatggcttcagcaactttagccttcagagcatctggtgactcaatcagatgtaaaacttcaggctggtccatctccagaagcatgccagaaacctttgctgcagcatggagttccagctgatccacaagcgggtataaagctctaccgagcatagtactctgctgttcagggggagcat

SEQ ID NO: 72978 - DNA, 391 bp, Glycine max
  Clone ID: jC-gmfl02220061g09d1
ccaacccaaaagtggggaattacccaaaattttttgggaccccccaaagttttggaaatttggggcccctttaaaaaaaattccccgggggaaaaaagggccctaaaaaaaaaaaaggaagggttctttttttggccaaactaaaaaacctaaaaaggggttcccttgggcccaagtaaacaggggggggtgggaaaaaaacttttagggcctgggcctaaattcggggaacccaaaccggcggggttttaaacccaaacgggaacggggggtttttttaaactgggcatttccccaaaaaaaacctgggttttgcggtttgcaccccgggggagacaaaaaaacccttttttatttaaaaatttgggccccccaaatgggggccccccct

SEQ ID NO: 72979 - DNA, 495 bp, Glycine max
  Clone ID: jC-gmfl02220061g10d1
aaaacacaaataaaacacactattattccattttcagtacatatttaatttctttttacttcaaagaaggaaacctacacaaacttttttttttgtaaatggaagagataaatacacaataataaagtaaattaagtatgcatcaagaaacaccaaagaaacccacaaggctgtcatatgatgaaatgaaaacaaagcacaccacaatcatgcatctccaaccaacaaaaaagccttgtctcaatcttaaatatcaatgagcaccactctccttttccttttccttttcctcctctgtcttggagtgataaccaggaagcttctcttttatcttttctaatatacctttcttctccttggcctctccttcatgatgagcaccttcaccatgctccaatgatgcaacaggtggtggtggaagaagagtagtagctgtggcctactctgtcttcttgtgccctggtagcttctacttaatcttgtcgaggaacccct

SEQ ID NO: 72980 - DNA, 513 bp, Glycine max
  Clone ID: jC-gmfl02220061g11d1
atagaaaaagcaaatgcttttattcaagagaaacaactgtgcattacatttgatactgctctcaggactatcaagaacaaagagcatcatcatacagttgacgaaggtgactgcaaaggtgatgtcaagacagccaatttttcagcaaaaaaaccagaaataaaactgataacttcccattgaacacaagaaacaaatgctttttactcatgagaaacaacgagcacttgttttccaacattgcgaccgctaaaaaggccaaccaatgctgaaggtccattctcaagcccctcagctatgtcttccacatacacaaccttcccctctctgatatttggcaggagaaactccaagaacttgggatataggtgaacgaaatccatgaagttaaagccttgcaaacgaatccgcttatatatgatctgtgccaaatttgttacaccttcatgttgagtaagattatactgtgagatcattccacagacgggtatgcgaccacggactctcatgttc

SEQ ID NO: 72981 - DNA, 506 bp, Glycine max
  Clone ID: jC-gmfl02220061g12d1
agcaaattaataaacttattattatgcaagcacacaagtaaagaaataagaaagtcttgcaacataatttagagtcattatcgtttgtgttcataatttatacttacgacatctcacaactttgtttgaaatatatattatataacaaaccataatgatacacagatttacttaactatattttttaacaccctgctctctccctctgtgtctgctgcagcttaaccttgcttcagttactaagtcaactaggcaccgctaatgatgatggagcagattttggactggtaactactagtctagctcctgttcttgcatttctccacggctcttggtgccagtccaatagcttcctttcctttcatgatacgtaaacgcttgcatgattcaacaaacatctcccatggcacatcaccgacaagcatccagtcgccatccctgtcttcataggtcgggacatagtcggagctgttcaaaagatccatcaacttgctctcattcatgaa

SEQ ID NO: 72982 - DNA, 517 bp, Glycine max
  Clone ID: jC-gmfl02220061h02d1
aataaacaaagatatttatggagataacctaatactgatatttatactaatacttaggtcgagcactagtactagtagtacaagcccaagcccaccaataacaagaccaaaacctaaataactcaagaaagatattcttaatattctccaacaatatcaaacttattcactgttgacagtagatcaacattaaactcaacaagttaacaataaatgtaaaaatttcaactcctggtgtaacataacatgtatccatgacgctgaaggaaatcttatcaaaatgtgaaaattaaaaaggcaccatgagctgggacaattttgtatcaagcacaaagcatgatcagcaaagatacaacatagttggaaaacaaactatcaagcaattcagttggaaataatataaataaaacttcaccacgttgtggctatgtaaactcaactcagcatacagtctgagcagaaaacattacatttattaggaaaatcctgattgttcaaatacagtaatctaaattct

SEQ ID NO: 72983 - DNA, 372 bp, Glycine max
  Clone ID: jC-gmfl02220061h03d1
attgaaagttctatatttattaaaacatgattgcaaattgtacacattcataaatttttaaggacctttactgggcccgacatgcgcacatacacaaagtttatgaacatataaacagaaaggaccaaaatataggctcttacatacttcagttcacaccaaacaagggacctgcagaccattgtcaaactcaaaacctaccacgaagacgcacgacatggcgcagaggttactctggctgaatgatgtagtcacaaagagtccttacattcttcaggcgctttccagcatagatcaatcttttgcgagctggggggataccttgctctgcctgaacaaatgcctggacattatcaacagtgtctgaacttt

SEQ ID NO: 72984 - DNA, 541 bp, Glycine max
  unsure (1)..(541): unsure at all n locations
  Clone ID: jC-gmfl02220061h04d1
agatacaatcacgataagaaattccatagaaataacacgccctgtcaaaatcaggaactccaaacagatgccaagtggtgatgtccctaacataagattcataaactcccaagcatgtccacagcaaacaagcaaaaagctcctccctaaacatggggtgataattaacacataaatgtcaaaggatgtaaattttccggagaatggttaaagccctaagccaactgtacggccatctcttcgtcgaaggcctgcagtgtattgtttctctagatccatctgaagttccttctgcttctcagcacggagaatttcgttactgctttggttgttggaattctgctccacctttgcttcgcctctcatacccatgagtttgctgaatttctcttgcctctcacgatcagaaaacatcccggtatcccatcgatggccagactcttcagtaggtatactctntntgccaccccacaacagtttcttctttggtcagtagtcaagcattcaggcccaactaagttcctattacccaatcagcagc

SEQ ID NO: 72985 - DNA, 522 bp, Glycine max
  Clone ID: jC-gmfl02220061h05d1
ccaaaacaaaacactgacataaatagtagaaatacgggcatcatttgttataagaaaatatatcaaattctacattgataaaccaggagacagtattttctataagtaccacccctaaagaaaatccagaattaaagccaacttaacaaaaccagcatccaccatatataattcagaaacaaatgcaaagctaacaaatagaacctaagcctcggtggtaggatactcaaacacaatatctttgcccgaaagtttcctgtatactgcagcaaaagtctccaatttgtactcggtgttgtttcgctccttggggtccaaaaagaccttcataatcttggaaccatcaattttatacctaacacgctttccaacaatctcagcaggcaatacaatatcttccagcattgcctcgtgtacagcagtgagtgttcgggtgcggggacgctgaacagcagaacctttctttggtggcctcaatatccctccggtgggcatccaggatacattcctttcactaaactt

SEQ ID NO: 72986 - DNA, 465 bp, Glycine max
  Clone ID: jC-gmfl02220061h06d1
acacttaaaacaaaatttaattatacagcatgcagaatggaatctcgataatttccatctcacaaattatgactaataagaatcaaaattaaaatcaaataaactggataccaaccacaaggcctccctggtatactatcaattttcattacattaacggtttgttgttcagagggtagatgagaaacaactatgtacagctacaaggtgggattgtttggaaaagaaaagcaaggttgatatcaccctatatcacctcactcaaaaacacaattgattacatactagggattgtatatagctgagcattatactactaattccgggatttccaaaattgaacggatactctttcgtgccatcttatatattgattcgaagcagtcactgataagcagcagtcagcctcgatttcgtcttcaagttagttttccaactggatggcttcatggcagttccctactt

SEQ ID NO: 72987 - DNA, 406 bp, Glycine max
  Clone ID: jC-gmfl02220061h07d1
gatcttcaacacaagcatacataattaaccattcaagttcacgtggattgttgtgtggtgtgagcacctataggatgtaaacagtgatgatcacaaagagcaaggaaaatttaatcccctaaggtttaatttatgctatattctaaaaatcaaaccattcatagctcctaaaatgagatatttatcaactccacaagctagttaacatacttcattacttactgtcctaagagaagtatgcatatacagctcatcaatctacagattcatgcaatagtcctcatggtcctgagcttcagctagaccaggcacattgaagagttcattaacatctgcacctagtatgcatatacaactcgtcaacctactgcctactgattcaggcaattgtttacatgaccatgtg

SEQ ID NO: 72988 - DNA, 573 bp, Glycine max
  unsure (1)..(573): unsure at all n locations
  Clone ID: jC-gmfl02220061h08d1
actactatataaataaaagaaaatatttattgcgtcctttcactttttttgcattagtacaatatttctggtctatcatgaatcatggatttcatggttacagttacacttacaaaatttacttagccacgggctgaatagtaggtttgcataatggtaagagcaagcagagcagcagctaccacaatccctatcaatttccacacatttgggatatgatctctaatcaagattttatagctgtgtttgcaagagtatctgatgcattctacacaaaggttgcaacaatgcaacatcagtatagggaacttcctcaaggggttcactgctgagtaagcattcaagtcctcacaaagtttgctgtaactattgtccatttggtccactccctttgtgattgtgccaaacaaagtgagcaaatctctgttgctgatcttagtacctttcaccaaaacaccattttccacaagcagctcaatatcttgcacagaacacatcatgcctctaagaaacaaagcattagaagtgaattgccctgtgatgccaattctacttngcttcccatgcatgaag

SEQ ID NO: 72989 - DNA, 394 bp, Glycine max
  Clone ID: jC-gmfl02220061h10d1
gtgctaattgttttttctccttgaatttgataaaataattattgattcttacagtgtacaagtcagagcgtattttatagtacaaacataattctgtgacttgcgtgtatgattatgcaacatataattcggcttttccatcaatgaatagactcatgaactcttcaccatccacagtttctttttctatgagaagttgagcaagcttgtgaaggatatcaatgtgagttgagataatatgtgttgccctagaatatgctctctctaccagttccctcactttcgcattcactacatccgcagttgccatggagtaatccttttgcgatgacatctgttgacccaagaatggatttccaccaggtccaccaatggcaacttgtccaattttttt

SEQ ID NO: 72990 - DNA, 545 bp, Glycine max
  Clone ID: jC-gmfl02220061h11d1
aataactaacattttccgatctaaacgatattagacttctaacaatagttttgtcaaacacacaataaggtcaagactcaaacaactgaattccaaaatgacacgttattaatgtaaactcgaaatctcccttgacacatctcaagtccaaaattataaacacatcgtagattattacaataatcataaagataggctcatttttgcattaagcaagagggggggatgtggccaatatggaaactgtccattactcatcccagagttcttcaattgttttgtacccgggagatgtcttgctaaaaaaaccatctccagtaactattctctcctgcttaatgtcagagaagttggcaagcaaatctgcaggtatggaccaatcaaagagatcaaagttttccttgagccttgcatcatttgtgctcttgggaagcacactgtggcccatttgtagtccccatctaagagctatttgtgctgcagtcttccctaacttctctgcagttgtgtgcagaaatggatttttaagaatattactttcactg

SEQ ID NO: 72991 - DNA, 520 bp, Glycine max
  unsure (1)..(520): unsure at all n locations
  Clone ID: jC-gmfl02220061h12d1
agaaatcaatcttacaaatattttcatcatttttaagatgttcatcaaacaggtgacgactaaacagtctttaccataaggtttccttacacttattctataatactgaggtgtccccagacccttaaaatgtgggaataaccccccactatggctaccatatgctaccatgagataactgtttacatattgcatttgtcataattgataatttaaaaatgacattgtatactcccagatatttctctcgccattattttcatcatgatgcaagattcaccaattttataagcaaaaactagaagagctcaaacatgctgcagaacatcataggcatgttcatccacaactgaaattttgtcacctgttgcaatttcaattggctcgtaactgcaaggtctaccacaattacacatcattagaaaaatggaccaaggcttcctttatgcggttcacaacaacagaggctaattcatcttgatgatagtgtatgaatgatcagctncctctatgataatta

SEQ ID NO: 72992 - DNA, 500 bp, Glycine max
  Clone ID: jC-gmfl02220062a02d1
acttataatataatcaatcttataaaaactaatattgaaatcttcattaaggagaacacattaactacatatattccaatccagtacacaagaggggtacagaaggattattatctaaatcatgattgaggttgaggtgtgggaaaactacatataataaggtattagaaatggaaggaatgactttattgcttgtagacctagagtgttatcattttatggagttggaattgccttgtgaattggaaatggtggtagaagtggtttcttaaatttgggattaagaggaaattttggaagaggctttttgaagaaaggctttggttttaaaaatttctctggctcaacagcagggatgggtttttgcactataaatggttttgatataggcttaacaatggaaattggctttggaattggctctaaaatgggaattggctttggtataggcttaacagtgggaaatgattctgaataggcttatatactgtgatagggat

SEQ ID NO: 72993 - DNA, 287 bp, Glycine max
  Clone ID: jC-gmfl02220062a09a1
accagtggaggaagattaatttggcgtacatgggaaagccaggcatttgttcatcaccctctcatcaacttgttctttaattttaatttctataatagtaataatatttatttgtgttgcaagttgcaattgatgatgatcacttatattttcactctcgttatatttttgtcggttcagtaagtcttagagatagttacagctagaagacatttgtaaacggttttaggacatcatggtcgtcaaattaaaaacagtgaaataaaatttgtggctggttttccaaa

SEQ ID NO: 72994 - DNA, 448 bp, Glycine max
  Clone ID: jC-gmfl02220062b03d1
accatacagaataacagaattcttaggagtgctgatttatgaacacttaaacaatccaaatatataattgacccgcttcatttctccctatttttctcttcattacatcacatcactaatcatatcaacacctgtctctcttctctagtttcttgatgtctgtatagatattcctattcacgggcagtacaaaaaatgctgttgatgcaagtctcgagagagaggtatccatagaccgcctcccacttgtaagagcatctcagtctcttttgaacatgccgtaagttgttagcaacttcacgaacaacaggaacacatttgcctagcatacagcatttcattctgccaaaccagtccatggcttataaagcataatttagcatttcataaaaaataaatggcaaccgtagttagatgtaaataatatgaacagaaacaaatttgaaac

SEQ ID NO: 72995 - DNA, 442 bp, Glycine max
  Clone ID: jC-gmfl02220062c02d1
aagaagtactagtgaaatggtacaaccaaccagacccgaataatgatacatacattcaattcaattgtggaccaggtgagagcgagagcatgcacaaaatgataattaaattaacttaaaagaaaacttcaggatcatcaaccatccaaccaaagatcaacggccaccgattcaacaggaaagaaaacacaaaggaaggaaaaccatacacagaagaagattccggagaaattcaataatacacattttttttttttattatttcatttttcccctctagtagtcagtgctgggaagctgctcgtgggtgtggctgatgaagacaacctcgtagataagcccagcaattccaccttcgatgagagggccggcccagtagatccagtggttggtccaggtccagctcacgacagcaggcccaaatgtcacagcagggttcatg

SEQ ID NO: 72996 - DNA, 368 bp, Glycine max
  Clone ID: jC-gmfl02220062c03d1
aaaaatatgcatactccaataatattatagattatgatcatattataaagggacattattatgatatatagaggaacgtgttgtttacttaagtgctcaaattcaacacaataaatgcaatcacaagaatagcaatcatttcataacaacgatttatagaaaagggcaatacatatatatgtagtactattaaacattggtgtgagaggctgaggttaacttgcaggagtctcccatccagttgtacgatatattgggaagaaatttgatcaacctgatatttttcactgatttaggtcaagcataacaaaaacaagctcatactcacaggcttccatttatatcatcagtagaatccattagacttt

SEQ ID NO: 72997 - DNA, 447 bp, Glycine max
  Clone ID: jC-gmfl02220062e03d1
cgcaaaataataatttgaaccaacaccgatgcaaaatcctattagagcaaaaatacatcgatgcaaggaccaaataacagcattacaacattcacgggcaaaaccacaaacaaaactaacagaaattaaatctaaggtagcattgttcacaagagaaaataaattcgactaagttcaaagtaaaataattcatgaaacaaatttaaagcttgtcttcaaactcggagagaggagtcatctgttccttcaagcccttcctcttgcgaatgtcagtgacaagctgtgcagcttgtgatccagcctccaatgggtcagaagacatcatgtcccagtgatcaaacacacattgtgggaaggcctggcctgatgttgcagccctcaatgtgctcgagaaaccaaaggactcgatgacagggaggtatgccttgatgttgtatagtggggtac

SEQ ID NO: 72998 - DNA, 516 bp, Glycine max
  unsure (1)..(516): unsure at all n locations
  Clone ID: jC-gmfl02220062f03d1
acattagtaaacaaatttattgcatagaaagatacgtgcgtttgcatattgtattgatgtccagttcaaagtacaactaatatgattatgaaacagattgtgtgacaagcttattccaaatcatgtttttcatgatagatcatgcatgattcaccttcatttctcatcatatttgacttcatgctcctcttgtatctcactagaagtgggaaccgagctgacactgcttccctcaactgcaccttcagattccaatagttttgggtccatatgtacatcatcggaaccgtctaaagaatgagctactgactgattatcagacatctgttccttttgggccgctggctttggccgcctgattgcttctgcagcctccggcatagctatggngggaggttgaggaggaacccatacgcgttgaactggctgttggattggctgctgactggatgcagcaccattgggtactccattagactcattttcattatcaatctctctaattctgacattttt

SEQ ID NO: 72999 - DNA, 524 bp, Glycine max
  unsure (1)..(524): unsure at all n locations
  Clone ID: jC-gmfl02220062g03d1
aattaactatgggatttaaaaactagttgcaatgtaacatgaattgaaaagacagcaaactaaaatagcacctaaaatgaaagacaaacaacttcatcaattctaacaaagcaaactcaacaaaagtattacttaatttagtcaaacagactgaaacccatgtcatcgtcagactcttcagctggttcttccttcttttcctcctccttggctgcagccgctggagcaccagatgcagcagcaggagcagcaacggcggcaacggcaaatttacttgggtccttcagatactccttgaccttgtctgcctccgggaaagaataatctgtctcaaccgcaacagcaagaacattcttgtaggcattgacaaacatgtgtggtgctgcagcaagtgttggatatgaaatagccaatgaaagtgaagtaaccattgagacaccagcagcaaacttccaatgaggtcatcctcagntagatcaagaacctcagggctgaacactgaaccattatcataaacagagaga

SEQ ID NO: 73000 - DNA, 513 bp, Glycine max
  Clone ID: jC-gmfl02220062h03d1
ataaatagggaactgcaaagccatttatttatttttgaaatacttgtacaaatctttgtaacaccacgcacgtcgcaatacaagttaatgaagaatatgcatgttttcaaccacagtcaagtcctttatattcttgccatttacttttgatttcgatttataggtttctgttctatttatgcaatttttattccttcctacattttttttctccaagtgacaacaatacgaaataaaaggaatggccatcgcccaaaaagtttaccttttcgtatgcacaaatgcactatacaaccctttttgaacaaaatggaaagtacaatgcatagctgcaacaagtcccagtttaaatcttgaagtatttgtaaccatactcagggcttgtcatcccctcttcccaatcacccatgcggcgaccaccaaaaacaatttgttggattccatgatattccgagctcaggacagttaggcagttgaggagcacatcaattgcaaaataatcagatgtaccca

SEQ ID NO: 73001 - DNA, 476 bp, Glycine max
  Clone ID: jC-gmfl02220063a01d1
aagaaacaaaattaagaagtcattaaatgagtaaagcacgtaaattttttaaggccatacattggatgcaagaattgctatcaagtggctgaactataatataaaaagaaaaaccctaccttacaatcatgagactactcctacaaacgcaaaagctgctaccgcaggcaacaacatacatagagtaactgaactaaaccataaaccagttaagaaaaagagcaaaaatctatcttaacttgggccgctttgtcatgctactacttagaccggctcctcttgacttaccaaagctttttgcctttcttcttttcctatcttcttcactgtcagactcattccctttctcccgatctgcattgcttgcttccctctccagttcttcccatgtctttcccttctcttcctctgaatcctcctcggaatctttctcgccatcatcctctgactcaacaagtgattcactatcagaagct

SEQ ID NO: 73002 - DNA, 516 bp, Glycine max
  Clone ID: jC-gmfl02220063a03d1
acatgcacatcaagcgaaagaaaaacagagaccagctgagcttcattgctaactacaccccaaaagctacaagctggtccccaaaacctctcactcccaaagtgaaaaaaatgaagaaaagtaaaaatctgcaacagaaactgaagaggagtagattccgggggcgtatctgcaagcatcccacagttaaacctctcctcagaaagtgaaaaactcacttatttaccgtcaccaattcaagcttgtttcctcaaatcatttgaatgaataaaagtgccgtgaaacccataaggaactctagaaggaagcttaacggaagcctcaagcttcaaagttttggcattcacaatctgcagctccgatttccattccttctcatcatgcacgaatgcgagaatatagccatcatcttcatcaccgtcaacaccatttggaagaaacagaggctccccaccgaacctctcttccccatacatgtacttgttcacttccccactgaacaaatcaactttagcg

SEQ ID NO: 73003 - DNA, 470 bp, Glycine max
  Clone ID: jC-gmfl02220063a04d1
gactaaagaaataacacgttcaaagacttttattccttgtaaaataacacacatatcacagactgtatacgtccaaatctgaggtatattatgtccaattgtcacttttttcctcagatcaagttgctctaacagcagcaggcatggaacgtatatactttaatttcacaaactaacttatcattaggtttgtataaaaatatcatatgtgcaaacacttctagctatttcttacggccttgatttaataactaggtttaaatggcttgtaagtcttgaggtccaaaaccacccctgccatggaaccaactgcagttaacaatgaaatgatgaggcaactggcactaagtaactgaagtccaagccagcgactggtccatcgtccaatcttcttttgcgaaatatacatgtcaatagggaaataaactgtcaagggccagaacccaaaagcgccaagtattccaaccaca

SEQ ID NO: 73004 - DNA, 292 bp, Glycine max
  Clone ID: jC-gmfl02220063a05d1
gttattaatgttactaaattaagtgtttcgattttatgtgcgttacttgtttatcgtgactgctagaaaataaccccctaaaccaagggggccaaagacagcgagcaaaaaaggggccgtagaaacacagcactaaagcggaaccggaaagcaaggagacccagctgcacaaccaaggtggggaggggcaagacgaaaaagacgaagcgcccctgaggcggacttttgatcaccccgggggggcgcaaaatgggcggggatggccccaaggggcatatgccgggacatggca

SEQ ID NO: 73005 - DNA, 551 bp, Glycine max
  Clone ID: jC-gmfl02220063a06d1
agattcaatccaatgataaactcaagtatattttgaggaaacccaaaaatgttaacgatgtactacatacttcctcagttgaaaggggaaaaagaagtaaaaaaaatgacaacaaactagactatgtcctcccttacgatgttaaacgacctacaagtataacgatccctcaaacaaggggtgtgggagagctcattggcagaacttagaaaccaaagaagccaagctcgctagctctctccttctcaaatgtctcaaagtactgatagatgatggttactgcaagcaatattcctgttcctgaaccgatggcccccatgaaatctgccaacactgtcagggcaccaatacagatgcctccaaatgctgcggcagtgggaatgtatcgattcagctctttctgcaagtttgactcacggtgtccgggcattaccatttgttgatccttcagctgcttggcaacatctctagcagatgaaccagagacttcaatccatgtctttgagaacaaggcacatgctgaaagcatatacacaagatagaacagtgca

SEQ ID NO: 73006 - DNA, 501 bp, Glycine max
  Clone ID: jC-gmfl02220063a08d1
attaagaatgcactcctacaaactactttttactaatgttatagcaaattacaacgggatccacgaacaatgagttatacctacaactatggttaaaatgggtaacctaccacccacccaaaatacacttccaccgatctcatctcaaggggtgaaaagaaagaatttaatgtactagtgtggagaaattggtgctacacagatattacattctaaaatccaaaacgcaaactgtattattagcaaaacatgcagcaatcttgtcaccctccttattccagcagacctcaaaaatgcccccattgcctgtgtatgttttgacaatcttgccgtccctcaatgaccatatgtgcatggatctgtcaagagacccactaactagataatcgccgttgggactgaaagcaacagaatatacgggatgcctgtgtccatccaagctgtacatgagtttcccaagttccacatcccatagctttacagttgagtcaaatgaagcac

SEQ ID NO: 73007 - DNA, 532 bp, Glycine max
  Clone ID: jC-gmfl02220063a10d1
gacaagtaaaacatttcaacgctctaaagaggcagggaccaatacctaaaatcaaaactagtaataagataagttttccgtcgaaaagaacaacaacaacaacaacaacaacaacatagtaatgtttatttctcgcgttgaaagaggcattaattagaaatagaaggaaggcgtctatatgattattagaaagccgaaaagcagaacagatagatagtgtgagtcactcggggaatgtgagagcagtgacgagagggtggaattggggaaaacgagcgaggagataagaaggcttagcgagctcgaagtcctggtactgaaacgcaggggcacaagtgcatcctacaagagtgtagttcctctcactatctctagcttcagcttcagcttcagctttagcacttccgaataccccgttcgcagagtaggtaaagtccttggtaggaaaagagccaaaccagacgttgggaggcaccgtgtactgcggcacctgattctgagtcagatctgattcaacgcaagtgaaatacgc

SEQ ID NO: 73008 - DNA, 361 bp, Glycine max
  Clone ID: jC-gmfl02220063a11d1
ggaaaaaagaaggcccggggggggcagaaaaagggaccccaaaattaggggggaaaaaaaaccccccaaaaaacttttcgggggccacaggggtaaaaaaaaaaaaaccccaaatggaacccccaaaaacaagaaccaatttacatggaaggggtaaaaaaccccggcaaaaaaaaaaattcggggggaaccccttttttttttcaccccaaaaaacgggggggaaatttccccagggaacaagtttacaaaactgggcccaaatttcttaaaacttttgggggcaaaggggttaaacccttttttttttccaaattacccgattaagaaaaaaaatgggaaaaaaaattggaatggggga

SEQ ID NO: 73009 - DNA, 367 bp, Glycine max
  Clone ID: jC-gmfl02220063a12d1
aaaaacaaaatgggaaaaaaattttttgggggaccaaaacctttaattaaaggggaaggccacccatttccttcccaaaaaaagaacacccaaaatcccctaaaccacccaaggctttttggaccaaaaaacaacccaatcctttacagggctcattaaacaaccccttggggctttggctttaaaaccggggaaaaaaaaaccatgtaccccaaaatatttttaaaacaaaagaatggccccttttctaaggaattctaaaggcggcctggtccagaacccgggggtaaaacaggccccaggggggtttccccggttcacacaccataaacccctcaaatttcggccattggagcatttgcccggg

SEQ ID NO: 73010 - DNA, 519 bp, Glycine max
  Clone ID: jC-gmfl02220063b02d1
aaaattaaaaaataaattatgaataatatgaaagttaaaacaattacagtacttgtccaatttgatagttgtttatttttgctttctacaagacatatcaaagataattttgaacattattgacattggccaccgagctacggcatccaccttgtcctgctggacttcttgcacaaacaatagtgtagttgcttccacacattagcatttccagggattatgaattggctaaagaatgttgcaggatatatagatatctttttttggccagcttccaggatgcatttgatgtatgaaaaatatcaagcagattgccacattatacttcaagatggtacaaggtctctttactaccaggattactattagtttctggagtcttaactgcttcactctccaaatattgaataaagtccattaccaaaggatcagtccaaggagctcccagtggagcttcatcaccagcaacccaccctagatggccacctttgggtgtcactattaacaagcagtttggat

SEQ ID NO: 73011 - DNA, 425 bp, Glycine max
  Clone ID: jC-gmfl02220063b03d1
aaaaaaaaagggggccaaactctgcttccatagcaaaatttatgtacaaaatgcaattttggggagggccattggcaaagatctatgcgaatttcaccattggggtccagacgacgaaatcaaaacttgccggagaggactcgccactggctcccagccgcttcgccggaatccaactttggggggagataagggccccagggggggtctggaatttaaaccagtaaaatcaaaaacaacctgtatgctgggaatcgaaaaaaacattttgttttctttaaaaatcataaatcctgggcctttgacatgaccgaaagaccactgggcctgggcttgaaccccggtttcctcctgtgatgatgcgaactgggaccaatgaatgctgtcagggcccgtttcacccaatcgcccttcaggccttcgat

SEQ ID NO: 73012 - DNA, 524 bp, Glycine max
  Clone ID: jC-gmfl02220063b04d1
agaagaacagttcatcaatttttattggttagaatcaaacaggtcgttgagtacagacaccatcccataggagcaattaaaagaaacaacaatgcctcttttcttctttcactgttttcggagatatacaaacaaaatcaggagtcaggagacttgagtggtaatatataaaccatacataatgttttgaattgctttgataacttgggggttggctccatcaagttaggtatacagtatctaccactccaaaaccaggcaaaactccaccttcataagatgatgatatttttgtacgcaccatatagccactttcgttattaatgataaccttatccttattccttaaataagtaccaaatactccagcttctgaaatgacatgacccttatcccaattaccatcacgcaccaaaattgctggagaagtggctggaaatatcctctgcataaggatgtatgctgcatcttcttcagaacctgcttcctgtaatttaaagagggttccctcaactcatcaccat

SEQ ID NO: 73013 - DNA, 533 bp, Glycine max
  Clone ID: jC-gmfl02220063b06d1
aaaaagggtaaaaagattccaagttcaatatactcaggaatttaattacatcaaactgcagacgccagctttacaaaagcaaattttccaaataaactgtgtcttgactctatatctgaggcacccatttatttctatccaattcaatatatacattctatgcttgcacatgcaaaaccatgacacagccacattgcaccctatcgcattgtgactccatcatgtggccaagggaacaaacaaaaccttttgtaccttcatgctttttggaccctgcaatgccaaaaaattaaggattgcttcaactgcgcacaattgcctagccagaagaagacgccgttctgggagaaacaagaactggttcattgcttgcagctttcatggctgcaatctcttctaagcgcttccatgtagcctctcgcttcaacttcaaagctttctcttgtgcttcatcttccttgaacttgcgcaggcactcctccaagagttcaggatcggtatcagcaaagatcttgcgtacatttattgtcaaa

SEQ ID NO: 73014 - DNA, 502 bp, Glycine max
  unsure (1)..(502): unsure at all n locations
  Clone ID: jC-gmfl02220063b08d1
gcatcagaccccacctccatttaccaagcaatgctatgttgaaattggtgatatccttaatgtccagacctccattttctttaggtgatgtcaccgtgtcccacctaatccatgcgatcttattttggtcaagccctgctccccaaagaaaccttcgctgcagtctcaccaatttgtccaccactaatttaggtgccgttagatttgtcaaaatttagctgctcaactggcaggcaaaagaaatcagcatcagcacgcatcggccagccaagctgaaaacaatcagctgaccagaaatattcatttaaatcatcatagttcctccattgtgaatgctttgacctaccctttttgctccgtgcagcttccttaagaaagcctcatcttcacctacataggctggcttgacattctctcctgtcattggactaacattgccagcaagcataccgtacaactcaaaggcatatggtgatagatatagcanaggcattctggaatg

SEQ ID NO: 73015 - DNA, 491 bp, Glycine max
  unsure (1)..(491): unsure at all n locations
  Clone ID: jC-gmfl02220063b09d1
aagctgatcttcatacttaatatttccaatatgtgattcacaaaaaataaaaacccgattttcctcatgtttagcattatcaacatacaccaacaaaataaaatccacttccacagcaaaagcaaattaggtcattctcccagctaattactttctccaacacaaaataataacgagtttacagaatttctttttctttttgcatttatttgttggcaggagttgggaggagacgaacttgaactctcacaagcataagcttaaatgcatatttaagtaccgaatcaatactcccattttttcaactccataccttctggagcactgccttccaccttctttgatcccacttctttccaatcagttgatagcactgttccatttgactccaagaaagacttgctcattgctctcctcatgtcctcatctgcattttggtaaatatcacggaacaatttactcaaagcagcatcaccatcaagctnttcttc

SEQ ID NO: 73016 - DNA, 402 bp, Glycine max
  Clone ID: jC-gmfl02220063c01d1
gttcccaaagtttaattcttttaaaactttaaattaaaccaagcaattttaaaaaaatgtttttaccccacttaacataaagttccaaaagtcccggaacttggcaagttccccggaaagtccaacgatacggaaagctccaaaagaaaaacaacacaaaaaggaacctaatagggcaaacttctaatcataatcctttccttgatcaccattttaagttgcctctgcaccaacttcctcataatccttttccagggcaccaagatcttcaagggccttaaaaaactcccccttttttatacccttaccaacataccaatgaacgaacgcccttttggcatacatgagggcaaaattgcggtctttgcaaaaaaagacctaaacaacactggtggaattgga

SEQ ID NO: 73017 - DNA, 469 bp, Glycine max
  Clone ID: jC-gmfl02220063c02d1
agggagaacccaatattaaagtagatataactatgtgtaactcatacagagaaataacaacgcaacacaatttaaagctatccaatacaaatctctcatacaagaggagaggggcatataagtggagccctcatcaccctcgatcttattcttaatattaataatgctactcatatactagtgagtagtttccggtttcctgcgtccatgactttctcttcaaaccttgatggtagcgcagttggtggaggtgctgatcttgtaggggatggagactccgcatttgccggggagcgaggcggcgttgttggctttgaagccggagatttggctggcggccgacttgaggcagttgcacgccgtctggcggtcggcggtggtcttggcggcggcattgaggctcttcactccgatgcagcatcccgacggcggcgttcctccgttctggaggtaaccgatgcaaatgatc

SEQ ID NO: 73018 - DNA, 438 bp, Glycine max
  Clone ID: jC-gmfl02220063c03d1
ggcaggaaatcgttaagttgtcaacacgatcggaaattcgtagtacatactcacgaaaatgatgatggacatcctgagtactagaagttacaaaaacaatgaaactaagaaaaagaaaatgatggatttccctgggatactgatactggtaagactaataagagggtcccaaaatacattactcttgttcaaaagatggaaaagcagaaccagtcttaaggattgggtgcgggctcttgagcctccttggaaagcttgatctccttgagctcccgaatcaattccttcatgttggtgtgcgaagatccaccaacctttatagcactcttcgccgcaacgcttagctccttgggtttattgctcattcctccatcttcttcttcctcactcatcaacgaagcaatcgcgtttacaatctgctcccgtttaccaccttaa

SEQ ID NO: 73019 - DNA, 546 bp, Glycine max
  Clone ID: jC-gmfl02220063c04d1
ataagaaaatttctgagatgttatatctcctttatggtacattgtacagagaggagctgttccagccctctagtagacaggaacataggacgaaccatgcaaattcattttcacgctcaaattaatccaagctcaagttaatattattcgaattccaaaattattaattgcaagggctattaacagtacaccaccatgaagctgacaaattggttttgaggatgcaaccctgaacttgatgtcttccttgccacgtagtatgtactttgttatttatttccaagggagtttaaaagtatctttccaccatccttgttttgagcaatttgcaacgattttgtccaaccgtgcaatgacctgagaaaatgttggcctcacaacaggtgttggatcccaacattcctcgatcaactctttcaactctggaggataatgttttggtttgatcttgaatgctggtcttttcccttccaagcacatcagtctaactgcctcctccgaggacttgggatggaagggatgtgtaccctctatcatctcatatat

SEQ ID NO: 73020 - DNA, 474 bp, Glycine max
  Clone ID: jC-gmfl02220063c05d1
agattcaaacaattatgcataaataaccatttatacaaaatagttcacaactttagaaagcaaatccagactggtcgactcaggtctaaaaccgttttcaccccaagctagcagcatcagtccataagatttttcaatcaacaggagcagatttaataaacacaagacaatgttctactcacactaagtcattcaaatggccacccagaataccctgcatgatgatgatggctgttctcagggatagttggtgtcggtgagctgcttactgttgcttcatcattactgcttgaatgagaagaacgaaaaggccactacatggaaaatggatttctccttccatggctctgcctaccactactacttaaacttgcacttctacttctaccatttgtgctgtggttactactactcaatccttgtggcagcagttgctgacgacaaactgggcaggagttatgctggaccaaccat

SEQ ID NO: 73021 - DNA, 535 bp, Glycine max
  unsure (1)..(535): unsure at all n locations
  Clone ID: jC-gmfl02220063c06d1
accacagaaaccgataacaatcatccaattcattatagcaaaatgtaggtccaaacagattttgtttgcagattgtaacgataacacagaaactttcatttaaataaccaaaaaaaagaaaaatctcacgcatctacttataagaagccacagctttgacagaaaccattaaaatccctacaacatgttaaagtaaaaacttaaaacaatccgcataacataaaccaccataacagtaatttcaacgagcacttgatgggcaatctctggcgaaatgcccagactctccacagctgtagcagcttcctccgccgccaccaccttctccaccaccaccgtacctcccgccaccgccgcctccatacctgccaccaccaccaccgccttcgccgtacctgtctccaccgcctccttggctgcagtccctagccagatgtcccgattcaccgcagttgtagcaagccccgccaccaccgtctcgcccaccaccaccgtagccaccggctccaccatatccaccgncaccaccgtagcc

SEQ ID NO: 73022 - DNA, 380 bp, Glycine max
  Clone ID: jC-gmfl02220063c07d1
gccccgttaaactattaccaatattcataccatgctagtttcccctgattgtaaacgtcattgtcacttaccattttgggaatatatctcaaccttttacagttcttaaataagttttactatcaataaattttaaaagcaaaattattcattcatctaaatggctaatttgaagaggttctccaaatccctgcttgcattaacttaggggccccataaaattagcataattccaaatgtcatgggatgggaccttgaaccttcaaaagttgatcacatgggttttctagtagttttgctgaagctgaaaatattcaagaacttggcaagcgtaccgaagaggcaagcttttttatacgtgggaaaccaatatgaaaatg

SEQ ID NO: 73023 - DNA, 519 bp, Glycine max
  Clone ID: jC-gmfl02220063c09d1
caagagagcatgatcatcatatatataagtcagtaaaatatatgaaacctagcacaaacttttttttatggtaaacctagcacaaactattaaggcctagtatttaaaaggaaataatacataaacaaataccctttttttaattcctaattatgtgagccgcaatatcaatacatgtcatgttgcaacgttttcacatataaggaaaaagcaaaagcaaaaaaatgttaatcaaccaaaccacctagtgtatcttaacatttctcaaggatttgtttatgttcttcttaccccccctccccctttccctcttttcttggtttttgattccacctttctcccgttcctaatctgtatcccctcgcaaccaacaaagctatgatgaaatgcagcccatgatcattctttcattcacccataagcttctccacctaagaaaaccattgtactgatgaaaccattttaagttccttcccttagagtccctccattatggcaatggcaaatggcatgaatcac

SEQ ID NO: 73024 - DNA, 524 bp, Glycine max
  Clone ID: jC-gmfl02220063c10d1
gttaccggaaaaagtaagaagtactagtgaaatggtacaaccaaccagacccgaataatgatacatacattcaattcaattgtggaccaggtgagagcgagagcatgcacaaaatgataattaaattaacttaaaagaaaacttcaggatcatcaaccatccaaccaaagatcaacggccaccgattcaacaggaaagaaaacacaaaggaaggaaaaccatacacagaagaagattccggagaaattcaataatacacattttttttttttattatttcatttttcccctctagtagtcagtgctgggaagctgctcgtgggtgtggctgatgaagacaacctcgtagataagcccagcaattccacctccgatgagagggccggcccagtagatccagtggttggtccaggtccagctcacgacagcaggcccaaatgtcacagcagggttcatggctgctccggagaaggccccacccaacaaatgttagcgccaacaatgaaaccaatggcgatgggagc

SEQ ID NO: 73025 - DNA, 310 bp, Glycine max
  Clone ID: jC-gmfl02220063c11d1
gggacaaagaaaggtgaaccatgcggaaaggaatatatttggaaaatcgaccacgcggaatagatgggaaacatactggacattatgctaggtaaattttgataaccgacttaacctaatcaagatgtcttaaacctccttgagacaatatatactttgatcaaaggctgggccagaaacggctataaacccaatgggatatgagatgacagctggagtaagagactatcactaaccctaggatgcatcctgaagggcctgatgctacttgggaaggctgattcaaatgatgaccgccaatactatgttt

SEQ ID NO: 73026 - DNA, 462 bp, Glycine max
  Clone ID: jC-gmfl02220063c12d1
cccgacatctaaatgtcaaacatcagtgacttttattacgcaagagtctagacattatacccgtgtcaaacatcacagacgtatttttttacaagcaacagcaggccattcactcactgatgcattctaaaattaaaattaaaaataataaaaaaatatctccaaataacatgtggctggcatgggcaaacactagtagcctccaataataataataatttttaccgagagaaatccatgaaccttaaccaaccaaacgcgccacccttgttcgttttgtcagcctctcttgaacacgaaccaaacggcgtcgttccactaccctcgtccccattaccaccacacttcctcggacacagaaaaaagtttctcgatccaatatccatcagcttctcctccctatccaaactttgtaggctgaactgagaataatggaggtcgaaatgcgaagggtcgttcgac

SEQ ID NO: 73027 - DNA, 466 bp, Glycine max
  Clone ID: jC-gmfl02220063d01d1
gaaaggaaacttctggattatccatatcctcttcaagttggttacaacttttataacgtgaggacccacgcttaacagtaaatggttagctgctgttgctaagctctaactatatgaacaacacgtaactaccttccctgcctacgatctacccacagcttttaccccattccccaagcccttctatcctaattggtagatatcacaatgcttgggtagctgcttcgtcctagctgaatgcctctggtgcatagcttcatcttcaacgtgcgtctcagatgcaatatccaccatctagaaactgcttaatagtttagatactacacaaggatggattgaatcaaatgaaattgatctcaaaatctacgaattgacctgcaaccctacctatcccttattattttattttttttgcattttatttcttacactctaatttgggtgaacaaaatgaatatcattagta

SEQ ID NO: 73028 - DNA, 550 bp, Glycine max
  unsure (1)..(550): unsure at all n locations
  Clone ID: jC-gmfl02220063d02d1
aaatataaatactaacacatacaaacggcatttattgagatagctcaacgagttgcatgcatggagttatgggtacacaactaaaattgcaagaaatggataagttctttcaaattgatcgaaaatcacatccttatcgtactctttgcacgtctgcaactctaacaatcattctggggttggcaacaacattaaatatttggcctcatgctcagacgagatgctatcttttggcctagagaacggtcagcctgagaccagtaagatatccagacactgcggatttcatgggtgacccgtgggtcagataaagcatcaacccatcggcgattaaatctatcttgcctgtcaggtgcccaagatcggtatctctctccgggctgcttaaagttgttctccttctcaattccacacttttcacgccttccactgcagatagcaggaggtatggggaacgtttctgcatgacgaacaggatcataccttgaagggaagtaattaacctnctcatccctgtgaatgaaattcatgaaaccttcatgatgattgt

SEQ ID NO: 73029 - DNA, 416 bp, Glycine max
  Clone ID: jC-gmfl02220063d03a1
ctcgagaccagtactacccctctccccattctctctttctttgttgggacttccaccatgagtgacgccggcctctgccttccgccgcagttcctcgccggagacacccacagaaccctttcgaactccgatttcagcttcccttcggagttcccttacgagttccgagtgtcttctccgccctccacggagaccgagagcagcgacggcgaagaggacttgctcgccggcctcactcgccgactcagtcagacctcgcttcacgaagctcgcaagcagttctctactggttcggagattccaaggaagacccgtcagggtttggtcggttcccctcagtcgacgctcgccggaatcggcagctggtccggtctgagcaccatttcggcgaaggaagccccaacgggtacacgcgt

SEQ ID NO: 73030 - DNA, 526 bp, Glycine max
  Clone ID: jC-gmfl02220063d05d1
atctataatacttatttattgggcttattcaaatataatacatgaactctaacactctggactattccaactactaggggagccccaacaaattaaaccaccccactccaaatcaacataagaaccattattttatccctctgaatgtggctcatcatgcactccaaattcccacacgtgcacatgcacgtacccaatggatgcacatctattttcactgccttcacaagtcacgacaacatcaagagagctctcgagtgaaggcttttgatgaagccaatgaataatcgtgggcacctgctccgcctgatgtatgtcgagtgttgtaggatttgcagttcggacacttttgagccacaaaatggaactgaacgtgagaagttttaccacagtcattgcacaggatccaaaccattttattttgatattgctcacgcattcgtgtagcagcaatctcaaggccaaatttctcccaaaccttgacatgtcacagactgactttgaacagatagggcatgcatacctg

SEQ ID NO: 73031 - DNA, 539 bp, Glycine max
  Clone ID: jC-gmfl02220063d07a1
ctcggaattcggctcgagagagaatcgaagtggcacctgctgtatggatctggaaaatttgaaacaacagttctgcatgtaggaaatcgcatgcacaacctggaactttgagcaagttgaagctgaatcttttgaagaggcatagcttgcatgtagaagttcaaaaatacttctacaaggttgttctgaccatgaaatattctataacatttataacagagaaacttgactacctctagcatacaattaagaagctgcttaagatgaaggacacattactaacattacggacatgtattgtatacaacttgttaaagccactgaaatttctggtgtcttggagtattttgtgatttgtgatttgtcatttttattttattctctatgcagtagttattgtgttttcagtctaaagtgcaatgagttaagctttgtaattaagttgcgcgggtggctcattaagatgttacgtagaagtaacttacgctctgtttggaagccatattgtatcagaacaaatgcattctgctgtatgactg

SEQ ID NO: 73032 - DNA, 421 bp, Glycine max
  Clone ID: jC-gmfl02220063d07d1
cattcatacagtaaaatgcatatgtttatgatacaatttggcttacaaaacagagcgtaagttacttctacgtaacatcttaatgagccacccgcccaacttaattacaaagcttaactcattgcactttagactgaaaacacaataactactgcataaagaataaaataaaaatgacaaatcacaaatcacaaaatactccaagacaccagaaatttcagtggctttaacaagttgtatacaatacatgtacgtaatgttagtaatgagtccttgatcttaagcaggttcttaattgtctgctacaggtagtcaagtttctctgttataaatgttatagaatatttcatggtcagaacaaccttgtagaagtatttttgaacttctacatgcaagctatgcctattcaaagattcggctt

SEQ ID NO: 73033 - DNA, 602 bp, Glycine max
  unsure (1)..(602): unsure at all n locations
  Clone ID: jC-gmfl02220063d09a1
ctcggaattcggctcgagcaaacactttgccatctctgcaaaaataccagaattcacaaacaagaacagaacattggtccttcagtattctgtaaaatttgagcaagagattgaatgtggtggagggtacatcaagcttctctctggatttgttaatcaaaagaagtttggtggggatacaccatatattttaatgtttggaccagatttatgtggcacggatacaaagaagctccatgtgatactctcctaccacggtcaaaattaccccataaagaaggacctgcaatgtgaaactgacaggttaactcatttctacacattcattctcaggccagatgccacatacagtgtcctggttgataatagagagagagattctggaagcatgtatacagattgggatattcttcctccacgaaaaatcaaagatgtcaaggccaaaaagcctgcagactgggaggaaagagaatacattgaagaccctgatgatgtcaaacctgagggatatgattcaatcccaagagaaattcctgacccanatgctaaagagcctgaaaactgngatgaagaggaagatgggaaatggaaaccaccaaaga

SEQ ID NO: 73034 - DNA, 382 bp, Glycine max
  Clone ID: jC-gmfl02220063d10d1
ggggggggggacaaaaaattaaaaaaaaaagggaaaaaaaaaaccaaaaaaaaaaaaaaaaaaaaaaaaaaaaagataaaaaaacaaaaaaaaaggggaaaaaaaaaacacaaaaaaaaaaaaaaaaaaaagaaaaaccaaaaaaaaaaaaaaggttgaaaaaaaaaggggagaaaaaaaaaaacccccaaaaggggggaaaaccaaaaaaccccttttttaaaccaaaattaaaaaaaaaaagggggaaaaaaaatatgggccaaaaaaaggggggcaaaaaaaaatggggaaaaaaaccccccccgcaaaaaccctttttttttcaaaaaaaaaaagggggagcttaaaaaaaaccgggaggcccctaaaccccggaaaa

SEQ ID NO: 73035 - DNA, 137 bp, Glycine max
  Clone ID: jC-gmfl02220063d12d1
gtacaaacagcaacgtacatcggtgacgagagcaaatgaaaggcatctagcatcacagctttcatgtagcacgagaatattgtccacctaaattacaacagaatacacttcatcctattcttcgggggggggggggg

SEQ ID NO: 73036 - DNA, 399 bp, Glycine max
  Clone ID: jC-gmfl02220063e03d1
catctactatattactattaaaaagcattttaagctttaactatgcgggttacaacaggcatgagtaattttgaagtaatcagataactactgttctcatacacggcttccatggtgatacaggtaatactaatacattacatggaaagtgccataagttagactgcctcgatggtttatagtagttattataaattatagtacacataaatagatgacttctagcataaaaaataataatactttaaccaagtacacaagaattattatactgcttaactgatttgaaattctccacttgcatgaacctctttgaccttttgtcatactcgtcttcttatcctctttttctccacgtttttttcccttcatctctttgccttccagccaaaacttttg

SEQ ID NO: 73037 - DNA, 542 bp, Glycine max
  Clone ID: jC-gmfl02220063e05d1
cttgtgtagtatactagtagtaaagggccatttatttagtaattttacttataagtgaattcactatagctttacaattttcttgcatgcctttgatagaaagattttatccttctcataccctctccaagagcagatggatcagcagcgaaagtaatacgaagccaatcttttaggcctactgcagttcctggaagaatgatcacagattcctcctttgcaagtttgaaacagaagtcaatatcatcactaatatcttccagaagtgaaaggtttaatttcaccatcatagccatggatccttctggtttgtaagggcaaaaaatgcagggaatatcctctatctctttacaacatatatctgctgtatgcctcaaattatcaatggttttctcgaagaaaatttcttcggtatttgcaattatctgaggtacagcagcctgcaagaaggttgctggacctcctagaagatcaaaatactttttgatacgctcgactacctttggttctctaaaagtgccagatggatccattgtcacaaa

SEQ ID NO: 73038 - DNA, 463 bp, Glycine max
  Clone ID: jC-gmfl02220063e06d1
aaggaaaaaaaatccgttaatgaaattgaaactcataatcctccctaataaccatggcagggagaataaagaaaaaacatgcgggacattcttttcatcctaaacaagggtactaccctggttgagagctaccaaaaaagaaaaacataatttaaattcctattaaataccctgacaaaacaagctccacgacttacgagtcctgaaaacctcatattttgcctggattcatgaagactttaacccttgctcccattgatctgggcggcagattggacttgaacttagcacgaactataccactggtaccatgaggcctggggaccttaccccaaatgcagcgataggggcttccgtccttttttaccttggctttggaaatggaagccatacgctttccacagtaccacgcaacttgttccttaggggttacattctcaatctggattaatgaggcgtttgg

SEQ ID NO: 73039 - DNA, 506 bp, Glycine max
  Clone ID: jC-gmfl02220063e07d1
aaaaacaagactacctatattagaatataattctcacaagacgagtaaaaaatcataaattaaaagatatgttcaaagcattatcaatctacagaaacccacccccttaacaataatcctaagttgagaaaagaaaagtcaagagagttgcaaataaatagaaaaggaaaaaaaaggggaaaaaacattaaaactgatacattgcaagctggaatgatacacatgcccacaatagcatcgcctgctgctcagcttccacttggaaagattcagttataattcaagtaaacaacacatccaccgaagcctaacttcgaaaatataagtatcaatatgattcatggctctgatttggacaaggagatgagcttgcacattactgcagggcattagttgctgtgctggtaacagcaactcaaccaaaatagtatcataggaagtaatcaggtgttctcctggttacatctggctctcccctccttggagcttgctcaaactgaatgaat

SEQ ID NO: 73040 - DNA, 364 bp, Glycine max
  Clone ID: jC-gmfl02220063e08d1
aagccctaagcaatctaaaaacgttaattgggtggatagacactagtaagtagacattagtcaacctgtcagcatcagggagtgccaaagcattcgctaaattaagaaagctagcacaatattttcaggtgtataccttaaaatagcattcatctagtctactaaagaagatggaagagtaactagagatactaacccatactacaactaaactagcctaactgataactggagaaaataatgctagcaacatgaagatgattaccacaaacgactcagctacttgatacacggactaaatgcattcgaacactctggcctaaggaagaaaaaagttaatgctgtaagcacaagacaggcaccc

SEQ ID NO: 73041 - DNA, 466 bp, Glycine max
  Clone ID: jC-gmfl02220063e09d1
ccttcaattcgatcccaagataagcatataatgtaaacacagtaagtctttctacaactaaaccgaacagtggtagttgagtttctgatgtttcttggccgtcctagttactttccacaatcacctagtactatgggatcaacattagaaatacaacttctccccatgccgagcaggaagtgggacagtagttataattaacacacagaactgctaccgttaaacggttagtaattacaaacaacattgcaaaagtaaattggatcaaggtcgtcatatcagtggttaccatcttcaaaggttgtcatttctatcggtagtaagcctgctgataagtgggagccaaaacatttccatagccgccatatgcatgaggatagttcatgggagctgccgggtaagaccctgcaatagctggtgccggctcgggtgaataagcagcataaggatttgctgggggacttct

SEQ ID NO: 73042 - DNA, 521 bp, Glycine max
  Clone ID: jC-gmfl02220063e11d1
gattgcaacatacattcaacttatccaaacaaacatgttcctataaagattacaagctccacaattactaatattcaaggtagcttcataaggtattatagtagaaacaaatgtaacacaaacaaaagaccaagacactattatgatacttgtaaccatagacaacatcttgaatagcagttaaccatcaaaacccggcattcagtcatttatatcataagttctctttccacactcttcatgttccaataccaactagcacctgctcctggatttttccatggccctgggagctaagccaatggcatcagaacccttcatgattttcagtcttttgcatgtgtcaatgaacatatcccatggtacatctccgacaagcatccagtcaccatctttatcttcataagtgagtacatattctgaaccatgcaggaggtccttcagcttgctctcactcaacatttctcttcctggagctccatgggaaccacattgacctagagtgaaacagctgaacattt

SEQ ID NO: 73043 - DNA, 449 bp, Glycine max
  Clone ID: jC-gmfl02220063e12d1
caaaaacaacttttacgttttccaattctacattataatggtgacatctttgaagattttcgaccaaaacctaagctctgtatagagaacagaaatggaagctccgtcccgttctactaacaaaactggaagtagaattgatagttgatcctatagaaagtttgaatcctaagttctggaagcagtaaagatgctacaacaaatccgcaacctaagttctctaagtagtatttgggctaaaaataaatccataacccaagaaaccacccgttgaaaaaaaattaagcagcaacagcttgcttctgagcaaaagcaatccccttctctatgctggccatgagttctggcttaagtgattccaaagccttctgctcatagtcagtcaacccttggaggtcagatggaattaatgcctaaactcctttcctaccaagcttcacccttgaagc

SEQ ID NO: 73044 - DNA, 385 bp, Glycine max
  Clone ID: jC-gmfl02220063f01d1
gcaaaaactggttatgctacaccaatctctatctattatgaagtatatctacatgcagaatatgaaggcggacttaacatactttcaatattcaatctttactgtatgggctatgatagatggacccgtacactatggcacatgttacattcatcataccggaatgcatcaatgatcacatactactaaaatttgcggatgacttgaaaaggctacttatagggatataaagatctcgacttgcttgtacgcttgcaatgaactgaacgtgaccatagatctcgagatcaaccaatgtccgtggggattgcactgccttggctgtgggctggacatcagctatatttgacggagcattgttatccacgaaagccatacacagaag

SEQ ID NO: 73045 - DNA, 482 bp, Glycine max
  Clone ID: jC-gmfl02220063f02d1
gttgctattaaatgagcataaatgaactcttattctttgaagagatattagaaaacttaactatccaatcacaatgcatttgtatacacatgaaattaattaaaaataaatacaatgatctgggttgtctaacttgccccgatgatgatcttcattcgagaacaacaatattgatcacactcatacttaacatcactttaaacttcttaatcatattgctctattatagtttaaattgtatttatattctcaccctaggctcatcacatgccctatccttccaaggctttattagcaacaaatagacttcctcaatatacttgatcatacggaaagcacaaaaaagaagacagaaaaaatgcatgcatattttgcagacccaacaagagttatgatttacctctgcaatattaatatataaagcctaaggatgagaggaagaaggtggtactgggaaccatttggggtgatggaaaaagtgc

SEQ ID NO: 73046 - DNA, 588 bp, Glycine max
  unsure (1)..(588): unsure at all n locations
  Clone ID: jC-gmfl02220063f04d1
cacatataactcttcatatacttcaaatccaagtactttcactacagtcctgtataaaaatgtcgccaggaaataccaaaaacgccaaatacttgctaccaccatcaaaacttaaaaaccagaataggaaacaaggatctataacagtacagaaaaattatatctaactctgaaatccttaatagctaaaataacttatgcagccaaatggaaaactgcttcccaaacgtcatctagtaattctgcgaataatcgaaactcaatgggcgttgaccaaatggagcctggaaaacagcttgtctaaattggtcatatgaatgtgcatacattactgcagcacttggccactgtacataagcagcatccctaggcacctgattcaaccctgtgacaccaaaaggattcatcatagggcttggttgaggtccatagccaagtgaagcttgattttgtgacatctgactcaactgattaaaagcattatcatactgcacaaatggatgtcgaacttgttgcagattaaaaggcatcnaagtaacagaagaagttggaaatactctagcatcccttcatagtacgatcataatc

SEQ ID NO: 73047 - DNA, 534 bp, Glycine max
  Clone ID: jC-gmfl02220063f05d1
aaattcaaaactgatagtgcattgcattaaacccaatactacatgacgatttaaatgacatacactagaaaattgatgatacaactattcacaatgctgacgatttttacagaaatctaggcttcctacaagaagatttaccgactcacccccgcaaaatttaaaagacaccatagattgtatctcgtttaggaacaaggcctgagccaaatacaactatatcccagtattgggattgttcccagctagaataagagaaatttctaaccctcggctaaaagcctggttaaacattaggcgagtttggaatgttgatacaaatgggaaccacgaaaagaaggcaatgggtacaaagatgagcattcccataccagcatcatagaggcgagcaattgatcgaacggatttccatagtccgagcctcttcatcaccggcttccaggcagcagcaattgacagaattccccaaccagtaggaatgaaagccaacatagaagccaatatgtcccgtaaagacagttggtcaaatatact

SEQ ID NO: 73048 - DNA, 485 bp, Glycine max
  Clone ID: jC-gmfl02220063f08a1
ctcggaatacagctcgagctgtgtcgttcacttgtttggtctctttctttcaaccttaacccttccaaaccaacacatataaaaatcaaccctctcttcttcttctctctccgcgggttgagttgaacttcaagaacctcataaaaccctttctctctctctctctctagatctgttcaaatccgaaaccatttccgctctaatttccaagagcaaaccctaatccgctctctctgtatgatactagatttcccctcctcaaaggcgtcgctttgtgtcgatttgtaaattcattcggtagtttaggttagaatttttgcgtcaagtctttagggttctgaatcggtgagatgaatcacaacaacagcaacaacaatagagcgaggtaccctaccgggatgggacttgagcgcggtggtttcaatccgaacctgagccagaacccgaaccagaaccagaacccgagcctgaaccaagatcatcac

SEQ ID NO: 73049 - DNA, 291 bp, Glycine max
  Clone ID: jC-gmfl02220063f08d1
aatcttccttaaaccattcaattttaaaactccattcttaaaaacttgtattgacggattaattctgcaattgtaaaacggaaccccaaactgaccccattacctattggcctaataaagcgccattttaacctttttaaaggcttaaacagggttaagggtctccaaaacccagattatatgtgagcgctctcatatgggggatacccccattttgacagagcatactctcatgcccggttgcaataatacacaatttgccactagcttcttagcagatcttatcaccct

SEQ ID NO: 73050 - DNA, 512 bp, Glycine max
  unsure (1)..(512): unsure at all n locations
  Clone ID: jC-gmfl02220063f11d1
ggagtgttccttaaacttttatttctgagatcaattaaacgagttcaaattcaacaaagcaagtgcattacataattagagtgccttctagatctttatttgctcatattcattggccttaaaattggaagattcaaaggccacattgacacacaccacttcatcggtattggctagcaagttgaccctccttcacaatgtagttttgttctggaaagtcttcacccttgaagtgcctatcaagcatgtctttgacaccagcagcataacgtaactgtgcatcaatggtggtaccagaaatatgaggagtcatggcatggtttggcatgtagcgccatggatgatcctttggagctggttgtgggaaccaaacatcaccactataacctgcaacgtggccactggagcaagcatcagcaattgcttgagtgtccgcaattgcccctcgagcattgntaacaatcaagacacctttcttgcacttagcaattctatttttgtcaaacaatccc

SEQ ID NO: 73051 - DNA, 506 bp, Glycine max
  Clone ID: jC-gmfl02220063f12d1
gataaactagtagattaatcataggtagcatgcagaatgaggtttcaattgcggttttaagtcaacaaaagaacccataaaagcaagaaaacaagttgatgactggtactgatacaaaacgcacaatgataaaatgcgagacaacttattcatacaaaagcagcaggactacttatttcatataaagcttgctcttcacttcagttcttccaaaaaatcaacgttgtcaaccaagacagttttccatccatctggatctaaaaacgaagtggtttttgtattaaggccaggaattggccctggttgccgagtaatcttccctccaacctcttttatgacttggttaactacctcagcactcttatatacatcatcagtaccaatggcaatctgtgcataagcatttcccttagagtattcagtcacaccatagttatatgtcaactccaacacagttgtctcgtgctcctctccatacccgagcatagctatagtgtacttgtact

SEQ ID NO: 73052 - DNA, 457 bp, Glycine max
  Clone ID: jC-gmfl02220063g01d1
gaaaaaaagactttgagaacttgactcgagtggaggtggaagatatacaagattatgcagaagccactatcttatcaactccaatgtcttgtccactccatatccgcatgcgttcagctgtttgttccacctctttcttccaattggttttgtaaagtatcaacaagagcagcaaggtctggagaacaattccacatatcataccaccccaaagtccctcaacccccaaatttgctgtataaccaagaacgaaccccagtggaagcccaaataagtaataacaacctatgttgatgtaggccaccagggcttgccacccaccttcaatagcaacacctgaaaccactggttgaacactgtttagaaccattgtcacagaaaggaggtatcctagtttcgcaacggccttatgcaaaacctcactggttggaaaaataatggcataataatctctagt

SEQ ID NO: 73053 - DNA, 451 bp, Glycine max
  Clone ID: jC-gmfl02220063g03d1
agcattatcaacatacaccaacaaaataaaatgcacttgcacagcaaaagcatattaggtcattctcccagctaattactttgtgcaacacaaaataatagcgagtttacagaaaaactttgtctttttgcatttatttgttggcaggagtcgggaggagacgaactggagctctaaaagcataagcctaaatgcatatttaagtaccgaaacaatactcccattgtgggaactcggtaccttctggagcactgccttacaccttggttgatcccacttctttccaatcagttgatagcactgttccatttgactccaagaaagacttgctcattgctctcctcatgtcctcatctgcattctggtacatatcacggaacgatttaactcgaggagcatcaccatggagctgttcattttgtccgcttttttcacttgagctaccaactta

SEQ ID NO: 73054 - DNA, 524 bp, Glycine max
  Clone ID: jC-gmfl02220063g04d1
gatataaacgaatagtttgctcattgcggtttgatctatttccccacaaatattaatatatgcactctatttttataactgcagagacatccgacatgcgcagccaactagacatgacgaacaaaacctacaaaaagaatttaatacacacaagcaaacacacacacacacacacacggtataataataaactttaaggttcatctgggccttcatctcccatttgttctgcttcttgcaacatgttcataagcatgttcacttgttcttgcagcattgcattttctctttccactcgagcgcgtttgcttttttcatccacaagctggagttgcaagtgctctagacaccgtgaatcctcctccagctgttcattcagcccatcaatttccctgtcctttctggacatttcttggatggcaatccttctcatgctttcaacaacatcgacattaacgagttttctcttcttgccaatcagccagcccttcggatagttggcagactcaaagtcaggaggagga

SEQ ID NO: 73055 - DNA, 218 bp, Glycine max
  Clone ID: jC-gmfl02220063g05d1
catatgtgtttttttttttgttttttttttttttgtaggaacaaaaggggggggtcatttaaaaacccctcccaaaaccgggcctaattttgaggccaaaggttgaacaaccccatttgcgggcccttattcattcccaatttgggagacaccccatttttaaggatgtgggccatgcgcttgaacaaaagggggaaatcaacgtggggaaacctaag

SEQ ID NO: 73056 - DNA, 552 bp, Glycine max
  Clone ID: jC-gmfl02220063g06d1
gtgaccaaaacctttaatttaatgtgtatgtcatccggttcctctccaaataaagaagaaccagaatttcctatcatcctatgattttctgtacaagaaacaaacgaatacttttcagtgctcatcaaacaacacctgtgagcttttcctttcaaaacatgaaaaaaacatgtagaccaagataattaaaacagaataattgcagcatctcttatgatatctcatagagccatgcacagtgacgggtggtagaacaagcaacagaggtgtaccaccagttcacacaacataaactcctcaggcttctgccatctgcatctctctgcccgtgccgggtgtatatttttcatggggcattgccatttgtgatgcaaaatgattcaaacctaggctcagtcaggtctactatttcctcttctgatgcacgagaaccgtcagatttcgaagtcaagaggatcaaactctccatattctcagctgaaactgcatcttctgctttggttttgttctcaacagaaaagatgtgatcattatatattgggcaatgaacta

SEQ ID NO: 73057 - DNA, 362 bp, Glycine max
  Clone ID: jC-gmfl02220063g08d1
agtctataatttcttttatattttagccacactgatatttattgtttggatccggccctccttataacatagatcactttaaagtaaattaaaccatggatttaaaggaaaaaggggattggcttaagatgaagtgcctctttcttgtaggtaactaggccatatgtttcactcatgtctatgtcttgtccagatgtgtgagttgcaggcagcttccaattgaaccaataaagaaggttggccagaatatactcaacagaagcaagcccaaacgtcattccggggcatgcccttctccaaaaccaaatgtaataaattgcaagtcttggccattaaaatgaacccggctgttatcatgtctc

SEQ ID NO: 73058 - DNA, 274 bp, Glycine max
  Clone ID: jC-gmfl02220063g09d1
aaaaaccaaaccctccccctttttttttccaacaaggcccattaaagtttaaaaaaattaggggaaaaggggcccaacaaaactttgaatcaaggggaggaatggaagttaaaaaccctttttttggcccctaaaaatgaaaaaaaacctaggccggggcagcaaagttccccccaatgggatttgcaagcaaatagggggggggggggggtcttttactcaaagagagagggcccctaactccaagctttggcaggaaaacaaaagttttttc

SEQ ID NO: 73059 - DNA, 378 bp, Glycine max
  Clone ID: jC-gmfl02220063g11d1
aacccaaaagggatgcttttaagtattcattctttctgatcacaagtttgccaaaagattcgaaagataacatccatattatagaccaaaatgatcttacttacaaactataaccactcgagatttatttcaagttcaaactacaaccactaaaagaggggaaaagcaacccaacacatccattcctcacgaaagtagccaggctagcatagataacctcattcttgtgttgaaagcacacaacgaagacatcccccttcatgcaaaagatcaaaagccttgtgtgatctccgaaagggtcaaagtatgggtaatatactcatcaaccttgatttccttcttcaagtacttgtctacaagccaaggcacctgtgacct

SEQ ID NO: 73060 - DNA, 474 bp, Glycine max
  Clone ID: jC-gmfl02220063g12d1
acatcaaaactttgtgattgctatccgccaaagttgaattacatcgatgtttctagcatcacaacccttgttccaatcaataaaactgccaagccacaacagtaataggacgcttatatcaaaccaaaatccccgaaaaaattattcaagtagtaactgcagcttttacacataagcacctttaacttatccaagacaaatgtgcatagctaaatctttttcaaaggaagccgttatataattctaaggatgattatttctgccacgagactcctcatcacacaacaaccgtgaatttatctgctgtctgggaatttatcctcgtatgactgaggcaccatgaagcttgcagtgatcatcttcccagcaaaccatcttccgtgcaaggactgctgtgcacttattgcagattgggtatcttcaaatcgtaaatagacaaaaccagcactcttcttatcaacatatatgtgtttt

SEQ ID NO: 73061 - DNA, 350 bp, Glycine max
  Clone ID: jC-gmfl02220063h01d1
cgggaaaccggaaaccccattccccaaaaaatttaattttccgaacatttaaacagcctggtttttaccccaaattttgattagaaaaaaaatccccccgcccccaattcccaacttacccccccccaccttccaacgtataaccccttcacaggggcccccaaatgcaaaacccggggccgcttttaaaaacccccctaccgggaaaaccctggggttccccaattttaagcccttgaaaaaaaacccccttttgccccctgggggaattccaaaaagggccccccccactggcctttccaaaaaaggcccatcccaaaagggaaatggcaccccccctgtacgggggc

SEQ ID NO: 73062 - DNA, 481 bp, Glycine max
  Clone ID: jC-gmfl02220063h02d1
agacgatgagtctttattgcacttaaatcaaaacttaacaagaaaatcaccatcgtaaaactggagttgactgttttcagtatcagttgtaccaattaaaatcattctggactccctaagagaaccaaatcaaaaatataaatgactgaagttttgcagttccatatcatcttcaacctagaaacaactgagataaaaagtttaaatattgtaaaaacccaatcaactggtctttggatcaggcattggaaagaggccagcacttgcacctcttggtggtgcaaaacccaagaacttctgcaaatttgttctgatgctaatggaacacaagaagtacagaaatgccatggaacaatcagtggggtcattaccctgcaaccctcgatggctcatcttcataataagcccaaaaggtttgaagggcaatttggcaacaaccttgccttcgaagagtgaattcagcaacccaaagaccacaaag

SEQ ID NO: 73063 - DNA, 438 bp, Glycine max
  Clone ID: jC-gmfl02220063h05d1
ggaaaaagcaagtaacattaagttggattgggatacacaagataattcacattatctgaagtacattgcaataacatatacttcaccaaacacaaatctaaaaactctcaaaagtccacaagtcatccttttctttcatgctcacttgccggggacgaagttggtggcgtaggcccaggcattgttgttgactgggtccgcaaggtgatcagcaaggttctccaatggacccttaccggtgacaatggcctgaacaaagaacccaaacatagagaacatggccaatctcccgttcttgagttccttcaccttaagctcagcaaaagcctctgggtcatcagcaaggcccaatgggtcaaagctgccccagggtagattgggtcagtgacctcaccgaggggcccaccagcaatacgataaccctcaaagcacccatta

SEQ ID NO: 73064 - DNA, 344 bp, Glycine max
  Clone ID: jC-gmfl02220063h08d1
aacaaagagaaatactaaatattatatccatgatcaacaacaggcaacaaagtcataaataaaaggccctactttgtttttcaagtgccatgcaaaaattacacaattagtagagagaaattttccatcaagcaagctattattcactagtaatctactccttggaagacttgttgataagagacttgtgaatgtgaggaatcactcctcctccagcaattgttccttttatcagggtatccaactcttcatccccgcggattgctagttgtaaatgccggggagtaatacgtttgaccttgagatccttgctagcattccctgccagctccaatacttcagca

SEQ ID NO: 73065 - DNA, 439 bp, Glycine max
  Clone ID: jC-gmfl02220063h09d1
aagaagaaactagcattaatagaatttttatttctcacacaataaatacaagagattctgcaaactgaaaaagggatttcttactaaagcaaactcaaacaagaacaacttccactcatttggcatctaccgtagtagaacaggatcaaaagcagctctctgatagaacacacgtatgtattatattgaacatcttgcacagtggttcatttctcacagctattgcaacttaaaatacttgcaaagcttctgcaaattccaaactttctttttctcccttctttatggatatgacaaagtgatcagatcatgaaacaataatcaatccattgaattgaatctgatttttggtttggatcgatgccaccattcttcatcttaggaagggacaacaaataggccaaagcctactaattaagcgcttaaaactgattagtgg

SEQ ID NO: 73066 - DNA, 505 bp, Glycine max
  Clone ID: jC-gmfl02220063h10d1
caaaggtcctttgggtatcttgctcaacaccttcgcatcaaacactgcatattgcttcttaatctcggcaattgccttcccaccaaaagagtctacatgatcttcatatttctcataaagcacaggcacagtgtgcagcaaaacaaaagctatgtagaacagggtcaagaagttggcccagctacccaaaatagagaaaacccataatccagcaatcactgataagaacttcttgagatcccttccagatgcaatatcccttaacaacgcaaaagcccggttgatctcaactctaagagcagaggcaaattctaaaacaggtttctctggaatgtgcacttgcgggatctttggtggactcttgttgatgaaagtggatgcattggaccacaagaacaacaccgcaagaccaaggatcagggaagtggcaaaccaaggtgaggagggtgggactcaagcaattcaaacagaacccatatagcggtcgcactccgagtgtcgatgc

SEQ ID NO: 73067 - DNA, 398 bp, Glycine max
  Clone ID: jC-gmfl02220063h11d1
acttcgacatgccatttggcattatttatttgataaaatgatctcttgattacatccaacacaagtgatatacgatgaaatctagggaaataaacaagaaaaacactagacatgtcaaaggaacactaaattcagatcacttgagaaggaacttttgcaaccaaaaagcagagaacttggggtatcttttcaagttgttcttgtaatccacatatatgagcccgaatcgaactgtgtaaccagcatcccattcaaaactgtccgaaaatgaccatgcataatagcccttcaaattaacaccttccttgatcgcttgaagaaggaatttaagatggccatcatgggatctaatccttatactatccctgcgggcttcattgactgggattgagtcattc

SEQ ID NO: 73068 - DNA, 367 bp, Glycine max
  Clone ID: jC-gmfl02220063h12d1
aaaggaaatatcatttattcaaacctaaagaaacacaataacacatcatcacaaactcatgtaaccctgccaataaaataaacccttatccctaaactccagcaccagcagcagattgctcacttcaatacacaactcctagaatttctcatgtcaccacgtggtaagcacgctgatgtggagccaagtgttgtgctcacacgtaggtataccctccataatacaaccaaagacttaaccatcatataataataatatattaataataaaggccactgaagaaatgaataaaaaaaaaagcttttcaacatgacatgcaaaatggtagacctaatgatccccacaactaggaccattttaaaacttg

SEQ ID NO: 73069 - DNA, 471 bp, Glycine max
  Clone ID: jC-gmfl02220064b01d1
cataaagcatttttaagttatacgtacttgtacaaaactaacagagaaaccttcacttattaactcatcacattcaacttggtcaccaaaattaacttcaaactttctcaaacaacattgctccatcatttgtttttctcttttactctcatttccatgctcttctgctcacattctgtatccactgacatggatgttattcggattttattgctaacataagaagcaaaaacgctagaaaacgcacatataaaaaacgttactccgagaacaatgatagtctatgaatgagagggaggccagtttccaaaccatgggtgttggtaaaagaactttggaggttccatcttgggaagaggtggacacggcttcttgaaatggaaaggaggaaagtatttaaaatatggtggcgacggcgcggtaggagtaggctcataaatgggagtaggaggaggaagtggcttgtaaatg

SEQ ID NO: 73070 - DNA, 334 bp, Glycine max
  Clone ID: jC-gmfl02220064e01d1
acattatacactttaaaatttcacaatattacattactttttcatattacacatggggaatcatgttatactttgtacatcgtgtgaagtgaaaaattgaaccccttaatatttctatgacatgacctttagtgccttttttgtttggcctagtacattgaacactgttgctgctatgtgagatggtgtaagaccggctaaagacaattggtcagcaggtgatccatgatcgatttaacgatccggaagaactattggccgccacttcaatttgccatctagaaggccatcaagggccatgaacttggcaacatgagaaccaaatcctccaatt

SEQ ID NO: 73071 - DNA, 356 bp, Glycine max
  Clone ID: jC-gmfl02220064f01d1
gacaaaagggacgggctccattatgcccgagttcagttcagggggcaaaaagtcccgttaaaaaaccagggaaaacaaagggcctaaaagggtatgttaaaaaaattttgttaccagggtcattcatgggccccccttgcaaaaaatggctactaggcaaattttaaggaaatcaaaacctagtaaaagtatatggcctaaaaggctggctgtttgagttgtttctctaaaaaagccccccaaattttcttccattttccatagccccaagggaaaaaattaagccttaaaaatgccctggtggaaactttggtttcttttttggcccaagttctttccccacattttgggtttaa

SEQ ID NO: 73072 - DNA, 484 bp, Glycine max
  Clone ID: jC-gmfl02220064g01d1
agacaaaattacttttctgatttttttttctttttcattttcatggataaatttctaacaagtgttacaagttcgtgcgtcatcaataagttgtctcgttatcagtaaccatacgtggcagcactatgaatggtatattctagcaacgtgccaatggtgtattttctggaattggcacagttgccagaacacccgtataagagaagcatgtttacaaatcataagagtcagtgatcgagagcacttcgaattgtgagtggcgtatttagaactgcgcctctggatataaggtcgtggtttaagaataaaacaataacagttatatcgtcgtgaaaatggcgacgaaccttcttgtcaatcttgtaaaggtctgaatatcgcatttcacgctttcttgctgcttcgtgtaaggcagccttgacaagtctcttggcactacccgcgcgtggactgctgtgaacaatatccactggttgatcattac

SEQ ID NO: 73073 - DNA, 383 bp, Glycine max
  Clone ID: jC-gmfl02220064h01d1
agcataaggaaggaacatgtccattttaagggttttcatccctaaaacattcaattttaaaactaccatactaaaaacatgtaatgaccaaataaatctgcaaatgtaaaacaaaaacccaaactgaacccaataactttttggcaaataaaagccaattttaaactttttaaagggctcaacaatgtttcagggctcccaaaacccgaattaatctgaaagccctcagtaatgggtaatacccaatttttgacagggcattcttttatgccaggttccaataatacacaatttgccactagcttaacaaaaccttttacccacctacttgagccacgggcacactaaccactggtattaaccgcaactgttaacacaacact

SEQ ID NO: 73074 - DNA, 440 bp, Glycine max
  Clone ID: jC-gmfl02220065a01d1
aactcaaatgtaaacaagcattgtaattccacttatagaacgtagatttgaccaaaaataatccgaatctcagataattcacccattaccaatttttccagcaaagaatcccagcatcaactctcacccacgacgatttttccaggtacaattcaaattgttatacaaaacgtagagaccagacaaaatcaacaaaaattaagcagagcctgtgttctctggtttgtcagtctccattggttcagcagatgctggtggtggggctggattagcattgtcccctgccttttcattagtactggcattaggattctcctcaggtggttgttgttgctgctgctggggctgctcaccaccctgaggaggtggggttgctggtgcttctggtgtagctggcttgggtggtggtggcttttggtttcatcataattggcttacag

SEQ ID NO: 73075 - DNA, 414 bp, Glycine max
  Clone ID: jC-gmfl02220065a03d1
accagaaaataaaagaacaatttagactagcaataaagtgttacatacaacacaacaaacaacaaagacagagaaagacaatctgcaaacaacttaccgaccaaaactattgatgaaaaaagggaccgaacaaatgatgacatgcatatttcttactcttcaagttcaatttccttcatgtacccaaaaccaccaccagaggttattttctctcaatcagagtaggggtttgatcttgaacctgtaaagaagcctcttttttttcaaggtaggattgtctatggtgagcaacaattttcccagttcaacaactttaaagctattggaaacaactgggtcatcggtgggggacatctttgtggccttctgtagataaccgtatatgcatcttaacatcaggcttgaattcagcat

SEQ ID NO: 73076 - DNA, 510 bp, Glycine max
  unsure (1)..(510): unsure at all n locations
  Clone ID: jC-gmfl02220065a04d1
gcataattagtaaaataataattaattaattccatcacatgaacatatattacgcgtacaagaattgaggagtttgactgagggtacacactgaaaaagaagatagagaagaatccgttgttacacgttttactacaatgagagagtgatggaaaaggccaaagagagactctcatgctaacacaattgaaaacctaacatattacagctacccgttcaggcaaatacgttaatcaaaagaagaacccttaaatattaataccaaattacacgtacggtaccgttcttgcgttgaatgagggccccacttggcaaagtaattaaagtnaattgtacttttagattaaatattttgggacctcattttttttttcctttccttctttctctttggacttggtacattattgctttctagttcacacattgctagctgtctcaatcacaggcacaggaccatnnttttgttacatgattcggcttaacaacgtcaataatatggcaatttag

SEQ ID NO: 73077 - DNA, 526 bp, Glycine max
  Clone ID: jC-gmfl02220065a05d1
gcaaccaaataaagcggaacttgcattaaatattggatgaatgtatgtacattttaatagctgagaaactaaaatagacaggtgtccctgtaggacgaagaggttggttatcctatctgtatccacactcacataggtaaattcatcttaatctcaacaacgacaaaatagaaggtggcactcactgtgcctttagctataacttttcccaccaatacttgaaggcagtggctgagatctcaaatgatcagtgaccttgtcgatacaccaagacaagtaaagccctctttgcgtgaagcagccgtttaactcaagttgaataaagtacaaagggaacaatgagaaaaatggtcaacattaagcaagtgtaacttgaacagaacagccatatcgcaagtgcaagggactttgaaactgcctctggctctggcatatacctatgcgcccaaaacgctgattgaacatatgaactactcgcatggcctgaggatactcttcaactttagtttccaaaatagatttctga

SEQ ID NO: 73078 - DNA, 529 bp, Glycine max
  Clone ID: jC-gmfl02220065a06d1
ggcacaaataagagacaatcatgtttaaaatcgcccttgtatatcaacttaattacattaacgagttccggtactaaggttgcgagtaaaactatgtacaaggtaggattgttgaaaaatgcaaggccgatacactcccttatcaccttgcacaacgcacaattccgtactatactactatattaggagtgtataacagggaaggcatatatactactactactactactactactaattccacgacacggtccaaaattggatggatactcattcatgccatccatattctgattccaaacacaagcactcacttgataaaacagtcagattcagaattagaatttccttcttcaggtcatattctccaactagatggctttatgacagtcacctactactttccactccagtccggaacctggaagctatggaaatcaaatctacgaactatcaggtatctgaagatgaatgattgagctgacactcgatttctgtgcgtctgctgcaccttcactggcagattgat

SEQ ID NO: 73079 - DNA, 307 bp, Glycine max
  Clone ID: jC-gmfl02220065a07d1
attcattctttaatcttttttttttttaaaaggaagaggggtccatccagtcctaagttatcaacatataatataccaccttgtttcatctatttcaaaattggcggaacacagaaagtctttctctatgggggaaaaatgaaagcctaccaaaacatctctccctttgggattgaaattgtaaaacaaatctccctcaattaataatataaccttgtgttcccgacacattttggcacggacttgtgaacgaacaccatggacctagttgataaaaaacggcccataaaaattcacccctgcttca

SEQ ID NO: 73080 - DNA, 486 bp, Glycine max
  Clone ID: jC-gmfl02220065a08d1
aaattaataaggatgagcatctattcatccatttcaatctcgttcctgtattcgtctgtcattcccttggtaacattcataaagacaagattacattcttgaataggaagagaaagggggggtagggatgatacacaaactatactatggtcaaaacaaaaatgccaataattaatgggtatatatatggcttataatcctgtagctggtaatttcatttgaatggctagccttctctttcatcatcttttggtcttgttgaagagcttgaacctgaggccattccaatgacttggctggtgtgtgaacctttgtaactgaatcatgcgcgcataaatcccatccgggtgatttttcaacaactgtgaatgggagccttgctcggctactttcccatcatcaatcacagcaatcagattggcattcctgactgttgatagcctatgtgcaacgatgatagttgtttttcctgaggaggcgcggtct

SEQ ID NO: 73081 - DNA, 319 bp, Glycine max
  Clone ID: jC-gmfl02220065a10d1
gcttataatatttttatatttattcataaaaaaaataggcccatacatttggtaaatgaattcggcggacaccaaaatcacagaaatgtaacttttttctatgataatcactatcatagcaaccccatttatttctgaagtaaatgacagattatagggggttgctaaacaaatctaaatacagaaaagaatgcaaaacatataacactccaagtggaagacaaacccaaatcatatccacacatggtagggtacttatttgaagaattcccaattgaacttgggaggacctgatttattggtctccgagggatgtggg

SEQ ID NO: 73082 - DNA, 579 bp, Glycine max
  unsure (1)..(579): unsure at all n locations
  Clone ID: jC-gmfl02220065a11d1
cgttgatcaaacactacaatctgaaacgatggtgcacataaaaagagtatcaacattttctacatcaatagttacaaatggtagcaagcaatgtagagaaattgaacattaactgcccatgtttagcctaaatggtagcaggcaatctcatctcatcaatttcaggcttcatgagagagggcagagacagggctgttttgaaccatactttgtaaatgaaagaaacgtacataactgcagaacatctttattccacatgcagaacaatcacgacattgacagaaggaaatagcagaatgtcgtccttccagtccaaataaaatgcctgaaaaatcttaagcagacttcttctgcttgtaccttttggcagcaactatgtacacaaaggtatttaagaagctaagtccggctaaaagccagaaaaagtaatcaagatgacccttgttcaagttatccggaatccatccaggatttccaacttgtgtagtgaagtaagtcactacagtgagaatgaaagagctcaagtaattcccaagtgaagtagtcaacagcgacanagcactacataaactacgcatg

SEQ ID NO: 73083 - DNA, 417 bp, Glycine max
  Clone ID: jC-gmfl02220065b01d1
atcgttgtctttcttcggaggaggcaccacttccacgtttcgcttcagcttctcgttcaggtacggcaacatctccttcacgtccatcgttcccttcaccgtcaccaagtccttgcttacgtcgaggctcaccaattgaacacctttgaacctaagaatgattcttcgaattttcgcaatgcaaccgtcacagtgtagtttgatcttcaaaaccaccgtactctctttagggttttcttccggtggtttctcctcaggcttcttgtcttctgccttcttcttcggcggtttttccgcaacggcggcttcttttttaggcggagctggtatgatatcaaccttcttctttggtctctcggcaatcttatctcgcagcttctcggcgtccattttacccgtaacagtcaccttgttcga

SEQ ID NO: 73084 - DNA, 479 bp, Glycine max
  unsure (1)..(479): unsure at all n locations
  Clone ID: jC-gmfl02220065b02d1
aatagattgataacatacaggctacaaatcttacaccaaggaatatgttgtttcttttgccatgaatttaaagtcttacagggtcgctggtttcaaatgctgcactaatttcgttaaccacacaatatagtaacactgcaagaaattgagcacgaaacagataaagcaacaagatgactaaggttattaattattgatcactgatcaaataaactctttctttcacaaaatgtgaaccaaatgaaaggaagtgcttagacttcaaaaaagtgcatatgctgtgcagcacaattattatatattaatgtaatcatgcccttcccaaaagaaacaaacttctagtcagattaatttgactagcacttttattcattctatcgntaatttggttggaacttattaagccctcttgaagataaccctgaaggatggaaccttatcactcaaagacaatgcttgttcccatcatcaccaacata

SEQ ID NO: 73085 - DNA, 398 bp, Glycine max
  Clone ID: jC-gmfl02220065b03d1
gagtaagtaacaataacatgtaacaaagatagcacaataacacagatattcccatagtgattatttttctacagattctcatccacactaaacaaattatcttaatttagggaatcggctagtagaagaccaaccaaaacaaaagaatagaagaaaatccaaagagcggcaagctcttaaaaattctcaggactgtcatccaattgtttctcgtcttctatatcaacctctaaaatctcagggatcctctgtttgagataattagcgactctggcaggacagtggaacgcttgtgccaaaaccgaccactaaggctaattttcacaaaaggcccatccaagtcagctagttcaaccactcctgtcataccaacagaggtgtcaaagatttgacccagc

SEQ ID NO: 73086 - DNA, 387 bp, Glycine max
  unsure (1)..(387): unsure at all n locations
  Clone ID: jC-gmfl02220065b04d1
aaaataatataaaaaaccattacactctttctaatagaaagggtgagaatataaaattatacaagattaaaacatttgatattggattgtgcatgtgctataagaggcagggtaaatttgatattgcagggatgacatatttgaaattaagcacagtttgtagaacatgcatgagctaagaggcagctaaagtaaaatgtttttttttattcctacataatattgataatgcagccttttttcaagcaaacatcttccattgggtccgtcagttaaaaatcctctgacgtgcatcattcatcaacgactaccgtctcaagctctcactattgtagtccgcatacaactcanntggatctattaaccgcttcgaaagcagctgaggca

SEQ ID NO: 73087 - DNA, 496 bp, Glycine max
  Clone ID: jC-gmfl02220065b06d1
aaaaaaaacctgatcaaggaattatatctatataccaaatgtcatcatgtattaatatgataaattaagagaaacagctacccaacaacagactaagcatcagctatgagggaacatattagaaacaacacagccattcagtattgtccaaagtacaatgacgtttcttccaatccctgttctcctctttacagcttccacggaaagcctctaactagtcgatgggagatacacccttataagatctttcgcaacaaccttttttctacaggtagggcatttaccctgagcacttatagcagctttgatgcaatccttgcaaaaaatatgaccacatcttgtcgacatttcatgtaccatagggcccatacatattggacagttgaagacaagctccttggaggttcaggtggcttttaaaactttgctccatggaactgctaccgccttccaaatttatatacttatcacaattaataatcagatttggcaattc

SEQ ID NO: 73088 - DNA, 389 bp, Glycine max
  Clone ID: jC-gmfl02220065b09d1
aaaaaaaaacccccccattttttttaaggaaaaacccttcaaatttccgcccaaacccccggccgaaaaaaaaaaggggccccccaaaaatattttccccccaaaaaaggggggggggggccaaaaaagcccaaccccaaaaaaaaaacggggtggggggggttatttcccccaaaaaagaaatttcccctgaaggggccccccgggggggccccgcccgggggggcatttttaaagggggggccccatggaaaaaaaatttcccccgccgggggccctttggggggggggcccggggggaaacctttttttttcgggcaaaaaaaatcccgggtttcaaattttgggccccggggccgaatttgggggttaggggcggggggggggga

SEQ ID NO: 73089 - DNA, 319 bp, Glycine max
  Clone ID: jC-gmfl02220065b10d1
caataacaaacacacgatcttgttcatattaaattattcttgtacaacattatgctacgataaatccacaagtgaaactagtaataataacaaactttccctggtatttccgagggttccttattgatcactcttaaatcactagtcaccgcatcagcatgatttatccctccaagggaacactgtgaagaacaacggtctcaacggttagacccggcccgaatccgaatagcaccccccactctaacccttctccagtggtactcttcccttcctccttagacttcttcctcatttcatccagaatgaacaaaacaca

SEQ ID NO: 73090 - DNA, 562 bp, Glycine max
  unsure (1)..(562): unsure at all n locations
  Clone ID: jC-gmfl02220065b12d1
actaacaaatacaaacggcatttattgagataggtcaacgagttgcattcatggagttatgggtacacacaacataatattgcaagaaaaggattagttctttcaggtaatccaaaatcacatccttatcgtactctttgcacgtctgcaactctaacaatcattctggagttggcaacaacattaaatatttggcctcgtgctgagatgagaagctatcttttggcctagagaacggtcagcctgagaccagtatgatatccagacacttgcggatctcatgggtgacccgtgggtcagataaagcatcaacccatcggcgagcaaatctatcttgcctgtcaggtgcccaagaccggtatctctctccgggctgcgttgaagttgttctccttctcaattccacacttttcacgccttccactgcagatagcgngaggtatggggaacctttctgcatgacgacaggatcataccttgagggaagtaattgacctcctatccctgtgaatgaaattcatgaaaccttcatgatgattattgtggtgagcacactttggag

SEQ ID NO: 73091 - DNA, 271 bp, Glycine max
  Clone ID: jC-gmfl02220065c01d1
gaaaatatgttaggacagcactgtttggaaattctggggaaatcccaaacaacagtcattttgggagggcccagacaaaatacctaacaacaaaactttggatttacataaatatattcaaggggaaatacttttacctactagtcttaagtttccaacataaaacccaacaaaaagcccataaagcaataagaattgataataaaaggaatggaagtccctttctgccaactcttttcatagttccagtggctttacctgatgcagcaat

SEQ ID NO: 73092 - DNA, 437 bp, Glycine max
  Clone ID: jC-gmfl02220065c02d1
cacaaaaatcgggttaattttttgaaaaaacccggcctaccgaccttttttacaggaaccaattaaatttcttccgaaagaaaaaccctctcaaagaagggaaagaaaaattttttaaaaaaaaaaaatgggaaaaaccagcttccttatttacatggaaagggggttcgaaattttaatttggaaacggggaatttgccaattggggagcctccccgaaactgggaattggagtcgttgggctgtttataaattttgggggggcccaaccccatcacaagggttcgtaagggggggggggaacttggttaaacccctgaatggggcctaacggaggggggggaaagaaacatgggcattttttctggcgtggcgggggaattgccaacccctcctgcgggacccaccggggggtgcgggcccttcctttagggggc

SEQ ID NO: 73093 - DNA, 427 bp, Glycine max
  unsure (1)..(427): unsure at all n locations
  Clone ID: jC-gmfl02220065c03d1
caaagaatggtattactaataccagaatgtacttttataattatttatatacaaagagaacagttgtggattccacgtcccataataaggggcttttcttagcatccaataaggtgaggcataaggaagacaagcctagccttaaaaccttttcctcaatcagaaacatatatttttctcttcttctgatgaatgaaatcaattctacaaaaatcagcaatatacaaacatatttcctatttgacaattcagctaataaatgaatgaagtggctttttggatcttatcttcctaaaataagctcaatctatacgtcattgccacatggnttgatgctggaatgtgactaatggcggggtaagtgaatgaaaagtgtagcccctctgtgaaagtttgatcttccaaatgaattgaattgaattgaatt

SEQ ID NO: 73094 - DNA, 278 bp, Glycine max
  unsure (1)..(278): unsure at all n locations
  Clone ID: jC-gmfl02220065c05d1
aaaaaacataattttaattgacactctgttttacatttgtattaaataaaaaggggtagcttttgggtttattccaaatggaccgaataaccacactccaaagttgaaaaaacgcaaacaaggggccctttattcccctcgcttttgacaaaaaaaaaaaaactttgtgggcaggcttatacaaactgcatagttgaggatttgcatggcnaggcgaacgggaaatatggtgtaggaaaaaattcatgttgtggccataccgtctatgatgcttgggc

SEQ ID NO: 73095 - DNA, 570 bp, Glycine max
  unsure (1)..(570): unsure at all n locations
  Clone ID: jC-gmfl02220065c06d1
attcctctcttctcatcacattatattatatatttcttaattaacacctaggacatatatatgtctacaccaaacatatagctacaataatttctcacagaaaagacattaatccttgatgagctcccattattggttggctggcgtgtcttagcatcccctccaactctgtagcaaacctctccatggctttggctggcaagctaattggtaccactatcacatgctctcctttgtggttcttacatgacacgtacacgcttgtcatttgaggaaaacttgtcattccacccgtggcaggcccaccataaatgggcttgccccacccaaaatcaacctcatcaagccccaatacgtgtagtattcgaaacaaggtagggacctcgtagttgcttgatggggtcttcctttcaccacaattaaatctgaggtagagcgcacatactcctatccacgttggattntgcattttttaccaattccaaagcatacccaaatggattctcgcataaccttcgtgatgtggttaccgctgccgagagcacaaatccattaccgtaataacccttt

SEQ ID NO: 73096 - DNA, 581 bp, Glycine max
  unsure (1)..(581): unsure at all n locations
  Clone ID: jC-gmfl02220065c11d1
aatagaatgatttttttgaattcatatcaagctttaggactctcctacgagagtgcaaaaacaacagagaaaaatttatttaagttgagtttacattgttattttcagaacaaggcttcttattctacaaatagtacagaaaatcaaaatttgatttttgtaccttgaaatcacttgatttcagagtgagaaaagaaaaatattaactgccataacactccctcttcctagctaagcagttcccgcatctaagttaaggaatttctttacaattcccatcatttctcccccagggaaacgccccagacatccctttgcagctgccacttcatttagctcataaaccgaatcaccactataagcttgacaacatttgnctcttctctcttctgtttccaaatcatcaagcnaagtcttcacccgacttaacactcggaataggaaatgggtcaagagaagttttgagaatggtggattccccaattgcaccaacaaagtctttcaaccggcaaattgtgaacgggaccgattcaaagctatgatctncatattctactggagtagagtgatctctgtgacac

SEQ ID NO: 73097 - DNA, 394 bp, Glycine max
  Clone ID: jC-gmfl02220065d02d1
ctgaagatagcatcttgattcaagcattctacgactagaaaaacttgcagacttgacattactagtcatttacgtacgacgggggattattatagcatttgaatttgacactaaagtttcaagggaagttaagcagcttgatagatactagtactatatatctaagggtcatattgtaatagggaaatgtctagtttcatcacctcgagagagggagaatgttgactttggagtcttattgccatacttgacactaattctggattctcctaagaacccataaaagctataggaaccgtgcacatttgagactccctttacacgacccgtttgccactcttgaagaagtttgtccaccgcatcacctgctgggagggtcttgaaattattggct

SEQ ID NO: 73098 - DNA, 323 bp, Glycine max
  Clone ID: jC-gmfl02220065d03d1
atagatactttgcctttcataaaaaaaataaaaatggaatgaagttgaagagtaggcagcgaggaaaattgacagtttcacaccatctggacccaaattccctggcttgggaatttcttgatgaaccagaaacagcagatagaaacccggtggcgcaagaacagcggaaaccggcgcggtaacttcaacctcgtacgtcgattccccaaccttactcaaatcgtgtggctccagcaccagcatcctctgattcatggagaacgagtgccgtgttaaatggcggcgacagcatcgtaaccgacaccgaatccccaaccaaagtc

SEQ ID NO: 73099 - DNA, 439 bp, Glycine max
  Clone ID: jC-gmfl02220065d04d1
atagatactttgcctttcataaaaaaaataaaaatggaatgatgttgaagagtaggcatcgaggaaaattgacagtttcacaccatctggacccaaataccctggcttggaatttcttgatgaaccagagacagcagatagaaacccggtggcgcaagaacagcggaaaccggcgcggctacttcaacctcgtacgtcgattccccaaccttactcaaatattgtgggtgcagtaccagcatcctctgattcatggagaacgagtgcgtgtttaatggcggagacagcatcgtaaccgactccgaatccccaaccaaagtcgcgctcatcacctcaaaccgaagcctcaacgtatgacacgacttgagttttgtttgtgacgcaggaaacactattgtgggacgcacgctagagaattcatgctcaagataccaaggag

SEQ ID NO: 73100 - DNA, 460 bp, Glycine max
  unsure (1)..(460): unsure at all n locations
  Clone ID: jC-gmfl02220065d05d1
gactaattaaatcaaaacggaaaggatcaactatagatattactaatactaactaccaatacccatgttcttcaagaatacaatttcacccgtaagcagtgttaaaagaaagaacagaaaggaacgggtagaaaacaaaaaatgtccacatgactgtcctctctcacttctgaccaccagcctcagttggttcaaccacctcagcttctacaatttctggggtatggggctggtttaccgtggactggaactgaccaggtgtagaccatttaccagtgagagccatacccatcatctcatatatcttccctccaagttgtgctggattatcaggcgtaaaaccactggaaaccaaagcagcatcatacaaaagatcgatagctctgagggcatcttcatcgtcagaatttggtttaaatgcagcatncaagttcctgatatagaatgggcagggttgatc

SEQ ID NO: 73101 - DNA, 530 bp, Glycine max
  Clone ID: jC-gmfl02220065d06d1
gaaatactcgatatagatgctcatagttatttgcacaaaactggtaaaattccagatcaataaggattgcggcgaagccgcaaagatacaacattcattagggaaaacaggagtggggaaaaataaggggggaggggttgaggaagaatcaattgctcacagagcatgctaagacacctaaatattccacacacagttattgaaacaacccaatatagagaaaatttttctttggtgtattataatataaagcagaaccaaatgacttggaagattctactttcttataccattcacttggcaagttcgttgcggatgagttttgctgcggcaaccatgtttgtgagggctggcttacctcagtgtacttacgggtcttgagcccacagtcagggttcacccacaagatgttcttctcgagcactgccagcatcttgttgattctgtcagcaatttcttcagttggtggtattcttgtggagtggatgtcatagacaccagggccaattccagcaccatacttcacacct

SEQ ID NO: 73102 - DNA, 499 bp, Glycine max
  unsure (1)..(499): unsure at all n locations
  Clone ID: jC-gmfl02220065d07d1
gaatgaacggcaatcttctcaagagatttcgtattttcttatgtcaacatattcacaaaatattgaaataacaaaggttaattgtcccaaacctgactcttacaaacaactacgcttcaaggttttcagagacactagtgactgaatagaaacaactattcaacaaaatgtgttagttttaaatactggttaaaatcctaggctacgaactaacatctgatttacattttacagagagcaagatcatgaaatgtacagactttatcccctcccagattcacagtcattcaatgctgcatgatgatcccgtgataaagttaaccccatacacccgtggagaccttgttcctcttggctctcagcctgagcctctgctaactgcgcttgaccagaattttgaacactaggaacttgngtcataccacgagattcttccaacatcctaaaatacgcatagggaccccagccttcagaatgataaggaggagggaaaaactgc

SEQ ID NO: 73103 - DNA, 511 bp, Glycine max
  Clone ID: jC-gmfl02220065d08d1
aaatctggttttgaactggtttcactattgtcaatctgactaaagataacagggacaacctctcacaataatttggacagaaaataaagagttatacaattgcctttactacaaaactgagttgctaaaaagaaccgctacattagttcatctttctacaacaatatttggagtaaggtgtaaaaagaaaaaatagataaaagaaagaaaaaaaagggggggaggggaggaaaagaggactcagttctcaattctctcaatcacgaatcttcagctgggggtacctcactcagatccactccctctggaggcaagtctgaagttagtggtcctaagattccttcaccgctgagagttaatccactctctggctggaatctaagcatatcagcacgagccatagcttctgcttgagcaattctctgtctgaatgtctgagccatctcctccgccttctcaaagacaagctttggattgcgaaatcatgtcacaggtgtgggttccaactttt

SEQ ID NO: 73104 - DNA, 564 bp, Glycine max
  Clone ID: jC-gmfl02220065d09d1
gaatataattttgcacgctataattatctttcgccacaaacaatggagtagtgctcaacaaagcacaaaccaacaataataacagttttagttgcattaatttacacaagaaagtaaattaacgtaataggcaacacatgtgtgtcacgttcatgaggatcattttataatgatatgcaacattgaattaaatattctcatgcaatggagcattctggaggaaggccttgagggaaacgtctgatatcagtgcaataattgtaaatcatgtaattcttttgcacccaacggatctttgcctgccccgtggcgtccagtgattggccagtggaggaagaagtttgggaattgaagtttctgtatgaggctgtgaatggggccttgctccaatccgttttcacaagcccaccccttgtggcccaatccccagcgttccaaagactagagtatattctcatgggttggctctttgggaatggaaccccttttgtctccaaattcttgaactcccttattggggtcccgtccacagagaatatgatgcttgcaggattccattggacg

SEQ ID NO: 73105 - DNA, 545 bp, Glycine max
  unsure (1)..(545): unsure at all n locations
  Clone ID: jC-gmfl02220065d10d1
gaatataattttgcacgctataattatctttcgccacaaacaatggagtagtgctcaacaaagcacaaaccaacaataataacagttttagttgcattaatttacacaagaaagtaaattaacgtaataggcaacacatgtgtgtcacgttcatgaggatcattttataatgatatgcaacattgaattaaatattctcatgcaatggagcattctggaggaaggccttgagggaaacgtctgatatcagtgcaataattgtaaatcatgtaattcttttgcacccaacggatctttgcctgccccgtggcgtccagtgattggccagtggaagaaagaagtttgggaattgaagtttctgtatgaggctgtgaatggggccttgctccaatccgttttcacaagcccacnccttgtggcccaatcttnagcgttccaaagactagagtatattctcatgggttggctctttgggaatggaaccctttttgtctccaaattcttgaactcccttattggagtcccgtccacagagaatatgatgc

SEQ ID NO: 73106 - DNA, 548 bp, Glycine max
  Clone ID: jC-gmfl02220065d11d1
catgatcatcaaccatccaaggatttaagacgaaaggaacaagtacaaccctcgaaagtgaattaggaagaaaacacaaggaaggaaaaccatacacagaagaagattccagagaaattcaataatacacaattttttttttttttattttcatttccccccctctagtagtcagtggtgggaagctgctcgtgggtgtggctgataaagacaacctcgtaaacaaggccagcgattccaccaccgatgagaggcccggcccagtagatccaggtggttggtccaggtccagctcacgacagcaggcccaaatgtcacagcggggttcatggccgctccagagaaggccccacccaacaaaatgttagcgccgacaatgaaaccaatggcgatgggagcaataattcccaaattacccttcttggggtcatgggcagttgcgttagccgtgtacaccagaccgaaggtcatcacgatctccaacaccaaggcgttgccaactccaactccagcggagagtccgaatgctggacagtggaggcggtgac

SEQ ID NO: 73107 - DNA, 434 bp, Glycine max
  Clone ID: jC-gmfl02220065d12d1
aaaaagaaaaggagagagtaattatttaaaggcaaaggaaaacatattttctcccccaacccccaccaagagcatattagtttcaacatgtgtaaaaattccttttttttgcaattaacatgcattcacaatttgattttggacatgcaggtggaactagcatccacagcaattattttgaaagagaccccacaagagatataaattttggccttaagccttaaaatcttgatcatggtcactttcccaggaagagtggcctctgctgtcaaattgaacaccccaccttcaatatctgacaaaaactttggatcttgtgtcaatttatcggtcataatacccacagtagggctcacattggtagggctacaagcagggaatgatcttatccccaatggaacttccgcttaatggggtcacgatatttaagatag

SEQ ID NO: 73108 - DNA, 374 bp, Glycine max
  Clone ID: jC-gmfl02220065e01d1
gataggagcacaatactatacataaaaactgacacaacaccctattagatatgaaaaactagatagcatccaattacaaaacttaagcatacataagaaaattatgcacacataagtttgcacgtttatttgtcaatgagaggtacgttggaaggaaagaaaaccacacaccacacaccacacactttcattagatagagatgctgttgggaattcctctgaaagtaaggccttccccactggtaggaagaagcacagtgtagggcatttgcgccggtccattacggttcctaaggcttgaattcttggtcctccctgagattttggcctcaatttccttcagcttggttccaaacttcttaaaggcttgaatt

SEQ ID NO: 73109 - DNA, 407 bp, Glycine max
  Clone ID: jC-gmfl02220065e02d1
gattggagcacatttctatacataaaaacttgacacaacatccctattagatatgaaaaactagatagcatccaattacaaaactttaggcatacataaaaaaattatgcacacataagtttgcacgtttatttgtcaatgagaggtacgttggaaggaaagaaaaccacacaccacacaccacacacttttattagatagagatgctggggggaattcctctgaaagtaaggccttccccactggtaggaaaaagcacagtgtagggcatttgcgccggcccattacgggtcctaaggcttgaattcttggtcctccctgagaatttggcctcaatttccttcagcttgtttccaaacttcttaaaggcttgaattgcctttgtgtcatcagcccaattgggatgg

SEQ ID NO: 73110 - DNA, 518 bp, Glycine max
  unsure (1)..(518): unsure at all n locations
  Clone ID: jC-gmfl02220065e03d1
aacacgttaaaatcatattttattatctacatgtaattcaacattaattattacaactttttaatactcaaataggagtatcagcggcacgagcctctccctagtttcattatgggaaatgcactcaaaggaacttcatatccatgcttgaacatttgtcccaatgtttttaaaaccatggaaatctggccacggctcatgtaagctttgtacattatccataatgttttctttgagcatttaagcttgacattttccatctcttcaaggacattatgcatttcgagtaaggtcatctgtgacccatacatgactagcttacaatgatataaggatcggcagatactccacccagagatttcngcacgtctcacaaaattttctagcttttctactgcattacatcgatnataagttgcaatnatgcgtctaaaataccctnggttgtatagaagtcccatgctcaaatgcctcattatagcattctccattttcgctaaccaggcttccttggcata

SEQ ID NO: 73111 - DNA, 452 bp, Glycine max
  Clone ID: jC-gmfl02220065e05d1
ctctgattatttctttgattgtgcgagatctttaaccataatctgcccgggggcaacactccttgaggtgtgcatcaaagcccacataaagagagattcaaaaataaaaaatatatttaaaattaacagaaagaaaaggcactatatgacagaatcgtgatgcaattcggagaaagacctacattccttgcaaatgaagagccatgtgtaatattatattttcaatcgacttcctagtttacagggtcatttagatacactcaaccttttttgctagtacattatatgaacgcatgaccagtatacagctgcattcatcttcaaagagtatccccacaattgcctccagagcattttacatgtgttgatgtatatagatcgtgactgctgctttgaaaaagtaaagcttcaaagcagaaaaaaactccctcggtggatttatatatgatttc

SEQ ID NO: 73112 - DNA, 567 bp, Glycine max
  unsure (1)..(567): unsure at all n locations
  Clone ID: jC-gmfl02220065e06d1
cttatatcattccatgacactttctaaaatttaaacttgggtatgcatatttgggacatattacaagctccttaataatataaataaagaagacgtcctttgttattgaatagttgcgttgaagtatttatttacaagggaatacaattactagctagacatctcctcttttaatggggatggcttgctaactcaagaaaggaaaaaaccataagaacattgttaaaaaaatgggcattattgtagttgctcattctaggctgcacaagtaggagcttttcctgttattacgggcttgacgttagcacatttagctgttgttgcagctccattgaatggtgagatcaacatcagtcatctctacaccctcacatggtgcaacactactacaaataaaaatcactccttctttagttcctgaagtgcccttaatgtttttgaaggaaaccttgcttatcttgatttttgacggattctttttggagcactggttccatggacaatactcttggtctatgatncacagggttcgaaacattntccatggntatatcttcaaaatgcata

SEQ ID NO: 73113 - DNA, 424 bp, Glycine max
  unsure (1)..(424): unsure at all n locations
  Clone ID: jC-gmfl02220065e07d1
gaagaaaaatatcagatgactaccttatttcaatatcattaaacataccatgactagaatccaatattataacctcttttctctcatcaagccgaacagatctaaaactgtttacaaatacatttttttttattgaacagaattctaacacttacgctctttcaattttctgcacaaaactgttctttgccgtagccctaataacctaaaaattaaacggtaaggccttgtggggcaccagctacaggtgccttgggcttaggtttttccaccacaatggcctgtgtggtcaacaccattccagcaactgaagcagcattctgcaatgcacaccttgttaccttggcagggtcgataactccagcctccactaaattctcatacctgtctaccatagcatttgaaccgacctnccattcaccac

SEQ ID NO: 73114 - DNA, 528 bp, Glycine max
  Clone ID: jC-gmfl02220065e09d1
gtgatgcatttgctaggttgaatcagtttatacttaatttaaatatgcagttgcttcacaatcttgaaatcagattcagttttgggattatgttagtcaaatctgcattttccatgagtcgcatctctagagttaatggaaagacatagttttggaaactagagagagagagagactaaacttatgctagatggctaccaattctgaactgtggttatctagaggttgtgaggaaagactgattaatttaaaattgattgttcaaacctcatggcaaagagatgaatgataatagagagccaactgaaatcctatcagtcattaacctggatgaacagctacttaccttttctgatgaaaaccactttaaaatattctgacaaagaaaatcagtactttaagcaacaaccaaatttcatttttttcggaaaggccaaaaatttcaacttatcaacatgtttatcattaggaattaattgttcccaaaaatccccttttaccatgttaacaattattatatattatgat

SEQ ID NO: 73115 - DNA, 425 bp, Glycine max
  Clone ID: jC-gmfl02220065e11d1
ggcaaacataattatacttcctttccttattcattatatttgcttaaacaccactaactgaataatgtcaagcttttcgttaaatagaaactccaccactacaaaacccatcatagtccccacttgttattattattcagtaacttaaatcatactactacaaaggccaaagcaaatacaaaaaaagttgatgaattagtcggtgaagccagcaatggtagcattgggctcaagggccttagcagcaggggaaggttcaacagatggaattggctcaacagtcttgacaagaagctcctgaggcaaatccttgataccctttagaaaaatgtgtacaaaatcttgaaaggatacacaatctgacgcagcttcacttgacctttaacaccctcaaatatgccagacccaccagtcacagccaatat

SEQ ID NO: 73116 - DNA, 517 bp, Glycine max
  unsure (1)..(517): unsure at all n locations
  Clone ID: jC-gmfl02220065e12d1
gaacgtgcctgggattttctgtccctgcttcctgcaacagtgtcaagcaaattgttttcactgcctccgcttcttcctgtaacattgtcaaccaaagttttttgaatatcagtttcagggactgtagtggtgccttttcctgtagcattgtcaaccaaagattttggaatatcagtttcagggatggtagtggcgccttttcccgtaacattgtcaaccaaagtttttggtatatcagtttcagctggtggtaacacaccagtgagggtattgattgcatattccaaacttgggtcagaccaggagtagtgaaatgcaaaggacagctgagattctgatttctcatcctccatttcttcattttcacgtttccccagctgaggttctgattttttccttttatttgctgactttccatttgttggtgcttgatctgcaagcactgtaactggcccacactcactttgctgcaattntgctttggagttcattgactcatgttcaattgcagctaatc

SEQ ID NO: 73117 - DNA, 316 bp, Glycine max
  Clone ID: jC-gmfl02220065f01d1
aaaaggaaaccaaaaaccggaaaaaggaaaaaagcccagggcccctttaaagaagggggcaaacaaaccccaaaaaggggggaattacccctcttaaaaaaaggggggtacccctttgggggccaaggcccaggaaagggggggttagggggctacaaaaaagaaaagggggggggggaaaggccgggggggctcctttaggaaaaggggttaaaccttgaaattttccgggggaaccttaagaccccatgggggtttaaaccctccctgccagttcctttttaaagggcccagggggacttttttttcacggggg

SEQ ID NO: 73118 - DNA, 55 bp, Glycine max
  unsure (1)..(55): unsure at all n locations
  Clone ID: jC-gmfl02220065f02d1
ggggnnnnnnnnaggagctggcagtttcacactcaggancncggtgcggaattat

SEQ ID NO: 73119 - DNA, 572 bp, Glycine max
  Clone ID: jC-gmfl02220065f03d1
gaagcacgctctaaattgttagataggtaaatgatcaacgcatatattcatacaaattcaaacataaggcagctttcaagagaagaaattaaaaggtaactggaaacctgcgaggaatattaattcccataggttcataaatcaattcctctagatttccaatataaaatggttacaattgttattttggagccatgagtttgaaccctatcatcagacgccactagcatataatcgggtccattccttcgctgtttcgacagcctcagcctcattagatttccaatgcttggcaatgttctcagaaagtggatcatctgggtttggtgcacttaatagagcttgaatgcttagtagaacaagtgcggatctgaagggcaggactccacttatctttcagaatatcaagacaaatcctgccaagcttatcaatgtttggatgatatatttttgttagaaacctaacctttggagcagccattggatattcttctggcaaaatagttctaactgaaaactcctccttcatagggcactgggttggccccaggatcatcacattgaaatatcgc

SEQ ID NO: 73120 - DNA, 406 bp, Glycine max
  Clone ID: jC-gmfl02220065f06d1
aggggaactcaaaaaaaggaggaataagcaaatggcatgtacagtgtacacgataaaatacatgaatctgaaaaccaataaaaacgatttaataattaaaaaataaaataagaaaaacacctggcgcaatataacctaggcgcgggggtcaactaaacgtgccgccggcgaaacttgccggcgcggcgacggcgaatatttcggcgagagccgtcatggctcgcacttgcatttccaagggggagatatagtccgtggctttttccaaaaggtttggaaacgaaacctttcggcaaccgggaaccaaccgggtgaggacgcgcgcttttttttgtacagccggtaaccggttcctcctcttttcgttgccaatcctcgttctcttcaaacagttaatggacgatgc

SEQ ID NO: 73121 - DNA, 480 bp, Glycine max
  Clone ID: jC-gmfl02220065f07d1
aacaaaataaagtaggaaactttacaccaatatatcaaaaacaacaaaattgagctaaccagagccacataagaaagtacctgcagttccagccattttgactatatatataacaaacagaacctgaaatatatacatgcaatgtactaagatatgtaaaacctattagataacatgtgtgcatgatatgaacatgtttgagttcatgtggaaacatgcagctttcaaggatgtgtatttgcaatgtcacgtgagagcggggaagcagaagcagtggcaattctaccatgggtaaaatgatcagcactttttctacgattttgtttcacatgggggacctggagctgctccaaatccgtggcaacctcgtccatggttggtctcaactttgattctattgcaaggcatcgcagaaggagggtagctaccttacatgcctcatctaattcatattggccttcaagacgattatccaacaca

SEQ ID NO: 73122 - DNA, 282 bp, Glycine max
  Clone ID: jC-gmfl02220065f10d1
cataaaaaaaaataaaatggcattggataggaaaagaggcaaacatagaaaagaagaatctacgaacaagaaacaaaaccttgaccacaaaagggttcgggaaatctctggaaaaaaaaagaagaattccacggacaagaagccggatttccaaaaaaagtacccggggaaacaaagggaaaagaattttaatgtggtggcgaaataaaacccactgggcggataattacaacgggcgagaaggggaaaaacctggcgataaccaacctaaacaaacatgcc

SEQ ID NO: 73123 - DNA, 540 bp, Glycine max
  Clone ID: jC-gmfl02220065f11d1
aagaaagaagaaaataacatttatcaacgcacaagtaacttaatctttctctttacatgttcaacctagaaacatcctatttattaggaagccaaaaaaaaaagctagaaaaattcctacaatcaaagataatattttttaagtttgatgcccaactagactatagaaataccaattcttcagaatataatgatgctggttatataatttttttttaaaaaaattggtcataacctattggtataatacaaaatcacaacttatcaaaacagttggagccatctggtatattacatatggaaaactttattttagctttaccaatcctcccctcacctccaaaaagaaaataacaaaaagatggtcaagacacaagaatgtaggataaagaagatggaaacagaaaggcttgtaattctcactgtgcactctgcatcaaattttcccttgtcttccatgattgaactaggagcaacaatagatccatggggcattgacactcctccagaatgcatgtaactagatatttccatacaagtc

SEQ ID NO: 73124 - DNA, 471 bp, Glycine max
  Clone ID: jC-gmfl02220065f12d1
acaaaataattaatatagtgttgagcgttgaataatggatacaagtatattatagtaaactctattgataaagatctgggttggataaccgtggggtggggatagcaaccaaaggtattttctttttgagaacaattccaaatttctctgatacctctaacttttctccttggggtactgtccaatcaaataagtgtacgagtgtggcaagaaaatgcaaaaccgtcttctcagccattgctattcctgcacaaattcttcttccagatccaaaggggaaatagttgaagtcattgccactgaaatccaattttgcatctaagaatcttgtaggatcaaattcgagtgatttcttccaaattgaagggtctctatgaatagcccacacattcacaaacacccgagacccctttgggattgtgtaacctcccaaatagtggtttcgctaggacaatgaggtactagagtgga

SEQ ID NO: 73125 - DNA, 552 bp, Glycine max
  Clone ID: jC-gmfl02220065g02d1
cacaccaaaggatctgattcattaaaagcaatagattcttcacaaccacacaccactcacttgacatatatggaacacatacataatccatatagccttaccttagggggggggcatttcttaacttttatttaatgcacaaacataacaggggcaggaaggaaaaccacaaaattaaaacgaagatcatatagctgttaataataacaacaacacatgcaacataaaaaccacatgcagttgtggtagtggcatcttcttcagattggaaacgcctcaatgatggaagggagagcgttgatcttgatgaatgttgtaacgcgcgaaaccggtttccttgaacagccacttccagttctcttcggtcctctctttgccaccggcgttgtgagcgagaagcatcatgtcgaatgcgatgccaacgtctgtgaagaagttcgttgccttcgggtcgaagaacgtgatccacgattatgacttttcctgtcttctctggtattgccttcctgcagttcttaagatcttgatgcagtgctcgtcgctccagtcatg

SEQ ID NO: 73126 - DNA, 486 bp, Glycine max
  Clone ID: jC-gmfl02220065g03d1
gcaaagaaatatccatgaactataattacaaacttcctagggtattatttacacgccccataggccataaatggctttatttgaattttatcttcccatatcttacagtttaaaatactcactcaagaatttggtcaactcccagacattcacaacaataaataacttgaataaaaagaacatatacgaacgaagttgtcgagcaggcagagacgagaattcacaatttcacaccatctggacccaaataccgtggcttggaacttcttgatggaccacaaacagcagatagaaacccggtggcgcaagaacagcggaagccggcgcggtaacttcacctcgtgcgttgattctccaaccccactaaatggtgcggcttcagcaccaacagcctctgattatggaaacgagtggcgtgttaaatggcggcgccagcatggtaacagacaccgaatcccaaccaaagtcgcgctcaccttaaaccga

SEQ ID NO: 73127 - DNA, 536 bp, Glycine max
  Clone ID: jC-gmfl02220065g04d1
atcaaaaaaaaaaaactgcactgataggaaataaaacagaccttttacaaaggtgtataaccagaacaaataggaaagggacaatcaatgagggtaactgacaaatctagtcaacaaaagaaatgctgctgctatcagcaactaacatgaaaaacaaaaaatcacatagcaacactgcaaagaacaggcaatcgacatgagaactactattatagatatggaggaatgcaaacttggcaagaatgtggttgctggcttgctgcttttttactaacatcatccaaaactgctgctactggagacattatcaccgttagaccatcttttgaaggcacccggtactaaatttctaccagccaaaaacccaaacctctgatcttaacattgtcaatcggttgttattattacttgaagaagcttcagcatcagcctcagccacagccacggttgtttggttaatggttggtagaaactctacagtattatcccgagctccgccaatcccatcacttgcactcccatccaaagctttaact

SEQ ID NO: 73128 - DNA, 339 bp, Glycine max
  Clone ID: jC-gmfl02220065g06d1
accaaaccccgccaaggagggggttctaaaaaaaacacaagggggtgggcaccccccccaagaaaggaaaaaaaaagggcccccccccttttaaaacccgggggaaaaaaatgggggggggggaaaaaaaaacaaaaaccctaaaaaaaaaattgccccccatccccccaccagggggggcaacatttggggcaaaaaaaagcgcctttggggataacaagaaagaaaccccaagtctttttacgggcaaaataggggaacccccccccgggggaaaaaaaaaaccccagcccgaacaggagggacttatcaaagaacagcgcccccaaatgcaaaggg

SEQ ID NO: 73129 - DNA, 597 bp, Glycine max
  Clone ID: jC-gmfl02220065g07d1
ataaaatgtcataaaaacattttagtaacccttatttatattttggcatcgaatgttgcaaaacgcatactttatttgtagtgtaacaccggcagttgcaattcataacagacaaaacattctccatacttagtcgatagaaatcacacaacacaagaatatgaagtatttctatcttcatgtgtttgccaaccaataaatgtggtagacaagtagcaatgcacaccctccctttaaatatcaataccatcaaacccaaccccccgttagcgtctctccggtaagcactgccaagggttaatcgaccattgtaggaaggagtatacaaaatttgtgtggtggctatttaaccaggaccaagcagtgaataggaattgttgttttagttcatccttatcaaatgtctttcccaaaaaaaaaaaaacccatttatttctatgattccatatgcaaaccatattaccattctcatattgcccatgtgaagtgcacctccactagcagaatgttgccactaatgttgatgtggtcattgcggaagcactattgatatgttctctcctctatactaccactccttctaaatatccataatct

SEQ ID NO: 73130 - DNA, 204 bp, Glycine max
  Clone ID: jC-gmfl02220065g09d1
gaaaaccaaaaggaaaaaatattattaatgtaatcctaaagcaagttgtaatacacgagtatatactgtcacgaaatttttggcaaactaagctgtttaggcctttcaaggggaagcttctccatctctacagaaacagaggtaacttcatcattcaactctgccattttgagttcatttagagtcctttttgcgtagacagtg

SEQ ID NO: 73131 - DNA, 518 bp, Glycine max
  unsure (1)..(518): unsure at all n locations
  Clone ID: jC-gmfl02220065g10d1
actataaataaacgagagatgtattacagttgacctcgaccgttcacttactttccaattactattattctattacataataaagaacaaacaattaatgaatatgaaattatatgttcaccctaaacaaaaattacagacaaggaagaagaaactaacttcttgctcgtcaaattgtcttgagtaggatataaagaaaatctaggcactgacttcttttctactctcatcctgtactttaaggccattgacgtcttgttcactgatcgtattttgttcctcaacgctgggatttccctcagctggctctntcattagtgggtttccccttgtttcgatctcgccatccaagtccaaatggacgagaaagcaaacttatcctcctagcagggatatccggctcttgattgtttctcgataccggagaatctgactgtgaagatcgtggagattgtagcactttaacttggccagattggtactgcaatgtagcctncagcatagattctgccataact

SEQ ID NO: 73132 - DNA, 303 bp, Glycine max
  Clone ID: jC-gmfl02220065g11d1
aaacaaaaaaaaaaaattttttttttttttttttttaaaaaaaaaaacaggttggggggtggaaaaaacccccccgcaaaaaattttggggcccccccgggggggaaaaaaaaaagggggtgaaagaacccaaaaaaaaaaaccgccctttttgggcccccccttctcccccggggaaaaaaaaaagcccctttggggggggggggctttttttttaaaaagggggggtggggggttttttgcccccccccccccacaaatgttttgggggagggggcctccccctggtggggaaagtttttt

SEQ ID NO: 73133 - DNA, 527 bp, Glycine max
  Clone ID: jC-gmfl02220065g12d1
caagcaaatttctagcaagtttgacctacaataatacacattaacacaactccaccatgtttctaactaaatatcgaatccagaatagcgacagtctaatgcaaacatctgaatatcacattaaagcagaatgtgcctatctaaaatccatataggctgataactgatgggaagctctagattgatgatgctcagaaagctctagactgatgatgtttctaccttcggttgtctaagcaatagataaaacagacatgctagtggttcttctgacttctagaaagtggccacctgcagtaagtgccttgtgtctagaaaatgcttaaacctgcatacaaattctactgcaaagcttagtaataaaactatcttgcataaggatggtaacgactactgccaccatagcttcccctactgggatacattccacctcctgctcctccataaccagcaccgggacctgttctataaccccaccagcgcttggaccacataggttccataagccccaccaccccgtccatatg

SEQ ID NO: 73134 - DNA, 423 bp, Glycine max
  Clone ID: jC-gmfl02220065h01d1
caacggaaaaaaaaacttaaatttcttattctgcatggctttcaatccttacactcaaatgccagtaatggcatgacaaaaagataaatttgcacaaacagatacatgacaacataaaaaataataataaataaacatccagtttcaataaactaggttacacataacacagagttgccctttaattactttggttactaagctgatagaggaagtctgctcttgcgccaaatccaatagttggttctaattggatcaacttgttttaggatagaacaaatatttcgggctatatttaaattttgttgttcccctttctcatcatcatctaaatcttgtttatccatatctgcggtctttaaggcgtcaatggcatctctaatgtcttcatttggttgataaccaaagcatataagatctaaa

SEQ ID NO: 73135 - DNA, 399 bp, Glycine max
  unsure (1)..(399): unsure at all n locations
  Clone ID: jC-gmfl02220065h03d1
gggaaccccctatgcaaaaaacttcccaagtttttcttagcaaaaaaaaaaaccttgggggcaaaaactcccccacccttttatgggaaattttcatgggataatttatgaaacaggcttgtacttaaacccccgatcttaaaacacaaattttcgtcccaacaacaaaattttttataacttgggaagcccgcgggcaaaaagctaaaaagtaactaatgccagccaaagatcaaatttcattaaatgacaaacattggccgaaacaaaattttctccgatcgcaaattttggttccacaactggtcaacgattggcctttgcaaccctctcaaattcatcctttttcttgaaagcanaactgggggaagacccttttgctgcttaaaaaggtcatca

SEQ ID NO: 73136 - DNA, 594 bp, Glycine max
  unsure (1)..(594): unsure at all n locations
  Clone ID: jC-gmfl02220065h04d1
gcgttgaatcattcaagatagtacgcaaataacaatacagtattcaatagcaacatgatcccttactaagtaattattaaggcatttcgtttgagtggactttaagtaattttatccgactaaactacatcaatactaggaaatggaaagattccttcatgaacatagaagccgcaataaaaagttctatagagcatttaagagacgaaattcagtggataaaatttcaagacaaaataaattagaaaccaaaaccattaaataaaaactaccaaacactcaaagtctattcatttcctaaagatttaagcagcagttgcttgttgggcggcaatccttttcctagcttcctcaatgattgatagtttaatacctttacccttgggaagagatatccatgngttttgttcccttgccaatggtgaacacattgcccatacgagttgcaaactcgtggccagtggcatcctgaacatggatagtctcaaagcttcccttatgcttctctctggtcttgatcactccaacacgacccctattccttccacctgtcaccatgactacattcccaacatcaaacttgatgaaatcgac

SEQ ID NO: 73137 - DNA, 508 bp, Glycine max
  unsure (1)..(508): unsure at all n locations
  Clone ID: jC-gmfl02220065h06d1
gaataattatatatgtaaaaatgattcatggatactgtaatacacctagagatagaaaaagagaagaaagacaacttacttagataagtccggtagaatagataatatgacgtgaaaaaaaaaatcaaaataaatgacgtatccatatataactactcagcgtatatacagtcaccaaaaggaaacaattgaacggagacaaacaccatcacatacagaaaataaattatctcccaaatcaggtctcaggcactgggtttacttccactcttatacatgttgtcaatggcattctgatagtatttaagcaactgtggcctcttcttcttgtatgttggagtgataaggtcacgttccatgtcaaatggaattgagtcaaggtgaactgcttttataaactcaaaacctttcaacttcttttccttcgcaatctttgagagctcttcanttatgtaactttttgctcgagcatcttcacagagagaattgaagntcatggatataccat

SEQ ID NO: 73138 - DNA, 316 bp, Glycine max
  Clone ID: jC-gmfl02220065h07d1
gtgtgttgattgtttttttgttgttaatttcttatttggtaaaggtgtgggggaggggaaaaaaacagaaaaaaaccccccccccctaaaaaaaaaagagggggcagggggggccgggggggggaaaaaaaagggggagagggggaacatagaaaaaccagaaggaagcggtgcacagggaaagggaaagaagacatgggcagagaccacaggaaggacatttctttaaagaggaggaaaaaaaaaaaggaaagcgccgcccgggcaaaaaaaaagcagggaagacggcccccaagaaaaaaccgggggggggaaa

SEQ ID NO: 73139 - DNA, 402 bp, Glycine max
  unsure (1)..(402): unsure at all n locations
  Clone ID: jC-gmfl02220065h08d1
aaaccaccaaaatagaagcataatgatgatatcacttcacagtttgaataatggagaactatatcacacaggagtaaaaacaaaaaggaacgaacaatactggttcagggtaatgtaacgaagcatataccctttttactcgaaacaattacattgataataaaaccttcatttatgaataggcctctccttcctcataattttccgctccttcagccccaacctcctcatagtccttttcaagagcagcaagatcctcacgagcttcaaagaactcttctttttccataccctcaccaacataccagtgaacaaaggccctcttggcatacatcagatcaaatttgtggtcaatgcgagagaacacctcaaaactgcagngttgttgctgatcatgcatac

SEQ ID NO: 73140 - DNA, 354 bp, Glycine max
  Clone ID: jC-gmfl02220065h11d1
atcaataaattggtctataatcttgcattataaaaaaaatatggtaacaaatatgataatcaattaaaactgacaaggaagaaactactccaattgaaaactaaaatccgcaaccataaaaggttcacttggcagcagcagcaccattggttggctttgaaggaacttcttcagatgtgttgttgttaagctcatcccaagcttcaatccaagtaaccatggcatctgctagcttgatgaagtagggatcaacagccccaagcttctccttgacttgcttggagagttcaatgtaacatttttggacagacgtgcactcttttaaaagagtggcactttggaagaatggaatga

SEQ ID NO: 73141 - DNA, 377 bp, Glycine max
  Clone ID: jC-gmfl02220065h12d1
ctaattaaatagctagaagcaacttgaaagtactcaaaagaacttgtacatcatcttagcattaaacttaacaagaatttttcacatctattggcaaattacaatgtgattttggtcttccaaccaaatgagttgctccaaacctttggcatgtacgatggatggatttaacttagctggatcaactgaattggagagagtgccctgcattaacttaagtacaaatttagttcttaaaatggccagcaagccaagtatgtaaaagaaacttgccttcggctgacatggatcatctttgagcttgatctgaaggtccaactgaagtagctgccacattgcttgcagacccattctcaatcggaggaggcacaccccac

SEQ ID NO: 73142 - DNA, 314 bp, Glycine max
  Clone ID: jC-gmfl02220068a01d1
agtggccaagtgggtttattttatttttactggtagtactcttcttttgcaaggaaacttcaagttctcatatagactcggatgcattcatgatgctagctcgaaaagactgttatggccaaacattcttgtttactcctctcaaagaagagccccaagttctcataatagtgactgaaaattcgaccgaaatcagattttggtctaaaaaaaaaagtagaatcctaatctcttgattcaggaaagctctcggctgcgcttagcagcagcaacaacagcattcatcagtgttccacggaacccaccattttcta

SEQ ID NO: 73143 - DNA, 457 bp, Glycine max
  Clone ID: jC-gmfl02220068a02d1
gcaagaataccattgatcaccacaggcattggaacaaaacttgaatagtttagaaagaacagttcaaaaccatgatatctcaggcacagctttacctcaaaacaagaaacaaggatggcaaaattataacaagtcagaccatttcaaaaatctaaaatgtctaccaacacagataatataaaaaaaataacaaccgcaaggcctaaatatcagtagccattaataatttaatcttcgtcctcctcatctccatctccaccagcagccttcttagcagcagccctttggttctttctcttcacacgtcctggacgaccaccaccaagtggactggtcagtgagaagtcaatgtgcttctgcgaatcaaccctaaccatgaatgatgggatgttcaccacctgtctcccaaccctgatgtgcctctgcctgatgaggactctggcgtggtggatggact

SEQ ID NO: 73144 - DNA, 314 bp, Glycine max
  Clone ID: jC-gmfl02220068a03d1
gacactggtaaaaaagtttgacgggcaacccttcgtgctcccttgacaggcaaagaaaagcagattatgaccctaaaccaaggctataaatgaatggtgcaccatatccattgttaacgcccacttagggtactaaataagatacaactacataggtaccgaattactgccccccaggtgtttccacatttaccaaaaccaggctcgttcatgaaccatgatggattcctagatacggtgcaggaatgaaggttccttgtaagcctcagggttccgatatggcctactcactagttagtgccaccccttgatgc

SEQ ID NO: 73145 - DNA, 537 bp, Glycine max
  unsure (1)..(537): unsure at all n locations
  Clone ID: jC-gmfl02220068a04d1
aggaagaatgacaaattgttcataaacagcacaagtaacatgacatagatgagagagatcaacttgaattggccttgctgaaacaagaaacagttgcaagtactcaactccaaacagaagaactgtcaacacctcattgaacatctaacatacatcagcaaaaggtgaaaattcatggtatcatgatatcatcatcatcatcacacacacacccctttattggaaccaagcctgccacgtacaatgccaccgctatgttcatgatcacactctctccttctgctgttcaaacccttgttcttcttcttggcttcagatgacaaactacatcccaatcctaagggtgttttctgagcctactcctctctggagctcaatcttgaagaagtccagcaatcggtggagtcagcagaatttggctcccatgatgaagaacatgacatgctgttgccccagtgatgttggccactgctactactcacagtgaagctgttgcttcctgaagactctaggccctncatggcttctactactaca

SEQ ID NO: 73146 - DNA, 466 bp, Glycine max
  Clone ID: jC-gmfl02220068a05d1
aattggatcttgttttaaatattgttttgaatgtttgtcattttaatagtctgttattctaagaaagacaggaagaccctgttggactaataggttggttaaaggaaactgtattcacactcccataggtaggttcatcctaatgggaacaacgaccaaatttaaggtggcactaactgagcctttagctataactttttttaccaatgcttgaaggcagaggctgagatctcaaatgatcagtgcccaagtcgatgcacctagacaagtcaagccccctttgggagaaacaaccgtggaactaaagttgcataaagtacaaagggaacaacgagaaaaatggtcatcattagagcgagtgttacaagaacggaacaggcatatcgtacgtgcaagggactttgaaactgcctatggctatggcataaacctatgcgcccaaaacggggattaacatatgaactac

SEQ ID NO: 73147 - DNA, 411 bp, Glycine max
  Clone ID: jC-gmfl02220068a06d1
ggctcatataaaagaccgtcatgtaaaagattagacctggcgtatcatcttaacagcattatccaggaagctcactcatggggcgagtctacctatgatcaaggtacgatcgcttgcaaaggctaggcccttacacatgacttttcagctggcataatgcggaatctcagactctgctgctacataaagagcgcttctcagtgtgggcttctttcctactactacattctactactatccacttacacagacactgcttcagactaggacggctcctgatttgatcccagtcatgcccatgaatgcgagactcatgctgatagctggatgggacttactctttacactgtagagcattctatctacggacagatcctacccctggaggggattgtgacagccatctgctag

SEQ ID NO: 73148 - DNA, 451 bp, Glycine max
  Clone ID: jC-gmfl02220068a08d1
ggatgaaaaaataggtgaacgtttataattcgattatcaatactcttatgaatagggaagaaacagcctccgaagcatacatgtgcacatgaatgcaagagctagtacgcacagacaacactgcttaactttgttcctactctatactcgggagacacttacagcttcattacatccagggccattatcttgcttctaattcttgtcgctgcaaataacattggaacggctaatgtgctgttgcagaggatcttatgcaggaaacgcagactatcgtaaccatactgccatgacattgctcatgcttgaccctgctgacaccactgatactgcatcaggctgatacccaatgatgtaacgacggctgacactgcattcgctgaaagaggtcttcacccagagttagagctggatgcctgacatattccatcgcttgaacttcggcattcag

SEQ ID NO: 73149 - DNA, 450 bp, Glycine max
  Clone ID: jC-gmfl02220068a10d1
gttaaattagcatttacaaatcacgagatagcatagattttcttcaatgaggagaatttgctctatcattaacaaaaaagaaaagaaaaattatttgaacgttctgttgaagttgctggtctatctggtagtgtctccataatgattggcattactcagctcccatcaacttggatatatctccaaacattcccatgggggtccttcgctgtactccaaagaacctttccggaatatcatctagcatcttattgaacgcaggctccctgtcaatacttggcttaaaatttgctctcaacatactaaaaagaggcaaagcatctttttccaacgtttgcaaaagatatgcgataaattgcatcaactctgtcttaggaaatgcaaccttagcccgattcagttgcttctttatctcttccattaggatgttcgcatctttcaaattacctg

SEQ ID NO: 73150 - DNA, 354 bp, Glycine max
  Clone ID: jC-gmfl02220068b01d1
aaaaagactaaaataaaattttttcattgtcaaaaaaattaaacccattttttgatcttattttggcccatcagggggccccctcccaaagtactattgaggctggggtttttaaaggggcaaccgttattgtgcttaaagacgggcccaaaaagtgttcccaatttttgttgcttttgcataccttggtctttaaccgtccggggtaccgcggaatgggcctcatgttttttccccccccaagcttcaaaatttttccccaatgcccatatatcccggggccccttagttttgacctcatgacaatgctggcatttgggtgcttacagttgaccatttggggggggtttgaat

SEQ ID NO: 73151 - DNA, 398 bp, Glycine max
  Clone ID: jC-gmfl02220068b02d1
attaaagaattcattcattaacagattacatacgggctccaaatcttacaccaaggaatctgatgaatattttgccctgaatatagagtcttacagggccggtggcatcaaatgctggactaatatcgcttaccacactgcatagtaacactgcttgaaatcgaccacgaacctgatgacgtacccagatgactagggatattaattcttgatcagtgatctaatacactctttactttcacactgtgtgaaccatgcgagaggaagtgcttgaactgctaaaaagggcatatgctgtgcagcacatttattatgtattactgtaatgatgcccttccgagaagactcagacttttagccagactacattgactggcacttttattcatcctatcgat

SEQ ID NO: 73152 - DNA, 511 bp, Glycine max
  Clone ID: jC-gmfl02220068b05d1
gaaagttcagtaaataatatccattcaactaaatttgagaaaaaacaaaaagcatggagatatataatatgtccttcaatagaaaatgaaataacaaaaggtagcaaaacatataattactgggtcctagcatgcttaagacgaggcacaatcatccgataacatcaaaactgctgctgcttctgctaactcaagccttcaccctttcctcctcgaggataagggccttccctgttggctttgccaatagatcagagtactcttggaatggtgatttggagaaccgagtctccttccagaattcaggtgttagaaaaccgtaggttttcagcaaacagtcaaaagtagccttgacgaaatttccgagggttttggtggaacccctggaggaagtgaagacgtcatcgattccagcgaactgtaagaccttcttggggaccctagcggcgacgattccggacccacgaggggctgggaccatgcggactgtgacggagccacactttccggt

SEQ ID NO: 73153 - DNA, 395 bp, Glycine max
  Clone ID: jC-gmfl02220068b06d1
ggtcctaactattaattcgttaccctaatttggaaaagcacgcaaccacgcactaaatttgggacattttgcaacatattttttcctgcccgatgttttgcaaaggaatattccccagtgatcattaattcccttaccgtggttgatttccactggccaaaagaaggcctatcactcattaaagggatatccaggtttttaataaattatgattgggccttttccgtgcgcctcttaagggggcccttgacaatcccaggggatactttggggtccaggtacaaacagtgggttcatactgagccttgttagccttgcacatgggggcaatatttggcacaagcggggaattagggtttgggacgcccaacaaggagccaaaggcccaaaggccc

SEQ ID NO: 73154 - DNA, 506 bp, Glycine max
  Clone ID: jC-gmfl02220068b08d1
ctggctctctttatgcatgttgcaaattacatagcatcggcatgattatgaatgatagggactaatatgcaaactgatgtccagtagaataactggattatgcccttacaacgatcaacaccaaggtcctattcgacctgaagctaagcggatgataagattgttctacgagcttttcgaatacgaatcattcttaaaacttgaatataacgggaggatcaagagccctatgggcatctgttcgatttcatgaatttgagctaccaccctttgaagggatgaaaaattgacctggggacgtttgtaaccaactatatcaagccgactttcttacccatagaaatgtcgattaaagccatggagtaaccatggttctatagcccaaaatttgttgtagaaatatggatgccaaccaatgatcatcaccattttaaaagcacctcttgccgccatccagctcatccggaataaacacttgcacgatactgtgaaaggatatctgaata

SEQ ID NO: 73155 - DNA, 517 bp, Glycine max
  Clone ID: jC-gmfl02220068b10d1
atgatgacaacaatacaagaaaaagaatgatatatcaatttatatagcctatgtactaggattacaacatagaatgtagaagagcctgtagctcaaacataaacgcctaattagccattattgtgataagcgtctaaaaatgatatgttacacaaacattaaactacatgaatcaggggactcatgctacaaacttgacgtacaaaaatcccacgaatgactgagtataagtataatctatctatctactcatctcattcttgcatcctgaaaggtaggactgtgccagcaagaaatacttctctttgtgccttttgtactcgtggtatcgaaggaaaaagtaaccaagataatcaaattcaattgcagacatctttgcctgaattagaccccacaatgcccagaaaatgtgagaagcaagggaaaatgtatttgcctcaacatacaaagtttcaagatctttctcagacacctcttggggtctttcaggtttcaagtaatgcctgaggaaatgata

SEQ ID NO: 73156 - DNA, 331 bp, Glycine max
  Clone ID: jC-gmfl02220068b11d1
ctacgagtgaacctgccattgcatcaagttaatatcgatcatatactaaacaggtaacatgatggatattctgctggtgaaattttaaaaccatatgcactgattttcatggtaggactcaattaggtgaaaaaggacagcgttaccactgtccactgtgcatgtccaccactaaggctacattttgccaacccttattctttaagaggtgcttaataactacttatgcctgttgtatttacccggaccatcatcattgactactacacctatgtacctgacaagtgcaaatgactctagcatgtaagattcataaggctactacgtttac

SEQ ID NO: 73157 - DNA, 478 bp, Glycine max
  Clone ID: jC-gmfl02220068b12d1
catcagtgaaagttcatatcgaacgttaatacattatcagcaaagaacagagtgtactttgttattttcagttacatcaactactacaaacgtaaacggccaaataaacaagaatctaaagtcatgacattaattaacataagcaaacatgacgaaacaggacaggaccttttctggggtctgtacaaggaacagaaggatcaaattcagtctgttaaaactcttcttgccttctctaatccatcgccctttccttcaacctctttctctttctcccaccaaaaagacaggaaactagagaaatattaatatatgtaattaatctgtgaatccaaggaccatattctcaagcaacactaatgatgctatctccattgctgaaacattgcatggcatgtaaagctgaaatgcttgatgatgtctgtctttggtcagatgagaaggatagccccagggacagtgtcggtggtgggtcaat

SEQ ID NO: 73158 - DNA, 462 bp, Glycine max
  Clone ID: jC-gmfl02220068c01d1
gcaaaaactgtgattacttcctgaatttacattaaatgcatctaaaccttaaataggtatttgtacattgaatcttcaatctatgcatgacaatagaagtagccattttacaagctttcaccaacataaacactcccacctaaaaccatttaagcgttacaacttagttaaaaaggtttgccaatgtttctccaaggcttgcaatcatagagttgttccaacacttctcacttgggagtgaaagcagcaaaaatagtagcatggccaggatctgcaaggtgagcaaagaggttgtcaataggaccagtgccagtgtaaatgtgctggaaccatgcccccatcacagccaacatggccaacctcccattcttgatctcctttgctctcaactccttgatcttctcaggagaaccacttccccagccaagtgggtcaaaccaaagcccacctgggtacccaaca

SEQ ID NO: 73159 - DNA, 371 bp, Glycine max
  Clone ID: jC-gmfl02220068c03d1
caaagaatggtattactaataccagaatgtactttaataataatttatatacaaagagaacagtagtggattccacgtccaataataaggggcttttcttagcatccaataaggtgaggcataaggaagacaggcctaaccttaaaacctttacctcaatcagaaacatatatgtttctcttcttctgatgaatgaaatcaattgtacaaaaatcagcaatatacaaacatatttcctatttgacaattcagctaataaatgaatgaactggctctatggatcttatgttcctaacataagctcaatctaacgtcattgccacatggatgatgctggaatgcgactaatggcgggccaagtgaatgaaagt

SEQ ID NO: 73160 - DNA, 469 bp, Glycine max
  Clone ID: jC-gmfl02220068c05d1
ataatagatcttgcttcaaatatatttcaagtagtacattttcttaggtttatacgtttgaaagcaatatttatgcttgctttcaacgaatcttcatccagacatatattatacattcatacatatcgatagaaccgtgctcattcactgccattcgtaacatagtgatggcgtagacaagaaccacactgagtcaatgacatttcatataccagtctcgattaatgaggtatcatatatatatccgccaattcatcaagcattcacaatgattccaccattggggtggaggacttggccagtaatgtaagaggagcatatgttgctagcaagaaagacatgagagggagcaacttcaataggttggccagctctcttcattggcacatgcgaaccaaattgaacaataggttcctcgtgcatagttgctactattaacggaggccagatgggtccatgtgcaaccccg

SEQ ID NO: 73161 - DNA, 425 bp, Glycine max
  Clone ID: jC-gmfl02220068c08d1
gggaaaatgccttaaacctttttccattacttttttttggattggttcaaaaacccaatttaacaaaaggggggtttagaaaagccttttacccctggtgaaacattttggttcctaaaagaggccaaatagcttgatccccccattatttgccctaattttgcatacaaaaattttccttaaccccaaccaatgaaaataaattttttcagcccaaggcaagtaaacctaagggcttattaagccagggatacctgcttaagaacgggggtggaaacaccttttggatccccggttaagcagcaaaaccccgttaaaaaggggcccaagttacctttacttgcctttatttggaccggacaagaatttaatttggaccccccctttagcttcattttaagccaatgaccaaactggctgtaccc

SEQ ID NO: 73162 - DNA, 494 bp, Glycine max
  Clone ID: jC-gmfl02220068c09d1
gaaagctaaattctagtttcaattagcataatttaacttagtaatgagcaataacttcaggccctacgcggtataaaggaaacaacaattccaatactgtactgtttttcgttttacgatatttggacctaaattacaacaaaattgagcctgttataaggctttgtaggaaacgggcaaatcaatcaaatacccttattctttttgtgtttatgcctatcactgctatttaggctatcgcttccaccagtcttcctagctttgtgcggtctttttgatgacgccgtagcatagatagccttcagagggtctccttcttttcttaattatctcttggatcccttgcggcgattattatttcccattgcatcccttgcaagcttgaccatttcccttgcctctttcgttggtttgtctaataggtacttaagcacatcccgtaagtgaagaggtggtgcattcttgctaaaattttgtcatgcttcagtagatct

SEQ ID NO: 73163 - DNA, 260 bp, Glycine max
  Clone ID: jC-gmfl02220068c10d1
aaaaccatcaatggtcaaaactcaattccccggcattacgtttgatggtgggctcaatctaatgcgtatttattacccctcgtgattccctttgaaggcccggcatagtcaacatttacaggggagcatttaacatcaagctgaaacctttttgcttacccactccaattttacgttacaagctttctacaagtactacgaattcaacttggggaaaatgtgctaatttcaaccaaaggccgaccaagaagggcctttta

SEQ ID NO: 73164 - DNA, 519 bp, Glycine max
  Clone ID: jC-gmfl02220068c11d1
atctctatatcttcaaattcaatgtctaccactgtgctataagaatctgaatatattgcttggcaaatttttagcataaaaagtcctgtaaattgtcattaattagttttagaaagcattagttggaattcagattttgagatcacgatgagagtgcatttatccatgcatttcatttattttgtgcacattagcatgtggtttattaaaagttgtgttttaaaacataacttattcataactccgtaataaattcaaaaattactcatgttgataaatttttcaaaaaaactaccactgttatgtaaaaaaagcctaaattggaatacggttataggtctaataaactgtatattctaaagcatatagttaaataatgaaaatatacgtcactataaattcaaaagtttggagcatccttaaaaaaaaacttaattattaacttggttactaaattattttttaaaaggtttaatttattcccaaattttttaaaagtttactttagtcacaaattat

SEQ ID NO: 73165 - DNA, 247 bp, Glycine max
  Clone ID: jC-gmfl02220068d01d1
ggaaaaaaaaaagggatgttaacctttaaacaacattaacatccataaataaacattacataaaaccatgttggaaaaattgaccctttaaaactggtgatggacagaacaaaatggccaggggccctgtacaatatgggtgcattcgggcttcccgcccaaaattatgataacttgcaagaacccccaaccaatttgagcccacatacgtaataaaccccctgacattggaccaaatccctcttaa

SEQ ID NO: 73166 - DNA, 522 bp, Glycine max
  Clone ID: jC-gmfl02220068d06d1
aaaataaaaagtcatccaaattattcattgatttcatacctgggaaacctgtgttttaattacaaagcgacattgcagttgtagagtacaataggcactttattttggtaactaaacatttattgctacattgtacaatagaagagtcctttctcatacttgagtatgttttgacaagctattaaagggggagcaactgaaccgaatcagaggtattgccatacccttccataggttttaaccgtcactcacttccatcataataggaattatgcaaacccatccaaaacttaaacgcctcagcagtccttttcctctctactcttgtgtattgtgtagcccttgaagcatgcttactagtaaacattattgaatgcattcccacatacattctagtaaacttggacttgttgggaggtatcccattgtacttcatgcaagccactatttacaatgcctttctaaagaaagcagccctcacacatatatcagcaattgtatctaaaagcgctacatccggtt

SEQ ID NO: 73167 - DNA, 473 bp, Glycine max
  Clone ID: jC-gmfl02220068d07d1
attgattggcacttttttttatagattttggttcaccttatgttaccttatgcacaaaagattgaaatctcataggattattgtcccaagcctgacttttacaaacaacttcgcctcaaggtttttagagacaccattgactgccttgagacaactatttaaccaaatgagagacctgaaaatcctggctaaaatcctaggcttcgaactaacggtctcctatacattttacagacagcacgaacgtgaaatgtactgactatatcccctcccagaatcacagtggtttaatgctgcatgatgatcccgtgataaagtttgctccatacacccgtggagaccttgttcctataggctatccacctgaaactgtgctaactgcgctagaccagaattttgaacactacggacctgggagatactatgagattcctcccacatcctaaagtacgcataaggaccccattcttgac

SEQ ID NO: 73168 - DNA, 400 bp, Glycine max
  Clone ID: jC-gmfl02220068d10d1
acgcaagctataacgctattaaatggcccacgaagaagtaaaggtcagcatgccctaaggacacaataatacctgtaaggggaaaattactgttcactggaaagtcaaagaacgtgataaccaggacatgtgcatgaatggcatgaggatcaagataccatgacttgcaaaattgaaagccatcttatgctgcgatggaacatcctgctggatggtaaacccaggaacacatgacttatgcgcgatcagtgtcatcatgtgaatgcaggcgcccaacggatctttgaatgcccctgggcgaacagtgattggccaacagcagaatgagttagtgaattgcaggatttgcctaaagcttggactgggaaccacgttgagcagcctttggtgactccatgcc

SEQ ID NO: 73169 - DNA, 205 bp, Glycine max
  Clone ID: jC-gmfl02220068e01d1
aaatctgtctcagcaccctattaaaagctaaaacccaaatttcaaacaattacggaccttttacttacataacaaaattatgcccacctccgattgcaaaacaaaaagccggtgccaggattttttgaaggaaatattacccctcagtttactccacacactggggttaaaaacagacgcttttgggagatccctgaaaaataaa

SEQ ID NO: 73170 - DNA, 450 bp, Glycine max
  Clone ID: jC-gmfl02220068e03d1
ataagaaaaaagcaacttgaaaattagccattggtcattcgagaatacaattctagagaagcagccaacctagcacaaacgtataaatgaatgcactcaggatatgctctaggcggtacaacatatacagggttgcacaggcgggaaaacgagagctatgacagcatgagctgggcacgattatcgtaggggtaaagctgggttcatggtgcagtgagatttgagtgaaaatggcccttcacatgataatattgggctgatgaaaatccaagccatgaatgaccaaacatgcccaagctactttaacctggaacatctgggtcagattggctttgagaggttaatcagattcagaggaatcagatggctggttaccaataatgtcagggaaaaaggtttgcatcataggatcggcaggcattacagattgacgggaaccaaccaacgtgc

SEQ ID NO: 73171 - DNA, 316 bp, Glycine max
  Clone ID: jC-gmfl02220068e06d1
gggccaaaagtgacaggattgcaaataaaataaatgcctattacggtgacaggtccctaatagcccagatggaccatgaagctgcaccccattgcttttactagctagacatttacagtttgagccaaaatggcttgctaactctttaaaggaaaattccataataacattgcggggaaaatgggcttaaacgaaactgctcattaaacgatgtataagcgggcacaaatcctgtaaaaacgggcaagcctatggcgcatgggaaaagggttgctaatttacatgaccgtgcctccatcatgggggaaaactcgcc

SEQ ID NO: 73172 - DNA, 456 bp, Glycine max
  Clone ID: jC-gmfl02220068e07d1
gaataatatttttttatgattaccttataacaccatcaaacaacatgccatgactttaataaaagggtaacacctcttttaaataataagggctaaccaatctaatactgaccacgtatacatacagttcaatagaactgagatgtaacaatgcctcactatcaataatctgttcaagcctgtaccttgggggccccttcatcacttacaaattccaccgttggggcttgtggggcaccaaatgaatgtgcctagaacataagcttagtgaccacgagggcctgtgccaaacataccggaacattcccatgtctcgaaatggcccaatgctcccacaagaacctacacatggggggccaaactaagatccactgaagtgacatacctgcctaccatggctgggccacggaccttgcaatgaccactctaggcactcaatacaacaaccaaagcttg

SEQ ID NO: 73173 - DNA, 569 bp, Glycine max
  Clone ID: jC-gmfl02220068e08d1
aaggacaacccttgctgtaatggaaatcgtttacataagatgatgatttattctagtttgcactttgccatgccagctatcattgttgaaacatgcgcgagaacacttaacagcaatttatacaaacagaatttcttcattaacacttaacagcaaacacgagaacattcaatcaccccaaatacataacttaaccatacataggtagatgaaggaatcatattccttctattcacttttattgaaaaccagggaaagtactgcaacaaccatagagcccctagatggagatactgttgggaattcctctgaaagtcaatccctcctcactagaaggatagagcaaagtgtaaggcattttagccggcccactgcggtttctcaacgtctcgtccttggtcttctgtataagcttttggtcaatctcttgaagcttctttccaaacctcttgaaggcctctagtggaccagcatcagaagtccaatagtcaccaccatctgtgttcccaaggtagaactcatcagatgtgtgccttgacaagatttctatagttgcaaggtcaatgagg

SEQ ID NO: 73174 - DNA, 492 bp, Glycine max
  Clone ID: jC-gmfl02220068e10d1
gaacactacaaatagaaagttgacatttaataaaccaaagcaacacaacgcagcaaagtcctgaaactcgctgcgcttaacaaaaatgtaatcaggggttccgacaaacacagcacattaaaacacagataaataaaagcaattttgccaccgtcgatcaagaacccagttctgggaacaacagttgcgagatgatggtggagacttcaaactttgtccgaaaaacaagctacctagaaaagaagacacaagagtacagaagagaaaccaacatttattgtaaccaacatcccctgatgaaccagcccgcacgattcacttcttcttctgggcagccttggtgaccttggctccggtaggatccttcttctcaacgttcttgatgactcccacagcaacagtttgacgcatgtccctaacagcaaacctaccaagtggaggatactcggagaaagttttaacaaccatgggtttggttggaatcatcttaac

SEQ ID NO: 73175 - DNA, 548 bp, Glycine max
  unsure (1)..(548): unsure at all n locations
  Clone ID: jC-gmfl02220068e12d1
agggacagaaatttctaatatatataatataatggttctcatacagattcttctggtacacaggtgtaggtacattagagaaaatgggagcagaagattgcattgaattgcaatgctcattgtccagggacaaagttagtggcataagcccaagcattgttggcaacaggatcagcaacatggtcgtaaaggttctgaatagggcccttgccagtgacaatggcctgaacaaagaaaccaaacatggagaacatagccaagcgaccgttcttgagttccttgaccttcaactcagcgaatgcatcagggtcatcagccagaccaagagggtcaaatgcaccaccagggtagatagggtcaagtccttcaccaaggggtcctccaccaactctgtaaccttcaacaaaacccatgagcacaacctgaacagcccagatggcaaggatgctttgagcatggatcaggtttgggttgcccaagtagtcaagtcctgcctccgagaagatctgtgaaccagccttgaaccacacggnctcggcgaatttaca

SEQ ID NO: 73176 - DNA, 487 bp, Glycine max
  Clone ID: jC-gmfl02220068f01d1
actcaaactggtcgttgcaatgtttatgtgcttaacggggcaatacaaaagataggaacaagtactgtttccgcctaacactaaaggactagacacaaactttcctcattcaacaaattgcaacatccactgcaacatgtaacactcatacaaagcatttcctttaccaagattagaaagaaaaaaaaaatacttgcaagcacaggaaaaaaaaactcaatatatttcaagtctaaaaattggacaatgattttcaagcaatattgtggtatggtttaataataatagtatgatctaatatgaaggcaaggcaacattatgcagcttgcttgagcttctttgtgatgccagcaatgtacttcccttggtggaatgcttgttgtaactcaagctcacttggctgtcttgagccatcaccggcgtaagttccagcaccatatggacttccacctttcactttctccatctcaaacatgccggcaccgaa

SEQ ID NO: 73177 - DNA, 555 bp, Glycine max
  Clone ID: jC-gmfl02220068f02d1
aatccaattaatgcgtataattaataatataatgcgctcttgttggtattgcagctctaccacatctaccgaaatatataaagtgcatcaacactacaaaactaaataaagatctcaatgcacaataagatatataattcatattcttcttaaaagaaaacattcaatatgtatttctccaaataacaatgaaactctcactctaattttcaagtcactgtgtttctctttgtttcactattgctatgctcactttccggggacaaagtttgtagcataggcccaggcattattgtttaccgggtcagctaggtgatcagcaaggttttccaaaggtccctttcctgtcacaatggcctgaacaaagaaaccaaacatggagaacatggccaacctaccattcttgagctctttcaccttcaactcagcaaaagcctctgggtcatcagcaaggcccaatgggtcaaagctgccacctgggtagattgggtcagtcacttcaccgagaggcccaccagcaatacggtagccctcaacagcacccatcaagataac

SEQ ID NO: 73178 - DNA, 549 bp, Glycine max
  Clone ID: jC-gmfl02220068f06d1
ccaaggaacaaagccaaatgccttaatatctcagtgatatgtattgtacattaagtaagattggagaaaaacatgaagatgaatgatttagagagttggagctctctcagcagatccagaaatgacagtgagcaagttgttgccaaaagggtcactgagatgttttgcaaggttctcaacaggaccttctccagtgacataagcttggaagtagaaaccaagcatggcaaacatagcaagtcttccatttttaatttccttcacctttagcagtgcagcttggtctggatcatttgcaagccccaatgggtcaaatggaccacctggatgaagtttgtcttcgaaattcaggccattaataattctgtagtactctgcacctcccacaagaacaatctcagcaatgacagccacaataagattgatggggatgggtttcccgaagtagttcaaggtacccccatcaagaagcagagctccagtcttgaaccaaacagccttaggaccgcagtttgctccatgattgttgaggcctcgggaatgatgaat

SEQ ID NO: 73179 - DNA, 524 bp, Glycine max
  unsure (1)..(524): unsure at all n locations
  Clone ID: jC-gmfl02220068f07a1
aggaacagcatgtggccaaaacattataagactatatggccgaaaagcttggcatagagaaaagcaaaattgatgacttgtccaacctcctctacaagaactatggaacaactatggctggtttaagggcaattggatatgactttgactacgatgaatatcacagttttgttcatgggagattaccttatgagaatttgaaaccagacccagctctgaggaacctcttgctgagcctaccctataggagactgatcttcacaaactcagacaaagtccatgcagttaaggcactaagcaggctaggattagaagactgctttgaaggaatcatatgctttgagacccttaatcccatccacaaaagcactgtctctgatgatgaagatgacattgaatttgtggggggttcaggcacaaccaatccaaccacataaaaagatgctagcagctntcaaatctttgacatcattggccattttgctcaacccaatccccacacagttttgccaaagacacccatt

SEQ ID NO: 73180 - DNA, 372 bp, Glycine max
  Clone ID: jC-gmfl02220068f07d1
gaccatcaatgatctaagccgtcacagatgtctccacagcacgcttgccaggatctgccccttctgatattatgtcatctctccatagtcatggctctggcttcctaatgttgcggatgctacctgatgcataatcatgctcctgtacttctatgagattttcctaccagctcacagggaagacccacacgtacatcagcttgtgtgtggcggaccctatccttaaagaacataggtctttgcggagtaacgttggatctcttgagggccaactcagtggcatttaccgagggttagcagatcatcgctgtctttgccaaaactgtgacatgattggacctgagcacaatggccaatgcatgcaaacatttg

SEQ ID NO: 73181 - DNA, 542 bp, Glycine max
  Clone ID: jC-gmfl02220068f09d1
aacatagcaaactaaacattttattatattactttagtataacaagttgtctcgatttcgagaattgaaaatataacaactatttcaaaacatagtaatacaaattttgtcgccctcaatagaaactcttggctcaagttggaatactaagtatgaaagttctattgttctgcttggaagggcttgtatttcttgatactaaccgaaaggccttggatggaacccacaagtgagataatagaaatgatcaagcaaacccaactcaatatcttgagccaagtccaggtgaaggaaaatctttgcatatttgacttcttaatgtacatctctatagggaagtaaaccgtcaatggccagaaagagagtgcaccaataagggccaaaaagtcattgaagaatgggagtaacatagctacaacggcagtgataatcacatatgcaggccttcacactaccctaaagaagttcacattggagctttcacatagaggaatgttcaaagtatgctcggcatttataaattggctttctgtccattttct

SEQ ID NO: 73182 - DNA, 423 bp, Glycine max
  Clone ID: jC-gmfl02220068f11d1
atactctaattccaaaactttgaatttatgagtgcccaaccaacatgaattgtaaagcaacaggaaccaggacaagagaggaaggtgtttgatgtaacaacagagagagagacattacaaccacgtcccacattacgtattaataatcccttaggagcaagcctagacttgatggtcttcaacctccttggttcccacctggaacgccttggtataacacattgtctggaaccggaggtgatcctgcaaacaacgttagagcaatggactgagtgccaagcaattgactgatgaatgctgcaattactgaagcttgctacttgacattggccttttggaagtgaaccaacccttttgggaacacaaatattatagccttgcttatgctctttgatatgatcgcgcaggctgaggatatgaacc

SEQ ID NO: 73183 - DNA, 449 bp, Glycine max
  Clone ID: jC-gmfl02220068f12d1
acttacagcaccaagcgtcgttgaatgactcggaacgtctacctgaaactaattatacactgtatagataaagatattgagggagaaaccgaacatttgaagatgagtaaccaagagcataatgatcatgaaaagaaaagaacataagatgacatcctaaacataactgccacattgtgactcacacacatacagaagggtattcaatgctagaccccgctactgggcctttattggcagagtattgactgcacattggccaccattaacaccgaatgtgcttaaaatgaccaaacatgcatctaagaagtatggcgattataatactagaggatgatctaaatctagagtcaccaatcctactgtatggttctgaatcatgcgtctctccagccttaggaaccttcaatttcaattgcatggcctagctcttaatatcatgcgatgag

SEQ ID NO: 73184 - DNA, 435 bp, Glycine max
  Clone ID: jC-gmfl02220068g01d1
accattaaaacaaaaaacagtactcatcaaaaacaaacagcagtgaaaattgaccaccgccgatcaagaacctagttttgaaagttacggctacatgaaatcggcagaaacttaaaaatataacttaaacaaaacacctaagactctgcaaggataaaactactataaaggagtaaccacgatgatgatcacatgtgctagcaaaattgcccaaatgcaatcacttcttcttggcagcggccttggtgaccttggctccggtggggtctttcttctcaacactcttgatgactccgacagccacagtttgacgcatgtccctcacagcaaaacgaccaaggggaggatactcagagaaagtttcaaccaccatgggcttggttggaatcatcttaaccatacctgcatcaccattcttcaaaatttgggctcctc

SEQ ID NO: 73185 - DNA, 501 bp, Glycine max
  Clone ID: jC-gmfl02220068g02d1
aacataaatcatcttctgagtaatagttgttcactagcatgctctcttggtgagtaattataggtatattatatatacaagattttacctatgattctaaagcatttgtgcatgacttctctttatacaaactatgacagagatgacaggctacaacgttgatttagtattgaagatgccatatgattcaccctgtcattgatgtttggctgccagaatattactgaacttggattgagatctgatgaaagatcttatcctgtcccaaagtgagaaattggaagcgaaatatctgaccatcactgactttttcgaaccttgtctgggaaactctaaatccctgtcaataatagaatgctttatactgtctagatcttcaagcattggtaatgacacataaccctgagactctaggtttctgatgcacccgcgacgtaagaaatttatgatctcacgaacttcatcatgagggcagtgaccaacatggctgattcgatatat

SEQ ID NO: 73186 - DNA, 450 bp, Glycine max
  Clone ID: jC-gmfl02220068g03d1
gaaacaaggaaaaaattaacatacatagttgattttacatattaccgcatagaggttccaggatgactgaggacacgagtctacaattattcaggtttaaggactacatgcattaaaccagactatctaacaagtatttatccatcccatcatgcacactttctatccatgccattggcgccatcaaaccatctaagaaaattaagtgcgtacaaatgaccaacgaggatgactttaacaccaggcttatgcatcctaaatatagcaggggcatactctaatcattacctttcccagatgacctttacacttacattatttctctcattcgacttgagaatccataattgatcgctaaaagctgatcctattcatgtaatgctgccccacaaacaatttctcatgctgtactttattgtgatgtaacggttcgttccatgttttgcccaa

SEQ ID NO: 73187 - DNA, 479 bp, Glycine max
  Clone ID: jC-gmfl02220068g05d1
aacaccaaaggatctgattcattaaaagcaatagattcttcacaaccacacaccactcacttgacatatatggaacacatacataatccatatagcattacttaggggtggggcatttcttactttaatttaatgcccaaacataacaagggcaggaaggaaaaccacaaaattaaaacgaagatcatatagctgttaataataacaacaacacatgcaacataaaaaccacatgcagttgtggtagtggcatcttcttcaaattggaaacgcctcaatgatggaagggagagcgttgatcttgatgatgttgtaacgcgcgaaaccggtttccttgaacagccacttccagttctcttcggacctctctttgccaccggcgttgtgagcgagaagcatcatgtcgaatgcgatgccaacgtttgtgaagagttcgttgccttggggtcgaagaacgtgatccacgattatgacttttc

SEQ ID NO: 73188 - DNA, 509 bp, Glycine max
  Clone ID: jC-gmfl02220068g06d1
acaaggacaaacagttacctgaatttattatttctcgcagcatgaaagccacgatagacagtcaagtcaagcattatgatacatcagaccccaaaataccaacaacactactcagctgagcagttattatatcgtactttcacatgaaagtgtcataaaggcagataaaagcatatacattcaacacacacgaccataaggctcaagcacaaggcaatagtatgacttaaacggtgacacatttcagcaattattcttaaaacactgcagattttctgaatttgttcaaaatacaagagccttgttactgtagaaccacacattcttgtgaaccagccaccaccaccacagtagggtgttcgcttgtgctgactgcatcaacttcttttttgacactttgaacattgacatcctccaattcaccacagccaatggcttcaaaaacaagatcattgacttcttgaaacctctcttgagaaagggacacctcagcaagaagcctccaagca

SEQ ID NO: 73189 - DNA, 417 bp, Glycine max
  Clone ID: jC-gmfl02220068g07d1
ctggctcttgcttcattatcactgcgtgctttccggttctcttgtacacgtactcaaccaactttgctggatcgtacacccccttcacgctcacttgtgagttctgcagatcgggttctgctgattccactcccttcattctctgtatgcgtctcttgatttcctgagagcaagcttcgcagtgcatgccaactttcagaaccgtcatcacaatctgagcctcttctttcttctcttcgggtgtgggcttgggcttttcttcctcttggaccttcttctcctcttgcggtttcgggatcggagaaagaagctcgacctgtctgtgactcttcctctgtattctctccaaaaccttcaacggatcccggtttctctcccttaacgaccaccttgtgagatttgcaatcggtgacaaca

SEQ ID NO: 73190 - DNA, 215 bp, Glycine max
  Clone ID: jC-gmfl02220068g08d1
agttattgtttactctaaggaaatctagaaatcttaccttattataggaatgaagatgactagagaaatatttgtattttatgtgtacaaaagaaaaacagatgagacgattaaagaattactgcatgactagccagaatgggcagaaagcatggggctacaaaatggacctacaacatctggtccaagcccaagctttatgcaaaaggccgaag

SEQ ID NO: 73191 - DNA, 396 bp, Glycine max
  Clone ID: jC-gmfl02220068g11d1
aaaaaaaccccaaaagaaaaaaccccgggggggttggacaggtttttaccacggggcctttgggcccacacaaagggccatacctgggaattaaataacgggggcccctggggtaaaggcgatttctccatttttccaacggggctttttttttattcaagggaaccgggctaaaagagccctaaaaaccccaactaaggggggaccggggaacagggcacttaaggggcctatcgccgggggggggtcccaaaagaacgctccatggggccccaagggttccaaaggattgggaacctttttcccccaggttttttttttcaagaaaattggcaggaaaggggggttaacccggggtttcaaagggtttctggggaaataacttttcccaggggg

SEQ ID NO: 73192 - DNA, 482 bp, Glycine max
  Clone ID: jC-gmfl02220068h01d1
caaggtaaaaattttattgcacaatgagaaggcagagaaaattgatggttctgtttctcagtacaagttttagaatgaaaaatgaagcaacaagtgtttgtagtggtagtagtagtagtagtaagcatacaaaactacaatggcatggtacatacatataataattgaattaccaattcagaatttgatggctctcacttccacttgttggcaacaatgtcagccaaatccacaaccctttgggagtagccccactcattgtcataccaagcaatcaccttaaccatgtcatctcccatgaccatggtcaacgatgagtcaacggttgaggacacatcagtgcacctgaagtcaacagacacaagtggctcatcacacacagagaggattccctggagctcattgtctgcactctctctgaatgctgcattcacttcttctgcaaaggtcttctttgagacctgaacaacgaggtccaccac

SEQ ID NO: 73193 - DNA, 504 bp, Glycine max
  Clone ID: jC-gmfl02220068h02d1
ggagagaactgtgtattaattataaatatctattttgattcaataatggaaaaaagtatatgtaactcggttaaacatttcagtatcagattacactacactacaacattttaagggcaaaatcccgacattaaggtatcattcactctgttgcaatcttcgactatctctaaagtaactttagctgaactaatttttcagcttgtaaaagattgctccaactccgtgatcaaagttcaccgcagcacccaaggcatacatcataacagattctactcaatttgacataaaaatattcacattttctgaactgagtatatgaaatagagtaatcatcattaatcattgttccttgaaaaagatggcaatggcattgagccttgtgggcgaaggattacaagcacaccaaacatcccaagcattggaagaacatgatgccacttcaacagtttatagtagtgcatatggaatgtaagagagaaatcatcagagaaatacagtcca

SEQ ID NO: 73194 - DNA, 459 bp, Glycine max
  Clone ID: jC-gmfl02220068h03d1
ataggatcaatcaaaacattattttactcactttcatttaatctatacagtacatacatcacatattttgtttgtttattgattaaaccgaagcaatagcactgcatgtgtatagttttttcacttttgaccccaatagtagaaagcaataatatacagacatttgagtttttttatattttttttaccaatactcatagtcctatactcctattaattaattacagagttctgtagttcgtagcctctgttggcgagcaatgaaagcctcaaccttgcgacgaaagtcgtcgttgctcatgccatcttcagggtacgagttattattaacaagaactttctcagtctcacacctctgcaacacgcgtggaggcaccttctcactctccacgcgcttcacaacaatatccgatttagaccttctataatcctttttcaccttcaaaccagtctctgcag

SEQ ID NO: 73195 - DNA, 526 bp, Glycine max
  Clone ID: jC-gmfl02220068h04d1
ggaaagaatgaataagccagaagagaagttgcttgattgtttgtcagcaaggagaacctttcttacaactgagtgcaccagcacctgttgttatggaaccaacaagggaagatggtcttgcacttaagctagaagcccttgcatagctagaggaggctccagcacccgatgatgtgaaaaacgcaccgtttactaacaagtccccttctgacctccaattccaatcctgccactcactctctggcgcatcttcacgttttgtcacctctttgctgaatctgtcatcgggtgcaacaaacctattgccttggcagttgatggttggattagcacttccaccaatggcatacattttccagtgagtataatcattgttcaccacatggaaatacccaagcctacaccttggcatcctttgaacaaggccttcaccaaagtggttgaaagcaatagtgacttgcatggccttgtactgggtgtaagcatcgctgagaccccacaacatgaccttatcatgatgcgtcat

SEQ ID NO: 73196 - DNA, 459 bp, Glycine max
  Clone ID: jC-gmfl02220068h05d1
gactactaataaatcaccctttactagaaattactaccaactacattcattttcaatcctaccactaacgcttttttttttcttgatgtgcaacagtgcttctcttatcttccttttacacaccttttttcaagatttgccatgatcttcacacaagggattcctccttatataccagccaatttccccaacctatgtctcaaaatcttcagccccatgtacctgcccatcatcatgacagttgcttgaggatttgttcctggtgattcgtcaaatgttgagccgtctaccacacgaagtctgtcaacgccaagaaccttgtaatcagggctgactaccttccccacatggcaccctccatggtagtgccaaattgtgatcacggtgtctttgcaaaactgtgctatcgacgctgtgacattgggatgcttgggtatgaagttgacattagccttgaca

SEQ ID NO: 73197 - DNA, 544 bp, Glycine max
  Clone ID: jC-gmfl02220068h06d1
gcactaacttggaaatatacaataactagagcaaactagctcttttattgaatttgcatgttattcaaatcactacaagaaactcgaaactgaagaagtacaaagaagacacaatcacttaacaaagggaaacatagcactccaatacagaagaaacacaagaaacatagcgctccaatacagaagaaacaaaagaaacacaatactcctagtcctagttaaattaagcatgaaaaacataagttgaacataaaaagcataacaaaccgagggattggaaaacctgaatatccacctcagattttcttgaattcccgttgtagcttgaaaatccattcatcatgatcttccaaaatcatgttctctccatcaattgaaccattttcaatgcaaccccacaaaccctgagggagaacaaagttggggttttcgatgtgagtttttcaaatcaatggcgagaatcagaggaagcagaggacggcttgtcggacacgccgtcgtgttcctctttaccctgaattcgtgcacgaatgcggaagcccga

SEQ ID NO: 73198 - DNA, 470 bp, Glycine max
  Clone ID: jC-gmfl02220068h07d1
aaacaaagccatttaaaaaattttcaataaaaatatttccgggagacccccaaagataaaacccacgaatacccaatgggccacgggctataacccccaacaacccactttttaacaggccccaaatgaggaacccaggatatggggtgggggaaattcaattaacccctccagaagctaagggcgtgaggaacccggggagctttcaaccaggcgcttccaccgggggttccagcccgtaggaaccgggccggggtgaaatggggaccttcttcgggggtaaaaaaaccccgggaaccctttcacttggaccttccggaaacgtgggcgcccagggccaccggggggggattcacccaagaacaagggggtttcaaaatgcaccccggcccatgggcaccaaccttcggggggaaggaagtccccccgggggatcccaaaaaacccgccctaaaaaaggcccaaggcct

SEQ ID NO: 73199 - DNA, 476 bp, Glycine max
  Clone ID: jC-gmfl02220068h08d1
aataagatcaacaaatttcattgaaataatagtaaaccatttattctgaaaaataaacaaaacaaagaacagctcatgtgatgtgagttctggacaggattctccagccagccggccattctctatctctattctctaaaacaacaacctacacatatgatatattattatatcaaaatcctaccatattataaaaactctctatattaattaaattttaataacacggaatattatccacccctcaatttttacacgcacgtcaatttttttttatttacaaattacaccatgcgtattccgtatccgtatcccgtacgtgtgtaagtgtacaccgaaaattaatcaccgatcatcacatgattgaacatgcattggggttttcatcgctgaacatctgcggaggaggagcgtgcgggtgcatgtagtacggtagaagtggctgcagaggataaccctggttcacgtaccctggc

SEQ ID NO: 73200 - DNA, 432 bp, Glycine max
  Clone ID: jC-gmfl02220068h10d1
attcttaactcaaactttggtaatccaaaaaccacaagtctcactagtgtattaatagcatttcccgcaacctaaaattacagagttgcagaatacaagaaaatgaacaaggagaaggggaggacaaagtccagcattggcgggaggcaagttatctttatcagcaaaatacaggaagccaaaaatgtagatatatgaggacaaattgtcactaaaataatttttttcagaaaaggaagctcaatcatcaacttcagctttaatctctctcagcaagtcgtccttgtaatcctcaaatgttcctgggaaatttttgacagtaccatcttcgacaacccagatttgactcctttcttcatcctcacatacacgtgatatcaatcttgaatcatgactaacaagaacaacttcaccggtgaattcattcagtgc

SEQ ID NO: 73201 - DNA, 248 bp, Glycine max
  Clone ID: jC-gmfl02220068h12d1
atacgaataaccaattccaatttgtgctatctcaaatgaacgttgtcatgatgctaacattgaatttatcaagaacatattacagctatggatcccttactttgggattatgcaactcaactcgagcgagtcggtacggacctctgccatgtccaaaccctggttgcaacctatctgtgtcatctccatatcttagagagcgccgccttcacataaggcataccaaacttgctaaaatggcctttgag

SEQ ID NO: 73202 - DNA, 391 bp, Glycine max
  Clone ID: jC-gmfl02220069a03d1
agctgcaatatatatagttatacaaatcaaatcaggatgcaggagtcctatcacaacaggattaaaaacgaaaaccacactaagattgttttctacttgctaattgctaatacaatgaagcacatgcgattaagatgcactttctataaataatttcatactataacaatgggaaacgcaaacctacaacattcgacaacagttgactaggttgttaaaaaagcacactgtaatcaacccactatttttttgtttttttaatagaaaatcaatcctatcgattcatctgtcattcccaatgaggcttctctgaattatgttgttctctcgaaaccacctcctatctgcatatgcagccattcaggaggggatgatccctgagcataccccc

SEQ ID NO: 73203 - DNA, 500 bp, Glycine max
  Clone ID: jC-gmfl02220069a05d1
atgtaacatgataggacttacatacgggtatcaaatccaagttggtgacatagagaaatttgatttgacattcatagatcagaatatcagacttacatacgggtgaacatgatacgggtgaacatgataggagcacaatactatacataaaaactgacacaacaccctattagatatgaaaaactagatagcatccaattacaaaacttaagcatacataagaaaattatgcacacataagtttgcacgtttatttgtcaatgagaggtacgttggaaggaaagaaaaccacacaccacacaccacacactcttattagatagagatgctgttgggaattcctctgaaagtaaggccttccccactggtaggaagaagcacagtgtagggcatttgcgccggtccattacggttcctaaggcttgaaatcttgttcctccctgagattttgtcctcaatttccttcagcttgtttccaaacttcttaaaggcttgaattg

SEQ ID NO: 73204 - DNA, 494 bp, Glycine max
  Clone ID: jC-gmfl02220069a06d1
gattgaacatgttttgttagttattgtgactttgaaaagttgtcataagtacatgttctcatttataggaatacttttgacacaaaagatccttacattgtcacaccattagcctcgataccctttcttaggaaatacaatgggtaaaatatctagaagacccatttattagtcactaaacaaaaaaaaaatatcaaagaggaattacgttacattgatttcaattccttgagatacaaaaatgtagctcactctaaaattaattaatgaaatcaaaataattaaagaataaagaagctcaatcattccttattaattaatttatatttcttgctttcacaactcatcacttttattaccaattaagccttgtctttttgtgcctatggtgtgcgggaatgtcacgaaagcaaggaatcccagtaacttcaatccagtcagttccgtgaaaaaacttagatgctgagaaccaacgtgcagcttttgaattgaga

SEQ ID NO: 73205 - DNA, 329 bp, Glycine max
  Clone ID: jC-gmfl02220069a08d1
actagaacaaaaaagcaattaatttagaagaaagcaacgaataaagagggggtgttgtttttcactgacatggtaccacattgcatatacgcttgagtcttagtatagctgattcataacgcctatgaattttttattatgaaattggtgttggtacgtcttgaatcgagtgtgggattcatgtgtaatgtaattgatgattgaaaaatgagttttaaatgataaagtgatgaagtgacgtgaattgctttaagttgaactatgtgataaatatttctataatgtattgcgcttaagtatttggttatctatattctattcaaaaatat

SEQ ID NO: 73206 - DNA, 472 bp, Glycine max
  Clone ID: jC-gmfl02220069a11d1
caaacagaaaatagaattgtatcaattaagtaacactaaccacaaatcatcgtcagatctacgttaatctaggttttccctactccagccccatacatgaatggttttaaaatgccatgaaacatccaccgcaaatgttaaattaaatacaacagcaataataatataactcatttttgcctacgacgtatgtcatttttcagtctttgaagcacacgccacaacatgagatttgaatttctccagctcggccaaaacctcatcttctggtctgtagatcaaatcactcatgcgccatatctgcaacgttccccctcctccagtactttcacagtcattagacacactaacaatcgtccatggatcatatgcattccaatggaagtcaacaactttatccctatgacctgcatgttgaaaaaacaaccctggaggagaacttattgattttccagatcgctctatcttttta

SEQ ID NO: 73207 - DNA, 266 bp, Glycine max
  Clone ID: jC-gmfl02220069a12d1
gaaaattataattaatataaccttcagaagacaaaatccccacactgcgtaaaaatatattgttacatttcacctctaaacgcacatcaatgcatgcaggtcatcgctgtttgattccaaaaaagagagaatattctaaaactataatttttatcttcagcagccatttaattttacaaattagtacataaatccaaccttagaagatggacacatctgggggtggtccatatacactcatccaagaaagtggaactcgccatttg

SEQ ID NO: 73208 - DNA, 538 bp, Glycine max
  unsure (1)..(538): unsure at all n locations
  Clone ID: jC-gmfl02220069b01d1
gacaaataacattattatatcaacatataagcttacaaatttccacattttcaggaaacaaatgaaggaaattcatcccagttttgacttctgattgagtgaagccacaagacacgtatcgaagttcccaaattaacacaaattgcttggtcagatgacccaaaaccaagctataacagacccagcagctagaccaaaaactaagaataatacactcacaatccctgcagtctctgcatgctgcaacattacaattttaggaatcagaatcatcaatgcactggttaggtagccattagtaagccctaacaggcaagtcagtattgtcacgggaatctcagtccggaagaatttgggaccatgcaagcaacctaagaagagagggaaaaacaacaatcttgctatgcaaccacctatggcaacttttgcattctgtangaggtaaactgcagtcagacacttgccaacangatcaaacacattatagccagcaattaggagaattggataccaatccttaagaattgagagtgaacat

SEQ ID NO: 73209 - DNA, 496 bp, Glycine max
  Clone ID: jC-gmfl02220069b02d1
gacaggcaaccatgcatatatatacttcataataagatgttcaaaagtcaggcccccaaggaaactgcatacataattaacaattaaagcaaacaactttggccacacttgcagaacacaacatcctgctgcattgctcaacagacaaacctaccaagacattgttaatttgcaaggggatctttcgttaatctatcttgtaggcccatccatgtttgtccaaaaatgcctccaccgcttccttaatggccaagtttggcactaactgtgatggatcaaggggttctcgtgtgattgggtcgaatttaccaaccttctgaagatgttcaagaatcacagctctctcatatgtaagtccacttggagtgataacaggatcatgaaaaatgtcgagtgtgattctacagcacaaataatctggcacctcagtaggtatgtcagcttctgcagctgtattgaagactctttctaaagcctctaattgttctgaatggga

SEQ ID NO: 73210 - DNA, 168 bp, Glycine max
  Clone ID: jC-gmfl02220069b03d1
cctacgagccccggggggggccacaccccacacacaaaaggggccaaaaaaaaggggcactaccgggctttcccccaaaaaaataagggcgggaccggcaatacgaagcgaaaaaaaagaaaaagaatagcccccccaatccagaagggctaaacaggggggataaaa

SEQ ID NO: 73211 - DNA, 440 bp, Glycine max
  Clone ID: jC-gmfl02220069b04d1
gccaaacgtagtgaacaaattttatgcaaaaaattcgaagttattcaaacagccgtgttcggacttcagactccaaaagtgctacaaattaaagagccttccagaaaaaatggctttcaacattagatacaaaataagtaaccttgtattcttccaattatgtgatgattaataagaaacaaatgctacaaaaccaagcctaaatgtctcatttcttgacttcctcatactcggcctcgggagcctgttcaccaccctgagaacctccggctgaggaaccgccactagaaccacctgaaatgtgctctccaatcttggagacagctttgtttgcagcatcaagctttgccttaatttcgtcagcattgtctcctgccattgctggtctcaaatccgatactgcattttcaatctctttggccacttcactggggatctta

SEQ ID NO: 73212 - DNA, 500 bp, Glycine max
  Clone ID: jC-gmfl02220069b05d1
gaccttaaacagttgaactttgaaaggagacacaaaatctagattttgctgctccaatattaaaagctggtttggtatcccttcaaatagacagataaacgaattatttatataacttatttatataaactcgtccttgaatttttacctttataagaatacatactgatctaaaagaatgttttttctttcctaattagaggtgaaaatcttattgatgaatttgcaaatgaaactcatcaaattttcacatctattttgaggacatctaccaaatagagacctaagaggtgaactcaggaggaagttctcctcgtaggaaaaatgagatcatggttagggctctctgcggttggtaacttggaaccatgtgcccagctcctcttacagtgattagtgtgagccctttgtacccaaccaagtatcctccaacctcattgctagaataccatggacgccatgttgtctccactggaagtttcatggaatttattgaatac

SEQ ID NO: 73213 - DNA, 347 bp, Glycine max
  Clone ID: jC-gmfl02220069b07d1
aattagattattccgtttttaaaacatttttctgctctataccataggaccagcccatttcgcacgaaaaacgtctatatcaaacatcaacagcgcagaaaaaactaaaaaggaacggcccaaaaaatgggaaaaaaaaacaaaaatttttaacaaaaaaaaaaaggggggaaaaccggaaaaaccattttaaaccaaaaaaaaagattatccaaaaaaccaaccgggagcgggggcccaaaaaaaggggccttgtgactaaaccaaaaaacaacccgcgcaaagcgacggagttgggtcctcccacgccccacccaaaaaaaaaacgcccccccccccccccgggg

SEQ ID NO: 73214 - DNA, 456 bp, Glycine max
  Clone ID: jC-gmfl02220069b08d1
cacacattcataacaaacgtaggtgggatattagagtactattattaatgggacacaattgagttcaacacaaaccgaacttattttcaagggacattattacagacccattaaacatcaaagttcttcaaatgttttgggaacacattcaacattacacaacgagcttaaaaccccccacggagacggaggacaaggggaagggttgattccttctggatgttgtagtcagcgagggtccttccattctcgagctgctttgccagcaaaaatcagcctctgctggtccggtgggatgccttccttgtcctgaatcttggccttcacattgtcaatggtgtcagagctctccacctcgagggtaatagtcttacccgtaagagttttcacgaaatttgcataccaccacgaagacgcacaccaagtggagagttgactccttttggatgttgtagt

SEQ ID NO: 73215 - DNA, 399 bp, Glycine max
  Clone ID: jC-gmfl02220069b10d1
ggaaaacatcaagctccacacactaattttggagacgaagaaaactgctttacatcaagttttaaaccaagagactttcaatggctagagcagtctcctttatgggataatcaaacccccatgataactaacggggtgaaacaaaacaacaccaattcccgcaaagcctttttattccacaaagggggttacaggttgaagcaagtcctgggtaaaaacaagtttgaaaaaaactcctccattttatcaagttttaaaaatactgatgaatgccgcttttcacaaacacctaaggaggtttagttgggctccttgacctgttcctgattttttgggaaacactagcactgtttttatgcacactggaacttgacccttcatggccgccaccttttttta

SEQ ID NO: 73216 - DNA, 467 bp, Glycine max
  Clone ID: jC-gmfl02220069c01d1
caaacataatgtactttaatatatatccaaagggaggaaagcaacctaacagcacaacaccattgcttcacaccagaaaacacaataatggaaattctcaaaaagtaccccaaaactgcttatttttcattataagggtaattctggccatggaagtatgtaaatacttctttcactttaaaattccccactggattctttccatccaccatagctctcttcaggttcagcataatcctgctcctcatttttctcaacagtaaaagtgagagccaccttaatctctccacaatattcttcgtccttcacaaccttgtaagcagtttctggaatgctacccgcttcaaacactggatccagatgaatggttgccacgccaagacaatcatcttgactaaagttgtctttatccattatctttagattaagttcagatgcactgtcagagacagtgaatagaaagctct

SEQ ID NO: 73217 - DNA, 377 bp, Glycine max
  Clone ID: jC-gmfl02220069c02d1
aaacaagccttaaaagaatttttttttctcacccaataaatccaagaaattctgcaaactgaaaaaggggttttttactaaagcaaacttaaacaaaaacaacttccccttatttggcatctaccggggtaaaacaggaacaaaagccgctttttgatagaacacacctttgttttatattgaacattttgcacaggggtttatttttcacagcttttggaacttaaaatacttgcaaaggttttggaaataccaaactttttttttctcccttttttttggagatgacaaaggggcccgatcatgaaacaataatccacccccttggaattgaatcttgttttggggtgggaacgaggcccccctttttttatttt

SEQ ID NO: 73218 - DNA, 419 bp, Glycine max
  Clone ID: jC-gmfl02220069c03d1
gagagccatgatcacaattactactaccattctccactacacacaaaaattctcacaacgatgtaatcaaaagaatagtacattttcgaaaccacaaatgacactagctagaggattcatcaacagataacaaaacttagggagggcacatatttagaatatggcttcacacttatcctgttgcataatgtatcaatcaaaccctggaatctagggccatgatggtgctaagattcatggggtgcatgtactggtcagagccagtcatcatctgttggactatgattcggttagctttctccgatgggtgaaatggatcccaaaacgcgtataggtctctatttggacacaagttggaaaggggtgtgcagagtccaaccccattaaacgggccttgcccacaacaagctatctttgat

SEQ ID NO: 73219 - DNA, 420 bp, Glycine max
  Clone ID: jC-gmfl02220069c04d1
caatatgaacaatatacatgaatataagaaatatatgtaagtacacgcatggtcagttcatatccgaagggtcctaaccaaccacaaaacggtcgtctcagcggtctgaagtaaaacgtgataaacaacatttataaactgtaccagcataagcaatcaaacaaacacaacatatcaatatgacctattgggtttggaagatgatgaggttttggatttggcaaaatcaacaagatccttgaaaagggcatcttctggcttctgttgtttggttggggtggatgaattcagggagagattttgagtttgtcccaccaagctgtcataagaggaactggatccactacttgaatgagatacaccttgttgctcaaaaaactgttgtctttgattatactttgaaggtgggggccggatgat

SEQ ID NO: 73220 - DNA, 385 bp, Glycine max
  Clone ID: jC-gmfl02220069c05d1
ggaaacaaacatatttgtttcctttttattggtatggggcaaaagctacaacaaagtcaggggggggggtatttttcctctttattggtacataaaaaaaggccaaaaatgagaattaggtggggggaggggccacaccacttgctcataactaatttttggaggctccattttttccattatcatccaacgatgcatataccttaattattggctcggaaattttaatccctttcaaggattcatttttgtgcaaaaactcattgtggtcatgtaaaaaaacaggagtgtttgccataggggaaaatccaattgctggtaatccacgttcacggaagtagcgtgaatttgtagcggggggaaaaacctcgggcttaccaagttt

SEQ ID NO: 73221 - DNA, 424 bp, Glycine max
  Clone ID: jC-gmfl02220069c07d1
agacgaatcacgtatcgtaatttcacgtaataaaatattttataacagaatggagaaaatatataaaagaaagctctactaccaaagggacaacagaatactcgtagttataatttgctagaaaaagaagaacaaatcaagcaaacagtcacaataattacaacgacaaaccttttgagaaactttagatgcaaacttcttgcttatgggtttctagtcaataatatgggaacattgatgaacttagttttctccttggacatacgatcagccaagatttcttggtaacggctgaaaagctcatcaatgatagcttcaccaaaggggctaaccagcatagattctgccacagccctcatgctctgtgtcaaattgtatccgctttcagattcaaagtcaagaacacttcattcatcccaagcgc

SEQ ID NO: 73222 - DNA, 497 bp, Glycine max
  Clone ID: jC-gmfl02220069c08d1
ctacgaaataataacgatgtttttgaaagtgaaacagacaatacagtatatattgattcagatatgcaaggtcgaaaagtagtgttcaaacagaagtactaaacatgtggatatgtaatagtcttcttaaccgtaggacctgagagaaaaatacatgttaaaattctctcagtattcaagggagccaattgatggtagtcctgaaacaatttcatgagaatctgcaccagtgctattcagcctctgtcctggacttggaccaagggattccagggcttgttctcccattttatggatatcttcaggtgaaagtattttgatataccatacattattgacaaatgattcccacggatcgtctccaaggagaagaacatcgttctccctgtcgacgaatacaagctgccagcctgatctaagagggtcttctaatttcccctcaaataccaaacatctgtgccaactcctccgcagctcatgataactgctgaaccggg

SEQ ID NO: 73223 - DNA, 373 bp, Glycine max
  Clone ID: jC-gmfl02220069c10d1
catctaaaaaatgtaaggatttatttccacgaaaatttaaccctcaacgacaactttttccaaacagaaaacatttttttaaattaagtaacagggaaggaacgtaaactttgttacatactcaactgaaatgggcgataaactcagtctgacattatgaatgttcctttggacttaggacatcgaatgaaaaccatgcccaatataaactcatgtaattttcaaattcacccccccaagtcgtagcaaacctggggatgagtaactgcactaaaattaaggggaaaaatacaaaatgccccaaccaacatagggtttgcaattgcatgcaggctctttttttttttgagaaagatgcttttttcggcaaaaa

SEQ ID NO: 73224 - DNA, 394 bp, Glycine max
  Clone ID: jC-gmfl02220069c12d1
gatactgaaaaatacaatatatgcccttctgaaatacctcttggtgcaatacaacatcctaaaaagctgttaatggaatgcgaccaacttaactttatacaatggctgagataacaggaaactctgtcggtgagatgattcagggaaaaaagagtaagtaaaaggaacaaaaaaataaaaggatcattagaagccagatttatccattatccatattcaccattcggtgggagctaaaggacaacacacatgagagaaacaataagacacaaacgtcctcaaaaagctgctgccgggggtaattaggcatctgtggcaggtgaatcaaatgagggtagaagccagccattcgactgagcatgctccacatagaagccaaatttctcctttgcgt

SEQ ID NO: 73225 - DNA, 543 bp, Glycine max
  Clone ID: jC-gmfl02220069d01d1
agaaagctcaaaatgatcttttatttaatattggaggtcgaaaggcctataagaaacagccacgtgagaataaaccgaaaagtcaccacaggttggggagcacatacaataaacattgaacaatcagaaatataaaaagctcataatgtgggacaggaacgactaatacaaaaggagcaatacgtaagcaaatccaagagagaaagtggtaactaaaagcacatccaaacccccaccgtggcttgctgagtcatgcgagtttggcagcagagaacatcctaagcatgcttagcaaactgatggtgaatgttggccttgtcagaattggaaagctgcacctttcgttgctgtgaggacaatatgtaaggatacataacagagtcctctttgtgagagtgatcaagtccaagtagatgccctatctggtgcatcgccgcagtctccaagtccaaaactccatcatctttagacagtgtggcgttttcacttggaagtaaccagcccatgttaccgttcagaagtaccacccctttcttactagaa

SEQ ID NO: 73226 - DNA, 423 bp, Glycine max
  Clone ID: jC-gmfl02220069d02d1
ggagaagacttttttacatattataaagcaaaagataaaaatgtagagaatcaaccacatgggtagtgttgcagttgtttacagggttcaaaattaatgaacaccttaaggacccacattagacccttgaatgtctaacaatcagaaccacaacgagaaaaaaaaattatatatagcacaaaatgtaacatggaaataaagcaaactatacattgcttacataaacatggttcatgccagccacacctaaacctccgaattttgttatatgctttactacttgccgcatcacaaaattctctcaaccgcggaggagagaagcagaaggtctaggataagcagaagcctttctaggggcatctgaaccaccatcgccaccattggtacggccggggccggaattgcgtacatgatgctgtttat

SEQ ID NO: 73227 - DNA, 416 bp, Glycine max
  Clone ID: jC-gmfl02220069d03d1
gaggttcaaacaaacaaaattgaccgttacaacttacagggtaccactcaattcgccattttctcaagtaaaagagccaagtacaagaagttcacaccatcaaaaaccctgcttttacacagaacaaaccggcaagcagaatactctctccctatagaaactgctctatcaagtgtgtagcacggaacacactgccctatacatcattatttataagaatatgcatagtaatgtaaaacttctaatcccgggattgtccatcgacactcttgtttcttcatctcgcttcctctgtggcagcgacaatgaagacatgactttggctgaggccacctttctcgctagtggtttccacttaagataactcttccttttctcttgctgcattctcaattgaaattgcctgcataagggaa

SEQ ID NO: 73228 - DNA, 407 bp, Glycine max
  Clone ID: jC-gmfl02220069d04d1
gaaataatatacattaattctcataatatacaattaaataatttaaatcctcataataataatagtcaaatagtaattaattaaaattcacgatttattaaaaaataattcaccaagacagtaacattttagaggggaggaggaattaatctccattattctcctctacaccaaaactttcattttactaaaaataaaaatcacacaatactgcacttacaattccatcatcgacgatcattcacgggcggttaaaccaacacgtaaaagaaatgatccgtcaccaattaatctctatatatttatcaatttatggttccgatgacgttgctaaatgcagaaggagtttgttgcactggtggcattttttgaggacccgcagctttttccatgtcagcgataatatt

SEQ ID NO: 73229 - DNA, 481 bp, Glycine max
  Clone ID: jC-gmfl02220069d06d1
aagggaaagtacgaaattagataatctatactgagtaacataatttcaatcccatactacatgaaataagatcaggtggtttttagacaagtcctgaacggaaccaaacgaaaactccatctagaactgcatacatataccacactaatatattatccactataagcctaagatgttaagccatataggaccaacaaatttcaagttgaaggagaggtagaccttggagtatttgacctcgatactgatcttgaacttgcattcacactcgagcttcttgagtagcgtttctcacatttgccactcctcttagagcttcttgaatggctcctccttgacctgggggacacatttcgtgagttgcttctctttgaaacaggtgtagcactccgtgagtagctccttcttgaccttctccttggcctgggtgaggcactccgagaaacagacctgaacggtgcctttcatattaggatcatca

SEQ ID NO: 73230 - DNA, 526 bp, Glycine max
  Clone ID: jC-gmfl02220069d10d1
atataaaattaatcgcgtttgattggagtagcttgaactcgaagaggctgaaccttctttaatgttatcgcatattgctcctccatgttcatgtgttctggaattaacccatcagctagcttccattcaaagttgtgtacaagggatgctactattaaatgcattgtcctgtgagctaatggcaatcctgggcatatccttttaccagctccaaagggtatgagcttaaaatcgtgacctttaaaatcaatctcacatttcaaaaatctttcgggcataaaaattgttggattctcccaaatggttggatctcgtcccatggcccacacatcttggcaaaatgtgtgcatttttaggcacattgaagccagatatgtttaccatttcatcacacttatggggtactaaaagtggacctgtgggatgcaagcgaagagcttcctttaccactgctttgaagaatggcaactttaatgatttgtgattcttcaaaggttacaatcttttcaattggtttagataactt

SEQ ID NO: 73231 - DNA, 373 bp, Glycine max
  unsure (1)..(373): unsure at all n locations
  Clone ID: jC-gmfl02220069d11d1
atccaaattatctattattatttattacttattaccacacataaactaacattacaataaaatacaaaaaaaatgactgtccgaggcaaacttgcaaatctctctcttagacacaacttgcaaatttctctcttctctcacacgcacacaaacccacattctatcgtcactttttttttaattttttacactttacattcatctcacacgagtgtcttgcaggtggaggtgagtgggtcccacatcgccggcagaaggaacttccggccgcgcatccccaccgcgttgtagctcacccccgtcgcgttctccgccagaacgtccccggcgtagcctggatacgnccccttcccgaaaatcccggtgcacgccg

SEQ ID NO: 73232 - DNA, 303 bp, Glycine max
  Clone ID: jC-gmfl02220069d12d1
aaaaacagaatatgataacaacttggattcaagaactggaacaagaataagcatccccacaatcttgagaaacttagtcgacatgcactgattgcaaaacatggggcaataatcaaactgttcagagatgctatatcttattctgcaaacaaaaacgctatgctactttctagatactactaccaacatcagggttcaacaaaattattcccaataagcaagcatgatactaaacagtcacaaaggaaagtttaaaccatcccacctgacggacaagaagcccccggctacattaatcatcac

SEQ ID NO: 73233 - DNA, 356 bp, Glycine max
  Clone ID: jC-gmfl02220069e01d1
cccccacaaaaggggtttaatatttgggccataaaaagaatcccggccttccaggatgccaaaagcttttagggaacaagacccttttttttaaggggggttttaacagggggccctccaaactaaaataaagctcccgaaatgttaacttaggaacccttttgggcccaatttttatacttggcaccctttaaacccagtaccctgggggaactttgctgaaacgggaatcccttggagctttgaaaacaagaactcccggggtagcttttctagaaagggtcttatcaaaacccaacgaaatacccatgaaataaagaggggtctatgtacccccgaacaaaaatgcctaaact

SEQ ID NO: 73234 - DNA, 467 bp, Glycine max
  Clone ID: jC-gmfl02220069e02d1
gaacacacagaagaatatcagctacatgtatttcccaattcccagcactcacaagagaagtttcatacaaacaaactaaaaaatcctccgcaccgcactgttacctatcctcaatatgtcaacagcgggaatgaaaagatagattatacattaatgtcttttaaaaatggaaggatcacgtcctatcctataatacaatgccttattccaacatgctagcccattgcatacttctgagtccagctcctagcagttgtttcatacttggacctgtctgtcttgtacatatgagcaatttcaggcaccaaggggtcatctgggtttggatcggtcaatagggagcaaatggagagcaacaccttagatattgtcaatgctgggctccactgttcctttaagatatcaagacaaatactaccattgctgttgatatttgggtggaaaaacttagtcctaaatgcaacctt

SEQ ID NO: 73235 - DNA, 484 bp, Glycine max
  unsure (1)..(484): unsure at all n locations
  Clone ID: jC-gmfl02220069e05d1
aacccaagcaattcaaatttcctttgacttcattcacaggcaaccttcgactcaggttcttgttcctgtttttcttcttgatgttgttgttcttcttcttgatgttgttgttcatcctcactactattactatacgacgtggttgcaccaccaagcaacaatggcttcaacctctcctcccacacacccctcaccgcggcgtcgcctcccctcttccttacctccaccaccgcgagctccgccgtgagccggtaaacctccaccccaatcccaaacctcccattaaatccttccaactccaccccacactccttctttcacctcacgnccatcctcggcgnncgccccgccttcttcgccgncttcaaaaccctctccggcggctcccgcgtnaccaacctctccccccactcccccccaaacatcccggacanatccaaccccgaagaaaaagatatcaaatcaaaagcgttcaaattcacca

SEQ ID NO: 73236 - DNA, 396 bp, Glycine max
  Clone ID: jC-gmfl02220069e07d1
aaaccaaaaggaggacctttaatttggtttttttcaacaaacttttttttaaaaccgggggcgggggtcctttttttttccccccttacaatgggccaaggggaggccaccggcggggggggggggaaaatatccccccccccttttttttttggggcccaaacttttttttttttaaccccccccttggggggtcccttttttttttaggggccgggggccccccccttgggaaaaagggggcccccctttttttggaaggcccggggcccaaaaagaggggtttttttttcccccccccaaagggttgggttaattttaaatgtgggggggccccagaacaaaaccaaattttttcccccccaacaaaaaaccaaacctttttgggtttggggg

SEQ ID NO: 73237 - DNA, 434 bp, Glycine max
  Clone ID: jC-gmfl02220069e10d1
agcaaaggggggacatattttcattacatgttaatcaggttgtctacaaggatgcatgggacactagccaaataaaaataccaatatctaaagttctaaactaaactttggaaaatagttgctatgtattaatgctttgaagcacaacgtgattcatgtttaggcaataatgtcttacaaagcaattacttttcaacatgcattgttgtggttggggggcaatcaccattgcgtcctttcttagtttcataatgggtcaaccgtcctttatcttgttctagccgaaaagtatgaccaaaattgcaatttttcctttccaagcgggaatcaataacacaaaccataacaatggtcatagaattcaaattaaactaaaatccccaattttttacacaattacactttttgatccttcactttacttcctaaccccg

SEQ ID NO: 73238 - DNA, 436 bp, Glycine max
  Clone ID: jC-gmfl02220069e11d1
ggagaaaaaacctttttttgaaatagtaaagcaactagacatgtgatgtacatgacaagtaatattataaattcacttgtacacgggttattggaaaaacaaacaaacaaatccaaattaagttttcaaaccataaacttaaccatttatgataggctcttgccacctaccatcactattttttttatatcagctataacatgcttagttgagatacaaatttaataacgcaaaatatactttaatactatatgcttcaaattatgtaatactgacacgtgtcacaaggacaattggtcaacgcactccagtctgaaagaagaaatgaatgattttggaatttacatgtttttattacatcttgggtgcttcctttgagtgaacagaacgagtattcagtagaggctgtagagctttcactataatgctcatattt

SEQ ID NO: 73239 - DNA, 477 bp, Glycine max
  Clone ID: jC-gmfl02220069f02d1
gacaaatcttgatatataaaattactggatatacaagtttaaatgatggcatatttcgttccaatacaaacattgatccagtaacttggaggatacaaaacaatgcgctgaattttcaagtatcgacacatgtcatttgttccctatagcttattgcacatagttgacggtgagcctttcttttttattctcctgagtcctgaccacataaagaataccaatcttgaattgatgctcctgtattctaccatgactcattttcaattcctgtttttgttacacaacacttgctttagccattcttttctggccccgagtagctagtagctcagaatcctgtacaatagcctgtgcacaaagcttcccagaaagaacagcgccttccattgaagctaaatatttttgttttgtgtaatctccagctaaatagaaaccttctaaaggagatctttgtaagggacgacaaggttcacaatt

SEQ ID NO: 73240 - DNA, 330 bp, Glycine max
  Clone ID: jC-gmfl02220069f03d1
aaaattgaactacaagtgttccttatgcttctatggataaaaataaattacaaaatctcccctttattcagtatcagaatctgggtctccatccacaatatcaggaaaatcatcttcatccgccagtgccttatcatgttccaattgaaaagcaaattcctcaaaaatattagagcctgaggttctatgccataaactactactcggagaagagaatttgaagtctttattaaccgagcttccatgtcttgattccatatgactggcttcattatgaggaatggagttgtctgaaacaatcttctcagacactttatcatcagctacatc

SEQ ID NO: 73241 - DNA, 342 bp, Glycine max
  Clone ID: jC-gmfl02220069f05d1
aaaaaaatcttttttttttttttttttttttccccccccctaaaaaaaaaaagggggccccccaaaaaaaaggcaaaagccccaaaggggcccccaaaaaccaacccctggaaaaaaaaaaggcccccaaaaaattaaaccacagggggaaaaccccccccctacaaaaaaaaaggggggcccaaaaaaccccccccaaaaaaaggggggggggaaaaggaacacacggtttcggggcccaaaaaaaaaaaaatgcccaaaacctccaacggggggggggcacattcaaaaaaaaggaaacatgccccaaaacggcaccccattaaaaccgccccccccccg

SEQ ID NO: 73242 - DNA, 499 bp, Glycine max
  Clone ID: jC-gmfl02220069f08d1
gaataaaaacacacatcatattactatgtgttgtcatacatgcattgtaatgagtggatattccaaagcaattggtccctttatccctccttaatccttatgccgtaaatggcaccatcccttgtaaattgtaattgcttcttcagaaatagaattatacaaaggtagttgcaatatctatttgccaaactataaatgtaaagacccttcttcccaatcctagtagtgtcccaattgtatttacaaaggtgggacaagatatgtatatacaagtacaaccatgtaacataatgtaacaataatcatactttggtctttactagtgcacattacagggagttattatgcactgaaacccctttgcagagaactccagggattggaaggaatactgacacaagcttgtgctgaagcctcagccatttgttcattctttatccctacattgcagatgtttgcaaaggacctcatgtgtttcatcccgtattgagacaaggat

SEQ ID NO: 73243 - DNA, 401 bp, Glycine max
  Clone ID: jC-gmfl02220069f09d1
aaaagtatccatttccatagagatgagtcctatacgcttaattcacaatatacaatacaaaacagtaacaagagaatgatatcaaactcaacatgacaaaatggctttcgttactttgctacctggggaacatataaaagtaaaagaactatataaattaatccagctgaggaacccaaattttcagatctgggccaagacaaatggaaaaactgagtcaaaaatatctccctcatttgctattatgctgctgtagcagtggtgggggctcttaactcgattttctatcctttctttccgcaatacccaaacttaacaacatacttttgaaccctttattttctccacaaagaaaaatcgatcagaaccctaaagaattatgttttaggtcttccttattc

SEQ ID NO: 73244 - DNA, 423 bp, Glycine max
  Clone ID: jC-gmfl02220069f10d1
gtgaatgccaattatttgaaatcactatacaaacattattcatttccaatgtacatttggtaccccccggtgacgttaaaggctaacaggttaatcctgattgctgagtacaattgagtaccaagctatatatggcttaaatgatataaggtctaacatgttggtacctctcatgctaatttgctccttattttggtagcaaatacgagaggagaatttcgttccacatatcaggaacaccgggtaagcaccaatggctacaatcaggaacagatggctggtcactccaagtgcccacgtgtccatcacttatatatgcagtcattggtgtaacatgcattactgttactggagcactcatgcttttgacaactctattgatcatatttgaaattgggtttctctttttgcgattagttctct

SEQ ID NO: 73245 - DNA, 482 bp, Glycine max
  Clone ID: jC-gmfl02220069g02d1
cttaaatgatcatatgtttttttaaaagaaaaattgtaatcttgaccaatgacaattcatgttctacagtacagcccagattcctcctctcaatacttttttagcaaacattgaaccttggaacaggctacaagcttgtggacttgtggtcattaacgtctataggtgtgttgagtcaatactttcattatttacaaattccatagcggagaagtgggcggtggctgcatgtctgaaactcgttttggtcaccaaattatgtacgtgtgaattaatcaacaattaacctttgaaatgatgaaccacaatgtataatggaacctacactcgagggattagttgctgttgttagtttatgattggacttgccatttaaaaaattgggatcggtttacgaagtaacttaaccagaacggcaaaacatgatccggaaaatttccaaagatcattattggcgcttcctttgatacagcgaataacca

SEQ ID NO: 73246 - DNA, 407 bp, Glycine max
  Clone ID: jC-gmfl02220069g03d1
cgacactcaaactttcaaatactttatttgatatacttaccaacgagttaacagataaaatgccacaagaccttgaagtatcaaaaaaattgcccacctacgaacaatagatctcaatttcatttggaaaggatccataggatttgccccttaggacattcattcccagttctatattgatattagaaattttgcttcaacgccatgaaattattggaaaaaagagtctccctttcctttctcacctttttggtatgcataatcccctataatgacaaaaaaatttaacttattctatgagaacatagtatgcctaatcagttgtccaaggatcgctctctgcaatgacttcagaaggttcataaacttctggctctgaactttcttcacttgtgcttgaatcagca

SEQ ID NO: 73247 - DNA, 526 bp, Glycine max
  unsure (1)..(526): unsure at all n locations
  Clone ID: jC-gmfl02220069g04d1
gagaagtggccttcattaaaaatgtaatatgtagatacagaaccaacaaggagataagtggggaaacaagaggaaatatgtttcatggggaagtttgtgaggaagagaatgatatagaagttacagagaagagaggaggaaaaaagctttatgaacattgtggataaaattcagatatctgcttgctcagaagtaggtttcatagcagacacacactaagaggcatataactagaaatgactttcaaattttttcatccattgagatatcccactttttcgatcaaagcctggatatcagcaccgctactcccctcagttgcctcgacgatgttggggctgtccaatggcgtgacatctgaaagagggtagcttctgttattatggagttgactgattgcactgcttcccactcccttcagtatgacacttttgtgtaggccaccaagaagtccttcgtaatctgtgtcaccgcattctccaacgaacaccaccatctttgacagttcanaaccccatcgaacata

SEQ ID NO: 73248 - DNA, 275 bp, Glycine max
  Clone ID: jC-gmfl02220069g06d1
attacaaggacaaacattttcctgaagcccaacagtaatggttattttaagccccaattttcagaaaccttgggaaatatggctcaaaaattcaaaaatctccaaccaccttaattccctgacgtatttataaaccttgctaaaacgctgaagggggaagaaaaaagctaaccccgaacaattataaatcaaatttgccccattgtctcagctctgggggaaggtctcgccgacttcgggcccacatgtggtctattattagaggccccctttgg

SEQ ID NO: 73249 - DNA, 379 bp, Glycine max
  Clone ID: jC-gmfl02220069g07d1
ggggtacaacccaaggggccctttgcatatataccatatatgctccgaataccaagggcaagtacctggaacaatatgggagagcagtgcttatacaatggtacagataggaaagtaaattaatacagtcaaatagaaaccggaccaattacaatttagggttgacaaaagtatgcccggaggcagaagcaaaaaacccttcgggacaggccattattttacagattggttttacaagggatgttaaaagaaaaattgttttaaaagatactggagaggggagactgggccttttatgaaacgggtgtgttacaaattaaaccatggcgttaaatttcaagggtcagtttaatgcgacaccaagttatttttttacctt

SEQ ID NO: 73250 - DNA, 405 bp, Glycine max
  Clone ID: jC-gmfl02220069g08d1
cccatcgtattccgtagttctttgcttctcaagagttactttacacgctgcagtgtcctaaattatgcaaaagaatctcaagttatgatttagacttgtgggggttggaaatactttcttccttatccaataaccattattttggcactagaatatacatgaattatatagtctcacttttgaaggcaaccaagggagcttcttgctacaacctcactatttccttcataagagcaacaaaaaagattgactacagaattagtgcccatttgttgttttcacagccaaattgttatctgtcctattttgatgggctgtctgcctgtgattaatatctttcctgagacattgccatagtgcatcataatgaagaagaccaacaattctcctcttaatttctctact

SEQ ID NO: 73251 - DNA, 427 bp, Glycine max
  Clone ID: jC-gmfl02220069g09d1
atatataccccgatatttatattatgtataattgctacaccaacatgcatttggatccatggacacggaccaccacaataattaagaaaaaataatagtaataattgaagaaaaaacaagaaaaatgatccaaggtaggtatttgaattatttgtttttctttgtttcttgtaaaaacaaaaacaagggcatgtggtgtgaggataattaaggcttgggtacgtacgtaggtgattattcattgtcaaggtgatattccttttttagcctttgctggaggccgtaataaccgaggtaccacttgacgaacttcctgagaccggtggcgagatcggtggtgggattgtaagagaaatccctgtaggccaagctgacattggcgtgtgtgaagggaacgtcgccgtttgatggcatcttaatgacgtgc

SEQ ID NO: 73252 - DNA, 352 bp, Glycine max
  Clone ID: jC-gmfl02220069g10d1
ataaaaatagcagatatattgcaaatacaaaaatgcgtatgaacaaatttactatacatttcttgtcattcacttaacatggcattaaccaatctacagaaatttcactgccgaagttgatgctaacaaacagcttctatcacccttcaaattgtctcaatctagcatgagaaatccaataactaagctttctcataaacagtttggtgtaactcccattcattcaaccagagactaccaactcaaccatttcttgtatcctggagtcaaagattcctattgatggatgaaatatctcggccaacttgtaacgaaattggttgtctcttatgcgagacagaaggaggggtac

SEQ ID NO: 73253 - DNA, 420 bp, Glycine max
  Clone ID: jC-gmfl02220069g11d1
aaacaataattttggcatcataaattcttccggaataattatacaaaagtgaccagggaaaacccgatctgccagttgcccactgaataaaaacacacatcatattactatgtgttgtcatacatgcattgtaatgagtggatattccaaagcaattggtccctttatccctccttaatccttatgccgtaaatggcaccatcccttgtaaattgtaattgcttcttcagaaatagaattatacaaaggtagttgcaatatctatttgccaaactataaatgtaaagacccttcttcccaatcctagtagtgtcccaattgtatttacaaaggtgggacaagatatgtatatacaagtacaaccatgtaacataatggaacaataatcatactttggtctttactagggcacattacagg

SEQ ID NO: 73254 - DNA, 330 bp, Glycine max
  Clone ID: jC-gmfl02220069h02d1
cattcactaagactagtctctgagagactttattttgtcattttgttgcctactttcagtccttttaggaactagtattgattaataaaaataaataaggaatgaacaaaattcaatttactttttaaatacatgacttttcccaccaccatttggggatactgtataaatattatagccatacagctgcagctttcagggaaagaaaatctgaaattttgttggtataaaagcccggctgtatggagttgttagggctttgaagcatggccagtgtggtgacccctgaaagcacaagaagagttttgcaaccaccattttgtccaaaca

SEQ ID NO: 73255 - DNA, 239 bp, Glycine max
  Clone ID: jC-gmfl02220069h03d1
agacaacttcaaacatagatagcacttaaggtagatttacacatagcagatatatataaccagctattattgaagatttttaagcaacactgaaagaacttgctgcactctccacaaatcttcttgctcccttgaaccacctcttgtctccagcttgagccttgcaaatgaacagttttccatcttttacagttgctctaattatgtggtgcttgccacctttatctccatcagcagtc

SEQ ID NO: 73256 - DNA, 483 bp, Glycine max
  Clone ID: jC-gmfl02220069h04d1
gaactggggtaaaataattttttccatgaattctaaaagttggtagggacccatagcaatttttgtacgtgaaacctcgattccgttgccgcttgactgcatagacaaagagccaatttttataagcagcaactgaattcagcatggcttaaatgacgaattctttaaatgcatttgcatttaatttacaatacattcatcagcaatcacaaacaactatttaattggcatatatacattagatgcttgggaaacctatactactcataaactcaacaattgtaatgccaaatcaattgagaaagagaactatcaagccagaaccatcacaatattgcaggagaaaaaaacaatgttcgtgaaggtcatttttgctatatttaagacaatgacgttacagctagacgggactagcacagcatcagaaatgaacgtacatgacctgatgttagatatatttttaagccatgctgtacttgatcc

SEQ ID NO: 73257 - DNA, 393 bp, Glycine max
  Clone ID: jC-gmfl02220069h05d1
atggtcaatgggtccaaaatcttgggaaagaaggcaaaaaaaaaaaaaatactgaaaacatttaataaccgtcctgtcttcccgagcaaccggaaaggaagaagggtgagggacaaggggagccccgatcaatgataattaaaaattgacccaatagcaagatttgggggagggggccgcccccttcggacacggcgaggggtattataaaagcctacggctgaagatccccctgcgtgcccccaaccaaattggccaatatagttttccccccacacagcagtggggggccccccattcccatttggagtgtggcacccccggacatggaaacccgcttgggaatgaagaaaaacccagcccccaaaaacacattattttggggggagaacc

SEQ ID NO: 73258 - DNA, 421 bp, Glycine max
  Clone ID: jC-gmfl02220069h07d1
gactaagaccaaaatggcatcataaaaatataattgactagttcaaaactattgtctcaaaacaattaacattaatcaaaaccagaaacgataaataccaaacaagtcactgttctaagacaaacaaaacgaaagtagagaccaacaatatcccacccagaatttacttgatcttcttcttaggcctcaactggttactatgaccgcacttcttcttacggcagttcacagccctagggtgcagacgagcatagcatttgcggcaaatcatcttgtcctggttgtatttgcgagccaaagccatgagggaaggctcgatgatgccaccacgaagcctgaggacaaggtgaagggttgattccttctggatgttgtaatcggccaagggccttccattttcaagttgctttccggcgaaaat

SEQ ID NO: 73259 - DNA, 504 bp, Glycine max
  Clone ID: jC-gmfl02220069h08d1
gacacttattctaaaaggtagtattaatctagtacatcattcagcatagactaacacaaaccacgcaaagcttacattaataaaattggtatattataacagccaatatcaccactccaagaaacgtggagaaaaaaggtcataaagcttgatggtcaaacacatgacctccccccttagcaaatcctacaatatctatacatctgaatcacaccatgaacaccaatggcattactcagcaacatcaacaaaagccttatccaacttggtgaccaatggcattactcagggaaaaaaaaaatggatgcaagttatctaaagaatgcctaaagcatcagcagacactgccaaatgggccaaccacaggataagtcaccttggcaggaacaggaagaaacatgcatatacattatacaaaagcatattaatcttgagaagttcttactaactaaactcatccccctccaaactgagatgaaacagtagttagacaaagtaaattca

SEQ ID NO: 73260 - DNA, 450 bp, Glycine max
  Clone ID: jC-gmfl02220069h09d1
gataaaatagtttattaacttcgtgatcggaatacacacataacaagtacacgagagtactttggagatgtttaggcagtgctacttcatggcattattatcagcattgcacattacagaggctggatgctttatttatattggcagatattatttccagcagattatttaattactcatggcaccaaattgggaaatcaaccatcaactttcatgtctgtctctggaagccaggggaatggcagcgttggtttagttgcttccagaagaacctcaatgggaatctttggtgcagatggcttcaatggtgctatggcgtgagtatacttttgcgggtctgcacagggatcctgagctgcatgcatctatagcacagatttttagaatatattaaaattggatttttgcagtagatcatctgatagacgaaggtatgttactccgaacatg

SEQ ID NO: 73261 - DNA, 296 bp, Glycine max
  Clone ID: jC-gmfl02220069h10d1
ataaaagctgcttatttgtcgcctattccaaactgcgggcgaacaaattcactatacatctcttgctattgacctagcacggtacaaaccaatttacataaattttactgccctgagccaaggtggcaaccatctgctgtcacccctgatataccaacaatctaacctgataaacacaattaccaatcttattgaacaaccgttgggtgtctgtccccttggttccaccacccactacaagtgcgccatggtatgtgatcctggaacttaaattccaattggtggcacccacattc

SEQ ID NO: 73262 - DNA, 411 bp, Glycine max
  Clone ID: jC-gmfl02220069h11d1
aaaagttaaaactactttagaccgcaaaattcaaaatccagaagtggctagttttttggttcaccaaaagcctcgtacaaaatcttaacaaatgaaaacaagtggctactcgccacaatgataaggcaaatgtaacaaaaaaaaaaaaaaccagtaatatatgatatgtgaaaaacaggtaaccgatcctaataaatgcttttaattgaagtttgcatccaatgtagatatgaagaggtatatcgagacctcttttgcaccatccaaaaaattttgccataaacagcagaagaattccttgtaatgggggtgatcatttcacagtcaagatcttgatgatagatgcagtgcccacacgatgcagtgccaccactgaatccccgttgtggcagagacccttggacttggcat

SEQ ID NO: 73263 - DNA, 523 bp, Glycine max
  Clone ID: jC-gmfl02220069h12d1
aagcccaagtaaacagagaatcatggaactgtccagatcctcatccttatcacaatggacatatagtattaagtggacaagtcaagaagttgagttcatgaaataagcaatatacaatatagcaatactgtaataaaaggaccagtcctttcaaattaatactgtgccacaaacttctcacttgttcctacatctgcatctcttaaaagctagggtttccaccaccaatcttagatacttggcttcaagttcaggtgagatgctatcttttgtccaagagaacgatcagcctgagaccagtatgatatccagatgctacggatttcatgggtgacacgtgggtcagacaaagcatcaacccatcggcggacaaacctttcttgcctgtcagaaggccaagatcggtatctctccccaggttgcttgaagttgttctccttctcaatcatgcacttttcacgcttcccacctaggatacgaggaggaacggggaccttttccgcatgacggacaggatcatacc

SEQ ID NO: 73264 - DNA, 484 bp, Glycine max
  Clone ID: jC-gmfl02220070a01d1
agccaaacagaaagcgaattcttttttaaaacaaaagaaaggaagcaagaaacagaaagcagctgagcttcatccacaaactacaagctgattcgcgaaagcatagataaatatttattattgagaagggtagaaaaggcaacaaaatgtttgttgtctgaaatgtgttttaccgtttaagcgaccaaataaaatagtccaggtggacttcaatgagcctccacaaacgtgccatggaagccatagggcactcttgaaggcagcatgacagtggcctccaacttcaaatcaagtgcattcagaatctgcaactcggactgccacgtcatctcgtcatgcacaaaagccatcacgtacccttcatcctcattcccattccctccacgtgttggcaagaagaatggctctccaccgaaccttctctctccgtactcgtgcctcttcacttccccactctccaggtccaccttcgccacccccgaca

SEQ ID NO: 73265 - DNA, 523 bp, Glycine max
  Clone ID: jC-gmfl02220070a04d1
aaactaactaatcttatattatgtagaaggttttagtattacacttgtatacatgaccaatgcacataacacgtatgctattgggctactctagtttagagaaaatttgacacaagcagcagaaaccagtaggcagaatgcaatagagaaatattacatcatcaaccgggctttaaagcttttgtgtacaaaacccaaaatcaagcactgtagcctctgtttgatggatgcaatagcccagcattgtagccttcacaggctgccaaacaagcctcttccatggaggcctcagaaacgccactgttgcaaatgttggcgaatgctcgcatgtgtttcatgccatactgagtcagtgtcccacagtgagtttcaaacacccgaaccattgattttaggcatgtccagtcatcaacaagggacgaaccaggagccctcacggattgtagaacagaagaaccttttcctggtccatacagtaaaactccaatcaattccacgctaccatctatgtgttttctatgct

SEQ ID NO: 73266 - DNA, 506 bp, Glycine max
  Clone ID: jC-gmfl02220070a05d1
attctgcaaagatctggaactctatttaacatactagtagcaacaaccttaacaagatcattacctgcaatgaaactacaagtattctgcaaataaattaaacacaagcttggacatagagaaactaacgaatacaatccaagagtagaaactcagggccttgcccaacaaaatagactcatacttcagtctaagcaccactatagattaacaaaatctcactattctcttaacaatcacagataccaagtgtcaaaatcaacttctgcttctgcgtcgttccctaaggccatttccattagcatatgggacctcctcacgcccacgataaggaggtgacctgctgtagctacgtccacgaggtgacaaactacggcgcctaggggaccgcccacgaggactgtaactccttcgcccataacttgggctcctacggaatctgggtggactacggctacggcgtctttctgaaccaccacgcatgcgacatttacgagcaaaatgac

SEQ ID NO: 73267 - DNA, 549 bp, Glycine max
  Clone ID: jC-gmfl02220070a08d1
ccttcaaagtcctgtactccaatttgacatccctgttgttagggtcaatgtcaagagctttcttaatgtcaagttcagccaaatccaagttagtcaactgcatatgtgcttgggcccttctatagagggctttcacatttgtactctcaaggtccaacaccttagtacacaatttctctgcttctttgtagtcttttaacttcaacttgcaagcagcattgttcagattgcaggcaaccttcaaggtcttggcctgctttttctcctcctcaccaaaggaggaatcatattctatgtacttcacggccttttcatatcttttggaagctcttgcatatttactagctttaaacaagacatttccctcttctttcttcttaccagcagcttcaagtttctcttcagtgttcagatcccaggactccttctctttctcaaatgacactagctcaacttcaaaatacacggctgagttaggaggaactacagccaactcctgttgggactctgatgtaccgaaagcataatcaggtgcaatggtaacaacgc

SEQ ID NO: 73268 - DNA, 480 bp, Glycine max
  Clone ID: jC-gmfl02220070b01d1
atcctatctttttgcgatttttttttttaatcatatgagtggtggcatgatacagaaagttttttgtgcttattcccaaactataatgctgtttctgaaagcattgataaatattttattattgagaagggaaaaaaagaaacaaaatgtttggtgtctgaaaagagaaaaaccggggaaacaaccaaggggggggggcccgcggacttgaaggggggaaaaaaaaccaaccccgcccgccatagggcacccctgaaggccccccgacgggggcctccaacttcaaaacaagcgcccccagaaacagaaaaaaggactgccacgacaaccccccctgcggggaggggggggcgccccccaaaaactgattcccccccccctctgtagaaggggggagaaaggcccctccccgaagcggcgctttcgggcggggggcgggggaaaaaaaaaaatacaggggcaataaggcccccccccccc

SEQ ID NO: 73269 - DNA, 516 bp, Glycine max
  Clone ID: jC-gmfl02220070b02d1
aatgttcttgaccaatcatatgttgtccttagcttatacagaaacagaggtagtcattgcacaaacaatgagatttgctacatcacaagcccaaaaatatccttcatgaatcatcacaaattcacaataatgcgcaagctttattgcaccacaaacaatgcgcactttaatacaaaggcatagtagacccagaaatagcttttgacttatcctcttctggtcgaacatagcccacgccctacatacactataatcatttgccctcttccccaaaaccaaacaaaaaaaatgttaatttcaattgatccatgtggtatggtatggggacacaataatttacccctagtcttaagttattgatgtgcattttatttcacgtgtttatatgaaagacatgaaataattgaagaggcgtaccccatgggataaactgaaataactcagttgtagtatatatagtatgatgtatttgaacagtggagaatgtaaattatatataggggtatgatatgcctg

SEQ ID NO: 73270 - DNA, 345 bp, Glycine max
  Clone ID: jC-gmfl02220070b04d1
cgaacccaaagtttaatacatttagggctctgggtttcaccaagcaacttcaaataaatgttttcaccacacttcacataaagctccaaaagtaccggaacaaggcaagttccacggaaagtacaacgatccacagagcacgagaagaaaaacaacacagaaagttacataatagtgcaaacttctaatcataatcctttccttaatcaccatcttcagttgcctttgcaccaacttccttataatccttctccagggcagcaagatcttcacgggcctcatagaactccctctctttcatacccttaccaacataccaatgatcaaacgccctcttggcataca

SEQ ID NO: 73271 - DNA, 520 bp, Glycine max
  Clone ID: jC-gmfl02220070b08d1
aaatgtaagaatggaaatatatattttcacaactatactgacatgttgttacattatttacaaactcattatcaaaatagtgctactaagaatccaaaaaatgcgtagtaataacgcttctctggtgtgtgctaaagaaaatactaatattagtaatataacactgaatagcctataagatatgctcaaaatatggccaaaagcacaaaaagggccatcataaacgcagaagtaggttttatcttaaatgagagattaggtgacagcacaggattattagactggcttgatcttgcttcaggattcacagctatggcaggagaaatagcaggtgtatttgatcggttaataggtaaagtagagagttcatcatcataacagttagattccctccaaccaagattcatgttctcacggtcaaagactatacggtaaccagtcatgaaattttgtgctatgatattcacgttgttgcttttcaggactcccaaacaaagtatgttaataccctcaccactga

SEQ ID NO: 73272 - DNA, 382 bp, Glycine max
  Clone ID: jC-gmfl02220070c01d1
aaacaattaataacaaataaatcccaaaagcctagttgatggttgcaatgattcataaaagtttcaatcgggataggttatcataaaatttgccggttgccaagggggggggatcaacaaagacaaattcttccaaccaagcttgggggaaccattttttttgaccagggtttcccctttccaagggaacattcccagaaacaagttcgtttgtgcagccggtttgcccttgagcgaaacgggcccaaacccggcccgtttaaattattccccccaccttttcaactaaacctcgcgggtccttttgggcccgcccacggcccagatgttcctgatcttgcagcccaacagatgctgctcccccgggtgccttttcaggttg

SEQ ID NO: 73273 - DNA, 514 bp, Glycine max
  Clone ID: jC-gmfl02220070c02d1
aacgcagaaaagataatgaatcttttatatgtgtagcattacactttcattaaattcttcaattagcctaaaaagaaaaaggaaataacagcccgagccatagattgacgaaacaaatcacgaatgtactattggacagattcgaggcaaaagtgactcgatcagtaaaaaatcaaattactaaaaaaaatccatcagaaaatctcgctacttaaggtaagcgtctcaaaatgatgtcaatttaattcaacttggctaatcacctcttagcaaaggtcctcactttacatggacattggtccagcgacaaaacttccatgataacggtcccaatatatgtcagtacatgcatgtctgaatgtcgctgttgctgcttgccccccatccaaaacgcattccatatctaagcttggaatttccccctttatggggcaaagttggcgttccaagctgaacctgagtcatgtgtctctgaacaatggccagtccatccgatctggggcgttatatcttt

SEQ ID NO: 73274 - DNA, 409 bp, Glycine max
  Clone ID: jC-gmfl02220070c03d1
ctatgaacaaactgagcaatgaagatgagaccggtcaatctttcactaataactgcaagagtaaattaaaactctcgcaaaacattgatatcgttacaaccactgatccaagtgacccttagtttagaatacagttacacgcacaagtgctcatcacaagaccataggtcaaaacataaatggcgtgaacaatgagtcaaagcaatggcagaacaataatattaacgccaccaccacttgtaacagtgcactcatttcctctgtagtggcagaaaaattagacatagcccctgctcttcaaactctccactgcatccttgatgatttgctcaacaggagtgaattctagacctaattcaaccaggttctttgatgcatcctttccacttgctcttaacaaccctgggtg

SEQ ID NO: 73275 - DNA, 195 bp, Glycine max
  Clone ID: jC-gmfl02220070c07d1
gggaaaaaaccaggcccatttaggggggggggggaaccccaaaacctcccccaattttggaaggacatgggaaaaaaaaatccctccccaaccccaaatttaaaaacccctaaaaggccccaaggggcccttttttttcaagcccactttccggggacaaaattgggggggtaagccggggcttttttttttacc

SEQ ID NO: 73276 - DNA, 278 bp, Glycine max
  Clone ID: jC-gmfl02220070c09a1
ggcgactggagcggctggagctcgagcttaataggtttgagcggctagagttaattatttggggctagtctggaacttataataatgtgcacatggatagcccggaaatccaagatcaaattgaaaaattcgcaggaggtgggaggaaagaaaggccgatctaagctttgtgggatggggagtctggaggcggatatttcaatacaaagcactatgctgttcctatagcaaaaacagggactgttgctcataatagagattaaaacacagaacagaaa

SEQ ID NO: 73277 - DNA, 540 bp, Glycine max
  Clone ID: jC-gmfl02220070d01d1
catccttcaacttcattctcattcactgcttgagatataaataagtcatccttaaaatctttctacatttttattacattaacgttcgaaaaaattcatctacctattttctacccaccaaatcctttaatattgaagcaatcaaacaattgtaggctaatacaatggaggggcttcgattttaaagaaaaagaaggctgtcaaaaaatgagcccaaacattgaagaccagaatctctgaatccctaaaatgtgattgcagagaacaaatagtgaattgacgagactaaagaaaaacaggctaaagaagcaaaaagaaagacatgaataaaaagggacaattttatatcgataatacaatttgcagacgcacgacattcaatgttgagcagtccaggtaggtttggtcacaacttttctacaagatcgtccccagtagccatatatgcaagacaaacaaatagccaataagtcctaatcttgctctaggatgactcatgagaacccggccaccagatacccagagtccatcaatacgatc

SEQ ID NO: 73278 - DNA, 472 bp, Glycine max
  Clone ID: jC-gmfl02220070d02d1
aataaaactataaatatattcacataagtatgaatgttgagtttctacaggcaagtaaaataatttataggactaatgaaatattcaacactaccctcaatggcaaagctacagtccaagtccaatttaacgaatatataatataaataaaaaagagatagcgaagaaaaaaggattagaaagtatcgttttcctctgacttctgagaaacttctgggaatcggtcccaaacggttaaacgacgcacgtgacgtctccgcgtgccggtttcggattccctacagcactacgtatctaatctaaaatgtttcattcgattagccgtcgccgcgtgtcagttgcacaccctttgatttgtgctgtgacacggactcaaccacggcgattcctgattctcgcgatggttctggcaatccaacggctcagatttcacgtctgcagaacccacgtgatgcaggcgcagcagggtatc

SEQ ID NO: 73279 - DNA, 451 bp, Glycine max
  Clone ID: jC-gmfl02220070d05d1
ctatctaaaaagtctgaagtgtatcagaattaaataaacaaagagcagtagtgacaaaggtagccattaacaaaactaagaatacaaccatctgcacaatttgcagctcatacatcaatccgatagtcatacttcaactggccgagctaaaaaattgttcggtcatctataggctggcgagagggtgctgctaataactaatgggacttaacaatatcattaacagttttccattttttagaaaataaaaatatgtagcctaaagaactgaataaccaaacaaactacaaacttgctttgatgctagaaatattagtcctagactataagtcttcgatgacatgcttctatcttccataaggatggtatcgaccagttcctgcacctgcgtatccccctctagtcccataaaatgagcctccagcaggccccccatatccaccgcctaagc

SEQ ID NO: 73280 - DNA, 397 bp, Glycine max
  Clone ID: jC-gmfl02220070d06d1
aggaaaaaatttcccacgttggttagtttgactggcctataacaaggccagagggggttcccaatttggctctccctattctttcacccaatagtaaagttaccgttttgtttgggcttttcctaaaaaagggggggggtggacctaacataaaccattatttaaactggattcactcgtacatacatgctcacaaaacaaatagggggagattttttttcaaatggaaaatggcctggtaaaaataatatcttggggggcatgagggtctcatgagaaaggggaacccatttttctggagcccaccttgggagggtctaatttgctgggggaatcctgatgatgccgccacagttgcttacaaatggggaggccccgcttgttcccttgtttttta

SEQ ID NO: 73281 - DNA, 538 bp, Glycine max
  Clone ID: jC-gmfl02220070d07d1
gaaggccagaacaggagagagagaatttaacattgtaacatgttgagagtcatacaatacatcatttacatccatctctattgcacaaataaggatccatttccacccattgtccattcatagagaatgaataacaacaaaaagtaaacaaagataataagcactttcttcacttgatgtagtaaggaaggtccaagacgtagaggaggaagtaggcccaaataacacccgaaatgcctccgaagaagaagcctccggtgaacttggcccacccatcagcagtttggagctgatcgggctccttcttgcggcccgtcaaggtcagtgacggggcagtggatgggtctccttcgttaaaagatgaaatcccatagattgtgaggcaaaggctgaggatcaccacaagcccaccagcggcgagagagcctgcttgcccggcgatctcggtgttcctcagaggcccggccttcacgaatgggcccaccagaaggtagccatgggcccagcccacctcgatccctctagtagtgggctcact

SEQ ID NO: 73282 - DNA, 519 bp, Glycine max
  Clone ID: jC-gmfl02220070e02d1
cattatagcctgtttttcaaaaatcaaccacatatatgaatatatcccagtttcttcccaatcaaattataccaagcactaattcttgtttcagatcataaggatccaagtattggggttaactttaacctcagcatgagccaaacctcctctgcaaagtatcctttgaatacattctaaacagtcacaatctcaaagtctgcatgctgagaacaattgcggaagtaggctgttatatggtcaaggttgttgatgaagattttatatggttgatccaactccaaagttcaatgacttcaatttagtagaaggcaaacatgctggcttcacaagggctgacgctccacaagtaaccttaactgtacagaaggatagtttaacagcttctgcattatgatgtccctgtaacatattgatcaaaccatgtaaagtctcctcttttttccttcgacgacatttttccaatcgatcatgtggttcatgtatatcaatgaccaagccatccatagaaggaagccg

SEQ ID NO: 73283 - DNA, 430 bp, Glycine max
  Clone ID: jC-gmfl02220070e04d1
aacatataactttccttacaattaataaactaaaacatgtagacagagaaatgtcatgaactagcaaggaaggtgaatacaattaattttgttctaggaaatttgggtttgtttatcttcatgtgtttgcgtccaacgctaagatggtgctaaggttcattgggttcatgtaggctttagaacctgacataatttcctccacaatgagcctattggccttttcagatggatggaatgcatcccaaaatgcatactgctctctgttggagcaaaggttggagagtgctgtgcatagcccaagtccattgtaaggtccttgcccacagcaagctacttgtgatgtaacaaatccaaattgttgggggttagtaacgaagtcgttgtgagcttttcctgtgtttgcagcaatgataacgtcacttccaatttt

SEQ ID NO: 73284 - DNA, 538 bp, Glycine max
  Clone ID: jC-gmfl02220070e06d1
acagaaattgatgtattcattgaacaaataatgagatttgctacatcacaagcccaaaaatatccttcatgaatcatcacaataatgcgcaagctttattacaccacaaacaatgcgcacttaaatacacaggcacagtaaacccagagatagcttttgacttattctcttctggtcgaacatagccctcgccccacatacaccagaatcatttgccctctcccccaaaacaaaacaagtgttaatttcaatttatccatgtggtatggtatggggacataataatttacccctagttttattgatgtacattttatttcacgtgtttatatgaaagacttgaaataattgaagagacgtaccacatgggataaattgaaattaactcagcagaagcaaatagattactctagtatatatagtatgatgtttttttttttccgataaaatatagtatgatatgtttttgaacagtggacaatgcaaattatatataggggtattcctggactagaataattgaagtgacatgaaattt

SEQ ID NO: 73285 - DNA, 484 bp, Glycine max
  Clone ID: jC-gmfl02220070f01d1
ggtaaggggctatctcaaacaatgatttctatatatgcacaactaagcttctatcttaattaggtgggttgacacaaacctaggaaaacgcatcccagtattaaacaaagagtaaagtttgtaaggagaactggtaatggtaactcaagaaatcatttttcgggtatatccattaggaaaacaattgtaagtgccatgttatagagctgccatcattgtccctctcgcagcctcacgctttaaaactgcagccttgccactgccacggaagtacatatatacttgctgtataacccagatgctcagcactgactcgagacagaaaaggccaaatccaatgaagtagaatatcccaaccaatgcattgtctcccaacacatcaatcgcagccaaaatgcctgtgagagattttcctttgaagataattggtggagcaactgcagctaaaatgcaaaaggcaatgtgcaacatgtaaagcaagaag

SEQ ID NO: 73286 - DNA, 497 bp, Glycine max
  Clone ID: jC-gmfl02220070f03d1
gaaaatagtaacaattgacaaattcttgttattgacaataacattgtattttgaggatacatcattatgacaaatgacaacacaatagtattgaacccaagtgttgattactttctctctctctctcattctctctctctaattaacatcttattctgttggaaattatgaactggaaactggacatatgacgcacataactcttttgcttgcttaagtatatagaaacatgaaatggtagatgtatagagatctcactgagatgatcccttaagcttcttagcaatgccagcaaagtacttcccttgatgaaaagcttgagccaattctaactcagttggttgtctggaaccatccccggcataggtacctgcaccataaggggatccacccttcacattctccatctcaaacatcccagcacaaatgtgtaaccaatgggcacaaaaatcatcccatggtgaacaagctgagtaatagatgtcaacggagtagtc

SEQ ID NO: 73287 - DNA, 493 bp, Glycine max
  Clone ID: jC-gmfl02220070f05d1
agatgcaagtatttatacgagttggcgatattataaatgtataatgcagatacaaggtgaatgcatccaagattagagcataaaatttgaaacttctcaagggagaaatctggctgtacaggacaatgattcaagttgtctccctagtgtacattattttgcttacaagccaagagcaccaaggggtgtcttgccctggccagcctcaaagtagaaaatcagcatagccaacatagcaatcctagcatgcttaatctcagccaatttcagtctctctagcttgtcggcatccggaatgtaaacgccatccttgatagctccagcaaatcccaaagggtcaaagaattttcctccagggtagccttgttcaccagtagagttgccaaagttctcagcagtttttgaccatggagtggcccactccactgactgagaatctgggttgaagatgtccacccattttttgctttaacccaccccatttggagcaact

SEQ ID NO: 73288 - DNA, 526 bp, Glycine max
  Clone ID: jC-gmfl02220070f07d1
aaacaatgaaaatccttcatttattggtgtacatatttggctaaagaagataatagaacatatctctgtgtaagcctactcagtaatctcaaatgcaatttataattatggaccaggaaagtgagaaatacatccaaataaaccatgttaaaaaagaaagaaaccaaattctgagctagggaaagctatcccagcaacaattaactctcagtaaatgaggtgattgaacatggaggcacccttcaaggctaagtcagattggggatatcaacattctctgttgagtcaatctaaaatcatctcaacaacccataacagcacaattatacacgaacaccccgacatgctccttcacgccaagtacctgccaatctatggtgccattgctgatccctgacttaggacaccatgaactcagcacaatagcttcaccttctggacccctttgtccacccacaaccaaaagttgctctccacaagccttgaaagccaacccccaaccattagaagaatctgctcggactgg

SEQ ID NO: 73289 - DNA, 516 bp, Glycine max
  Clone ID: jC-gmfl02220070g01d1
cctagtaatgaaaataaaaatatgtctaactttccatttaaatcctcatataaggacaaaaactgcatttaaaactaaatgcaacatataacattatccaagacattgcataaagagaacatagatgaattacatattatgcacgacgtttactcaaacgccatgaatttggctcatggtatctgtcataaagtggttcaattcgctcttgacgctttcgcttgctcatctttgtaggatctgccactttgaagtatcttggagccaattcaacaagccatttggggtctatgacagtgacctcacgcatatattccttagttgtcatcacaagctcatggtagatgacccagtctggttgtctctggaacagagctgaacttggatggatatacacaggctggttctcacaagggttctgtaaccttcctgggggtcctttctagaagcatggaaaaagaaccctgcagtgatagccttcctgactttggtgaattttttcccgcacttacaaca

SEQ ID NO: 73290 - DNA, 456 bp, Glycine max
  unsure (1)..(456): unsure at all n locations
  Clone ID: jC-gmfl02220070g03d1
aacaatcacgccatgtcacatctacatttatggggaggcttgcttgactttaaaacaataaattatgtattacaaactgcaagttttccttgctcacagattcttcatattaaaaagaaaatttatccattaacaaatatttaatgcgtgtttgggtattcgacgaaccaacattggtgaaaactgaagttcgcaaaagcatctccatcattccttttgcggtaatatacggttgaccatagaatttaaaattgcaatttttgctaacaagattaacggaaagtcaaacatgctttttatctcattaaaacttaatcattctcatgcacaagaccaattatcttgagctcagatttaagcttcaccattttattcttcggaaaaaacatggttagaaacttgccaataacaccattctccatagaacctttgggcattnggttcaccaaaacaacc

SEQ ID NO: 73291 - DNA, 412 bp, Glycine max
  Clone ID: jC-gmfl02220070g06d1
cttggggaaggggggcctttttaccaaaaaaagggttgggccaacggccttccctttttttttttaaaacccaattttggggggaccccccccaattttaactaacccatagctaaaacctttaaaaggccccccgccccaagttgaaaaaagttgttgcccattcaatttaaaaatacccccggaaaaaaaaagttgctgaaataccccaagggcccaccaaaaagccccccattttggtttttaaaaacccccccagggggggtcccgttccccccccggattggggcctccatttttcctttgatgaacccctaaaacggtttttcccacttataaaccccttttttggaacgggataaactttcggtggcaatccccccttattcagggaactgcccttttcaaaggg

SEQ ID NO: 73292 - DNA, 536 bp, Glycine max
  Clone ID: jC-gmfl02220070g07d1
gagcaccaagaaacattcatattacaattattttatctaaaccaaagacaatttttatggggatacactacagattgaaaggaaaaaaagatggaacagatcagatggctaacaaaagtccataagtgaaacaacaaaatgttggccaagaaaataaatttagtagcagaacataaaaataggtgtacattaatcggtttcagagactggagcaagtttcacgattttattgctcctggattcgttctggttaagaagaaatcagttgcatgatccaacagggtaggcatcaaatcccatttctccatccaacaatgtcgactcattttgctcccttttgaccattacacccattatgtcatccaaggtcccaaaagtattctgcataaatccatcttgggacttcatttgctccaaaatgtaggcttcatttggcttcagtcgaatgtctgaagagaatttctcaacttcagtgcaccggctgattgatggggatgctccatttagttggccaaccaaagatgatgcatcaactc

SEQ ID NO: 73293 - DNA, 461 bp, Glycine max
  Clone ID: jC-gmfl02220070h02d1
gatacagacaatagattgtaataaaggctgaaaaaatgaagggtgaaaaaagaacccaggaatttcttttagaacaaaaaatagaattggagcttctattagtatcaatcacctatggaatctggttaacaaatacacttgaatacatggagaattgtcccatgtttttgagtgcaacctaagtacccctcttgctttttccttcaaataggaagcacaatctgcttgcaacaccatgcaaagctgggacacagcaccaaccctcagcatctcttgcacgacctcattggaggccgtgaacttcgaaaccaaggaaaatatatgaagagctcgatcatcagtggttggtgaaaccctaaggatcctctttgaaaccacagcaatgcctgcagcatgttgcagaaactgttctgtcccatcagcacaagaacaaagatgagccaagagaataatatgagttc

SEQ ID NO: 73294 - DNA, 387 bp, Glycine max
  Clone ID: jC-gmfl02220070h04d1
ggacccaaacaattccattttttatagtacctctcaaacaaatcattatagttcatggggatatataattaagtcaattttgttaatattccataataaataccaaatgaatgtccatcaaattttcctagggcccaaaccatacagggaagatcaacccccaaaaaaacggggactaaacagattcgggtcccatattggatgacatctaaatttagttggcaaccccggattcaataccgggggtacttcgaagctggtttattgctatcaggaaccaatctttggcatcttggggatcatatttccataaaatggcgcctcctttttattattctttttcaccttttccttaaaagtcctgtactccaatttgacatccctgtt

SEQ ID NO: 73295 - DNA, 461 bp, Glycine max
  Clone ID: jC-gmfl02220070h05d1
aatccttagaaaacatgtatcaatattttcccactctacaaaatttgacaaaaaacaaaacaaaggaaaggagagaagttccacgcataagcatcaatcaaatgatcaaagctaaacatgtaaaagatcagaaacaatcaataaaaagaagctaccaaactaccatcaagcaagtccagcttccagtccaccaaatgtatcatagagaggttggtttagagtctcgggaagattaaacgcaaacatccctcccactatcccacatgctgcaaacaccgcaaacggcaaataccctcccaaaacgaccacaaacggcgccaatatcgctcccatttgcgccgcttgagtagtacacccgagcgcggcgttcctcaccactgtcggaaacagctccgccgtgtaaataaacagcaaattataagtccccgccatcccaaatattcccaaaacaccacacacca

SEQ ID NO: 73296 - DNA, 477 bp, Glycine max
  Clone ID: jC-gmfl02220070h06d1
gctatcacaaaacgaagaaactattattggaattcattcaaattgaagtgcacatgattaataagattcaaccaaactagagaaggccaccacggagcctaaggacaacatagacatagaaattttgttatatcatacacattcaaggaagagaaaatctcaatagcaagattcaactgaaactagaaatcgccaccacggagcctaagaacaaggggaagcggggattccttctgaatattgtaatcggcgagagtgcgtccgtcttcgagctgcttcccagcgaagataagacgctgctgatccggaggaatcccttccttatcctgaatcttcgccttcacgttatcgatcgtatcagaactctccacctccagagtaatagttttcccggtgagcgtcttcacgaagatctgcatccctccgcggagtcgaagcaccagatgaagcgtcgattctttctgaatattgtaatcg

SEQ ID NO: 73297 - DNA, 411 bp, Glycine max
  Clone ID: jC-gmfl02220071a03d1
aacaaaccaaacaaattcttgttcacatttgttcgggtggggtttgaagaatttttttacaagtccaaaccaaataaaaccaaataatttaattggtttggatatttttttgttgtaccattttttcatcaatagacacagctgatctaacgtttgtatacaaccagagaaggttaaaaaaatcaaagaattttagcttacacaacaaaataattaattcacaacggaagaggccgcctagtaaagcttaattctggtgttaatggggcttctacagatgggacacgactgaagatcttgtccacattcacaacatgtctgatgtccacatccgaaggccatgtcttttgaattggtcagacatatggggcaaagctgattgtcatatgaggaacttggggcaagaggagc

SEQ ID NO: 73298 - DNA, 542 bp, Glycine max
  Clone ID: jC-gmfl02220071a04d1
aaaaaatcgtcaagttctatcaattatttcacaatgcacaaaacattgtctaacagaattggtagctcaagcaaatgagcatcctgcgttcaaataatcgcataaactttctagctcaaaagttgcaacacaacaaggtatagacaaatcaaaatcaaacataggccacaggattttgaaaggccagagtgtattctaaacaatgtctctccatctttccagaatttattccagatttaattgaaggattgcaatcaatggtgatcatcatcgccatgcccatcgggtgatccaccaggtcctaccacttcaagaacaaaatactgtgcgcacactggacattcgtggggcttgtctttctccagccaaaaccagacaacatcatgctcatcctcaccttcacctcctgggcatccgactatccttttatcatagtaagatttgacaacagcaggtgcttccttcgtgccgaatggaccttcgggatggtctatttcaagatattccttccctcgagctcagcctgaagctcctcgcgctcg

SEQ ID NO: 73299 - DNA, 437 bp, Glycine max
  Clone ID: jC-gmfl02220071a10d1
gagaaaatcagagatttttatcattctatatattgtggaatgaatattctacgccatcagtgcataaatgagtaatttacatttattgaaatcacaagctaaacttaaccatgaaaaaaaatgggataaataaaacggggaaagtaaataggtagcctcaaacgctcatttggttgaatgagaatcctatacccttttttctccaatgcagaagaacctgcctctgccaatgcttaataagaatactagtcttgacataatgctaagtggaaaattagatctgattagtccaagacttcagaaggccaaatgcttttccaaatggaaatctcagtctcactcttaatctttctgattcctccataaaaaccatctgcttcatttccttcctctctatgatctcttctacttatagttggtttcccccaacgcgagtc

SEQ ID NO: 73300 - DNA, 446 bp, Glycine max
  Clone ID: jC-gmfl02220071a11d1
ccagcattaaagccgtcccaattattcatgcaagatgtttcgacaaattacattaaaaaggttagtcattatcaagctgaaaaaaaaatgcataataataaaaccaattgtttgcaacagcaacgctgccacatgctggtataataatgcttatacctaacaatcgctcaaaattgatagtaaccccccaaaaaaaggaagaaaaaaattaagcgctcacacaaagttttgttctcatcatataggcacgtagcgtttcaaagcctgcttcgccgtgacagcgactccaaccacgacgccgccgacggcgcccgttaccgccgccgaacgcacccctttggctgcacgatacagcgcgccggtgccgagtcccgccgcgacgctgttccaaacgtcgtcggtgtccctcgttgccttgatcccgttctcgatgccggcgtaaagga

SEQ ID NO: 73301 - DNA, 558 bp, Glycine max
  Clone ID: jC-gmfl02220071b01d1
aacagtagtaaaagacgcagcttatattttattattctaaaacatataattgatccttaataaagatgtgaagtgctatgtcttgaattttcgacattcaaaacatattattctgaaacagcatgataatttatacccctcataagcagcgttaacagcaagccactgaattcctctgtccagagatccatagcaatatcacattcatgataagaggaaaagcaaatagcctaacaagcaatcccatgacaactgaacagattaagaaagaaaacttaatcctcatgtccaaccagtgcaaggagaatgctctgatagtctccagaagtgtcactggctattgcgcggtccagaggaatgctgtttcttctttggtattcctcagcaattcgctgcaaatcaacctcagctctggttgtcaccactctagtaagggccccttcatcagttcctagcttgtttatagccagcctcaagacttttgcaaaatatttttcagggtaagtcaagcacttaatggctgccctcatatatgcagatattcatcttttgatcagt

SEQ ID NO: 73302 - DNA, 527 bp, Glycine max
  Clone ID: jC-gmfl02220071b02d1
gaacgaaaagctcatgaatatttcacgacttcataatgtagcaaatccgaacagcttttctaaatacaagtgaaatacttaaaattgaaatagaaaagtttatacgctaacaagactcttgccaagaattatgtcatctgttgagaaatcagcctctttccgatatgttcctctaccaaagtccaggttgtacgagtctgctagaccctctacaagtccaaattcaggttccaatccaagcacgctctttgctttctcaactgatgcaaagaaatgctggtcacggaatggaaatgatttctttttcccaaaatcaaaatctttagggttgtagtgaatgatctctggctctgggaacccaccagccttagcacatgctcttgctaatccatcaaatgtgacatacttatctcccgagatgttgaatacttccttgctggccttctcattaccaagaacctggataaaagcttttgccaaatccttaacatgaccaagttgggttatctgtattcctgagccgggga

SEQ ID NO: 73303 - DNA, 519 bp, Glycine max
  Clone ID: jC-gmfl02220071b03d1
gacatcaaacaaagcctcaactttacagggtaattagtgttactttcttgtaaaacatacaagaaaagcccataaatttaggcaattaaaacaggacaaaatgcataaatagaatgctcatgtttataataatacacttcatatcagggctcataaattgccattgctaattaatatgttcacttccttaactgaaaataataaatcctaaaaacagacaattagcatagaaccatagccaaggcaaattcaagcaagaaagatcaatagaagcggtaagttatgtagcaccttcgaatatagaattaattggtcgttcaaaggtgcagaatggctctgcttagcatctccaagttgaaactgagatgagatccttcctttgccagcaaagaacaagggaagactgcctcttctcaacatggaaccccttgctaggagtcctctgcaccaaacactcagcctgggattctgtaaagttactaaatgtcaatggtgaaaacccagatgacaagagaaggt

SEQ ID NO: 73304 - DNA, 490 bp, Glycine max
  Clone ID: jC-gmfl02220071b06d1
gtctgcaaacttaataaataaatagcattaaaatttcatatggtacaacttcatgctgtctgataaggaaataaaaccaatacaataggccaaaactgcaagaattgccccacagacaaccctatattctcacgcaatatggtaagaaaaaacaattgaggaatagaacgagaagctcccacgccacaattccctaacctcctcttttggactcaatcgcactattaacactcataatatacacattctagagaaagttccctttccaatcacaattgactctgcattctcaaaactgatatagaacaccatgcaagaatgaatgatggaaaccatcttatggcaaaaagaatgggtacaaatatagagaccaccaaactggaaaaagcttgttcccaaaaagagcaagacaccaactgccaagccagatgctatgaagaaatgaaggatttgcagcaaaagcatgacaactatgtagaaaggatagatt

SEQ ID NO: 73305 - DNA, 481 bp, Glycine max
  Clone ID: jC-gmfl02220071b10d1
aattgaaaacagaattgtcctgtattctattatcgcttattttatcaaccaccaagtgaaaccaattttcagtttcacctagtgccactgagctagcttagctgcaggccgaaagaagaacatttggtatatgagcaaatacaatagatagaggaccaactattattggctttcttgagtttacatatagaggctctaaaggaggaatttcaccagctgagtttacacttaacatttttccatttagcaacatagtttggctatgtaaattcctgtctggtgcagttaaatggtactctcttctggctggttcacccactctacggtatggtaacttgttaaattttaaggccacattgacttgaacagtggtgctgttgtccaagttgagcactagtattgtgatccctttggattcctttgcacaatgtgcataagttcttatcttctttggcccatagaaggttgttaagaggacacg

SEQ ID NO: 73306 - DNA, 447 bp, Glycine max
  Clone ID: jC-gmfl02220071b11d1
ggtatggaagtgaatcgttttctttctcttctcaacataaaaagcataaaattaattacaaatcaaaaggctttcgggaaaaaaaaaagagaagaaaagaaaagccaattgcacaaacaatgatgataagatatcgcgtcgtgaaataaagccaaataatatccaactgttaaatagggtcatatatctctcaagccctaaaaaaaaaacctctcttctctcttcttccatcatccaccacccaccccttcccaacatattaaccacaccaaattaagaaataaaaaaaaatttctcttttcatcaaaataaacaaaactcagttccgtagggaaaataataatcaaaccttacgtcatgacgttgtgttaaaacaccaaactactacaccatgtggaatcaatcatcgaagaacacgttgattgaataattcgttgataattcatt

SEQ ID NO: 73307 - DNA, 409 bp, Glycine max
  Clone ID: jC-gmfl02220071b12d1
aaaactgaaggggccaaaattggtgaatgaatcctggccatacatccatgtctggaacccaagggcccaaataatcatcactaaccccaaatttattttcaggaaaagttttttagcccaagctgcccaacaaggctattctattttgggtccataggggggttccagaggcaaactaaagggtaggtaaagctaaattggacccagtttcgaccctgggaacaatcagctcctaaaaaaacttaatgccccttgacaaaagttcttgagcaaaatccatgggacaaattagcttccccaataagaaactcccccaagccatttgacccatgctggtaaaattttactttaaagcattatttctgaaaaccgggagcaatatcagctattaaataaaatttaaagattt

SEQ ID NO: 73308 - DNA, 546 bp, Glycine max
  Clone ID: jC-gmfl02220071c01d1
ataaaaactacttccatatatttacattagacataatgaaaaagtttaacataaaagtctcaaattaaggaaaagaaaaaaaaactatatgcctcacggccaaacagtagtatttctactatataccaatcttcttccttcttttttggtgaaaactacaaaaataaatcccacaaatttccattttccacagccatctgtcatttccaggaccaacatgccttagtcaacaaccaccccccacagaaacgtacgcatcttccaccagaatctttaacttccagcatccaccaatgcacgaccaatgacaattacaaatcaaaatccctaattgcccatcatcataaaaagaaaaatctacgaaaaaagaagacccaagacaaataaaaaaaaaagaagtaaaaagtcatgagtatcaaccggagttggatctaacagaagtaacaagtaaccaaggtttgaatccttacaaggaatatgtatccaaatttaatgtttgactaatgagacatgcatatgggaaaaaaagatcattcatcagtggtg

SEQ ID NO: 73309 - DNA, 458 bp, Glycine max
  Clone ID: jC-gmfl02220071c04d1
agagacaaatgtgtaggtttattagaaaaccatctcaaaaccgggcatcacttcaagttcagagatttacaatacccattagcaggccaaatatatatgacatttttggaacaaccccattttcaagcattgatacaatacagagtaaagaaaagggaaaagaaaaaagaaaaaattaaggggattgatcatatgatcatgatcatgtggtggagtctaaaatgaccttggctttgccacaatggtggaatgcttgagtatgtgcaagctaaattgccctcctttctcactagtgtcaatctgtgactggccagggggaggcaagagctcaaagtttaggaccaaacgtcccaaagtgatgccaagaattggcaatgcaggaatgatttcaaggcagctttttttgccaacacccaagggaaggtacctaaagttattgccattggctttaacaagcg

SEQ ID NO: 73310 - DNA, 438 bp, Glycine max
  Clone ID: jC-gmfl02220071c06d1
aaaattacaagtcatcgaaattatacattgatttcatacctgggaaacctgagctttaattactaaacgactttgcagatgtagagtacaataggcactttttttagttaactaaacatttatttgtacattgtcaattagaagaggcctttctcatacttgactatgtcatgaccagctattaaagggggagcaactaaaccgaatcataggtattgccatacccttccatagggcttaaccgccactcacttacatcctaatctgaattatgcctacccatccaaaacttaaacgcctcagcagccctttacctctctactcttgcgtcttgtgtagcccttgaagcctgcttactagtaaacattcttgaatgcattttcacatggattctagctaactcggtcctggtgggaggcatcccattttacttcatgc

SEQ ID NO: 73311 - DNA, 535 bp, Glycine max
  Clone ID: jC-gmfl02220071c07d1
aaaacaacatacctaattcatatccccaaaagaagaaagtgtcatgtacatactgtttctgcaaccaataatagataatagatcattacatgacacaaattccttctctttcttcttgaggaattaacgaggcaatatcatttgctactaattgggcatccatgttagctccaaagaaaccccttcttgacagcccaacacaatacaaaccatttcgacctttccaatgatttgggaaactgttttttggaaagccatcctcatttagaagatcatcaccccccttaagccacttttgagttgatctcttgaagcctgtacagaaaacaattgagtcgaatgtgtacgatttgccatcctggaacaaaacttcattacctcttatactctttatttcagctggcaacacctacataacatataatagaattaatcaacctcagctcatacgtctcttcagttgaaatttttttttcttaacctcttaattttaaccaatcagctgaaatttattttgttaaccttttaattttaa

SEQ ID NO: 73312 - DNA, 270 bp, Glycine max
  Clone ID: jC-gmfl02220071c08d1
gataaaataaaaaaaaataaaacaaatataaaaaaaaaaaaaaaaaaaaaaaaaaaaaaaaaacaaaaaaaaaaaaaaaaaccaacaaaaaaaaaaaaaaaaaaaagacaaaaaaaagcaaaagcaacctaaaaacacaaaaagcaaatcagaaccacaaacaaagaaacaaaaaaacaaccccaaagaaagaaacaaaaaaacccaaagtgtaaaaatagaaaaaccaaaaacaaaaaaaaaaataaacccaacccccaaagaaccccc

SEQ ID NO: 73313 - DNA, 524 bp, Glycine max
  Clone ID: jC-gmfl02220071c09d1
gtcatagcagatttcatatagcgtcttcacattgatattccaatcatcgccagaagatttacaatgttaatgacctaattctgcattacaaatgttgtcgcccgaatctgaacttcttacaagtagataattgtacaattatacaaagcccccgcaatacaaatggcccatcttatttggatacaagtaaccggagtttaccaaatcaagtaagatgaaaaagggaacaatttacatgacaattacaacagtatagcttcacaatttctataaacagtaaaattatgcataaggaagtcgcagcaggcagctaatatgaaatgaagacaattattaataaattccttggctcgatttattttcactatgaataacgtgatattagattcatgaggatattatacctaccagaatattgatgaactccacctagcatcttctgccaatatgattgccagaactacatattaatattaattacatgaccagcttattaatgtactagaatatgtcatgaatactct

SEQ ID NO: 73314 - DNA, 465 bp, Glycine max
  Clone ID: jC-gmfl02220071c10d1
aaacttaggaaatcaaattagaaataaaagatgaaggaaaaaagtaaattttagttacataacataacatgaaaaatggaccgtgcctatctccatttaagtatcagtccaagaagcaaaaactggcaagtgagacaaagagatagcaggagaaggcctcatttgaaccgttggtgagggtagccaagaggtaacactggtaccaatggggttcacaatctttgtttccattggaggcattgggaacagaagcgagggaccccttttctcaggactagcctctcttgagctgcttaaacttgtcaccagcgatgacgtgtttgaaaaatgagtcccaattttgctagactcgtccagcatattatgctgcccagaacccaccgaatcaatcccaataagatcttgtagggccatagaaaatgcactgtttctgtaatttccacagttcattattttttggtcact

SEQ ID NO: 73315 - DNA, 496 bp, Glycine max
  Clone ID: jC-gmfl02220071c11d1
agcaacaaatgtaaatttatattatatcccacaggtaaaaatacaacgatttcccaaatcatacatgatttatgaatacacgacagctagaaagacaccacatcaatcctcttcatcttttgttttctacattctatgaaaccagaggacttaaactgagattttattccactttttaacacatgctaactttaggtcttaggacaaacatgaatcacaaaacaatggccgggtgtttatagatatcaagttgcaacaaatgaatgatacagaagacacttggtttaattctcacatatcaaccaagtccaaatggtggtgcctaaaaaagtatgaccaccagcgcccagatgggataaaccaacagaagtattatgccaatggaatttgatatgccgtgagctttagtgaaggagtttctgaaaccaccagaagcccgaatgtgttcttgcagcaaataacatgcaatgatgaggcacactaccaccccaacaat

SEQ ID NO: 73316 - DNA, 496 bp, Glycine max
  Clone ID: jC-gmfl02220071c12d1
agcaacaaatgtaaatttatattatatcccacaggtaaaaatacaacgatttcccaaatcatacatgatttatgaatacacgacagctagaaagacaccacatcaatcctcttcatcttttggtttctacattctatgaaaccagaggacttaaactgagattttattccactttttaacacatgctaactttaggtcttaggacaaacatgaatcacaaaacaatggccgggtgtttatagatatcaagttgcaacaaatgaatgatacagaagacacttggtttaattctcacatatcaaccaagtccaaatggtggtgcctaaaaaagtatgaccaccagcgcccagatgggataaaccaacagaagtattatgccaatggaatttgatatgccgtgagctttagtgaaagagtttctgaaaccaccagaagcccgaatgtgttcttgcagcaaatatcatgcaatgatgaggcacactaccaccccacaatg

SEQ ID NO: 73317 - DNA, 419 bp, Glycine max
  Clone ID: jC-gmfl02220071d02d1
cagtaatgaaatttatattagacgtcattattttttgaattgccattacaagttacaattgcaaattccatttaagcatgaataggacatggcttgaataaataaaggagtttaatttgtaaaagaaatatataatcatagacagcatttcacaagattatactctatgcagaggttagcccttcaggaagggattcactgtctggatcaggcctaagaaaccttttacaagcataaaacactgatgaatggaagccacttgggttgtcaatgaacactaagtgccaggcctggggaaccctaaggagttcacatggaaccttcatttgtttgcgtgcttcttgggctccttcataattaatccagtcctgaaaaccatatatgaaggcgggaggcaccttccactctgaaacactggg

SEQ ID NO: 73318 - DNA, 471 bp, Glycine max
  Clone ID: jC-gmfl02220071d03d1
gctacaattctattcaattactatcattcaacattggtgtttgagtttgagcaaaaaattgtaattaaatcgatgaagacagcacacccttcatcaagaatgaacaatttacagattccttgtttttcaatgagagcacattacatatacaccctgatcatgctttaaaatgcactcggttacaatatcaaatttgtcatgcattcattcgctcatgagcaattcaactagtagactcaatgagagtacacaatcttcaaagttcagaaattgtgtcatatgcagcataattctgaggcctctctgttgtcttcaagaggaaaaaatggatgatttactgtgatgtggaagagctactaagtgtagggtctgtttgatagtatacaatatcgccactgtcactgacaaaatggtctttcttcatgcttcttaacaattctccaatgaagtaaattggaagaggactagact

SEQ ID NO: 73319 - DNA, 479 bp, Glycine max
  Clone ID: jC-gmfl02220071d04d1
attccaaaggtatgatttggtaatttcttataaatgatgagaactagctgttcaatactgcttacaatcaaaagcataatacagatgcaccggaacaaaaagaaccagggcagtcagtgagctaaaattgctagagacaaacataagagacacaattctattgcaaataacactgtatggtacaaagttagaaaaacaatgacatacgaaccataccggaatccctaacaaatttttttaagtgcctatctcaagttaacttgagatcattccctcccagatgagggcggaggcaaacccggacttcatgctcttttggtcccacgcgatgttttggcaccaggatctcaagcactgatcctggcccatcgtagtatgcttctatgttggcatcttcaggaattcgagttgaaagagggatttctcggacgaactctccaggggggcagtgctctgacgatggatctgtaagcttgaat

SEQ ID NO: 73320 - DNA, 473 bp, Glycine max
  Clone ID: jC-gmfl02220071d06d1
ctcaaacatgcgcacacttggcaacattattattcgagcctttaaaaatacatcaaagcatttacaatgtttacatattgcaaaaagattagttttgctccagaaaatcttaaatgccaaagcaatggtaccccaaaatatgtattctggcaactacggataaataaagccagcacgatactatatcccagttgaaagcatacaacatttcctgggatgttttatccccatttgcatataacgtgaccattaaccctaatactcagggtcagtatgtggaaattcattatccagaaacaactcaaacttgattcccaagtaagttgtatatgttgttgcagttcaagaagaacaaagatcctgaatcctgatcaaagatccagctgaaatatttcaaggctcaacccaacccatagctctttcacatgactcttccatatagttgcatcttttacaagttcaactttgaccct

SEQ ID NO: 73321 - DNA, 297 bp, Glycine max
  Clone ID: jC-gmfl02220071d09d1
aacagggacatttttttgaattcgaaaggttgggaaatttaatagctctgaaaaaatgcgttaaacaatcataatcaaaccccgatcatggtaaaacaactaaaagcgcttttaatccaactaaaacgggtgccacataagcagctgcttagtatctgactgatttagcaacctcgaaagattgtgccacatttttcttaggcgtacctactttaatgccctgtccagaattcacgatatgtttccccatacctgcttttctcacagtgtcatttatccgatcagtgctgaaccctt

SEQ ID NO: 73322 - DNA, 284 bp, Glycine max
  Clone ID: jC-gmfl02220071d10d1
attcttgcctgcattcataaatattaaataatctaagcaaaaatcaaagaatggcacaagtgacagtgtgaacaccctcattggggcaaatcattcccaaaagccaaccctgcaagcaattactgggcacaaataaaataaagtaagaaaattacaagaaaaagcatcgaatccacaagcacaaaatctgttctcccaagatcctgtcacaacgaccctcccattctcaccatcatcacaactgaatggactaccataacctttaacacagacaaagtctgctc

SEQ ID NO: 73323 - DNA, 343 bp, Glycine max
  Clone ID: jC-gmfl02220071d11d1
ggcacggaggaagcaacagtgacagacctaataagcattagggtcaacattatatataccaacatttatccataaacactattaacagctgattggtctcagcgcatgacagcctgtagacatatgacacagttccatcgatctactctttcttgactaacctgggaatatacacgtgctgcctgcagatcctattgtgagcccaaagggctgctaaggtgctacaccgagactgacacatatagaattatgtatgactcggctcagctgaaacagaagatgtatactaacagctcgttatgatgatacgctttccgagcatgccgaccactcgcggaagctt

SEQ ID NO: 73324 - DNA, 571 bp, Glycine max
  Clone ID: jC-gmfl02220071e04d1
aagagaaaaaagaactctcatactctatttcttcttttttgtttcactgtatactattctactagcagggtcctattaaacaacaggaagttcatctttggtatcttcattttctcctcatgctcagaaattatatccagcatgattatttcactagttcttagtaaagagtctatgctttgcctgtatattagtagcttttttctgatagagctttccaattaaccaaaaggaaaatctccttatctaacagccaccttcgcctaattttaacactcatgcccctaaagagatatatttaaagcacattttttgtctcatcactttcatattccaaatcctgcaatatcataattcttaattctaaacataactcatggagctccaacacattccccagcattcaagtcaagtggctgagtaatgaataatgtttttgacgtatatgttggagaatatttgatcacagtttcaatttcatgtacttctcatagaagtcttgtatctcctcttcagtgaggccttcatcatattctccagcacttttctcccacccaagcgaacgtaaaaa

SEQ ID NO: 73325 - DNA, 499 bp, Glycine max
  Clone ID: jC-gmfl02220071e05d1
actaaagtaattcattttcattacccgaacattaattacgagggcaagggaaaagtgaattgaaatgagtttgactgggggatacaccgagagaagagaatatactacgttacacgtagtagtacaatatgagagtgatatgggccaaattaagagagactaagtgttgtggccaacagttacatctacccgaacaggcaaattaaaaccacacctttacattaatcgaactaaattaacacttataccaaatactacttactattcttgcattgtagatatgagtaatattagatgtgacctcactcagtaaagtaattgaagtttaggttattccctttttttaacttttcttgtcattgatcccttgtttctccacattcatataatctcaatggtgatattcaaactttgccaacagcaccagcagtagctgcgtgattcggttccattgttcccattttcccacgacaatgatgtggccattcaattcttgagc

SEQ ID NO: 73326 - DNA, 456 bp, Glycine max
  Clone ID: jC-gmfl02220071e06d1
tcggcggccgcccttttttttttttttttttttttttttttttttttttttttttttttttttatatgactctgggggtatttttgattttgcaaattaaattacacaatcacagccgtacattacacatgagttgggccttttccaacttaaaagcagaggataacattggcccatgacgcgacacatgcaccacctaataatcataattttacatttttacatacaaaatacaaagactttaatttttaaaaagaagaaaagagattaaccgatcattttaatgaaatgaaaccaaaacccacaaacattggcttgatttttggtggtgttgttgttcccaacttgattaagcatgaaccgtttgattgaatcacttggacttgaagggaatggccctgattaccacctggtggtaaaatgctgcaagagctgcaccgatgaatgggcccaccc

SEQ ID NO: 73327 - DNA, 486 bp, Glycine max
  Clone ID: jC-gmfl02220071e09d1
gtactcaattaatgtgtcactcaataaattgattagcattttcacatgaagccgtatatatgaggaatcatagcaatacagtggtttaaggggcattggagctatgatatattcaaagattactatgtaaagattgtagttgagacataacttcctttctgacttgatctctttttattttccctattgtagtgagtggaaatggctttctccatacaataaacatttttggtatcttaaacctgcttaaatgattttctatacagtattgctgaatattctttctagataggagaaactcttcatttgaagcagacaactgctctgaccattgccaattttctcttagttggatacatgctgctaccatctctgtcaggtgagcatctgggattcccacaacaacaacacttgcaatccctggatgttgctgtagaattgcctcaacctcttcagggtaaatgttctccccaccactcttgattc

SEQ ID NO: 73328 - DNA, 434 bp, Glycine max
  Clone ID: jC-gmfl02220071f01d1
ccccccgaattaaaaaaaaaaaattttccgcccccaaaaaaaaaaattttcccccaaaaaaaaaaaaaaacccgaaaaaaaaccctttaaaaaaaagttaaaagggcccggaaaaaaaaacccgggggcccgttttttggaaacctttggaaaaaaaaaaaaaaaaaaacccccccccttttttttggcccaaaaaaaaaccccaagtttaaaggctcaatttgggaaacccctaaaaccaaaagggggcccctaaaaaaaaaaaaaaaaactcccccccccggggggaattccccaaaggggggggaaaaaaaaaaattttcccatccgggggggccaaaaaaaagggggcccccaaaattggggggggggggaaacccttcaaaaaaccttttttttggaaaaataatagggggggggaaaaaaaagccccc

SEQ ID NO: 73329 - DNA, 319 bp, Glycine max
  Clone ID: jC-gmfl02220071f02d1
acttgtccccttcattatttgggttgtactgcttctcaatgagctgctgtgaccccaaaacatggcaaccgccatgctccagcttacggaaaggacctatgacgaatgctggggtcacttcggtaactcggcagcactcacacatatctcacgctccagggccggtgccaacttcatatacagacattggtggagtctttttgcggcgcaactctgtgaacaaacgcgattggtagccacgagagaggttagagcctatacagcgtctattataactcccagaacgctgaggctcagcccaccagagagctctcttcac

SEQ ID NO: 73330 - DNA, 444 bp, Glycine max
  Clone ID: jC-gmfl02220071f04d1
gtcattaccaaccagtaatctgatttcatgggtaacagaggccctataaaccaatagtacgtcactttacaacaatttgtccctgaattatgtaaaacaaaaataatttggataatgtattcttattagtttacaaaccctaaaagcacactagggctatgctataatcatatcgctatacagatggcacgcttatttttatgaggtatcgaagatccaacatacaatttggtttcaatgtctctagtggctagcgagtcttatcccattatctcctttggaaattgatggatttaattgcaaaggcaaatataattgcaaaaaatatgcagaagccagccaccataacagcagttacgcacaagaaatcatgcctgtgcccaaacacgtgattgagatacctcttttataagcatcgagttttctttatagagcttccctaaa

SEQ ID NO: 73331 - DNA, 419 bp, Glycine max
  Clone ID: jC-gmfl02220071f05d1
aaatgactctggggttatttttgattttgcaaattaaattacacaatcacagccgtacattacacatgagttgggccttttccaacttaaaagccgaggataacattggcccatgacgcgacacatgccccacctaataatcataattttacatctttacatacaaaatacaaagacttttttttttaaaaagaagaaaagagataaaccgatcattttaatgaaatgaaaccaaaacccacaaacattggcttgatttttggtggtggtgttggccccaacttgattaaacatgaaccgtttgattgaatcacttggacttgaagggaatggccctgattacaacctggtggtaaagtgctgcaagaactgcaccgatgaatggtcccacccaaaagatccagtgttcatcccaacca

SEQ ID NO: 73332 - DNA, 427 bp, Glycine max
  Clone ID: jC-gmfl02220071f09d1
gtactcaatcattgtgtccctcaataaatggcttagcattttcacatggggccgtttctaagaggaatcatagcagtacaatgggtcaaggagcataggcgctatattgtgtacacagattaccacgctgagatcgcacttgagacataactgcctttcagactcgatctctgtttatgacgcgtaatgtagtgaggggaaatggctcccttcatgcagtaaacatcactggtcacaccaacctggttaagtgatagtctgttcagtattgctgaatatgcccattagagaggagaaactgctcaatggtagcagacaactgctctgcccattgccaaggatgtcctagtgggacacatgctgctaccatctctgccaggggcgcatgtgggattgccactactactgcactggctattcccggatg

SEQ ID NO: 73333 - DNA, 410 bp, Glycine max
  Clone ID: jC-gmfl02220071f10d1
gtactcaattaatgtgtcactcaataaattgattagcattttcacatgaagccgtatatatgaggaatcatagcaatacagaggtttaaggggcattggagctatgatatattcaaagattactatgtaaagattgtagttgagacataacttcctttctgacttgatctctctttattttccctattgtagtgagtggaaatggctttgtccatacagtaaacatttttggaatcttaaacctgcttaaatgattttctatacagtattgctgaatattctctctagataggagaaactcttcatttgaagcagacaactgctctgaccattgccaattttctcttagatggatacatgctgctaccatctctgtcaggcgagcatctgggattcccacaacaacaaca

SEQ ID NO: 73334 - DNA, 334 bp, Glycine max
  Clone ID: jC-gmfl02220071f12d1
aaacaacaaatgtccacttaaatacttggatatatagacggggaaagggtcaacaaaccgggcaaaatacccccatcaaaaaaaagggaactcaacatttgcaaaaagtcccccacatataaaatggaccaataagttattggggagcaaattaaaactaagagcagagcattggctaccccaatttcaagcccaaagaagagcacaagggaacccatctggcacaagttgataaaccggattcctgaacttataatagacctcaaccctgttggaaacccgacaagaaattcgcgcatacccaataacagaggcccccttccccaccacaaaa

SEQ ID NO: 73335 - DNA, 542 bp, Glycine max
  Clone ID: jC-gmfl02220071g02d1
acaatacaagcttctccatcttataattaactggcattaaaatacatggtgcaagtgtcatgaaatatccaaagccataaaacattgtataaatatgcatggccaactactttttattatttataaatcttaaacacttttatttttctcttccaatgtttttctatagacaacacaaaatagcactgatcaaatacaacttgtggttgttacagatcaatgataattcatgtgcaggtagactggtgttgaagattgcgtagttggtcctccaatgaagatactcactgttttcccagtggccttgttcttgaaaccatgtgctcagatttctgttctgaatgtggcaaatatttcccatcaaatgtcaataccacacgatccttcccatctactcctttaattttatcaaccgagcagtagaaatctattgctgacatgatcccatcaccaaactcctcattgattatttctttgatgctctccccaaaatgcataacagcttcattcaacctatagacagtggggtcttggatgaaata

SEQ ID NO: 73336 - DNA, 347 bp, Glycine max
  Clone ID: jC-gmfl02220071g04d1
aacaaacaaggaacgaaagttgcttttcaattcatatatgaaaggggatatgggcaacaggggccccttgggggtaccccttttgaatatgaagctgggagggccaacattttttggtttttaaactaaaaataagtctcggccccccctggtggggcgaccaccacccccttaacggaaatagggggttttttgggggatggcaatggcattatcctcatcatcctcacaggcaacaacaacatccaagtgaccacggtaagaaggtttttccaccttggcccctttcctaaccaaaaccaccatttttttggccatgcgttttctgtgcctagggaacatgcttt

SEQ ID NO: 73337 - DNA, 409 bp, Glycine max
  Clone ID: jC-gmfl02220071g06d1
agtaaatagaaaggcaatcttatatatgctcttgcacaaggctttcgtattgaataaatgcccttaaacattgacaacgtaagtatatacaaatgcttattcactatagacttcaaatagtcctcatcctcaccttacatatctacaaaagaaaaatctggtcaaggagaatgtgtcaacccaagtcttttaagctgtacatgtgcaagcaggagcttttcctggaactatgggcttgacattagcacatttagcaactattggagctccattgaatgtaagagcaacgttatttagttccacattctcacatggtacacccttgctacatataagagtcactccttccttgggttttgaagtgccctgaatattcttgaaggtaaccttgcttatctttatttttgat

SEQ ID NO: 73338 - DNA, 283 bp, Glycine max
  Clone ID: jC-gmfl02220071g08d1
gggaaaaatcattttaaaaacttggcatatggacctgaaaaccttttttaccaaaaatttcccttggaaaaaaaactggacatttaaattggccatttacatttaaaccaccggttttaaaaaccctggaaaaaaacaaaaaatgggtttccaggatttttttggccctgagcccattttatttttttaaccaaaaaataaggggattttctagggtacccataaacacgttctaccccatattggctttaaaaaaaaggcatgggactccccacattttggg

SEQ ID NO: 73339 - DNA, 371 bp, Glycine max
  Clone ID: jC-gmfl02220071g11a1
cgaggaaggcctggcttggtttggttgtttttaacacgcccgtgaagtgttgaggatttaagaccgtacagaacattgttttacctaaatggcagtgtaagcgaatgagcattctgtgtacaaataatcgataaactatctagctcaaaggtgggaacacaacttggtatctacctattgaaaatactcataggccacaggattttgaaaggcctgagtgcatattaaacaatgactgtccatcttttctgaatttattccagatttaattgaaggattgcaaacaatggtgatcatcattgacatgcccatcgggtgatacaccaggtcctaccacttgatgaacaaagtactgctcgcacactggacat

SEQ ID NO: 73340 - DNA, 160 bp, Glycine max
  Clone ID: jC-gmfl02220071g11d1
aaaaaataaaaattttatttcctaataatataaaccaccaaaaacatggaaacccaaaataagtaaaatgaaaaccaccgccaaaaaaaaccaacaaaaaaaaaaaacccacctaaaggcaaaaaaaaatactgtgacgaaaaaaccccacctggataaa

SEQ ID NO: 73341 - DNA, 507 bp, Glycine max
  Clone ID: jC-gmfl02220071h07d1
gtcattgatcccttgtttctccacattcatataatctcaatggtgatattcaaactttgccaacagcaccagcagtagctgcgtgattcggttccattgttcccatcttcccaacgtcaatgatgtggccattcaattcttgagccttcactggctcctctagtgccactggggtggcgtttctgtacatcaaatacatccccatctgaattatgccgaagacaaacccaagtgtgtttggaagagcaacgtaataatccctgaggagaaggccatagaagaaccacataacagcattgatggttaaaaacattgacaaagtaaatggcatgtattccacgctcctcgtctttatgacacgcctaataatgaagagaggcgcagcaaagacactgatgttgaaaacaaggcaaatccatcctatgatagcaagacgctttgctccctttgacaggtagagagttgatagaagcatggctccaaacccaaacacattcagtaagagaa

SEQ ID NO: 73342 - DNA, 439 bp, Glycine max
  Clone ID: jC-gmfl02220071h09d1
aaatggaaaactcacaaatcaactttgtcaaataaattctctcatttcactatattgtacaagaattgaacttaaaattgccagagtctcgagttacaagtaccatataccatagctctcaagcattgcaactaaatttaaataatccaattcgggtgacctccccctaaaccaacaaaaggatttccaaaattggagctggaattctcggttgattgggtataagacctttcacagcatttaagacggggctcactagaattacgcgacagaaacttctgctaacccatctctgcttagtgaataagaaacaagctctcggaattgaaaaacttccattatatatacagtgctcggtcggtaacattagtcgcttggaatgagcacccttgaatagagaaaacgcagcgggaaacatcaataatgaaggtatcaaagc

SEQ ID NO: 73343 - DNA, 504 bp, Glycine max
  Clone ID: jC-gmfl02220071h10d1
gaaccgtaaatatcttgtatttattgattaattaatacaaggcaatttcctcaaattgcttaaaactgttatggcgttatccctattatcacatatataatggcctaatagcattgaccccatatttaacaggttcacaggtttcataatcaagattctgttctgaacaggtgaagtgtcaacctcgggttttccccatatatattgatgacagctactattactatggatgtataacatgtctatactctaaacccaaaatctaagacttacccagtttctaaaataatatattaagaaaaggtggaagcttacagcagaaaacacctgatatacaacattacattgccccatactctaatgattcccagttgaaaggctggaagacataataaactctaggtgagcttttgaagagcatagctacacagacacacacaactgctatggtcaccatggagagcatgactggcctataaaccattgctgttttcatgccaccat

SEQ ID NO: 73344 - DNA, 506 bp, Glycine max
  Clone ID: jC-gmfl02220071h12d1
atgtccgattcaagaaatagtcaattatcttcaaattattatagtacaaatcttgatgcaagaatctaatgataaaaaatacatgacaaccatatatattgtaagcatataaacgccctcaaccccctttcaaaaaatattcaacaaaaacattcctatcctgtattcgcagtttacatattgctgctcatgatggattcattcattcctcatatattttggttcacaccaaattggaaaggccaaatctttgtagtttctaaactataaacaaataagagaccaaaaaatgcttcatgtttgcaaaatactggtgttcaactattgctggaggagctactgtcactgttgttgcagcctttgcagttggtgacactgtcattgatgtttttgctactgcagtgcatgatcacggcgctgctgccgtgccgtagaagattgaatctgtcttcttggtttccatctaacatactctgttagcagcgtattcaagctgattgcaatcc

SEQ ID NO: 73345 - DNA, 306 bp, Glycine max
  Clone ID: jC-gmfl02220073a02d1
acatgatactttttttgtaatttaaattggacatccttcggtaaacttgatttttcaagaatttctcaagccggtacaagaacctcaaatttcagtgtaaaactgttttgcctgcagctgatccatctggaggatatttccaggcacccactagggctgacactggcttatacaggacatcgaaggcttactgtccacatggtcgagtaaaagttcatcctttcaaatcagcttcttctacttcgagtttcgtcacactggggtggcccttgggtaaaagctttctttttaactccctatgagccc

SEQ ID NO: 73346 - DNA, 563 bp, Glycine max
  Clone ID: jC-gmfl02220073a03d1
caggtaaaaacaaaagcatcatcatttcataagatgaagaacttgtttaacaaatattgaaaacatacattatttctccaagttaaaaagaatacatagtgtaaaacaaaatccttgctcgtatatatacataaactcaatgaacaaataaataaagaattaaaacacatatcctttctctagtaattaaagtaaatgaataaaaataatctccttccttaacacacacacacacacactcagaatcaattctctttactcagtttcttgggccttagctccatcatcatcccctgaagctaagtctggtttaatctcctccaattgctgtagaacttgatgaacttcaggcctagcagcaggagaaggatccacacaatgcaatgctaacttcaatgtgttaagcaattcatctcctatggctggtgcatccctcatgagctccaaatcaaacacttcattagtccactcttccttcactatggatgccacccattgtggcaagtccatgccattggttggctcccccggcggtttcccagtcaggagctccagcatgatga

SEQ ID NO: 73347 - DNA, 533 bp, Glycine max
  Clone ID: jC-gmfl02220073a04d1
ctatctgccttgaagaggatccaccactaccctttttgttttcatcaaatttcttggctgagtgctttttttgcatctgcatcatttgcagcccaacttcctttttttactgaaactacgacactagtttttttcacatcagccttctgaccaagtgcctttttcactgaccgcctggtaggtttggcttctgaatcactagctgtcacctttgaaacatcctctgcagtcccttcttttacagggccatctttcttttttgttcgtccaagtttcttagaatgattttcatcacagaggctctcacttggtggagaagcaacaacttcggaatcatcattgcatgccattggcgacgaaatcttagcatcaatccctttgtcattctctgaaggtcctgcagcttcaacagaatggtcctcgggaggggaactgtgaactatcttgctgttgctttcacagtcgagcattttctcagtttccttctcattagcagcaacttgaccctttggaggttttgtcaatttaattga

SEQ ID NO: 73348 - DNA, 558 bp, Glycine max
  Clone ID: jC-gmfl02220073a05d1
gagaaagcaagagaggttggcacatgggaacaaacaaggcaaataaaagccaggtttgacaggttgatctctaatgacgacaaacatgtcaacagcaaccttaattgttgacacgtatattttacaactcaaagtagtgccaccatacattttggcactttagtccgcaggatgttgcaatcgatagtagcttaaaatttaaaataatataatcacaatattgggagaaatatatatgaacaaaaagccatgccaaaaagcttcacaagcttggtaatgccgacataaagaatgagtgaaaatgtgatgggaagagtataaaatctgagaattttacttttggaacccaccaaattgatattgttggttgctaaggcttgagaaaaagtcgtctccagctgctggctgtgaaggagtgaatccagacctacccattccaagaccagatcctgaacccatagctctccccatgtaaaatgaaggtggagggcctttctccctttcatcggatccatcactcaatccacccacaatttcaacgtccgcaggggatacttt

SEQ ID NO: 73349 - DNA, 573 bp, Glycine max
  Clone ID: jC-gmfl02220073a08d1
gtgaataatctatatttgtttcgcaccatttattcaaagtacatgaaaggagttatagaaacacgccaccgtatatatactatacgtctatagatgatacttgttatacacacttatttttttcatatttaaatgaaatcaaactcgttacctctcaagcctctaaagaaaaaaaatagaaaataagaagcattcttaattattctcctaactatatataaaatcaaaggctcagaacccatatatataatactttgattcattagcctcacaccctagcaagcccaaattccctcatcatggtttacgcaggctcaccaacttgacatcatcaatcacaggcccacagagtgaagaaaagtcatcacttctcatggtgtagaatgtgctaaggaacatgattcttgttctaggggtaacagccacaaacttgagtgctgcacgtttgaaccctcctttgcctttggactcatagggcaccttgatggtgtcttttcctgcaaaggctttcacaatcatggacccttcacatgagttgcttgcattcccacagagaatgagagcacataggtt

SEQ ID NO: 73350 - DNA, 560 bp, Glycine max
  Clone ID: jC-gmfl02220073a09d1
gtgcaaaattgttaagtttattacgaataacaaaatttacaatgaaggggttcaaaatactctcaaactctctaaacccaaaatacagagctccttgtaaaggagacaactactatctatctaaccgaaaatggttacaaacggaaaaaaatagaaaatagttacagttacaacacaacttatgttagtgaatcaccatgttggacggtccctcgtacgtgactggatgctccaccaggtgacataggattggatgacctatataaaagataaaagtactggaccagacgatcattgatgtccattctatgtctatcatgtattgtccaacaatcatcaatctccaccttgattcaataatatttctgaattacaactaactcagttcatttccagcaatctacagtaagtagatccagataatgcatgaacttgtttcttagaaccggcttcgtgaacatatctgttggattctgcctcgtatcaactttctggaccttgacccttttctcaaaatggatgaagtggcttctaatgtcaatgtgcttagtcctctcatg

SEQ ID NO: 73351 - DNA, 412 bp, Glycine max
  Clone ID: jC-gmfl02220073a10d1
gaaataaaaaaattcccaagcaaaaaattttttttggggctggcataaacttggccaacaattcacaatcttggtaaggcccgccatgattaagtgggaatatatttccccatttctctggattacagcttatggcatggccctctttgggggttttggggggccccttccccaaggggaagccagcctctgggggttccacaaaaaatttcccaaagggttctaaagtagtaaagttcatggcatgccctcggcttttatgcctttgggaaagggaattcttgtgagaaaggtctaggagcttttcaacggggcaatttcatgggctgccaaaagctttatttttttatatatatatatatatatttatatacatctatatatatagggtcccacaaaattttttctttaa

SEQ ID NO: 73352 - DNA, 513 bp, Glycine max
  Clone ID: jC-gmfl02220073a11d1
aatatataagtgagtctttacagcaagtgttgagagggataagatccataaaaaagttacatcaaagactaaatatgtcagcactcagatattgtctttgctatcacaaggtaaaaaaatgaaaatgagaagtatacagaatttccctcacctatgctgcaggataatcaaatcccttgttatacattgctgagatcttatgttctctgggtacaaaatactacaaacaatctcaaattaaagaacagaagattattttccctttgcaaatttctcaatcattaaatgttcattgacaatatcaaaaaatgggaagtctctttgagggtcagaataacttgctttgcataaatgatgtcacacaggctcactcaagtttccatgccttttaaccttcaatttgtgatcttcgcatgaaagtcttaaaattctgaccatcagctttacaccattaaaaaagaaaaggagcactgtctacagaggaacatcgacaccacggctatgccggtcacg

SEQ ID NO: 73353 - DNA, 580 bp, Glycine max
  Clone ID: jC-gmfl02220073a12d1
aaacaaaaggttaaaaataaataaataactatccaataagactttcaaatgttaatggaaataaattaccgagtgcgacacatcgtcaatttaaaaacagttcagacttgattacatggttttaaaaagatcagaaaagtcaacaaattgtagttttgcttccaagagtcttaagctctctttgtcactatcaccattatcactattattgccaaacctgtgaaggttcctcccatgctaattttactatccatgaaacttgctttagtgttcccatcgacatcaccagacatcttctctttcatagcatcaggtgttgggaatatgttctgaaggaaaccagacaccctacttaccaattcaataacggttagctttacattctgtagaagatccatgaaatcgaaaatcccattccccgggtgagactcatgtgacactcccaatctttcaggggattcaactgtttcagaagtacaacttgagaacttatccaattgctcagtatttcctgctgcttcaagatcagccactgactgttgtgactggaagaaactactgacggcaggattttcatgac

SEQ ID NO: 73354 - DNA, 310 bp, Glycine max
  Clone ID: jC-gmfl02220073b01a1
ctcgagctataggccaaccatggatccatatagctttaaatgcatagaagcgttgctaatagtaatggtgggtatgatgatgatgatgatgatgcaagtagtctgtgccgaagaggatataacgtgcattgatagggatagggatgcactcctccaattcaaagttgccattgtggatgactatggcttgctatcatattgcaccactgctgaatgctgtcttcaggaacggatatcgctgtaccaaccgtaccgggcaagttctaatgctcgatcttcacggtcagactaactattaattcattatgga

SEQ ID NO: 73355 - DNA, 409 bp, Glycine max
  Clone ID: jC-gmfl02220073b01d1
aatacatgatacgctatatttcatttcaatagcacaaccctggttaaactagcctttttcaaattatctaaacatggtataagcacctcaactgacagtgaaaaaatctaacgcgttcatatcttccaactaattgccttttccaagcattaacaagcttagacattggaggattccgatccacgagggctcgtgtcttccagggactagttaagcttcagccatgcacctttggtacatctatcaacagatatcgctaccttgacatgaatactgcctgacagagtgttcacgaacttgaaataagcctgtctctcaagaaagcctgaactacattgagccaaacaccacccaaaagctaattacaaattccaatgccatacgcatgttaaattcacgactgaaaagt

SEQ ID NO: 73356 - DNA, 566 bp, Glycine max
  Clone ID: jC-gmfl02220073b02d1
aatgtaaattcaaaacccaaagtattattaattgaagagcggatgctctcatctttaaagttcaacatcttatagactagttaataccaccaatcttaactacttcaaaaatactgacacatgatgcaaagagttggagaatcacagtggattctaaaaacttgagaaagagctcgccacatcaatcacaaagcgatatttcacatcagctctgctaagcctttccatggctgtgttgatctgatccatcttaatcagctcaatatctgcagttatgttgtgctttccgcagaaatcaagcatttcctgagtttctttcagccctccaaagttgctcccccctataagctttcgtcctgcaactaaaggaaagataggaagctcaaggggtttgttaggcaaccctacagtaactagcttcccattcagcttcagcagaccaagcagtggaatcaaggaatgaacagcagaaattgtgtctatgatatagtccatggttcccaaagcagccttcatttttgcagggtctgatgaaacaagggaaaaatcagccccgagtcggtcaa

SEQ ID NO: 73357 - DNA, 566 bp, Glycine max
  Clone ID: jC-gmfl02220073b03d1
cgttgaaaagcatatatcaaatgttattgcataataggcttgcagccttttacatgtgctactagcaattacattactccgagttcctaaatcccagtacataggaaaaacatttaaatactattttaaaaatagaaaacaacccagaacttcagaaaagaccaaaggtaaacgaagactactaataaggtaattcaagattaagcagcatcttcctaatcaagaagtctttgatcaaagtgccaaacaccgtgaccctttccaacccttctcaactgagccacatactctgaaattttcttaattgattcaacctgttcagacaaaaactcgctttcaatgaagtctgccaattgagggtcattgttgcgatctgccacactgtgcacattcagaagtttctcattcactaacttctccaaagacaaagctaattccattgcatacaatgcatcccccttttccacatgctcaaattctgaggggacattcttgatggcgtgaagaacaacccttccaccgcgagtattctgatatttcatgaagcttttagcgtgctctctttc

SEQ ID NO: 73358 - DNA, 548 bp, Glycine max
  Clone ID: jC-gmfl02220073b04d1
cgttgaaaagcatatatcaaatgttattgcataataggcttgcagccttttacatgtgctactagcaattacattactccgagttcctaaatcccagtacataggaaaaacatttaaatactattttaaaatagaaatcaacccagaacttcagaaaagaccaaaggtaaacgaagactactaataaggtaattcaagattaagcagcatcttcctaatcaagaagtctttgatcaaagtgccaaacaccgtgaccctttccaacccttctcaactgagccacatactctgaaattttcttaattgattcaacctgttcagacaaaaactcgctttcaatgaagtctgccaattgagggtcattgttgcgatctgccacactgtgcacattcagaagtttctcattcactaacttctccaaagacaaagctaattccattgcatacaatgcatcccccttttcacatgctcaaattctgaggggacattcttgatggcgcgaaaaacaaccctttcaccgcgagtattctgatatttcatgagctttt

SEQ ID NO: 73359 - DNA, 375 bp, Glycine max
  Clone ID: jC-gmfl02220073b07d1
aaaagaaaatgattgctatatctctgtgcgctaatccttacctagtgaacaggctgtggataccatacggcacattcaactagtagatattacagttctttgtttcataacgatttgatccgtaacctcttgttgtctcccattttatttatgtgactcgaataactcctggctattgatcactgaaatggaagatattgaggactcatgagtggctgatcgaacatgaagttccattggggattagagctcggaatattgcaggaggaacttcgatatttctttgaagggtacaatctcatggtgcgctaatgatgcatgttcgaaaggtggcgttttggcctatccatgctttccatgtgggaagggttcttc

SEQ ID NO: 73360 - DNA, 437 bp, Glycine max
  Clone ID: jC-gmfl02220073b08d1
aaaagaaaatgattgctatatttctgtgtgctaatccttacctagtgaacaggttgtggataccatacggcacattcaactagtagatatttcacttctttttttcatttttattttctccctaacctttttttgttcttttcttttctttatgtgactcgtataatttttggctatttatcactgaaatggaagatattgaggactcatgagtggctgcttgaacatgaagttccattgtggattagagttaggaaaattgcaagaggaactttgatatttctttgaagggtataatatcatgttgccctcatgatccatgtttgaaaggtggcgttttggcctagccatgttttccatgtgggaagggttcttctgaaacacgtagctattggtgtttgtgatgcagcagtaattttggggggtaacttcctgat

SEQ ID NO: 73361 - DNA, 455 bp, Glycine max
  Clone ID: jC-gmfl02220073b11d1
acacatagttaaccatttatatcatttattgaaaaagtaattaatgtttgagtaaccacatatattctatttcatccatttgaggaagtttgtataaaactacagatagtgtaggcagttcctacccctggctgaaaagagatacttataaggcaaaatttaaaaataaataaataataaccatagatagcaatgaatacaaaattaagccacaagccacatgaagtaagttgtccaaaaagtgactgcaactgaggccaaagcatatgtccatagcatgataacagaacattcaccttcaccagctccaaacaattgcgcgattgggcctatagccattgctggtggaagtgcatattgaaggagaagcacaaactgatataagggatctggttgcaccaaacccaactgtgttgctcctttaataactagaatacccaaaattggcaggaaaa

SEQ ID NO: 73362 - DNA, 429 bp, Glycine max
  Clone ID: jC-gmfl02220073b12d1
acacatagtgtaccatttatatcatttattgtacaagtaattaatgtttgagtaaccacatttattctatttcatccattcgtggaagtttgtataacactacagactgggttagctggtcctacccctggctgaaaagagatacttatgaggcaaaatttacaagtgtctaaatcattaccatacattgcaatgattacaaatttaatccacaagccacatgaagtaagttgcccactaagtgactgcaactgaagccaaggcatatggccatagcatgattacagaacattcacctttaccagctccaaacgattgcgcgattgggcctataggcattgctggtggatgcgcatcttgacggagacgcacaaactgacattagggatctgatcgctccaaacccaactgcgatgctcctttaataac

SEQ ID NO: 73363 - DNA, 342 bp, Glycine max
  Clone ID: jC-gmfl02220073c01a1
gtactgctctgccctatcttgaagacactctacaaaattttgatatcaagggaacagtcatcacaagttattctgaaagccttgacggatgaaaatctgaatgatcctcgagaacgaattgagattgcacaaagccatgttttctacaagccttcacttcttggacaaccctgattgttttctcattggcaaaagccaaatgtggatgcaactatatatggaagcatttgtcaactcaaagagaatatttaaatgagcatgaatgtattgttttgtgatggattttgtattacattgttgtatgtatatatgtcaaaatataagccactaagcaattggact

SEQ ID NO: 73364 - DNA, 532 bp, Glycine max
  Clone ID: jC-gmfl02220073c02d1
acaatcaaataccaatttctataatactttgaatagtttattggtcaaattggcaaattagcgtcattctcagtttgagttggattccaagatccatatgaaaacagtatgttgatatcagaactttttgcatgagagttaattttacttcctttcactcccaagatacaagacatgagactaggagagaaaaaaagcattagcttaaggatccagcaaaagtgcatcaatatttcgttttcctccagggcctttggtataccatgatgatacatagtctccataaacaacatcacggtatttagctagtgagtcgtttatcagttcagaagcaggggaaatcttgactgtcttagcagggtcatgaaatgttgccacagagagccttgctctatcaggattagtgattgccctatgctcacagctcctgtactttccattggttataatctcagtttggtcagcccatagaacaaggatagcatctgacagaggctgaacagtgacccacttgtaccacccttgagaacct

SEQ ID NO: 73365 - DNA, 432 bp, Glycine max
  Clone ID: jC-gmfl02220073c03d1
gtaaaaagcaagtaacattaagttggattcggattcccaagataattcacattatctgaagtacttcaccaaacacaaatctaaaaactctcaaaagtcatttcgttctttgacgctcactttccggggaccaagttggtggcataggcccatgcgttgttgttgacagggtcagcaaggtgatcggcgaggttctccaatggaccctttccggtgacaatggcctgaacaaagaagccaaacattgagaacatggccaatcgtccgttcttgagttccttcaccttaagctcagcaaaagcctctgggtcatgagcaaggcccaatgggtcgaagctgccacctgggtagattgggtcagtgacctcaccgagggggccaccagcaatacggtaacctttaacggcacccattaggataacttgtgtggcc

SEQ ID NO: 73366 - DNA, 523 bp, Glycine max
  Clone ID: jC-gmfl02220073c04d1
aaaaataccatttatcacgtactatcttgcatcagcttagagacttttcttttttattgcatgtgagactaaactgttttagttgactatattttcttggatgttcctaaaattacaaatctacttttgcttattagaaggaatcatcttcagaaaattgggaagtgttattgaagaaacatgtctgtctacgcacaagtagcttcaactgctaaactttttgccactcctctacaagggtttccgaatgtctcacttgatactccaacactacaactgcttgatccaatgcaggccttctgcacaatagaaagagccttgttgctgctgcagcgtccgtggtagaagttaccacaggttccaaggggtgttccatagctagcaaatttaatggaagagatgacttggttatcatgagggcaagtgagtgatagcacaggacctacttttcttcctgattctgtatctgagttccacaagtctacgggtggtgggtgagaatcggatacatgtgcacacaaac

SEQ ID NO: 73367 - DNA, 434 bp, Glycine max
  Clone ID: jC-gmfl02220073c06d1
caatacaaattggatcatattcgaggcaggatagccaatttattcactggattcattccactttgtcgttcaattcaggggcaggccattacttaatacatattcaactcacaattatttcaactccatatgaacgactacatgataaccagaacttattcaggggcactaagttgtgaaggggactcatttgtgagctccaattccatcttaatttcatgatcaacaaggtgcttgatatccattggataagtgaaggctgaattagcggtagaattataagatgtcaatgcattgagtaggttccattgctcggtgggatggaaagcatcaaaaaacacatagccattcctattatagcacggctcttgatcaggaacacactcccctgttaatcccggtaggcagcaaggagtttccggaaccggaaaacc

SEQ ID NO: 73368 - DNA, 508 bp, Glycine max
  unsure (1)..(508): unsure at all n locations
  Clone ID: jC-gmfl02220073c08d1
acagaaatgatgtaccttgtccactgacagttaaattacaaggtgctttctgttacataaatatgatgcctagagaaagcagaatgtcattcttactaggagggatgcgtttaaacgacatacaaattagcctctgcaacttacagattgtgacattttacaaaaatatatacattaagacccagaataatcaataggatgattattatacaagtgccacttcaaaaactaaaactgaacagctaaaccctatctccaaaaaattataaatgaaaagccatatatggctagaatcggggagaaatgtcgaaaatattatcccaaccctgcagataccagccaaactaccaccgaatggatctttacaactatatctgtcattcctacatgaggtttcagaaatctgactgcataagcttcattcgaggctatatgctgacatttgcaaagggttntgactgttctacatggacataatccctggtcttgagaaccagagtttcaaaaa

SEQ ID NO: 73369 - DNA, 547 bp, Glycine max
  Clone ID: jC-gmfl02220073c09d1
aataaaactccaacaattttattaatgaaaatactttacaatttcagcacatatacactgccatgaatataattttgcacgctataattatctttcgccacaaacaatggagtagtgctcaacaaagcacaaaccaacaataataacagttttagttgcattaatttacacaagaaagtaaattaacgtaataggcaacacatgtgtgtcacgttcatgaggatcattttataatgatatgcaacattgaattaaatattctcatgcaatggagcattctggaggaaggccttgagggaaacgtctgatatcagtgcaataattgtaaatcatgtaattcttttgcacccaacggatctttgcctgccccgtggcgtccagtgattggccagtggaggaagaagtttgggaattgaagtttctgtatgaggctgtgaatggggccttgctccaatccgtttttacaagcccaccccttgtggcccaatcctcagcgttccaaagactagagtatattctcatgggttggctctttgggaatggaacc

SEQ ID NO: 73370 - DNA, 599 bp, Glycine max
  Clone ID: jC-gmfl02220073c10d1
aacatgaccttaagcagcagttattattacctcaaataaaacaaagacataacaccatccgtttcaaatacatgaaaaagttccaaaactaacttcaataactaatgtgtaaccaaagacctctaacaaatagcaacataaaagccagcccttcgtttggtaatgcattattcacccttattatttgctatctgcagcaactgcccgaactagaggcttcattctttgccatctgcagcccgaagggaaccaagttgaactggggcttgagtctgaaccactttggatgatccatagcctgataaatcaacaccttctgccttctctttctcaagctgctctttgatccaaaagtatgtaattctcagcccatccttcaacttcatagttggagcccagccaagtttctctttgattaatgtattgtctgaattacgaccccgaacacctttagggccaggaatatggtatattggtatattcttatcctaaagctaagaacaatctcagccatctcattcatgctgaccatttcatcacttccaatattcaccggcttccggaagtctgattagtcaatctagtacaccttcacacac

SEQ ID NO: 73371 - DNA, 401 bp, Glycine max
  Clone ID: jC-gmfl02220073c11d1
gaaaggaaatcccaattttttttaaaccaaaaattgaaaattagttcttttcttggaataatccatccaaatcaatttacaacggcaatgctgaaaaaatttttggggcaaatgaaccgcattttttctaatccaatgcccaaaagtcccatgggatttttacaaaaaccccgttgatgttttaaaacaaacgtagcttttttggaaataaaaggggataacgttctaaggccaataatttttttggacccggccaaatcattttatggggttgaaattggaggaattgttttgggaattggaaaatgtaaaaaaccgggctttatcaaatttgggggaagtttaggaataggttttctgaaaaaaggctctggcttaaaaaatgactttggcttaaggga

SEQ ID NO: 73372 - DNA, 360 bp, Glycine max
  Clone ID: jC-gmfl02220073c12d1
gaaaggaagggcaaaaattaaccacacgaaaaaccggaaacgggatctaactttgaaatagcccacccgggaaaccctacaacggcactgatccccaatttataagggccaaggaaccggggcgttggaaacccagaagccaaacaatccacaacggattttgacaaaagcccaaaccatgcccaaaaacaaccacaaacaccctcggaaaaaaaaggggaaaacggccaaagaccaataacttaacagggcccggccaacccacctaaaggaatgggacccgtccaaaagggtgggggaaccgggaaaaagcccatacccggctttaaaacctttgggggacccccccggatgaaattc

SEQ ID NO: 73373 - DNA, 543 bp, Glycine max
  Clone ID: jC-gmfl02220073d01a1
ctcgaggtgaggatatcacttggttagaggagcattgccaaggacagatctccaacaggaaatgcttgctagatcggttattgaaatcggcttcagtgacaaaagaacttcaagaaaaggattttgaacaaaatgctcttgacaaacttgtgatgatggcttatgagaaatacatggctagccggggtcctagctcatcaggtgggaaaaatgcaagcaacaaaatcgccaagcaagctgcattgggatttgttaaacgaacattggaacgatgccaacaatttgaagatacaggcaagagctgcttcaatgagcctttgtataaggatatgttccttgctgcttcttcccagctaagtattgttcggcaattagatggcatagaggctgaatccacaaaaccttgtgcttccttttctctggaagcaagaactgcttccatgggttcacagcagaacccttcacaattaagtcagatatgaaaaatcatgatctcgaatcatcagatattctttctgctattaatggttcatctgaacaaac

SEQ ID NO: 73374 - DNA, 556 bp, Glycine max
  Clone ID: jC-gmfl02220073d01d1
aaatgaaagctgattttattagaaaaattaaatgtatgtacaaaaggcttttctctgatttataagagctacaaccaggatacagtgtttgctaacatacaatcactaggaatactaacttgtacctagaacaaaaagactttacagtggaagtcgtgaacgtcaatactagcaaaatccaaaacagttggatctgtcattagaaacagtttggagaaggaagtctaccaaagaatatatattaacctaattgagagcaggattagccataaaaccatcctacgtaactagtcatttcttaaaggtactttgtttcctttgtcattggtataatgaacagtactatacaaagaaagcagtttcaaaccatcatattcaagtctgaaaggtcatccatgggaatttcaaggcccataaagtcatcatgatcttgcaatccatcatcctcaatattcaaccatgaaccaagatcagcaccttggtcatcaagatcaccaggaacaccaagcacattcattccaggtagttgcaagttggacatatcaataggttcatg

SEQ ID NO: 73375 - DNA, 459 bp, Glycine max
  Clone ID: jC-gmfl02220073d02d1
gaaaaggcaactcccaagccaataaaaaaattcccccttttaaaccgttcttgggtttgggggttgcccaataaacctttggcaaaaaaaccgattttgatttgcaaaaacaaaggggtttctaaagggcaaaacaaaactgaaaaataaatttttggaaaagccccggggattttaaacaacccaaaatgccttttcagccggatcaagccccaactccttaagggggttccttagccaagggtttattaaaggggctttcccccttgggcccaacattttttggggaatccccatgaacccccatcagttttcccagatcaaacttgggggctttaaaaatcttaactttacgaataaacccattttggagggggtatttgccaaagggggcctctttaaacccctttccaatcatttcaggggtgaacttggcccccaatttttttaaaatacagg

SEQ ID NO: 73376 - DNA, 527 bp, Glycine max
  Clone ID: jC-gmfl02220073d04d1
aatccacatttatatatagtcccgagctacaccaaacctcaatctaaacaaaacatacatcaatgtgaagaagggcgttacatactccctggccctcgtctcttctctgaactatttaatccaagtccataaaatggagcaaatcaatactagctttcaatttagaatcaaacattgaaactaaattgacattgaaaaataacctactcgtttctttcaatataagatatggcacaaccatgaataaacactaggcatgtacgtaaccgctaagaaatgtggagcagcttatgtatgggaggcacattcaaccttgtgagattcaaggacatgccttgtggcttccatggctacctgtccactgacatagtgctggcgacacacaggcatgtagacatcaacaccaccaatcagctcaatctgcttatcctgtgtcttcctcagggtaaagcaagcacgctttccacagatttcacatctggcagttaacttggttactgaatcacgcaggggaattatattcagga

SEQ ID NO: 73377 - DNA, 325 bp, Glycine max
  Clone ID: jC-gmfl02220073d05d1
aaaagggattttgggaaaattataaacccccatcaaaagggttttttttgagtatccctcggctcaaaaaatttccaaacaagggatattccccattatttcctctcaactttggggattacccaaaaatttcaagctgggaattaccccccccgccatatttgcaagccttttcccacttatttgaagtttttatttccctatgtccaatgggctctaatttccccgcaaaattgattcccaaagcctttggttatcaattttcacctttggcctggaatctaaactaaggggcccccaacaccagaatccccccaattttcag

SEQ ID NO: 73378 - DNA, 413 bp, Glycine max
  Clone ID: jC-gmfl02220073d07d1
aaaaaaaaaaaaaaacctttccatgattcacttaaaaatgccttactaaaacaaactggtcaagggattaatttccaattctacactttttgcaagactttccgcttaaaacttttccaaagacttccctgatttcaagccccaaacttttaatgcagtttttttaacccataagcgttttaaaaaaattcccccttttttatggaatataaaatccagccctgcccaaaatcaattgaacttgggcattccatggaagaatttcaaggaatcttgcaaatatttccagcttggtccattatcaggggtcccaaataacgattccgaatcaaaagggaggggccaaattcacctttttcaacctgtcgcaaaatcttttttatacctttagcctatggagctgctctaggggc

SEQ ID NO: 73379 - DNA, 391 bp, Glycine max
  Clone ID: jC-gmfl02220073d08d1
aaaaaaaaaaaaaaacatttccatgattcacttaaaaatgcctaactaaaacaaactggtcaagggataaattaccaattctacactttttgcaagactttccgcttaaaacttttccaaagacttccctgatatcaagccccaaacttttaatgcagtttttttaacctataagcgtttaaaaaaaattccccattttttatgtaatataaaatccaaccatgcccaaaatcaattgaacttgggcataccatggaagaatttcaagtaatcttgccaatatttccagcttggtccattattaggggtcccaaattacgattcccaatcagaaggaaggggccaaattcacctttttcaacctggcgcaaaatcttttttatacctttag

SEQ ID NO: 73380 - DNA, 402 bp, Glycine max
  Clone ID: jC-gmfl02220073d10d1
aaaaaccggaaggacccaccgggggctatagggccctattggggaaaaggacccggaaccgggtccgggccaaaacaaacaaggccccaagcccccgcttgaattatgggccctgaaggggttccggggaaaaaaaagaaaattggggaaaaaagaatgggaaaccaaaggccgggcaattagaccattggaccccaaccccccaaatcggggccctatttccaaggtttttcccgggtaaacccccgggttttgaacccgggaaaaaggggatggaagggtttgggcccccccgagcccgtggcccctcccttttttccctataaaccattaaagaaatcccctccctttcagaaaaaccccctttatagggggcaaacccccttgggccccttggggggg

SEQ ID NO: 73381 - DNA, 574 bp, Glycine max
  unsure (1)..(574): unsure at all n locations
  Clone ID: jC-gmfl02220073e02d1
aacaaagcaagagcagacataattttacctttgatatgttccggcttttcattattttatgttcagaaaaaaatgtggtgcaaggctcgtatgtgtgtaaagtaaaaactcgtagtacaagttgaaatacattaggggagctacggcactcagtatattaactcacctattggaaacggcaaatgatcatccaccgggataagaaacagtgggctcttggtcaaaagccgaagaacaatatatatattagcacttaacatatatttctaaatacttgttagagtctccaccgaaggggaatcatcacttgctgtcatatccaatttgagagcctgccttgtgacgcggtttgtctgttttctcaatctaacattatcgatgaacaaatctgctatgatctttctcacttcatcatcacagattacaccatcttttatgtcattggtggttctatctacattggaagccgcacttccgtagtccttctctaagttttctacctctgctagtaggatgtccattnggtcatcagatgtcgttaactgattaaaagctcagttgatgatgatgaatt

SEQ ID NO: 73382 - DNA, 354 bp, Glycine max
  Clone ID: jC-gmfl02220073e04d1
gacactatatgatataccttgaaatgatgccatgtgcccaaagcaacgcttaattaaaacctatgtcgaagtgccctagtacccaccgaacgtcgagttccataacctaccaaacgcgtctaattttacgcaacgtacagatgccgaaaatgtatcaaagccggcgcggattaataagaacccatcggtgctaaacatcttacagacactaatccttattacatatggaagtcacttaatagatactctgctccaattgcagcccaagtatatacaacctgttgcttggccacattcattatgaagtgcatggcctaatgcacctgtgatatctaggcctatgccaagccacac

SEQ ID NO: 73383 - DNA, 58 bp, Glycine max
  Clone ID: jC-gmfl02220073e05d1
gctatctcgtgtacgtgcatcgcatatcatctccggaattttattcccgggtacgact

SEQ ID NO: 73384 - DNA, 585 bp, Glycine max
  Clone ID: jC-gmfl02220073e06d1
gagaagttactatactacatcatttgataaagttcaagatctattttacaaaagaaggtctttcattacatataaattcttaaactgaacacacgcattgcttcttctttttttttttcatttggagcaaaagactaaatcaaacaccacttataaaacgaaaatgaagcatattacaacctagagagcgccagttttaagtccttcctcagtatctttcccgcagcattcttgggtatggaattaacaaatgctacacgccttattttcttgtacggtgaaacctgtttggcaacaaaatcaataacttctgctgcgccaagggaactttgaggttgtctcaccacaaacgccatgggcacttggcctgctacttcatcagggtatggaataactgcagcatcatttatctctgaatgagataggagtaactcttctagctctgccggagcaacctggtagcccttgtatttaatcaactctttcaacctatctacaacatacaagaaacctttgctatcaaaattacagatgtccccagtccttaaccacccatccaccaaagttgctgaagtgcttttgggt

SEQ ID NO: 73385 - DNA, 360 bp, Glycine max
  Clone ID: jC-gmfl02220073e07d1
ggaaaaagcaagtaacattaagttggattcggattcccaagataattcacattttctgaaggacttcaccaaacccaaattttaaaaaccctcaaaagtcatttcgttctttgacgctcactttccggggaccaaattgggggcattagcccaggcgttgttgttgacagggtcagcaaggggatcggcgaggttctccaatggaccctttccggggacaatggcctgaacaaagaagccaaaccttgagaacatggccaatcgtccgttcttgaggtcccttaccttaagctcagcaaaagcctttggggcatcaacaaggcccaatgggtcgaaactgccacctgggtaaattgggtc

SEQ ID NO: 73386 - DNA, 275 bp, Glycine max
  Clone ID: jC-gmfl02220073e08d1
ataatcatgtcaaggcacttaaggtatcttactaaggtactagggttgaatcccgcgggaagaaaatagcttccacgaccaatgttacggtgacgagcatatgattaccccataataggcttgatggaatattgaatcctcacatgataatgtcggcagacatgtacctctgctgggggaaagaacgaggccaatttgaactcactatttggctttaaggccttgactttcgagggcatgaacgtgtggtgttgagctgtcgcgatctgaattct

SEQ ID NO: 73387 - DNA, 498 bp, Glycine max
  Clone ID: jC-gmfl02220073e09d1
tgtggcggatggcgtgggtgttgctttgctgcttgattagtcaacccactggcagtggaattcctgctgaacccaggttgtgcatggtgaagtttctgctgttggagctgggatgacaatggagttaaaggggatgatggcgttataggtgaaagaggcacttgctgaggagaattttgtggttgaacctgagaactgttctgcagtggtgatgatgagatgggaagttgagacttagcctggacatgtggcattaatgcatttgatgcagcaagctgctgctggtgctgcagatatcgttgctgcagttgtctttcctttgccaaccgaacagcataggcttgttgctgtgaattagtggcatgactaggaccttgaagatgaggactgctgagatgggactgctgctgggggagttggtgtggcttgtgggcatgttctgagtaaggctgaacaggtggtgttgtctgattgctaaggcagaactcggccacacag

SEQ ID NO: 73388 - DNA, 356 bp, Glycine max
  Clone ID: jC-gmfl02220073e10d1
acgtaaaacggcggttcattctaggtggcacttggccatgccggctatgattgttgaaacatgcgcgagaacacttaacagcaagttttacaagcgaaatttgcttctttaacacgtaactgcagacgctgaacctttcaactgccccaaattcataacttaaccattcctaggtggatcaaggaatcataatgcttctattaagctttattggaaaccagggaaaggtctgtgccaaccattgagcccctaaatggggataccgttgggaattcctctgaaagggaatccctcctcactagaagggtaaagccaagggtcaggcattttagcccggccactgggggtcttcaacg

SEQ ID NO: 73389 - DNA, 327 bp, Glycine max
  Clone ID: jC-gmfl02220073e11d1
gtagatgtccaatccgttttccttttgaacaacttgggaaccgtctttcaaactgaaaaaaactcacaactttcttcagtctcaacccccctggtatgttggagccacttaaagtctagcactccctgggccctgggggaccccaaggcggatatattcccgggagccataaggcacggctggggcattcaatggatcctcccatacctggtagcccaggtttggatacacatctgcatcataccgaccaagatccgaaccgaggtaatgttctgtgcccttaaacgcagtatcaggggcgaagcattacgacgaacccgtgaatac

SEQ ID NO: 73390 - DNA, 486 bp, Glycine max
  Clone ID: jC-gmfl02220073e12d1
gatggagtcaaagaactgtattgatctaaccaacaaaatttacacttggtgttgccttgaggcttcatgttggacagttcaacacaaacaacaaaaacgaatcttgaatcagtattttgctttccactatctgtgcatttcacaagtattacaataacagaacaacaattcacagaggcccttcaccaccacttgcagcagcagcagcagttcagcacccatcattgatacatgacaacaggaggaaccttaaacctatcctcaagaaagggtataggccttttcccatccacaaggtccctataaaacgcatactcagcctcatagtcatgcaagtgaagctcagccttctggttagtgtggtaatggtgcttagcagaagtcgatttcccaaacccaaaaatgctaaccctatcacaaatccccaaagccagcatcacagcctgcatccctgaagagtagtgaaaaagagaaccatcatgagcc

SEQ ID NO: 73391 - DNA, 558 bp, Glycine max
  Clone ID: jC-gmfl02220073f01d1
aacagataactgaatttattatttctcagagtcaagtcaagcattatgatacatcataccccaaaacaccaacaacagtactcaggtgagcagttattacatcgtactttcacatgaacgcgttataaaaggcagataaaagcaaatacatacaacacaggaccttaaggctcaagcacagcacaatactatgtgacttaaacggtgacacaattcagcaattattcttaaagcactacggatttgctgaatttgttcataattttagagccttgttagtgtagaatcacacattcttgtgaaccagctaccaccacagtagggtgttcgcttgtgctgactgcatcaacttctttgacactttcaacgttgacatcctccaattcaccacagccaatggcttcaaaaataagatcattgacttcttgaaacctctcttgagagagggacacctctgcaagaagccttcaagcattgccttcagatgcctcatcataatccttcttactctttagaaccatgtgcccactaatttcccacacagcatgattcacttgg

SEQ ID NO: 73392 - DNA, 433 bp, Glycine max
  Clone ID: jC-gmfl02220073f02d1
ggcaatcaaggaaaattttattgacatctccaagttcactacagactcaacctgtttttatcaacaagaaaaggatcttctatttaccttaacatttggggaccccattctttgcaaggatttttcaccccactgcagttcgggccagattcccatttacgattaaatggttttaaaaaatttccgggaaaagaaagaatgaaaaataccattcattaaaatgagcaagaccctcaagtttaatttccggggggcctaaataacatgtagcaacagcagctcaaaggcttaagccagaacccaagtggtatgaaattctaagcaaaggggcttaattggacaaaccttgggcggcaggcacccccctgttctggagccctgtgcctttccagaaagatcccacagtgaactgggtagccccacccctggtaat

SEQ ID NO: 73393 - DNA, 377 bp, Glycine max
  Clone ID: jC-gmfl02220073f04d1
attcaaaaaccaggaggaaatagtaacagtttaacccaaaaccccataaaaattcagggaaccgggccccgaaataattaaaaaggcaaaaaccgatgaattcaaataaataacccgaagaaggcccgggcttttttttaaccaaagaaggggaaagaaatgaataaacaaaaaaatggggtttccatggcaaccaggggggggggggggatagcccctgggatctggccccgttaaaggggggagccccgaaaactttgacccctttccaccgtgtttttggacaagaccctgtttttccgggggccggaaaatccccatttgggggggggaaaaaaaccgggggttccaagcctagggaggggaaaaccaccggg

SEQ ID NO: 73394 - DNA, 547 bp, Glycine max
  unsure (1)..(547): unsure at all n locations
  Clone ID: jC-gmfl02220073f06d1
aaagtagaattacacaacatatataattttattatagaggctctgctctgtattcaaacctcactcatcaattacacagctcaaacaatacaatgataataaataatggtaggaataaagtatatggtaaatgatgaatcaataatacaataagaaacttatggtagcaaccataaacatagtactacatgtgaatttaaatgtcacggtttcttctacattcaggtggaagctgagggtagcggcttctgtcagtgcagtagttgtagatggtgtatttcctgcgcacccacctgagccatctccattgagaagcatcaagatcatgatactgtgcttgatcccaccacctcttgccttgtgtagcacagaactttgcattcactgaagcttcacacccatcaacgtggaaccctttgtattctgctatgaagggtgctttggaccaatctgttttctccaaaccaccccttgtggcccagtcatcagcattccacaagctgtngtacacccttcatgggttggtcaaaggggaacttcactccca

SEQ ID NO: 73395 - DNA, 215 bp, Glycine max
  Clone ID: jC-gmfl02220073f07d1
gttctaaggcttttattttaatttattatctcaatataaataaacaaaaccaaacaaacaaacaataacagaacccactaacaaaaaatccacacaaaatcgaccttccgcccaacagtcattaaaaccgactcgccagaaacgtcaaactaaaaaaacaaaaaagaacacctacaaaacaaccacagcacaaacaccaaagacaagaacaacac

SEQ ID NO: 73396 - DNA, 471 bp, Glycine max
  Clone ID: jC-gmfl02220073f08d1
ggtgtgagtttaaaacaatgcttaaatgccgaatgcaaagaaagatcaatcagttgcaaaacccatgtaattacagacccatattacagactgaaacctaaaacctatgtaattacagacccatattagtattcaacctagaaaacatatacacaggcaaaacccaaaccaatcccactaaataattacaattctaaagttgtaagtggcagtccaaatgtaaacccagaagaaaacacctaagaatgtttagcactaccctttagctatctccctactggcctactcttcttttgcctaatggataaacagattccaacaacacacagataccaccctacagctaatccttgttgacacaatcggtgttacagtcaactgtaatttaatactacaggaaacctaaagagaacaatgttcatgaatcaccaccagcctcagcgaatggatgattatgttgtcgtacaaact

SEQ ID NO: 73397 - DNA, 332 bp, Glycine max
  Clone ID: jC-gmfl02220073f09d1
aggaaccaaaattaaaaaatcttatcccttggaaggaatgggccccactttcagtattggcccggcctttaaaaagcttgatttgcaaatgaaaggggcccggcaaaatgctaatggggccaaaacaatgggcttgggcctaaccgaaaatgggatgccacctttatcactcccaatgaaaagggccccataccccgggaaactggtcttaacccccaatgaacccaggggaatctggatcatcaattgggtaaagctgaattccaaatttaaaaccctcataaaccctttgattcccccaaaaagacccacaagggttaacaatgcccctg

SEQ ID NO: 73398 - DNA, 426 bp, Glycine max
  Clone ID: jC-gmfl02220073f10d1
agggaccaaaattaaagaatcttatccccaggaagaaaggggcccccctttcagaatgggcccggcctttaaaaagccagattagccaaagaaaggggcccggcaacatgccaatggggcccaaacaaggggcctgggcctaaccgaaaaggggttgccacctttatcactcccaaagaaaagggccccatacccggggaaaccggtcataaccccccaggaaccccggggaaaccggcttaacaatgggcgaaagcggaattccaaatttaaaaccctcaaaaaccccttgattcccccaaaaagacccacaggggttaacaatgcccccggggctaacaggggtaacatggtcgaaaagcccccaaattcaaggagcccttggccaaaccccttttgggcatccccaggaacccccttttgggg

SEQ ID NO: 73399 - DNA, 475 bp, Glycine max
  Clone ID: jC-gmfl02220073f11d1
caacaaaaattcgacatgatttttttttttggaaagcattctgtgatacaagatgatatttggctaattataattacattatgacatattgcgttttggacattttcttacatcctatcaggggaagtttggtttttatattagaaagttcaatctattgttaactagagtctacagtgtgttaactatgagaggatccattctctaaatgatgaaaatcatcaagttcctgtctcagtcaatagcaatggcattcccaggtcgacatcccctccagaaatcaaactcagaagattgattgttaccatccaagtgtgtgaaacgaatgccaaaaggggatatgaatcgatacagagctaatcacatgagttcaagttggtagattttgccaagatattgaattagaagactgcaacttatcctttccgaagtgattggaggcaaaataaatcataatgataatatggagctgctg

SEQ ID NO: 73400 - DNA, 592 bp, Glycine max
  unsure (1)..(592): unsure at all n locations
  Clone ID: jC-gmfl02220073g01d1
ataggaagaactacacattccaatatctattttctcaaaattcaaagaacaagcagtacctcaggtccctatcattacaacaagatagagcagaaccaaatagaaaaagaaataatcaaacgggaaaggaaagctttggcaacaattccctagccgaattaaggcacggctttattctagtaacagatcactaataaactagagaaagacactgaattattctgttgccattatttttacaccttggtctcctcttcttgctctcccgaaatctcctccaaggatctacccttggcctcaggcaccaagaaagtgaacatgaagcctaaaatgttaatcacacccaacacaagcagtgaattcctcacaccaatacctgcagggtaccctgcatctgctttgctcgggtcctgattctgtgccaaatataaaaacccgaatgcaccaaccatagccccgagctttccagatgctgaagatattccatggcaagtggatctaaatctagctgggaaaatctccgtccgcacaacatatgtggtggcattaggcccaaagttngcaaagaagaatgtgagagagtaaatgacca

SEQ ID NO: 73401 - DNA, 508 bp, Glycine max
  Clone ID: jC-gmfl02220073g02d1
ctgaaaatacagtacatttatttgatcttcttgatttgccttacaacaaggttgaggatttatacctcatttttcttgtaaataactcaataccactaagtctcccgtgttaaaaatgaaagtccttcattcataggctccttttttttcaacagatgcttttattggtgtcaacattggttcagatatatctgacatgcccggtccaacagagattgttgctcttctgaaggctcaaagtatccaacatgtcagactctatgatgctgaccaagccttacttcttgcacttgccaacacaggaattcgtgtaactgtttctgttcccaatgaccagctacttggcattggtcagtccaatgccactgcagcaaactgggttactcgaaatgtcatagctcatgtccctgctaccaacatcactgccatatgtgttggatctgaggtcctaactaccctcccaaatgcagcccctattctagtctctgccataaatttcattcactct

SEQ ID NO: 73402 - DNA, 426 bp, Glycine max
  Clone ID: jC-gmfl02220073g04d1
aaaaaatgaagtggccaatcagctttttattgataaaacaaaatttccaagtttcagaacaaaacttactatataatagagaataaacaaatcccgaatgccctaattgtatcggcaaaaaccaaagtgaattgaatgaccaaaaattttaggccttgaagttataaactattaacaatctgacgtccaaagcttcggccagacaaacactcaaatgtagagacaatttccgttatttatttcataactctattcaacgaactgaagcacaaagggactggtggttgcccaattctgggactccatttgggaacttttgcctgtctttcccccttttggagacaactataaacccttgaccatctccattctttttttcaggaacacctaattttttttggctataactatcacctgaaatgaggc

SEQ ID NO: 73403 - DNA, 450 bp, Glycine max
  Clone ID: jC-gmfl02220073g05d1
gttaaaagcaagtaacattaagttggattcggatacacaagataattcacattatctgaagtacttcaccaaacacaaatctaaaaactctcaaaagtcatttcggtctttgacgctcactttccggggacgaagttggtggcataggcccaggcgttgttgttgacagggtcagcatggtgatcggtgaggctctccaatggaccctttccggagacaatggcctgaacaaagaagccaaacatagagaacatggccaatcgttcgttcttgagttccttcaccttaagctcagcaaaagcctctgggtcatcagcaaggcccaatgggtcgaagctgccacctgggtagattgggtcagtgacctcaccgagggggccaccagcaatacggtaaccttcaacggcacccattaggataacttgtgtggcccaaatggcgaggatgctc

SEQ ID NO: 73404 - DNA, 448 bp, Glycine max
  Clone ID: jC-gmfl02220073g06d1
caccaaacataatgcaggtttatagatacaagttatggtgctaacaacaaatgagttgggtagtatgacgtctatatatgtgcaagtacatgtacaaaattcataagaattctgttcataaataaatcaggtaggaggagacacagaagttgatttcaaagcttgagatttgcatatggggcaaacattttttaccaccaaccatgttcttaagcaatctgcatgatattcatgctcacattgaagaactccaatcttctcttggctcttgaattcatcctgacatattatacaagaaaatgtgccctgatcatgacaaacttgctactccatattaatactagtagcacccgttaaataagtccttggcttcaattgagttgtaattgtttgctacgataaccagtgtttacattgccaattctctcaccctaagcaatgagatcct

SEQ ID NO: 73405 - DNA, 292 bp, Glycine max
  Clone ID: jC-gmfl02220073g07d1
gggtatggtgtggtttgttttttgactttattttgtctttaaagagtcaaaatacagggtatgcagcggcaaccgggggggagaaaaaaaaaaaagaagaccacaaaggcgccgtgaagagagacacaccaaaaacaaatcagaaaaaagaaagaaaaggagaaaacgaacaagccgccacaagaaaaaaaaaaaaggggaaaaagaagagccacccagacacccagagcaaaagggagggcaacccgaaaaaacaaaaaccccagggaaaacaccatcacgaggggggggg

SEQ ID NO: 73406 - DNA, 415 bp, Glycine max
  Clone ID: jC-gmfl02220073g09d1
gcaataactgagacataagctgtggcctgatttttcctgaacagtttgaaacaaccccacatcagcgatgtgcataaagagttgcttatcttgctccattattacgaccacccatttccttggatttgctacttggatctgtgaagcattcatacagaaattacatgctacataaaccacatggtctaaaccgccacctgagcctatgctgagattattatacccgtgccgaatgatcaagttcacaccatcaatagataaaccaactcctcttagttcagggtcacgtgacaaccacactgaagcatctgttcaaattaaatggctggatggatatatagcagatacaggcgagaccatgggatgtaatccacacacattttgacctttgcagatcttgaaaaatccattcttt

SEQ ID NO: 73407 - DNA, 323 bp, Glycine max
  Clone ID: jC-gmfl02220073g10d1
ataggaaacgcaatctgtcaaagatttacctaattgtgttgacactaataacatgattacagaaagaagtggccagttgcaaaatattgtagattattgggtcacactactatgatttaaccaaaaacatacaaacacttataattctgttatgtcataagtcggacaattactaggtaacaatactattgtatttaacactattttggaatgaggcatgtaacttatttacaatcacagaggtttgagctgaattgattgctattattcccaagagttggtctaacttttgaggatggccttctcgcagatgagtgacttta

SEQ ID NO: 73408 - DNA, 393 bp, Glycine max
  Clone ID: jC-gmfl02220073g11d1
acaaaataatttaaattttgattgtaaagtttttcattgtttataaatttttggactaggtccaaagcaatgaaaaaaaaagagactttttctaggtaaaggagaaaaactagaaggagggaacccaaagcagccacaattataatgcaaagaggaaagaaggatgttacaaacactggaccaaagaaatgcattcccaacccttgtttaaaaaagctatttcagaactcaatattccagagaatgaggaccataaaggctgaaatataaaccgatagcccatgctcgagggggaggatctgcaattagagcaaccacagaactttgcaaaggggccgctcagcatatcaaggatgagagtgatagttccgcggggaaccttctcaccgaaat

SEQ ID NO: 73409 - DNA, 498 bp, Glycine max
  Clone ID: jC-gmfl02220073g12d1
gtctgcaaacttaataaataaatagcattaaaatttcatatggtacaacttcatgctgtctgataaggaaataaaaccaatacaataggccaaaactgcaagaattgccccacagacaaccctatattctcacgcaatatggtaagaaaaaacaattgaggaatagaacgagaagctcccacgccacaattccctaacctcctcttttggactcaatcgcactattaacactcataatatacacattctagagaaagttccctttccaatcacaattgactctgcattctcaaaactgatatagaacaccatgcaagaatgaatgatggaaaccatcttatggcaaaaagaatgggtacaaatatagagaccaccaaactggaaaaaagcttgttcccaaaaagagcaagacaccaactgccaagccagatgctatgaagaaatgatggatatgcagcaaagcaatgacaactatgtagaaaggatagattgcaatgc

SEQ ID NO: 73410 - DNA, 524 bp, Glycine max
  Clone ID: jC-gmfl02220073h01d1
aaaaatgtaacgcgcctaggctagattactataagttgtgttattacatacacaaggatgagactccagaacctgtattataatacaccctagtcttctaatcaggctcaatcatttcggctgactttacatggaagaagaattaatgggttatggtacccttaacaaccaattacaactcaattgcaaccaatcaaacttgggtcctatgtacactccctgccacaaaaacaatgttttaaaacgggaacccttcaaacacagcagaaaagacaacaaaataggtcaaaaaggtagaatgaaccatttctgaacttctacaatattatccccctttgttccatttgcttttatctttcagatgagatagatagcattcttctgtctctagtgaacaaccaccaagctttgaggtggttaaatactaaaacatgcactggctgttaaatagggaacttactctgaggagacttcggacctatttgccacttcgagtgtctggatacggacagtacgctccatat

SEQ ID NO: 73411 - DNA, 447 bp, Glycine max
  Clone ID: jC-gmfl02220073h02d1
gatactgtaacattatattagataaggtatggtacaagtacaaccatattatttaataatagtccataatacatgcacagattaaaacattagccattattaattaagaggcatgcatagaatagaacctctctatgcgttggcttgaacataggcatcgacctctaggaaattcttgactgcaaaatctttgacaagggttggatcagaaatatcatggctaaccttttcgtacacagcactccacttcacctcgcatccatcgccaattggagtcactgaaatgtctcccttgaatgttttgtagtgctggaggagttccccatcaatgatagtgtacgacactaccttcttttcctcatcaacagcctcaatcttctcaaaggatgatttcacaagtggtgaaccttcaccataacttatgtggcggatagaaccaggagactt

SEQ ID NO: 73412 - DNA, 377 bp, Glycine max
  Clone ID: jC-gmfl02220073h05d1
agaaacaatgattcgcataatttgaaataaatattatctatgtaaactgataaaagaatgcaaggtagcatcctcttagaaagaaagtttaattgaagaaattcactaaattacagtcaaacaccatgcaaatctaaactacagtcttcagtgacagaaagcacacgcattgaataaaaggctcacaaagccttatggtgattgtgctagagaccaattccatgttctattacaacatcctaatggtcaactatcaagagagagactagccttttcgtatgcactccacaaaatccttggccaatacctgctatgcatagttacctccagcagctcgggcagaatccaccttttgtacctctccatcttcagggatg

SEQ ID NO: 73413 - DNA, 449 bp, Glycine max
  Clone ID: jC-gmfl02220073h07d1
atcaaagagtaagactagtacataattattatgaatagaatttagtgttgtaaactatgataatagtagttacttttttttcgttttgctgattaaattaggcactaggtaattcattttaaccgtaagcctaaaaaaatgcccctttttttgccttcagttgcatgtgcctatgatgacaaatcagaagcttagcaataaaattacaactctacaaaagttggtttcaccttttggcaaggggagtcatcattgctaacccctaatggacaaaaactagatccttcatttcttactagcataataaacacctttaagaaagtgtggccttggctttctgaatatcctgcagactgacaccgcatcagttcttcaggaggcttctctttatatcaagcttcttcaagcacaaatccgggtacatatttgatactcttattttgttctgg

SEQ ID NO: 73414 - DNA, 339 bp, Glycine max
  Clone ID: jC-gmfl02220073h08d1
atcaaagagtaagactagtccataattattatgaatagaatttagtgttgtaaactatgataatagtagttacttttttttcgttttgctgattaaattaggcactaggtaattcattttaaccgtaagcctaaaaaaatgcccctttttttgccttcagttgcatgtgcctatgaggacaaatcagaagcttagcaataaaattacaactctacaaaagttggtttcaccttttggcaaggggagtcatcattggtaacccctaatggacaaaaactagatccttcatttcttactagcataataaacacctttaagaaagtgtggccttggctttct

SEQ ID NO: 73415 - DNA, 291 bp, Glycine max
  Clone ID: jC-gmfl02220073h09d1
ataacatacaaagcatatgacacaattacctacatgtgtaaacggtgcttacactataacaacccgaccagggcactttcacaaagagaaacctcatacggtatcactactatgatatgaccaacacctttctatcacaagcaaaactctaatctcttaataatctccttcccaagggcacaacaataaaaaagttcacactatactagactgaggcatgcccttgttttataatatcagagcttatagctgacaagattgttcgtaaccccaactacgggaccaacagga

SEQ ID NO: 73416 - DNA, 329 bp, Glycine max
  Clone ID: jC-gmfl02220075a02d1
ccaaaaaatatccaaagcatatattggattttattcattataaaatgggcttcacaaccccttgcaagcgcagcaggttgcaaaccaaaaggcattcatgggatatcattcaacgacagagacaaaagcagtgccatacaactgtttaaaaccaaagtaattaatatttcataaacaatccaaacgaaaaaaaaggggattgacacttcgtttttcttatgggacaaaatgcgcggaaacttggcttccgttgttttccttgggcaattgcgaagggcattttcctgctataacaacgttttttattggcttatattcttcaaaaataa

SEQ ID NO: 73417 - DNA, 343 bp, Glycine max
  Clone ID: jC-gmfl02220075a03d1
ggggaaaaaaaaccttatttattggagtctggtggggggggccctcaaaggggtcttgaacattttttgtaattaccggaccctcaaatctcaatggtaaaaggggggataaataattgaataaaccggccaataattttatctggaatggcaaaccctggccgaatcacccctggactgggaacagttacttttccttggcctacaggggcttcccaaactggaacaatttaaccacccgtttttttttttttgggacaattaaccccatgccgcttttttaccggcccaattttgatattctacccactggaagccctctaagggctcgggagggaaaccc

SEQ ID NO: 73418 - DNA, 534 bp, Glycine max
  Clone ID: jC-gmfl02220075a04d1
gataataagcaaacatttctctattattataaaatggtttacaaacgagtttatctgaaatttctcaagatctaaaatacatagagcacagtttttttttttccaaactaaagaaaaacagcaaacttttgaatcactttcacgatgtgtagttgtacttgtacacaataataatttctaacaacataaataatgacgagtctttatgtgacaagagatatgccttgtagaattaatgcatcagctagaacttggttagcagcttgtgaaggatggacactgtcccaaaacacatactgtgtggcattagaacaagttcctggtgattttggattacacaacaaggatgttgtctctacagtcccggtaccacagcatcctctgtttgcctccacaaaaccagattttgaaggggattgaacaaggtcatagagaggcttgtaaatgtcgaaaaccgcaatcttaagaccaggaagttgcttttgaagactcgttgcagctgagttgagcttcttgttaaatccttgagcatca

SEQ ID NO: 73419 - DNA, 434 bp, Glycine max
  Clone ID: jC-gmfl02220075a05d1
agcctctgatgctcgtttccctcattattttcctttccacaacagaatacaatacacataaacataaaaataaacaaattgttaatcagagaccagaaaaagaaagaaatagaaaaaaagaaccacgcaaaatgaaaaataatgttgtaactcctcagctctcaccagtctcttcgtctcttttgagtcttttatctccatctacatgcacacatgcacatgcagtacttaactaatagtagtaatttctctctatgagtatcaccacaaccaattcacctcaacacacaacagaaacacaatggttggatttgggttacgttgtctttgaatattctaaccccaccactggtgcactgcaacaccctcgtcccttaacttgccatacaaagccaagcactcccaataggcccttcggctggaattccctgagc

SEQ ID NO: 73420 - DNA, 548 bp, Glycine max
  unsure (1)..(548): unsure at all n locations
  Clone ID: jC-gmfl02220075a06d1
gaaaaagaaccaaccatctaagtagcattcaatgaacaaagcaacaaacttcaacgatagttcagtaatagttcgttcaatgattttacaatccgaatcaatcaatcacttcatagattgaatgacccctgtagttagtatacatagtgataaagtaatatattatataaaaatagcataccaattcttcttccttgctggctgaataaaatccaggttttccaactggctctgacaaaatagagacagggaaaacctgatgactgttgaggctgctcaaatcatggctaattgctaatactatatttgttatatacactaataggctaattgctactggtaccaccacctttgtagatgtccttcagagctccatcttcaactgatttgaatgcagagatactgaatttgccgatgagtcataactccagagtgagttttctggagtcatgttagtttttgtcttcttccctcccccaaggggttggtggaatgcatcaaactgccacggntgctgatattgttgtctgtttccgctctgtgggatt

SEQ ID NO: 73421 - DNA, 457 bp, Glycine max
  Clone ID: jC-gmfl02220075a07d1
atggtaaaaacagagaagagactttcattattttgaaccggtttcactaatgaaagggtctacaactttgatatttctgcccttccggaagtgaagaacgttaaagatctatacgtacacattaattatgatatcaatatcataattgatattgagaaatattaaaagggcataatatgataggaatagagggggcacacggcaagaggaatttttttaaaacttaaatgtagccattcttgatcatccattccaaactccaatgattattgacgttcttgagtgtccaataacaccacccaaatgttggtcgcccaaaaacatctaattcagccttgacaaatctttgataatcctttttgggagccccttcaaccttccactcagcagtccattcacccacgaaagtgagaggaccatctacggttgtaatattatccaactgtgatgaacggac

SEQ ID NO: 73422 - DNA, 488 bp, Glycine max
  Clone ID: jC-gmfl02220075a10d1
aaaagcaaaaaactgaaacttcttattattgatattagaaattaccatagtcatgttcaacattgaagcatgaatatgtacagaacaatggaaccaaacgagaaaaactacataacccaaaagagctgaagcctaaaagcagagtcagcaccatcatattaagttgtgtactcttaaccacttagaaaagggttttaaaaaaaagttgggctatgattaaatcagtcaagtttgttagctccatgtggcccaattagcttcacttccaacacgaggcatcacttggatctttgtctgagagtcaacattgaagttagccccacacataaatccctcgctgtcaatcctaggcattgctttcatcttctttgttggatgttcaatgctcatgagaccatgctcactatgaaacatacacccattcggaaatggtgcaaatgatttagcacagcttgcttttataagctccagattttcagaaataacta

SEQ ID NO: 73423 - DNA, 464 bp, Glycine max
  Clone ID: jC-gmfl02220075a11d1
gattagccttttttgcaaaagaaatttctgaagtgaatcaaaatggccgaatttaaaaaaattccgaatacatcgattgtcatctctctaaagcgtaaaaacagcctgttggcaaccaagctaccatggatataggtatgcaggcatataactaacaatttctaagccaaggacaagggactgctctttacagcaataattgaaaaagcaaatgaagcctataaaggtagggacattcattgcccatgtcacttggaagcctcttcatcttttgccgccttaggatgtattcctttcaacttaagaaattgttacaccgatcagaccccatattacggaaaaatcactatccacttatatcagcgcggttcaccctcattggacagaaatgcagagtgaactttctcagaccaactgtccagttaatcccagaaggatttgatctgtaggatacccataactct

SEQ ID NO: 73424 - DNA, 350 bp, Glycine max
  Clone ID: jC-gmfl02220075a12d1
ggaacaaatgaaacatcatcgggggtttttttttatttagcactatattattgacaaaaaatactaaaacggcctaccaagggttatcaatcaatgtgcattgtgaaagggtgtcctctcaatgccataaaactgcactgggcaacgaatatttgaatccctgcccattccttgtctttggttggaaaatgtcacacaaacatgggtgagtttgcctttaagctgagggaatcccattctttccgattaattggggaaatagatagaaaattgactgaaattcaaaaatcataagcaagaatttcttgctgactccaaccaaaatttaaagatgatcaatgattgctttt

SEQ ID NO: 73425 - DNA, 341 bp, Glycine max
  Clone ID: jC-gmfl02220075b01d1
gggggggcaatgcttccattaggggcaatgaattatgctgatcaaaaatgtccaagttcatttttaagtttcaagatcccccataatctaaaaaggggtttttgggtttttcttttcttttttatggaaaaatttttgtttaaaaatagagatgaatttttgaccatttgctatggggggggtctaatttccacagggtcaggtttgacaaatgaaaattccccctccctcctactggggggttctcccccactatcttggctatgttccgcttgggggggggcgccatgatcaacttttacaatgaaacttgttgtttgcgaccccaacggaaacaactt

SEQ ID NO: 73426 - DNA, 529 bp, Glycine max
  Clone ID: jC-gmfl02220075b02d1
cacttcttaactaaattgtatttcatggtaacctcaaatttcgttcatggtgattaatgtacagagtacagaaaaacatagataacgctggtaagtaatgaacatgccaagaaatttatggcgattatggaacaaatttttgaaatggaaaccatccaggacggttgatacaaaaattggttgagcatctaacaatctgacaatgtttcaattaaggcaagctccaacacatgcaagcctcacattattgaaggcaaaaagtatatcacacttcagcaggaatccaggtcacggcagggaggaggcttgggctcacttaacaaagtagtgttccctccttcaggtccactcttaattcggcggggattttgggtgccgtgcggtggcttctcaccctttctcagcttttctactatctcaactactttctctggggttacatcttcaaagtaattataagtatatccctctgatccatttgaataatcagccactgtaatcataggagcattcacacagcatcccatgc

SEQ ID NO: 73427 - DNA, 482 bp, Glycine max
  Clone ID: jC-gmfl02220075b03d1
cgaataaatgttcacaacttcacataaagctccaaaagtaccggaacaaggcaagttccacgaaaagaactaccatacacagagcacgaggaaaaaaaaaacaacacagacaaagtaacataacagtgcaaacttctaatcaataatcttctccttcatcaccatcttcttcagttgcctctgcaccgacttcctcataatctttctccagggcagcaagatcttcacgagcctcagagaactctccctcttccataccctcaccaacataccaatgaacaaaagccctcttggcatacatgaggtcaaatttgtggtcgatgcgagagaagacctcaacaccactggtggaattggagatcatgcacacagccctctgaaccttggcaagatcaccgccaggaacaacagttggaggctggtaattgattccacacttgaaaccagtggggcaccagtcaacaaattgaatagtgcgcttg

SEQ ID NO: 73428 - DNA, 469 bp, Glycine max
  Clone ID: jC-gmfl02220075b05d1
atcagaatcattttggaccaactttcctaattgctttaaagcatattatttctgcaaacttgtacatattcttattaagacttgaattttcataagaacatcaatgcctctcatcccttttggatgctattcctttaaaaggaaaatcatgtagttacattacatctaacaaataatgaatcaaatttatttttttcaatttaagctttcagctgtctatcttagtagtccttcagtgtaaggtatatctgtgtcaggaagccaagtatttcccaatgtaaaattaaggactgtgaagttccaagcttgagtagcattcaacagagagtaaccaggccatgttactctattgctagtgttagaaccaggtccatagttgttgaattcaccataaaagagagtgtctaatccaactgttccattccactctagccacccagcaggttgaattacatttccatgtatgact

SEQ ID NO: 73429 - DNA, 298 bp, Glycine max
  Clone ID: jC-gmfl02220075b06d1
gttcttggaacatgagctcagattttctgacaggcgaggaaagggaaatctacatgcaatgcctcgcccacctggatagttcgccatccttcagtgctcacttcctttaggtcactgatgcacattgaggctcctttagcaatctcaaaagatggcccggggctcaagccaagcaaatgtactaaatccttgctcggccacggggagggaactacatgagcctccatcttttggattgatcatgaacaagttcttttcacaatcatatctttcaagtgtatggtatagaatgggttcc

SEQ ID NO: 73430 - DNA, 483 bp, Glycine max
  Clone ID: jC-gmfl02220075b08d1
ataacagacttttatcttttaacaacaggtcgggaccccagggtacatgtatttatttattgctacaacaggaaaccccttccctgagcatgcacaaggaagcttctatactctttttgcataaccccagctgccctgggcctcaaatggtgggtatattaaggatcaagtttcagcctccccatttcagcgtattcttttaagacctttttctttacccttggatgcaggcttgtccgaacctgtttttattggcctctaccgaacatttttttgtaaggttaaaaccctgttggacgagttttttagctttcctggtccaagacccatggatagccattccctccaccttgatggtattttttgacaaatagcatatatttctgcaccccttacaattataactgcttttcttgcttttcaggtcttcatctttgtaccttgtgtttttgtccgtttacctttatgctgactattttaata

SEQ ID NO: 73431 - DNA, 475 bp, Glycine max
  Clone ID: jC-gmfl02220075b09d1
atggagggaaaatcggtaaatttaattatatcataaccctccaattgacaattatacaggctcttgcaccactttcagctcaaggcttattgatgatccatctatatacttttttatagattaaaaagactgaacatgaaccgtttagtatttgaataaagataatgcttcaatataaagaggattgcctcttaattatgttgcaatgtccagttaattggtccattcctaaagagactgtatgctatattgaaataaaatcttcaattcttgtgtagtatactagtagtaaagggccatttatttagtaattttacttataagtgaattcactatagctttacaattttcttgcatgcctttgatagaaagattttatccttctcataccctctccaagagcagatggatcagcagcgaaagtaatacgaagccaatcttttaggcctactgcagttcctggaagaatgatcac

SEQ ID NO: 73432 - DNA, 511 bp, Glycine max
  Clone ID: jC-gmfl02220075b12d1
gaagggtacaacaccctgcaattacattacgtgaaaccatacacagttaaaagggaccattattaatggaatggccaaaacctaaacccggttataagatcgttgaatctctttagcaacaaaaagctctcagacttaaattattaaatcatggcgtatacctactctaaataaaacaacaaagtcgccacaccactgccggcaacaatacaacaatggttctgagattgcaaaatttgatttggttcttgaaggaataacattaacattagcctaccagacacgtatgtgataacatgttcaattactggttggcaaatttgattcccttctcaattgatgatttgagttcaggcttaaggctttcgaggccttgttgctcaaaatctgagagaggtcctaagcccaaaacttcctccactccattcttcccaagcctcaccttggaagcaaagtagggaagttcagtaacagtggattgcacgaatgagcactccacaacatctgggac

SEQ ID NO: 73433 - DNA, 414 bp, Glycine max
  Clone ID: jC-gmfl02220075c01d1
aaaacaaaaaaaaatgagaaatgataattgatcctcaataaattgaatacaactctgaattgaaaatcatgatgcccttcctatgttactattgtaaagaaaaacactattttggggcaataaataaagtcacaaaaaacaggacaaatatttcaattgatatgtctccaggggaatttggcaaacctactatcttaaagaccttcgggaaatcatttgacaaaaactcctgaacatgcaatacttaagaagtaaacatcttggtaagcatcagccagacaccaactttaaaaaaatgcagatggaattgagaagtatgagaggaactctgaggtactgagttgcataaatgaggcctataagctggcctttgaacgacttagtccttccacctgagaaatcttggaagcccca

SEQ ID NO: 73434 - DNA, 412 bp, Glycine max
  Clone ID: jC-gmfl02220075c03d1
caaaccaaaaccataaattttgcattaaatttcgaagaaattaacatgatatccatctcaatgcatattaatgaacatatcatgtgagagccttaaatgacacaaactaacagaaatcttaaatataaaatggtcttaactcaataaattggcacaccatactaattaactaattaagagtactactacttaatctgtatttcatcatggtctaggcttcattcttccttcgttggccatcttgaagagctgggcttgtgcttctgctgccttgttggagttgagtgaggccacaaacctgtccctgacttggttggttgtgtaagggaacttgttgttcaccatggagttgaggaaggaagctgtgccttctctgtagagtgctcctagcccatcagttcttgtgttggaa

SEQ ID NO: 73435 - DNA, 301 bp, Glycine max
  Clone ID: jC-gmfl02220075c06d1
ggtaaacaactttaatttttcatttcaagattatttttaggggaatgggagcacatgacttgataaacaaaaagcaaattttctaaataaaatatgcgtttctaaccccacatcggcatgagaagcagagacccaccttttctctcgtgaggctatgttttctagaaacacaagtctccactctaatatctccatctacgcccaagacctaagaatattcatgattcctttatcaccccggccttatatgatgtgatttacacctcaccaattattattctatcccataaactggggacac

SEQ ID NO: 73436 - DNA, 315 bp, Glycine max
  Clone ID: jC-gmfl02220075c07d1
aaaaacttgaattatcgtgtatacttaaagagaataacttgccaataaaacatacacatatgatgactaaagacaagatatgtcatttaacaagacagaataattcctacaggtaaagtgcataacaattgagtataccatctaataatgaaaataacgcaaataacataatgcttaaagcaacgttcatatcagaagggaaaaatagtttgaatcccatccaacaaaaatcatgcgattaaaatccaattaaaaaagcataaagtaaaataagtttttaaaacaggtatctggaggaaagcaactacatttagt

SEQ ID NO: 73437 - DNA, 332 bp, Glycine max
  Clone ID: jC-gmfl02220075c08d1
aaaggggggggccccccccaaaaaaaaaagaataatcccttcaaaaagggatcccactttaatcctcagcaaaaagggggtaacccccccttttccctaccatgatccccattctccgggggggaaaaccccttggccaaataaaagctaaatcttttttccctcaataaaaaaaacccgaattaatcccccgtaaattttggaaaaaaaatgggctgaatgaaacccaaagtattgttcccccggttttcaattaaaagggtcccccctcatttgcattccggctaggggggggaagacccggaaagcccaccccacccccccccaaaacc

SEQ ID NO: 73438 - DNA, 385 bp, Glycine max
  Clone ID: jC-gmfl02220075c10d1
ccatccgaatccattttatttatatataaaaattatatccaaaggaaataaaaggattttaaaagatcctatttttaaaaatttgaaggggaaattataaagtttttaaaggattaaccaatttttttctccccggcccgggagaaaaaagagtcccatctgttcttgaaaagcttccttaaaaaggacttttgtttccccagggaatgttttggtaaaaaaaataatttttttgaatggggggttattcgggtttaagtaagcccgtacctcaacaagaaatttccttacctggccaatttttaaggaatcaagaaaccccttcgttccagtaaaaaaagttattatctggtcttccccggaaaaaggagctgattgggattgt

SEQ ID NO: 73439 - DNA, 506 bp, Glycine max
  Clone ID: jC-gmfl02220075c11d1
aaaatccaaaagatttgtttaaacaaacataattgttgaaaatattagtccaatacaaccatctaaatgtatttagcactttatttaaatcattacatcattagaagggggtcactatcatccatattattcatctgaagtccatcaacgttggttacagtgggcttctgcactcgtcttgggctataagagaacgcgatcttgtttgtcccagggcagcagaccctcgtgggacgaatggcgccattcaaatgacaatatcagtctgaactgggtaccaactatcacccaaacgattaatgccttgcccttgcaggcgcagcaaaccatgctggttataatggacctccttcacattaagaaacactccaggttgggaatccattatgtggatattgcagtgatatgccgcagatgccggaattagctcccttagctcaaacatttcggctggagccataaggagtggctgcttattagctgaaccaaccaatggctctgggata

SEQ ID NO: 73440 - DNA, 506 bp, Glycine max
  Clone ID: jC-gmfl02220075c12d1
ataagagaataaaaatcttttatttatgtcacagtcgtacatatatgatagtaagtaacaacatagggctaacacaaaaagacacacattaaaagggttacattatgggaacacccatgatttattaacccataatatagtaccaccagaccagacctgccaaagcataaaaatatctaaagacctaaacgattacatgggaagaaaaatgcattaactgccttttgagtcaagggactttcacatgtccccttttaatgacacaataaaagcccttgatacacgagtttcccctcttgtcattttcactggtaccaaattgaaacctcttgctgtttgtgaagaggatccattcctactcctccttgtatatcctccttgaaatcaaaggatgacaaatcacaaggggaattaaacatcaaatggatattattattgttgctatggttggtataaaaggggtatgagtgttcatgttcatggtggccttgaaccggtcaaattga

SEQ ID NO: 73441 - DNA, 347 bp, Glycine max
  Clone ID: jC-gmfl02220075d02d1
gagagcaagaaacaagcttacttcacaatattatacaacttattagttaagcaaaaattactcatgctctcgtagaggtatttccagatcatgacagagacaacgcaatccggaagcaagacttaatagaagtactactaagtaaaaaataaaataaaagcccttcatagttaacatatcctttaactttgtgttttcttgaatctaaagcacaataaaaacattaaacacccatagtggatactcaaaagtatagtgaactctttactttgccaatgatccaagctcatggctcgaagttctcatgttcatcttcaaactcctgctggttctggttcccgctgtag

SEQ ID NO: 73442 - DNA, 417 bp, Glycine max
  Clone ID: jC-gmfl02220075d03d1
ggcaagacattaattaataaaaattataactcatcagtagcaaaaacaggtcaaaacaaaattacgatgccaatttgggaaggactaacaggataatttgcactaatcgatgtcctggggctcaaaacatcaccttaaatgggtcccgccacacataaaagcaactaaagccctataaaaatttggaaaacactaaaatcaagcagccccctttcccttttttttttggaggtttttcatgtaaaactccaactccttaccttccagaatgtggccatcagctctgccacattgaccaggtcttgaggaaatgcaagcaagcaaacgcccaccaccaaactggtcctcaatgggagcatcaagctttcgatctttctggcgcttctccaattttctctgacatgggtactctttttg

SEQ ID NO: 73443 - DNA, 410 bp, Glycine max
  Clone ID: jC-gmfl02220075d04d1
aaccctcaagataccatcaatgtgactctccatttatagcaggatttctctacttatcaatcaatgaactatactattaatatctataaagaatgaagaccgagaggtatgtttcaagtgttggtgtggaagttgttctgccaccaatagatagaaaagccccattactccggtgtgctcacggctgctgctgtaattagactctagagttaaagtttcaccatcaattatatttacagaaccaggtcgaggataacatgtgctcattcctacaatgtagtctgcttcatttcctgcttcttttccctttccataacttggtatcgaagaacatataactcttccatcctgtccatatagagttgatccagttccacctgaatgttgatgagcaacaccatagatgacat

SEQ ID NO: 73444 - DNA, 346 bp, Glycine max
  Clone ID: jC-gmfl02220075d07d1
aaagggaggggccccccccaaaaaaaaaaaaataattccttccataaggggtccccctttaaccctcagcaaaaatggggtaaccccccctttcccctcccatgatccctatttcccgggggggaaaatcctttggcccaataaaagctaaaccttttttccctcaataaaaaaaaaccggtttaatcccccggaaattttggaaataaaattggctgaaggaaccccaaagttttgggaccctggtctccaggtaaaaggttcccccctcatttgttttccggtttggggggggaggcccgggaagccaaccccccaccccccccaaactttggctttgttttgg

SEQ ID NO: 73445 - DNA, 375 bp, Glycine max
  Clone ID: jC-gmfl02220075d08d1
agataaactgtttcatcaattattttttaatagcgaacataaggcagaaatttgctacgttgtcatcaatgccaataattattacatctaaaatttcttcaatcaagggtcattaatctgtgttgtaagtcaaatcaatgacctgtacacagttatctaatttcttgagtgtcaaaaatgagaaacacgggcataacatggacatctgacactgtcattccatacagatacttgtggaaaatgagtatgaaacattaacaagcaaagtcaattcatggctcaggttgcattttctcgcattcttcccgtattgactggaaaagaatagttgacaaatatctttcaccaaagcttgggaagacaaccccaataagc

SEQ ID NO: 73446 - DNA, 548 bp, Glycine max
  Clone ID: jC-gmfl02220075d10d1
gatcatcagctaggttctatatatagtggaatgaatattctacatttgtgcttaaatgaacaatttacaatgagggaaaccacatgaatatgcataaattttttcatgaaaaaatgtgacaaaaaagagaagaaaatcgggttggcctaaatatctgaactgaagtccacttcaggttgtatattgccatgtataatccagaaccagtcaatgcttcagtttctgaaacaaagcttctatattgaaatcatgctaagttgtagagaatttgatcagatccagtgctagtgcctactaatccaagacttcagatggccaaaggcatttccaagtggcaatctcagcctcgctggtaatctttcttattccgccataaaatccatcagcctcgttcccctcctccctatgatctttcctactgacagtggtcagcctccatcgtgagcaggagtgtaatgattgaactctagcaccacagtgtcactactatgacatcggcaataattttcactcccattgcatgactccaagtggcctacaacaccata

SEQ ID NO: 73447 - DNA, 346 bp, Glycine max
  Clone ID: jC-gmfl02220075d12d1
aaatatgactttcaaaataattattataagaaaataataatttttaattatacaacaattcatgattgaataatagcataaacaacttttaaactaatagtatattccaatcaatgttttggctgaaagttaaccctaagattcatatgccaagaagaggacaaataatgaggtatgcttcgacattaaaatataaaatctattttacatcaacaatatgttattcagcaaaaagaagaaattaaaaggaagaagaagaagcttgctagtggcaaaacatgactaggtttgcgccttccactggcatgttgaacttgactgaccaaggtcagcagattctaatgta

SEQ ID NO: 73448 - DNA, 545 bp, Glycine max
  Clone ID: jC-gmfl02220075e01d1
aagcaccacgaagtgccttaaaaaactatataaaatacattaggaacatcagggcttccgattcaaacatgaacaaccagcagatacataagaaatccttagcagctaattaaaaataaccagataccgctatttagttgctgtatataatccaactcttcacttgaaacatttaggtgaatactactacagccatatgttgaccacctcattctttgccatctgctgctcgaagtgagcctagttgaactggggcttgagtctgcaccactttggaagacccatacactgatatatcaataccttgagccttctccttctcgatctgctccttaatccagaagtatgtgatcctcagtccatccttcaacctcatagttggagcccaaccaagtttttcttttataagtgtattgtctgaattacgacctcggacaccctcggggccaggaatgtggtgaataggaatattcttgttctaaagccaagaatgatctcagccatctcattcatgctgaccatctcatcgctttcaatatttactg

SEQ ID NO: 73449 - DNA, 274 bp, Glycine max
  Clone ID: jC-gmfl02220075e02d1
gacaaaggtaagtatgattcacaccctaacgagttaaaaatagacagatatccatgcaaattaggcggccaaaagaattgaccatttttgcaacggagttcattttagttttacaacagctaatctccaggaccaaatgtgatcaaatctaagctaaccattaacaagtacatgtgctaaaaaatttagccatgtcccaatgtacatcatcgaggaagaaggaggggatgaacttatccccgatttaccttgcccattcttatgctttacactt

SEQ ID NO: 73450 - DNA, 526 bp, Glycine max
  Clone ID: jC-gmfl02220075e04d1
ccttgatagaatatgtatatattcactcatacatgttatatagcgacattaccatagaacatacatgcatagttactataaaaatataaacaagctgcctggctcagaaatccaactggaaaatagggagtgcaaagtccaaagttgtcaactcaaacgcaacccactgaaactgtattccaaagaggaccttctaatgctgagtttctctttcttgatttggacaagaagagggtaaacacaccatgagaaacttagataatgatccctattcatgccttcattatagcaaccccagtaacttggatgataagtaacatggtaccaagcagaagcttttgcatacacatcactactccctgaatctacatcaccactgctgttttcattgaaccaggccctggcctctttccttagggacctcacagccatattgattgcttctgcatccctccctttgttgaaagattttgacattttcataatattcccaccgaggatttcagcttcagttttgatcccatag

SEQ ID NO: 73451 - DNA, 463 bp, Glycine max
  Clone ID: jC-gmfl02220075e05d1
acaaaaattccaatacattttgaaataacgaatcgctcaatattggttatacatggtaaagatatttgaacaagagggggggcacagaaagagagatggtgagggtggaaatagaaaaaaaaaaaaaaaaggaataacgtgtcagaaggccacactaatgaccaatgttgctatatacctggaatacaacaagggtcatacttatgatcattgggtctaactagtgtgatacaatacaatcccatctccatgaagctacatttacaagtttacactgatctttccgctgctagtagaatcaatttgtcaagtgatgttttgctctcaacatggttgatatttgaagtttctaccagtatggtatccattctgaatatttggtgacgtattctcatgagttggaataatcgtggaagttgaagttagaggatgagacaaggtgcgaccactctttccctgaaat

SEQ ID NO: 73452 - DNA, 361 bp, Glycine max
  Clone ID: jC-gmfl02220075e07d1
aaagcaaacttacttgctttccttctataccaagccatatgctaccaccaccacaacaaccattttttttctttttttttacatcacattagtacccccacaactactactagttaataaactactactagttaatacctgtgaaacaggcttttaatgagttcagaaacataaataaaaaaaccctctaaaaatttaacccaaaaaaagggagaaaaagtaacatctcccgccagatattaattaataaagaagggcctagaaactatttaataatagccattctcaaatggtgctgcttttgcggacaacgtagcgatatgcagcaacctttttcctccttgaggcagtgttgtcagcc

SEQ ID NO: 73453 - DNA, 364 bp, Glycine max
  Clone ID: jC-gmfl02220075e09d1
ggaaaaaaaaatatcagccccccaaattggtaacaaacaggggtaacattaaggggacaatagggttcaacccaaaccaaacttatttttaaagggtattacagacccattacacataaaatttttttttaaaagggtggggaaaatccaacattgaacattacacaaaaattagctccagcttaaaaccccccccgaagacccaacaccaagggcggaggtgactccttttggagggtggaatcaggggggggccttccatcctctagctggtggccagcaaaaaaaaacctttggtggtccggggggaatccttccttggccgggaacttcgccttcacattggcaagggggggggagctct

SEQ ID NO: 73454 - DNA, 579 bp, Glycine max
  unsure (1)..(579): unsure at all n locations
  Clone ID: jC-gmfl02220075e10d1
gattaggacgttgcacgtctgcagatgcattttatttgtacctaagaattaaagatacactcgagcacacagccatttcagtcttgagcacttgaaaagttaagtccacataattcattaaagacattggaaacggcaaaagagtatcagcaactgaggctatccgaagccagagatccaaaattacaaaaggcaaaacgataaatacggaatgaatatgcaataaaattctatcatatgatgaatcaaaattcaaaatcagtctacccgttgatcaactcctgcatatgtgggaaacgagatgcaataaaattctactaccatgagatgaatcaaaatccaaaatcagtctactgggttgatcaacttctgcatatgcagtttcaaggtgcgcttgctctgcttcttgtacctccttctcagttttcctgccctttttganttgtagtatacactcataaaggtcccaacagctccatacttcctcctagtatgctcatataaaccagcatcaaacatccttcagaagtttttcttcgacagctctgacacagcatactgtggctgaaaccatgattt

SEQ ID NO: 73455 - DNA, 490 bp, Glycine max
  Clone ID: jC-gmfl02220075e11d1
agataatggagagaaagctttttgctcattttctttcaaatacagattacatgaaaaataacaagtgaacgctacactgcataccttggacaataagtgaacttacctagcaaagaccagcacaaaacataaataaaaaataagcgaagtaaaagtgaagtataaaacgctgacattccacgtttctggaaataagacaagaaaagaaactcagaaaaatttgacttcggcgataaacaagcggaagaatcacagaatctgagcagctgtgttcaatttttcagccaagctaagctgcgttcttgtgatactagataaatacagcaaaagcaagtgatcctgcaaactgtcattcacaagcttatcaaaaactgatggggacaatttgggaagggaacctacagcttctgatataaatctcccgattttgttgtctggtgccactcgtgctttcacaacatcgtcaacatatttgtagatgtcatcaatc

SEQ ID NO: 73456 - DNA, 536 bp, Glycine max
  Clone ID: jC-gmfl02220075e12d1
aacttggaacggacaatttcttaatggaacaagagctcataattcatgaaagcctcgaaaagggaaaacaacattgttcagtgcccctacatgactaagtaataatactcaggatcttatttcatagaaattaaggagcaacttagaggcttgatttgagagcttaatcatagtacaagggattaggcagcttaaaagtcctagtccctttgttgcttcccaggaggtcactccattggtctccaacgtttccaatgattctgtatccctccttctccagcttctctctctcagctgatttgtattcaaatgataacttaccagagtactcagatggatccctgagaattaacttctcccatgtgttgaatccaacctcctttaagttcttggctgttacatcccctagactcagtggtctttctgataagaatacaatcttgatgccgagagccaacagtttgttgtacattataagagtctctggcagtgcgaatgcctcgccatcaagaacccagttcttaaacgccgtcgta

SEQ ID NO: 73457 - DNA, 527 bp, Glycine max
  Clone ID: jC-gmfl02220075f01d1
gagagaatacaagtgaacttgtaatcacaaaagattttaccattattttcaaagtagacttctttgtacaatatgtttctgcactcactagacatttcccatttgttatgtccctaccgtacacataaatacatgcagcatttaattagaagaagaaagtacgtacgtactgtgccattttgatgatgatttggttttgctttgctatcaattttgtgttttggttggcgaggaacctcacaagaggaaacgttcaccttccaccttccgagagaaacatttttgtaaaatactaggtagataaaattcaacaccaagaacctaaatttgagcccgtggtattttgtcacatttatagatttgatatcttacccttaattttctttcatagacaattaaattcccgtgctaatgcccctcttccttcattcctatcgtttgcagtgcatgtgactctatctcgttgaaacaggtaaacccaaaatcatgaataccaaagtcttgacagtccaataaccaagcacaat

SEQ ID NO: 73458 - DNA, 371 bp, Glycine max
  Clone ID: jC-gmfl02220075f02d1
ggaaaggaagccccccctttaattaaaacaatgggctcaaaacatggaaaattttacacccgggaaaaaaaacatttttttttcccccccccccccccccaaaaaaggggtttgattgggggggggaggggaaaaatttaagaaaaatttgggcctttttaggggaaaggcacattttttacattctactttaaaaaaaaaaatccccttaaatttccaaattccctattttaacccttaaaaccaaaaaccccctaaaggctgggaatctgggttggaaattttcgggacattataagagcatttttttatataaccttttaacgggcccccaccccaatttaaaccctaagggggggggggcccccttt

SEQ ID NO: 73459 - DNA, 397 bp, Glycine max
  Clone ID: jC-gmfl02220075f03d1
aggaaaacaaaacatgatttgctgctttaaaaaggaatgatttaaaatacaaatcattatgggctgctctccccttttaaaaagaccttatccaaataaaaaattaaatttataaaaaaatcctcccttgttttctggaaagaacaatataccggggaaaaaaaaacaaggggtttttttccctccaggggcccccttttttatgtgtaggaaaaaaatgtccccaacctactggatcattaatactttggcaaaaaaaattttcaatggtcaattttggagtttgcccccactgaataattaatagctactttgggttcataaaggattagggatgtttaaatatcttggatcatgccaggagctgatcgccaaaagatccaacgggtgaacgggg

SEQ ID NO: 73460 - DNA, 493 bp, Glycine max
  Clone ID: jC-gmfl02220075f04d1
aaattgaattttactatccaataacattaatgctggataacaacactcacaaatagggaacaggacgaaagctgtgacttctatttaagttcattaaatagtttctgaatcaaatccatagaaaattccaattgaatattcaagtatatagctgttggaaataccaggtttctattcaagttctcccagtttgcttcattaagggaaacgactgatacaaaatactgtggttctgaatagaatccagatagagaaaattcaatgggatgttaaatttcatgcagtggggttggaagtatctgacttgttggagtacttggaaagccatttctgcttgttcttctgcgaggcattccagtttcgagagaattgtgtaaggccttcccttaacgacccaaggtttaccccatctccaaccaaaatgcttgttactcccattttagacaccgcttggatgtttctattctcatcatcgaacaagagcatggagttg

SEQ ID NO: 73461 - DNA, 299 bp, Glycine max
  Clone ID: jC-gmfl02220075f05d1
caaaaaaaaccccggcgggaagggggggcaaaaaaaaaaaaagggggggggggcccccccaccccccttaaaaaacaaaaaagccctttgggccccccacaaagggaaaaaaaaacccccttttttttgtccccccccccgggagatgcaaaaaatattagggggaccccaaaaaaaaaaaggggcccccaaaaaaaaaaaaaaagggggtaggccccggggaataaaaaaagaagggggggcgcctgggtttttccggggaccccccaaaaaaaaaaagggggggggggggtcaaaaa

SEQ ID NO: 73462 - DNA, 370 bp, Glycine max
  Clone ID: jC-gmfl02220075f07d1
cgaaacatgcctttcaacaggcacaaattatattaaagaaaaacaaaaggggacaaagttacaaacaacttaaacccccccaaaaaaaaagttacaaacaagttggaactttatttcttctcatttgaacccaagcaacaaattctctctttttctagctcttacaaggccaacaacaagcttgttttgcagaagacgcaaactcatcctagcaagaggagtagcttaaatcttctgtgcaatgtggttttttttttctttccaaaaaaaaaaagaaaaagcgaacaacaacaacaacattaatggttggtgttctttaacaaggcttgccaacgaaacagtttagggcaccagcatgtcgtgtcaacct

SEQ ID NO: 73463 - DNA, 393 bp, Glycine max
  Clone ID: jC-gmfl02220075f08d1
aatatatggtacaacaaccatattatttacgataataggagaatgcacatgtagtatataagttactatatatttcaatccataactaaattaattcttaactcacatcatgcattacaaacaccaaacttagactactcatataaacagacctaatgatgttattaagcctgaacacactctacaagagcttaggtttatatatcatcatatatatgatttatataggcatgcatatagctaggtttaatctccattgagtaattgcatagacgaccagatatcctcgatgctccaatagttgttgttgtcgttggtggtggtacaacaacttgattgatcagtgattgtagggaattgaggttggaatggctcaaaagttccttggtatga

SEQ ID NO: 73464 - DNA, 369 bp, Glycine max
  Clone ID: jC-gmfl02220075f09d1
gaatgagacaaagagcgcttgaggaaccttacaaattgcccctatgaattaacgatacagtgagccacccagccccatcagattacagcatacaacaagctacttctatatacgccatgccagacaccgaaaacggaagaagaatttggttgctcgaagatatatcgggccaagatatcccagaaacacatacgcttgatcaacaactcgtggggaaggatgctgaaaacatccagcgccgatgacaaagaatacataagacaaatgcccgatgcccaactcacagtggacgttgaaacgagatggaaaacaaattgccgaccatgagaacaatgctagaactctatggagactgtgcctgatcaaggg

SEQ ID NO: 73465 - DNA, 368 bp, Glycine max
  Clone ID: jC-gmfl02220075f10d1
ggaaaaaaaatcgatccggggggaaactaaaattaattaactcaggcctgctcaaagcccgggaagctttccctcacgttgttttatacataagctaacatgcccttccccgggcttgggttccccctagcagaaaaccgcttccccctttttttttcccaaggaaaaccaagcgggcctaaggcaaccttaatttccttttattaggaaccccaattttccccaattggtcctaatttaatagccgaaaaatgccccccccccccgggttgattttactttttacaaaacaaatgggggggacatttgggttagctcctgtttcgcaaaacccacctttgggtttccccattccttggccttttttt

SEQ ID NO: 73466 - DNA, 393 bp, Glycine max
  Clone ID: jC-gmfl02220075f11d1
cccagaaaaagttttaaatattataggcggagattcataattcagattagccgaactttatacagaggcgcccatttcccaacctttaaaaaaaaaaaaaaggaggccccctggggcttaacacccccatcaaaggtccaaaacacttgaacttggtgaaggggaaaacatgaccccttttttttagggggggtggttaaacaaaaaacaccggggggcccgaaaaccttcacagacataatacaaaagtttttagctccccataaagagggaatcattattccaaataaggggctatttttggtggaagcttgctctcccaacacctcactttcaagggcaggggttgcaggaacaatttggtccaaatttgcagccatggttttcaggggg

SEQ ID NO: 73467 - DNA, 372 bp, Glycine max
  Clone ID: jC-gmfl02220075f12d1
ggtaaaaaaaaaagggcttttttttaaaaaaaaaaaaaaggggcccccccggtttttgggggcggggggggggcccccaagggcccccccattttttttttaaaaaaaaaaacggcccccggggaatgggggggggggtaaaattaggcccccccaaaagggaacgggggaaacaaccccctaaaaaggtaccttttttttccccaccccaccgcgggaatttattatggcggggcccgggttggttttttcaaaaaaaaaagggggggttcggggctccccccccctttggaaggggggggcccaaaaaagggaaaagggggaggggccctacctggaaactttggcccccccccgggccccaagggtttt

SEQ ID NO: 73468 - DNA, 166 bp, Glycine max
  Clone ID: jC-gmfl02220075g03d1
ataacatacaaattcatataacaacaggttgggactccagtttacattcagtaatttagtgctacaagaggaaaccattcacttaatcaaacaaaatgatgaaccaatcctcatcttctatcgcccctcctgccatggacctcaaaggggggggggggggggggga

SEQ ID NO: 73469 - DNA, 446 bp, Glycine max
  Clone ID: jC-gmfl02220075g06d1
gcatggaaaaaacatggcaaagcaactaccatcattcaataagtaaatgttttacacaaatcaactcatgaacaatgtacataactaattcagccaaacgtcgtttcttgccactggcacagatccgaccaatcatatgcttgtcttgaactactgcagcattttgcaataaatctattagcagagaatcacaatgcaattctttttttcttcttcctttttttgttttggagatctgtacaaatactgagctgtcaggagaatatgggcttcattcacaaaggttcttggcttctgaaattctataattcgttcttgcttattagtggtgggtgtgactgaaactacaccaatgaggaacaatgtagcaattgagttgaaatcataaagatcacccacagattgtaactctccaagagccaacccagccttgacagtgacataag

SEQ ID NO: 73470 - DNA, 428 bp, Glycine max
  Clone ID: jC-gmfl02220075g08d1
acaccggttctaggaaatgagaagatatacatcggatacaaacatctttcaaccaacaagtgacttttagcagtttttatccatcagaacttcttctaccaatcataacactgatcaatgattacagaagccccaaactctcgacaaaacacattgcaaatatagttacttagttacacacacgatacctgtgcagagcacaaaggcacatatcctgtcctacatgagacgctatacaattgggttgtcagttaccatctctaaaccacacagtacgcttttgcacaagctcattgagaaaatcatcaggtttctcaagggcgacatttggcattaccacaacatgtgcaacgtctgcttggcacgcatgctgccacttgtgcacaaacccttcatcgtgaggcctctcaaacacaacggtgctgctg

SEQ ID NO: 73471 - DNA, 427 bp, Glycine max
  Clone ID: jC-gmfl02220075g09d1
aaagaaaatctcaaactaatcgtcaattggttctattgattggcaaccttctcatatttcttacagatagtaaaatttaaattgtaatcttacatggatgaatgccaaagaatatatagtgatatttaaaaacaatctcataaataatatttgaatgagggattcaaaatttaataggccagtactatacaaagctggatatatgcctcctttatttgttttgggccttactgcagtccatgttttccatgcgctctctcttgagagcagtgaacttggcagctatgtcatcatagtctggcaacttaggatgaacatgactaggatgtggagaaggacaaaaatatgtccttaacatcttatctttggtggttctgtgcctctcttggggcatggtcatggcccttgaataggaagcttctgtttc

SEQ ID NO: 73472 - DNA, 465 bp, Glycine max
  Clone ID: jC-gmfl02220075g11d1
gcaaagacaatgctatcttataactgatatttgaagcgggagcatcaatacaatacaatatgtaactatgaactatcaatatatgatcgttattatgtctgtgatacacacaattaaggccataatatacttatgtgatttacaacaacttctagcttattttatacatcatgccaacccaactaggagcaattttcatcatacaattacacttatctttaatcatcattcatcaatactggcatcagcaatacgctctaaactctgaagcatgacaaggtggtagtcaccagggaccatattgttatgcaatttatgccacaattggataagatgcacaagttgcaacacacacatgttcttccccaattccatcttgaagtagccattttcaccccagctttctccccatgaattttttatgagccaatatgggacaccattttcaactccatatccaacagc

SEQ ID NO: 73473 - DNA, 335 bp, Glycine max
  Clone ID: jC-gmfl02220075g12d1
gttgtggttgttttttttttttttattttgttattggggacaagccccccccaattttttaaagggggacccccgcagaataaacgccgggaaaaaaaaaagttataaacaacagggggtaccaaatccccttcgtcataaaaacctttttatgaacaaatttaaaaacccacgggctttggtttttcccccaaacccacgggtactggcaaaagccaaaagaggggggctctgaaacaagactaggcggaaaacacctttttttattgggggacccaagccccaccacatttggtttaggggggggagaaacttcagcttttttgtttttaaaa

SEQ ID NO: 73474 - DNA, 386 bp, Glycine max
  Clone ID: jC-gmfl02220075h01d1
ccccccacacacccggggaggggggcccccccttttggaaaaaaacccccaaaaacaaaaaccccccccaaaaaaaaaaaaaaggggggggggaaaaaaaccccccccccttaatttcccccgggaacaaaaaggggggccccccccccccccccataaaaagaaatttttttcccggggaaaaccccccacttaaaaccccccccccaattttttcataaggggaacagggggcaaaaaaaaaaaatatttttaacccccaacccgaaaccccccccaaaaaaatccccctttttaaaccccccccaacaaaaaaaaaaaggggccccccggggcaaaaaaaaaaccacccccctggggggacaccttttttgagtaaacccccc

SEQ ID NO: 73475 - DNA, 528 bp, Glycine max
  Clone ID: jC-gmfl02220075h03d1
gctctcgtatctttattagtattggatggtgattgactatgcaatagacattgctccatctgatgtaattatttggttttttattcatttgcataaaactcctttcttttagttctttaaaaaaagtacattcagaggaatgtattaagagattgaaatgctcgatctattttcattgaatccaaagcaaaatagaatatctaaaaccaaacttgactagacaacaagaatcagtagggctacttacactgttgtcttttgtcagcgttgataccataccactgctgaacttgaattctctctttcatccaattattgattgccagatctgcgagacattacaagtgatagtgtccagttccacacgtgtgacaaaaaacccatatgttgttgctgctctacaaattttgtctcaacaacttcactgcctactaatctttgcttttttcccccacagcaacctccttcgaacaacaattttttcttttctaaaaggatcagtgaatcgaatatcctccatgctacttt

SEQ ID NO: 73476 - DNA, 366 bp, Glycine max
  Clone ID: jC-gmfl02220075h04d1
atgaaaagtgattttcacataacaaattaaagacattggaaacggcaaaagagtttcagcaaccgaggctatccgaagccagatatccaaaattacaaaaggcaaaacgataaatacggaatgaatctgccataaaattctatcataagaagaatcaaaactcaaaagcagcactacccgtgagaacaactgctgcatatgtgggaaacgagatgcaatagaaggctactaccatgagatgaatcaaaagtcaaaattagacctactggtgagaacacacttctgcatatgcactatgaaggagcgcttgctatgcttatcgtaccttcttatcagtggtactgccgtacattgataggtaggata

SEQ ID NO: 73477 - DNA, 535 bp, Glycine max
  Clone ID: jC-gmfl02220075h06d1
gcagaaataggccatgcaacgccactctttattatatctgtcatcatatttacatacagaaaatcaaggtgaactccacacaatattaatattttcactttacagaaagtgcagtaatatataaacacgtagaccattgtattgcatccatcataccggaatgaaggaaatttacacactactaaattttccggatgacttgaaaaaactaatcatagggtcataaagatcttgttttgcttgcaagcttaaaatgaagtcaacatgaccatagttttcaagataaaccacttccggtgtggatggcaattccttgagtgtgtgctggaaatcagttatatctgccaaagcatcatttccaccataggccatccacagaggcaatgatttgggtatgcgactaaggtcgaattttggtggattgaacttgccgtactctatcagattttttagctttccataatcatacttggagtaggtacctctgcggatcatctggaaaaggtgtttcaagtttttggaggatgatgggtga

SEQ ID NO: 73478 - DNA, 452 bp, Glycine max
  Clone ID: jC-gmfl02220075h08d1
aataaaactacatggtattggcaagaaaacgcgaaaaccacgaccacaggatactaacgcacatgtacgtaacacttaaaaatacatacacaaattaacatgggcatgtctgatgagatggacgtcaccacacatttagtgcacataaattaaataagcatcgtgacgaggatatacagattattccgatccaccatgtataagcaaattaattaagaacacggttaaatgaagcatgtctcttgtttcttagatagcttggccataattacaggtttgaggagctcctggaagaccctatagcctttgctgttagggccctcaacacggactggtggtagaatgcaacaagagcaagaccgatgaagggtacaacccagaagatgcactggtcatcccaagccttctcgttcgtgaatatgacagcaggcccaaagcttctagctgggttg

SEQ ID NO: 73479 - DNA, 286 bp, Glycine max
  unsure (1)..(286): unsure at all n locations
  Clone ID: jC-gmfl02220075h09a1
acaaccaccaaaatactaacaattaaaaaaaacaacacaaacaactaccataatcaaacaaacaactattaccaaaacttaacaccaacccacaacccacccaacaaacaccttttnacaatccccccccttttaaaaanncnnaanannanaannaaaaaannaaannaanaaaaaaaaaanaaaaaaaaaaaaaaaaaaaaaaaaaaattaaaaaaaaaaaaaaaaaaanaanaaaagggggaaaaaaaaaaaaaaaannacaaaaaaaaaaaaaaaaaaaaca

SEQ ID NO: 73480 - DNA, 415 bp, Glycine max
  Clone ID: jC-gmfl02220075h09d1
gagcatagaatgcatataactcggtgataaaacaaaggctttgatgatcatcatataataaaaaagtgatatgataaatatagttgggagtgacagccaacaggaacggaggaagagatccgtgatctggctgatagaaaaaagacacttttatactaaaaaaagacagaaggcaaggcagtgaaaagagtttaccgtacagattctaattctacacgaggtgaatatgaaacagcagcccccttttaaaagtttttttttttttttttataaaaagtaaacgggcttttttggtcgatcgagacaaatcttcacaataattttgccccatggcgctccaggtaagaatcacagttcgaccgattcgattcttcacctttttcccctaacaatcccacagaatcgctaaacatta

SEQ ID NO: 73481 - DNA, 531 bp, Glycine max
  Clone ID: jC-gmfl02220075h10d1
aatcattaagcttaacaactttattcaaaaaaataacaagcagcgtgtacaagagatcattattaacttactgtggcacctaatttctgtgtttaaaagtgtctatctgattgtatcaagctgacttcatgaaatagagattaacaatccatttgctgcagtcacttcttaagcagcattttttgattcaagtgttctgtgaataataattgcactctactttctataaaaacttcgatcaactaatgaatccaacacttcgacacgtacagaagaaagaatatttttcatggagatccctcatttccatttgtgaggcatgatatcagggtgaagtcccaaaacatgctctggcataaaatcatggcgtgttagaatcccaacaactggaggtctcccttggctctttggaacaacacacatgtgcctgagtccatgttgtcggaaaagaatagcagctttggctagtgacattgtctcaccacagtgtaaggagatgcattagttatgggatggagatcaacatacata

SEQ ID NO: 73482 - DNA, 523 bp, Glycine max
  unsure (1)..(523): unsure at all n locations
  Clone ID: jC-gmfl02220076a05d1
cagttcaaatcaggtgttcattcacatgaagctctggttacttgtttcacctgcaccactactcttgcgtttgcttttggagccactagaagacgacggattagtatgccaattcctttttctttgatttatgaaccagttatttatctgctttaattgcagccctgtttcctgcaccaaccttgccttgtcctcttctgttggatatggccatttagaatgtgactgccaccaagcttttaaaagggaagtggtgtcgcctggtagctttcccgctcttctctttcgtaaaatttcttctcttatgtccacaatcttgtccttgtaaccctgttttaactcatgcttcagctcctgcctcacacgctccatcaaagatctttcagtttctgtgggaacaagaggaccaaagctgagactatcagctccatccatgcttccttcgaacaagttggcattactctctgcctgatcttcttcatcgncggacattgttgcacccgttccttcaccgggagataca

SEQ ID NO: 73483 - DNA, 325 bp, Glycine max
  Clone ID: jC-gmfl02220076a06d1
aactgagataataatggaattatgaatgttcttggtacaagcgaagaagtctttagtgcgattttcaaaccgaaattctataataccatagtaagaactaagaagcaacatgcaagttcagaggtaggaaaagtaaagaatgactgctttcttctcaaataagagtagcgaaatccaaacacaaataagttcatgtaaagagaatttcattggtacatgaactttataatattaaacggggtaagaactcattgtgaccttgaatgaaataaagaaaatgaccttatgcatatttttgcaaataagaagctatcgcctattcact

SEQ ID NO: 73484 - DNA, 516 bp, Glycine max
  Clone ID: jC-gmfl02220076a07d1
caaacacaacagttcatctgctaatttactcattaaatttgggccatttgacccctaacatcggttaaataatgttacaacttacaaatggatcaaaatgaagcacgtagtgcttggtgattcctctaaagtataatatgaatgcaattgacaggacttgaaactgccatgctatacaaataaccaatttttcaaataaggaggaaatgtcatccttaatattattttcacatatacctgttcaacaaattggccagacatagtgtgaagctttcttcctatgatatatgcttttgggtaacctgaatttccaagcctcttgaatttattggaaaaagggtaaattatcagatgaaatcgggttgacctgttgaagttaagcaacgatgccacattcgactgttggggtccaccaacctaggatgggatatcacttcggggatgggaagagtaacatagcgggtggtacataaacctactgtaatgccactatatcctgcaaacgcaccatgaaca

SEQ ID NO: 73485 - DNA, 338 bp, Glycine max
  Clone ID: jC-gmfl02220076a10d1
aaaaaaaaaaaaaataggggggttttttttttttttttaaaaaaaaaaaacccttcccttttttgccccgcccccccccaaaaaaaaaggggggtggtttcaaaaccccccccccttttttttttaccccccctttttttaaaaaaaggggggggggtttttttttcctttaaaaagggggtttcccgggttaaaaaacccccccaccccttttttttaccccgggggaaaaaaaaaaaaaaaagggggggggaaatttttttgtttttttccggaaaaaaatttttttttgccccaaaaaaaaaaaaaaattggttttaaggggggccggcctaaaa

SEQ ID NO: 73486 - DNA, 291 bp, Glycine max
  Clone ID: jC-gmfl02220076a12d1
gttaagagccccctcgaaaagaaagggaaaaaatccgagctttcaaaaaaaaaaaaacacttttggatcaaccccctcaggaaaagggatttatctaaaagacctgcttttcttgcccgccaaaacacacacagagggccccagagattttgtgtctcagatacatgcatctatggtggggccctgaggctctcattggagactttttccaacacacaattcttagaaattctaatttgtcacaccaccttttgcaacccattttgctcctggaaggcccttatagagacc

SEQ ID NO: 73487 - DNA, 525 bp, Glycine max
  unsure (1)..(525): unsure at all n locations
  Clone ID: jC-gmfl02220076b01d1
ccacacaaagattaaaatttcccagatgataaacgtactaaataccagatccaatatgaaatttgacaaatatgattatgaaactatatcttcaaattcacaaaacaaaccgatctcagcactccaccctgtcctagagaagaacaaaataatcaacacacctctgaattaaacaatagttttaaggccagaccaaagcagccaagccatctggccatgcaattccacctgtatatggagacttgagtactggggagaaggaacaataaggggctaaaccaaatccagctttctattgaattctctgagacacctttttcttttcctcacagtctcccaattatactacaatacaaaagccattgtagaaacctcagccagcatctgcacaatgatgcttctttcttttttcttttcatccaaatccataataaaactctactactgtcctcctgagccttgagaatcatccttagcaggagtttgctgatgctgnntgtgctgatgctgatgctgttgatgcac

SEQ ID NO: 73488 - DNA, 533 bp, Glycine max
  Clone ID: jC-gmfl02220076b10d1
atcaataaatcaacaattttcatgtaataaagaaattatacaagtgccatcattttacagaaaatgaaaaataaatacaaatggtaattccttgaaaaagaaaaaaaaaaagtcttacaattatatcctggttaattgtgctaaggggaataaaaaaaaatccaaaacttgcacttgctttgttgctctgatagcacattgcttgcacccgcgcccctttcctgagtatttacctgtggggcgggtcacagctgagaccaggtatcagcagcctgctgataggatcgacagaacatgagcatgagctcctgatttacaattttttaagcaagaacatgagctcttgataggatcaaatgagtacaagcaacgtggcccgacaactttgtgccagatgactgacaactgttcaccatggcaatctactggtggatgcttctgccttaaagagcaaccagttggaaatgaaaaggaccatctccttcctaattttccattccctcaatccagtcatacttagatccacactggga

SEQ ID NO: 73489 - DNA, 386 bp, Glycine max
  Clone ID: jC-gmfl02220076b11d1
gggaaagggttttaaaaaaaaacagggggtgggaaaaaattttgggccccccaaataaacaattttccccagccgggcccaaaaaaaaaaccaaaaaaaaaaagggggggggggggggggggcaaaaaccgggtggaacaaaaaccccccttttttcggggaaaacccctggtgtttttttcccccttaaaaattttttgggcttttccaaaaaccccttggggggaccccccttttcccccgttttgggattaaaaaatccccccaaatggttaaggaccccccagggggttggtttaagggggttgtaaaaaaaaaaaaccttttattggggcaggaaggcaagacccccccctggggaaaataaaaaaaaaaaaaaggggggg

SEQ ID NO: 73490 - DNA, 465 bp, Glycine max
  Clone ID: jC-gmfl02220076c02d1
aacataaaagattaaggaatttcattaagaacaaggaaagggatacaattgaatagttacatcataacccatagactagggtgactagtcgctcatgatcagagcacaactcataatcctatatgaaatagacatagacataccaataaggaagaaacaatgatcatgatttgtccttacggggttgtctacacttcacaacttttaaaaccctcaaaagttctcaaattcaaaactaggtaaaaggtactaaagatacaagatacgacccatatttataatttctcaaaaagatgtcaatcagaaaaggcacactatgtccgtgatgaaatccattacgacatgggcaaaaagtcatgacgttgaagctctgggcgttgtggattgactacggcccttatgagttgactacgaccatgatggaatttaccacgaccattgtcagaaagttggtgttgtttggag

SEQ ID NO: 73491 - DNA, 519 bp, Glycine max
  Clone ID: jC-gmfl02220076c09d1
aaaaaagaaacaccaatcatcgggcatttagttggattgaacatttagagctttaaaataatagcagtttcatattgtcttccctacaaacaacaggttacataaaaacggaaacaaacagaaccagttttatagaacagtaatggaaactagatctagccggaacagaaccatcccctcaaaagagacaatcaaccggcaacaggaagttgcggcatgttatacatcttcaagccaccgcaatacattaccaagttcaaaatcacatatcatgttggccatactcctcctcctcctcttcctcctcatactcatcctcatcagcagtggcatcctggtactgttgatactctgacacaagatcgttcatgttgctctcagcctcagtgaactccatctcgtccatgccttccccggtataccaatgcaagaaggccttcctcctgaacatagcagtgaattgctcactcactctacggaacatctcctgaatggaggtagagttgccaatgaatgttg

SEQ ID NO: 73492 - DNA, 569 bp, Glycine max
  Clone ID: jC-gmfl02220076d01d1
cccaagtaaaatatatcttctattacgctggtaattttttacttgggtttatttttaattttgagacattctacgtacattagtttcacatccctcagaaaatttccaaaccacgacagtggttttcctatgtctagtctctctagtaatctgaatcattaaaaacagaactgtaaccaattatagcttgcagattgcaaacatgtaatactcagtttggtacaacaaacgggaaatatgacaaatactcagaagagagcatgttacctaagttttagatacataggaccaaatttttttccatgagctaatcagtgttcttgtatgagcagaaaaatgtcctccttccatgattctttcagctgtaggtcccacttcgtggacgaatttgacggattccgagagtcgattaagaaggttcgtcaatgcaattacctcattcctttgcagctgcagtgtatgactcgagttttcttgaccatcaacagagaagagaatctttaatgcagttccaagaccaagaacctgaagcttaccccattatcgacatttctcacatcctacacaat

SEQ ID NO: 73493 - DNA, 524 bp, Glycine max
  Clone ID: jC-gmfl02220076e03d1
caatcatattctatcaaatatttactcaatatatatcaccatataattacacatatgcgtctaatttttgcagcaatagcttgcaatcataattcccacgtgatacagaaataatgggattggtatatggtgccaattaattacttctcgtcccattagacactatgattgtattaaagcctcttcagtcacgtacaaaacctgtcgaatttgcaatggcttgtgctcattctcacggatgaatctctagagccatttgttctactttcacttcgctttgctttaaattagtgtttggtgacttattctcaaaatctgactcaattatacgcagttttgggagtttctttgttgatggaggaagtggtccttcaaagttgttcttctccaaatgcaatgtttctaactccttcagtccactcaaatctgggatagtgcctgagagtttgttttccccaagccacaaatgctctagtgcacttagacggccaagagttgaggaagtgaccctgacactcagcatt

SEQ ID NO: 73494 - DNA, 140 bp, Glycine max
  unsure (1)..(140): unsure at all n locations
  Clone ID: jC-gmfl02220076e06d1
gcacatacaatcagtcactgcataaataaggctactttatatttaaactattaaatatttaaatataattattattaatgatcattataataatcatcttattaaaggggaggcgagtanattgaacacctcggaatacc

SEQ ID NO: 73495 - DNA, 393 bp, Glycine max
  Clone ID: jC-gmfl02220076e09a1
ctagttctagatcgcgagcggccgcccttttttttttttttttttttttttttttttttttggtgttttttttttttttttttgcccttcccctccaaccttgttttttttttttaacaatatatcccggaaattgggggaccctggaaatgggacctttccccctttggggagcctttttttaacaaccccctgactttttgttagccttttggcgcctagtccaatatttttgaaggcggcccctggtttacacattttaaaattctgcccttaagagtccggttttagaaattccccaaaaaaaaaaaaaagggggcggccccccatttaaagccccgccgccccgaatttttattgcggaccgggcccttggagagttcccgctttccc

SEQ ID NO: 73496 - DNA, 479 bp, Glycine max
  Clone ID: jC-gmfl02220076e11d1
aggcagcgaaaggaacaattttattaattatatttacccactggattctccatttggttacacgtagttccaattcagaacaccaaaacactttcaagaatttgtcttaacagaaatttccactttcgttaatgatggagattcaacattgaaaccaaattattgcaggcaacttctcttctgttggtccgtgtattcaaacacaattgcaacattaccaaaacatgaattctggtagtcgtctaactcatgcatacaacccatcaatgttacattccccaagaaaaaccttgatgctgcgtggtgaaccacagctgccttcgacaatcaatgctctgtcattggcagccatgtgtgcgataatcttgtaaatcatttcgatatcttcaggagcatggcaacggtctgctacttcttcgagggtcaatggttctacaggttctttgcagcttgcctcatttagcactgccaacactcgc

SEQ ID NO: 73497 - DNA, 410 bp, Glycine max
  unsure (1)..(410): unsure at all n locations
  Clone ID: jC-gmfl02220076e12a1
gcggctgttcaagctgcaatcttaagaggagagggcaatgagaaggttcaagatcttctcctcctaggaagtcacccctctgtctctaggtttggagactgccggnggagagatgactgtcctgatccctaagaacactacaattccaacaaagaaggaacaagttttctcaacatactctgacaaccagcctggagagcttatccaggtctttgagggagaatgagcaaggaccagagataacaatttgttgggcaaatttgagctatctggcattcctcctgcacccaggggtgttcctcagattacagagagctttgacattgatgccaatggtatcttgaatgtctctgccgaagataaaaccactggccagaaaaataagatcactatcaccaatgacaagggta

SEQ ID NO: 73498 - DNA, 532 bp, Glycine max
  Clone ID: jC-gmfl02220076f03d1
aaatccaacccctctctttcttttttcgcatctaacccctcatttatgtttttttccaaactaaataaacctgaagcacaggatcatccaaagaggctcagaaacaagccaaagaaatttcaaatttgccatgaaatttcactttccatcattccattccaggctactactcttggcttctctcgtcccgttcccactgtacactaaccaatattattattccctaaaaataaaataaaaaaaggaaaacagcttccttttttttttttctcttcccttgatcatagttcttcataaacctcattttgtgaaaacactaattaggtcataataataataataataataataattacgaatccaccctgctaatcccaattctcttcaccgacacgttcctaaacccttccatcatttccataccctgaaaacacatcatcccattctgctgctccatgtaactcctcacctccttccttatcatctcatgcatcaccgccataaactccgcattcaaattcaacgcttctaa

SEQ ID NO: 73499 - DNA, 501 bp, Glycine max
  unsure (1)..(501): unsure at all n locations
  Clone ID: jC-gmfl02220076f07d1
cgaaaataacaagtcgctgtgcttgaccttttattattattgtcattattttggttctgcctttgggttatatcaaaaacagtaacaaccatcaaagccgctgtgaagacagccagacatgcttattaacatttacatgcaaataccagccattacttcataatagtatcatatgccaaatacagtcaaagccaccactgaatccagttacttggaacacttagaagataataactaaaaagctataggaaaatgattacaacttttgagccaaaatggaagcccaaataattgtacaatgccaacttaggcaaccggtggacggagtacatgatcctgtgaggtatccacggcggccggaggcataaattgccacatggcaactcccggatagctgatgaaaggcaccaacttgttgccaggggcttggccttgtggagcaaatgcagcagggattgcaggagggggtggcaagaaagcangttgagcattcattgattt

SEQ ID NO: 73500 - DNA, 452 bp, Glycine max
  Clone ID: jC-gmfl02220076f10d1
aatatataaaaatatttatatagcattgctcagaaattaaattatttgcaatggaaggaatgagctttctctggatacatcagctagaaaaggaaagcaacaaacagcaaagaaaacaaacagaacagaagaagaaaaagaaactaagaactctatgtaagagatgcaacccatacataatctggcataaaaaggaataagggttgtttgttctatttagtctggcaattaaaaatttatttattacaaccaaaccattcatttagtcttacacttgtctctcactcactcactgacagagagcacatgatgttttttaagggccagtgatgcctcatccggtgctgatgatccaaatttctgaaactgaacccttaatatattctcctcagacaccaccaaacgcctgtttccatcatcatcgaaatgaatcccaatatgcccacatttgc

SEQ ID NO: 73501 - DNA, 554 bp, Glycine max
  Clone ID: jC-gmfl02220076g03d1
aaaataataaataaataaatgattgataatatatagctagtgtgacaaataaattaaaatttgccttcatataaataccttctatctctctatattatctagggaaagaatgaaaccctaacaataacaaaaattatttgaacaccgggcagacccaatctaacttctgttgagcaagcaccaggtcaattaaaaggaaaagttggtccttagggcttcctcagggcagatgctgcacccattacaattgccaggacaaggccaagaccagcaccaacggatgctcccacagcagcagaattcaatgaatttgccttaacttgagcatctctacttgcctcaatcgacattgcttgttctcgtgccaactccatcagaagcctatctcttgcaaattccctgaaaaattccccacctgaaaggaagactcctcacgactgcggagtatacagtggatttgctgacaaagagaatttacgcctttcactggaaaaacaatctcctttttaggaaaggcttcctaataaagtaataggagcaaatatagcttttca

SEQ ID NO: 73502 - DNA, 540 bp, Glycine max
  Clone ID: jC-gmfl02220076h02d1
aagtgaaaatgcatcacttgttgattagtttagtgccctcaactgtggaaaactcatacaccagaacattgcttctccccaaagcattgaaactcctaaattaaggaacatttgttatataccttcctattcccctctcccacaaacactagaattcaagtgcaggatattttcacaatacaagaggggccttgaatgtaaacaagcttaaagggctcatttactcttacaaccactaaaaaggatattaaaaattacagacaacagcattatcttacaagataaagaaacaacaattcaaacaaaccacatacaatcaactatgcattttctgaagtcttgagtgtgttcaggaatcattcagccaccttcataccagagagatagactttactctgaatcacacttcccccaatccaaaatccaggcataaccatcaaaccaactttaggtttttcatcattgtcatccattatcaaattcttgaccacactttccatataaacatcagagaactcactcccttcttaacctgaaata

SEQ ID NO: 73503 - DNA, 361 bp, Glycine max
  Clone ID: jC-gmfl02220077a03d1
agtggttattttttttgttttgttactgaaacatcatgtgaccacaacaacaacacaaaaaaaggaaagaactcgagcaaccaaaaatcgacaacacgaacaaaaccgagagtaagagaaataaaaaacaaatagaaagaaccagaaacaaaaccaaaacaacaaacaacaaaaacataaaccagcactacagaaaactgaagaacagggaccagaaatacagaaaacacaaagggaaacaagagaaggaaaagccaaacatagcagcagggaacacgccaccgaagacatacactggggaggcaggacaccaagacgacacccgcgaacgaaaattcgaaagagggaatggaaaacaccg

SEQ ID NO: 73504 - DNA, 364 bp, Glycine max
  Clone ID: jC-gmfl02220077a04d1
agagagaagtgacacattggccaacctgggcatataccaataaccagaatgtgataagtgacaaaattccagagtcaagactacagcaataactatatatgtaacaaaagttgaaaaaaaaatgatttaaagaaagacaaactggccttaagcctagccagttcagacattcaatcctttccttccaaatgctcgagaatggattgggctcggtgctgttgcagagcagtcacagtcaaacacttgatgcccatttctctgattctaggcgggattatcacaccaactgtttcagttagatatctacacaggaaaaactttatctgcaagcgacaataagggagcagattcattcaaaacaact

SEQ ID NO: 73505 - DNA, 489 bp, Glycine max
  unsure (1)..(489): unsure at all n locations
  Clone ID: jC-gmfl02220077a05d1
agtgaaagaaaaaaaaatatatatatgtggggcgaaagctacaatctagaacagttctgaagtctcgacacatttcagtagataacattgtttggtttgccatcagtgaacctctacagagaatggttgtttgagcatgttacatacaattgaaagggcatctagccgagtcggtgcataacctaatcatcattttcaacagtaccatctttgaggtgaaaatgtttttctctcttctggaactctgtcaaacctttcccacttcccgtcacaccaacctttccctgaggatcatcaggagatttaaaaatactctcccgttttcttccagagaagaaaccaatcttctttgcctttcttttggttgactgaaactgctgccaagcattttgccgcttttnntgtgtgacttcaagttgctccatccgcatctntgacttaaagcatgtatttcttggcgtttgaagctttacatctcaggatcatcag

SEQ ID NO: 73506 - DNA, 362 bp, Glycine max
  Clone ID: jC-gmfl02220077a06d1
ggggttatggttactttttttttcagtttttgaagtttctgacacaataaagcagaaaacaaagaaaggtaagccatcaatgaaccctcaccagagaatggatgtaagagcaagaaacatacaaaagaaagggcatcaaggcgagaaagtgcaaaaccgaaacaagagatgcaacagaaccaaatttgaggcgaaaatgaaccccgaacctctggaactctgaaaaacctaagccacggaccgacaaagcgaccttgccatgaggatcatcaggagatcgaaaaatactctcccgtacacctccagagaagaaaccaatagtctaagccaatcctttggatgacagaaactgctgacaagca

SEQ ID NO: 73507 - DNA, 518 bp, Glycine max
  Clone ID: jC-gmfl02220077a07d1
ctgcaaatgtcaattttcctttcaccaaagggtgcaaaatttaagttacattatggacagtaaggtccacacataaggtcctaatcaaaatacaaaaaagaaagaaaaaaaataagccttagttaattttccgaagaaagatggtgagtacacaaaacaaaacccctttcaatttctctgctctcaattaaagaccccttttttcattgcagcctctattattattcatccctttcctttctaatcttaaccactttaaacttttggaactccaatggctacccttaactctcttgaggcttcacccttttgcatctcaatgtcgttgtttgtttcagcatcttctaccacagtctccaacctcatcccattttctgaacaacacttcaatacctcaatggttatctctgcctctttctctttggtctccttgtgcttgccccacagaaccgagtaaagtcccattactatgagaatagctccaatgaccccttcaagaatattttttctgcaaggat

SEQ ID NO: 73508 - DNA, 515 bp, Glycine max
  unsure (1)..(515): unsure at all n locations
  Clone ID: jC-gmfl02220077a08d1
gcagccaataataaagacagtgccacttattttcatttataatagaggcaaatataaggtatacatagatgagccagctagctaataagacataggcaactgaacacaacacatgatatccccacaaaggataaatcataagacgtacaaaagcacaaaggtaaggactattattaattcatggcccttaaaaaatactaaaaacaccaagggggcatgcaaatgatacatatgtaattattattaattaagcaagaatctccttcaaaggcttggcctcaagttttgccttctgatcaagttcttgcaaatgcttttcattctcaaggtcctgcaaatgcttttccttagccagcttcttcatccttgcaatctcaatgtccttgctcatcttcctcctgtacatttcagcaaaagtgattggttcctccatcacaggcttctctccttctcttatcttcagagggtaaacagttgcatttggtgctgggttntgaaaagtggctatggacaaa

SEQ ID NO: 73509 - DNA, 538 bp, Glycine max
  Clone ID: jC-gmfl02220077a09d1
agcttgtaaataaattccattcttaagggcagttttaatatgtaacatgcaggcagcgttggacctcattgttaagaaacaagaacatggtgttgtatcatggagcgtactacaacttaggtctcatctagtacagtaattaaatattaaaagaatttcagttgaattctcttcggcacgtcttaagaacacgctacagtggctgagaaacctggtgaaacaacaattctgggggcagaaaaaagtccacctttgtccaaaactgatatcaggagatcatgccattatgacctcaactcttgggtttctttccataatgcttgagactattcttgaataaaaggtgatcttgcatctcaggagtgtcataattcagaatataacaacaaaaagacacaacctttacttaattacttcctgatattgaggagctcaaagttccgcagaggatcatcacggcctcttatagagccaccatgcgtataagttgcttggttggtgtcatacactggttgaactctgtgagcaccagatggac

SEQ ID NO: 73510 - DNA, 501 bp, Glycine max
  Clone ID: jC-gmfl02220077a11d1
ggaagaaccaaactgagcttattatgtgcaaagaaagattaaagaaaaaagtaaatgacacgtgcttttcatagcaccctgtaacagctatctcaccgggtccattccacttccaaagaacttctttcctttgtagttttgtacaattaggaatgcagtcaccatttgcccggataaaaattattattattttttctttttctttttcttttctccctttctaaagcatcagcagcagcaagaatttttggtttagaacttaaaatttgaattcattagcttttttttttcttactttgtggtccacgtggcacatcgccacaccatcgtgatcggcatgctggcatggcgggtccccaggaatagcatcagccccacatgctattcagtcattcactctctcaaccaccttaggatcctccatgttcttacagatgataggtctactgacccaagtgtaatggttaattcctctatttgctgtacactggtatggggcat

SEQ ID NO: 73511 - DNA, 463 bp, Glycine max
  Clone ID: jC-gmfl02220077b01d1
gaacttaatagactgtttactttttatcaataaatcaacaattttcatgtaataaagaaattatacaagtgccatcattttacagaaaatgaaaaataaatacaaatggtaattccttgaaaaagaaaaaaaaaagtattacaattatatcctggttaattgtgctaaggggaataaaaaaaaatccaaaacttgtacttgctttgttgctctgatagcacattgcttgcacccgcgcccctttcctgagtatttacctgttgggcgggtcacagctgagaccaggtatcagcagcctgctgataggatcgacagaacatgagcatgagctcctgatttacaattttttaagcaagaacatgagctcttgataggatcaaatgagtacaagcaacgtggcccgacaactttgtgccagatgactgacaactgttcaccatggcaattcctggtggatgcttct

SEQ ID NO: 73512 - DNA, 280 bp, Glycine max
  Clone ID: jC-gmfl02220077b02d1
atataacaagatttacttaacaaaaccaaccacgatggatacaattaattctctcctatttctgccccccaccaaaatcgttgagccattcaccatatgatatcaagcatagcctctcctcggttatatacactcatctctgtacacactcgtcaacgccaaaagggctttaaaaatgtaaatctattacacctattggaaaaaacagatgtattgagatattataagctatgctctagcggactgtacatcattcatccctttacccacccaaaagaaa

SEQ ID NO: 73513 - DNA, 450 bp, Glycine max
  unsure (1)..(450): unsure at all n locations
  Clone ID: jC-gmfl02220077b03d1
aatcagaattcagtaatcacttaagctcaatatcaatagccattgttggggggtaaagttcaaactcccattgagaaactttactacatctaattaaagatgaaattgattaaaacataacttaatttcaactcacagcctacaaaattacaaattaaaccatgaaattcaaaacagaaaatcctatgacataatgaaaatgcaaatccacaaaatctggtgctgaacaatgaaagcaaagcaagctgctccttttgtagtttgtgcactatccatgactcaaagcatgcaatcagttcttgcaggcagcctcctgaagaaattcagaggcaccgaaggaangcttgtggcggaacctggggtgtctcaacacatagattccagtgaaaagtgcgacaatttggaaaggagtgacatagagtacaatggcagcaaccagacagaaaatca

SEQ ID NO: 73514 - DNA, 410 bp, Glycine max
  Clone ID: jC-gmfl02220077b05d1
ggaaccctaagcctatggttggctataaattaaatcgggataaaacaaatttttctaaaaatcagatacccagatttttcccgggttgggccggtttttccaagggttctgggaaaaattatgggagtttaaaagggttttaaagggcagggggtaaagggttaattccaaatccggggaataaccattggcccaaaaattagtaatacccccccatacgggcaacacaacaataaaaaatttgaaagcacaggttgggtatccaacttattttgggaatcaggtttaaagcccgcccatttaaaatttttgaaaggcgcgttattttcccaaaaatccacgtccctaaaaaaaataaaaactttttctataccctttactttaaccacattcggcccataaggaatttt

SEQ ID NO: 73515 - DNA, 420 bp, Glycine max
  Clone ID: jC-gmfl02220077b06d1
ttccaaatgtgacgggatcgaacctcctcagcctctcagcttcttgggaactgatgacacactccgaaggagggactttgtatctgactttgtcatagcagtaggagtatgtcatgtgcttcttcctgaaattctccattttgattctttgtgctggtgtaacaccagaagaaggaattgttgtagttgcctcagaactttgaggagcattgtcacacttggccacgtgctgctcaattggatccactgcacaaccgtgcagaacaaggtcagagaattcagcaacatagggtgcatacttgtagttaaccctgtatttgcccccattggtagcccaatcagatgcatcccatattgttgcatacaaagtcattggcttagaagggaaatcccctccatagattctgttcgagtcacttc

SEQ ID NO: 73516 - DNA, 434 bp, Glycine max
  Clone ID: jC-gmfl02220077b07d1
gagggaagtcctttttaaccaaagtcaacagaaaaatcattatttaagtccaatgattcatgggaaacaacatacatttgccctttcaattcttaataaagagttcttttcaagaggaagcaaaccgggacttgggggttaacacatacccaactgagaggcttaggggttcaacacaaccgaacctgacgtatttcaattctccaagtcttcgggggcttttgcacccttaaacaatgggaaagtttgattaacacggacctttaacccaccgtaagcaacgttagcaaacaccttttcagcagccttcaacagcttatcccgaggggcaacattttggattagactaggcctagtcaagaaaagggattttgcaaccagggaagattatggaaccggattaggtgaaccaaatgactgcccaaaacttacca

SEQ ID NO: 73517 - DNA, 518 bp, Glycine max
  unsure (1)..(518): unsure at all n locations
  Clone ID: jC-gmfl02220077b08d1
cttcttcagtacgtgtctaaaatgtgccatatattactgtaagaatgagagtacatctatcaaagacaaactatttacagaaaaccaatgagggggcaggagaggacatcgagcacaagtaaaaaaaatggcattaagcagcaacctttcaccaactagaatcattagttttcttttgatacttatatatataaatttgtgagaagagatcactacctgatccttgaacaaattgcatacgagtgaacttccctcaaattctcaaccttggacttggcttgtcaaatagccaaggcaagcatcaccaatttaagaaagattaaaccagcacctcaaccaaaaactactgccaagaagcactctgtccacttgacatggctcgagcttcagccaaagagacagccatggcgagcatcatctgctcctcaaaactctcgggaacaatgggttctgtggcactttgaaggcttccatcattgtcatcagaccgtggcanagatgatagttcaccacgatct

SEQ ID NO: 73518 - DNA, 523 bp, Glycine max
  Clone ID: jC-gmfl02220077b09d1
gtaacaagcatgggaatgtaatattctcaagtgcacattactgagaatcttccttcataacttacgacaaacggcttgtaacaaatattttatatcccacgtcaaggaatatgctgctgctcggttaagggactcatatctaatgaacgcaaccaaacgctataaccgctatcactgtttcaattatagtttgaaaatcctaatccacgggaaaataaaggtatgtaaataaatttagaccttaagatagattctcctaaaatcagtcccaaccaaaaccaatgatgcatgttatattttggaatttgacctctagctactgctttgaagaatcatcatgccaataccctgcttctgcagagttggacttaaaaacgcatcatcactgctgagtatggccagcccataattgatgttggtacatcggcatggtatgaatcggctggctagcattattatcgtatagtccagggcctcctggcccctgactaaaatgactattctcattatcttcagatgactc

SEQ ID NO: 73519 - DNA, 546 bp, Glycine max
  Clone ID: jC-gmfl02220077b10d1
ctataggaaacaatgtaaatttaaaatcaataattaattctatcgtacaacaaagtttgcaaaacttgtaagctagttttgacagtcatgatagcattcatgaccatatagctacttattgccaactattactgtctacaagcttaagaccccagctcatatcctcacagtgccttacatgtggaacaagtgcaccagtatcagttcctctcttagccttacaatcatagaagggaggagcatggaagcatggctccatcgacatggcacgttgacaaggaggatcaggagctgttccattctcgggcttgtacagtatccacggtttcaacccttcaagcccctgcgccacgtagccgaaagtagaccacgagctcgtgaccaacatatccatcaagctcaagaggtaaatttctgcccaagctttttggttgtgcatcttcttctctgtttgttgatacccttcatggcttggctggtaaatgccaacaacttctcctgtcacagttgggtgttcccaaaacatgtctctcaccttttcaaaat

SEQ ID NO: 73520 - DNA, 512 bp, Glycine max
  Clone ID: jC-gmfl02220077b11d1
acaggacaataaaagaagcaatgcattaaagctgaaagtagaaagtacgttcatcttcaaaggagtgtaaaagagggtaatatatattttacagaatttctgaaagagcagaaaaaaggaagtaaagacaagaatgatttgtgactcaaatcctggaagggatcataggaatagtgttctgtaagtatgcactggcagcagcaactccacttccaagctttacaggataacccacatctttgagtatcatctctacaccagctagacatcccaacagttgcaactcattcaagtggccaagatgtccaattctgaaaaccttcccagcaactttgttcagtccaagacctaagctcaaattgtatctcttccatgccctcctaactatttcagtactatcaatgtaagcaggaacaagaacagcagtcacagtgtcactgtaccactcttccttttgggtgcaattcttcaaaccccatgcctttacagcaagtctggttgctttgcctaaa

SEQ ID NO: 73521 - DNA, 458 bp, Glycine max
  Clone ID: jC-gmfl02220077c01d1
atacaacgtggagtaatttaatcttacatgtttcaagagacaatgtccaacttctgaaacagacatattgacggtataataacaaaactgaaagttggtaacggggaaaaggtataagaaatctcaacaaggggattgaaatttattcatgcaaatttatggttcattctacctccataggccaatttgctctcatcagatcttcgacctgctttggttgccacgcttattctgcttgagttatggcaacagtcggaacttttggaaaacttgcgatcatgagagctaaacttcatcccaggatagactttagcatcatcctcatcagataagctttcatcatgcatagagccagagcccctaccctcaaattacgttgatcttgatttaacagcgcatggggttaagcatggatttagatcattcagtaataggtcgtcagattggtcatcagagct

SEQ ID NO: 73522 - DNA, 392 bp, Glycine max
  Clone ID: jC-gmfl02220077c02d1
atggtaaataaaattcatttcttggtgaaaaaatgacaaataacatgaattagaagcgcatttttatccaccacattattgggctcagactaagcaaacctaaaataaaaggactcacgaaatatataactataaaatctcacaaaacaatctatgcaaacaaaatcacactgtctacttaatttctaaggctctaatttaaccactttttttgggtacttcttcatagctgcacttaagcctgtataatgcaattctagtaataacagcactttgtctgtgatgatttgtatcttcttgatgatggatggcaatgaaatcttggaaaggacttttttctttccgaattgaaaatgatttgagctaaactagctgtagatgattttggtact

SEQ ID NO: 73523 - DNA, 455 bp, Glycine max
  Clone ID: jC-gmfl02220077c03d1
agaacacttaacagcaatttatacaaacagaatttcttcattaacacttaacagcaaacacgagaacattcaatcaccccaaatacataacttaaccatacataggtagatgaaggaatcatattccttctattcacttttattgaaaaccagggaaagtactgcaacaaccatagagcccctagatggagatactgttgggaattcctctgaaagtcaatccctcctcactagaaggatagagcaaagtgtaaggcattttagccggcccactgcggtttctcaacgtctcgtccttgatcttctgtataagcttttgttcaatctcttgaagcttctttccaaacctcttgaaggcctctagtggaccagcatcagaagtccaatagtcaccaccatctctctccccaaggtagaactcatcagatgtgtgccttgacaagatttttataatt

SEQ ID NO: 73524 - DNA, 507 bp, Glycine max
  Clone ID: jC-gmfl02220077c04d1
gttacacagcactatttatttattttttttaaaaaaacatcatttttatataattatgagttcatctaatcctggcacaacttcccaattatgctatatatggtacatatgagcatcaatttccccagtaaaactggagtccctgatatcatatagaggatagattacatttttcttaaattgtctaaccttgcctgtaaatcactatctatcccgccatcatcattcccagtcgtttcaacttgaggtacctttgtctttgcagccggggcagcaacagctgatgatggtgcatttacaagctcttggttgatgtcaattccaatctcataaggacttggttactagatctttagtttcctcttcatcttcttctccttccaaagcatcatctattgcatctcccatcatctcagatgtcaattccatcttctcattctgtctctcaaattcttgcatgattttctgcaaagatgggcagttcatttgcctattcatttgccccat

SEQ ID NO: 73525 - DNA, 505 bp, Glycine max
  Clone ID: jC-gmfl02220077c06d1
gacatctaataatctcgtgacaattttattgctaataagctataacaacgtccaaaacttcaacaacgatctgctgcatgttctaaaacaagtacccaactacaacattgtctaaaagagaagctgacataaatgtataacatggtaaattttctaaattctgaatctaagccagttttctactttggttgggttacaaatgtgtctaaacttttaataaaaatctaatcaccaaaagccatccatcccttcttttctttcggtagagactgggaggagagtcctgcatcctgtttgtccccattgatttcatcctcaacatgggtgtcttggatggacaaacttaaccaaagttggtaatcacctgtaagtgtacatgcaagagcctgggcacaaacaaactatggacctacattctatctttttaaagtgcaataatgccatgaaaatggacagatagtgtaccccagtgacatgccctgccatgcccgggtctagaacgaat

SEQ ID NO: 73526 - DNA, 527 bp, Glycine max
  Clone ID: jC-gmfl02220077c07d1
acaaagaaaacagacaagagactaaaatatcacatccttgatacatgtgctttagatgatgagaccgacacacatcacatacatgtgatgaaaacaagtttttcaacaaaagaccaaaaaaaaaaataaaagagtaacaaaactaagtcttattcatgttctgtacacatcagaaacagacattattaatgaagtactgtaaatgcaggtttatctcccaccaacacgaattaattgtccttctgaagctaataattatacaattgcattgcatcctttgcttttactattgacgatacaaatttgaagttcttgtccagctaggaggcaattttggtgatatccttgctagatctgttgtatttcatgtggctattaacaagttggcctgctgcaattgcagacatgagtgagagttcccctgctaggactgaacctgctactatggttgctagtaacctagaatttgcacctggggactctttgctcgcaccctttactcctaataaattaaggcatgctgactg

SEQ ID NO: 73527 - DNA, 533 bp, Glycine max
  Clone ID: jC-gmfl02220077c09d1
aaaaacaagcagaaagtccacctttcatacaaatattattcagcaattcctaattccatattgggtttaacaatgggggcaacatattaaaggggcaaagatccgtaataaactacatcggctgagcctgtcatataaacatgattatcttcctccctccattcaatctgaagaggtcctccaggtagatcaaccgtgcaattcctcccagcacgacccttaagaactgctgcaacaacagtagcacaagctccagttccacaggctagggttgctcctgctccccgctcccagacacacattttcaagtgagaattagacaacacttgtacaaactctgtgttagttcgtgcagggaacacctcatgatgttcaaattttgggccaatttctgctagcttcaattcatcaacaagcaaattctggcttccttctctactgaaagttacacagtgtggatttcccatgctgacacaggtcacatgccagataactccatctacaactagttctgatttaacaacagcattatc

SEQ ID NO: 73528 - DNA, 614 bp, Glycine max
  unsure (1)..(614): unsure at all n locations
  Clone ID: jC-gmfl02220077c10d1
agtaatacatgaagcttttgacttcaatttttttcttggttcaacagattcatgttttagcagtacaaacagtagtctctttgattgcataccaagtctgtacttttacttaatcatacaaaggtattaaatgttcatgcaaatgctacaaagcacctttaaggggatagataccacaaccatttttattcaccaacaaagggtctctcactctcaacacgctccctttacttccccaagaagatgatgatccactttccaagcttacgcttcacggaaaatctgccaaaaccacacagctggcacaccaaaacctactacctattttgcacattcattccttgtgcgattcttgcttatgctgctgaaccagcttgttcacataggtccaacagatccagagtctctggaactgacagctcaagacgaaactttggcccatcataatgatgcaatactggcctgaaagaatcttcttccaatgccttgcagagcttcctgacacggattcttacctgagctggaaaccttgattcgcctttgcattntttatcctcccaggcagttggatctatgttagagccaccaaaacttgctgcctcaaaaataccatg

SEQ ID NO: 73529 - DNA, 369 bp, Glycine max
  Clone ID: jC-gmfl02220077c12d1
agggcctaaatattcttatacaccaacaaaataaataatattatttaaaaaaacctacaactgaatcacccctatttcaaagagctaacaaaatcccaaaccaagcaaaaaaataaatctcccaatttcacgcacaaaataaacgattacccagacctaaaaaagaggcccctcccttggaattccaggttaagccactcaatccaaaaacccctttagcgcttgggcaaactgacctgccaaaaaaattgggccactgaaaccccaagaagggaccctacccggaaatttgcataaacgctacccactaaaaccttacccccctaaaaggcccaccctgaccgggtaacgctgaaccctacacttacc

SEQ ID NO: 73530 - DNA, 325 bp, Glycine max
  Clone ID: jC-gmfl02220077d02d1
gcggcattatattcaaattaatatgggattaatacacaatcttagtccatataaaataagaagatcacatatttcagtatgaaaattcgtcggtagaagtgtttgaatagaataggattgcttggtacagtatgaaaaattgtgttataaaaaatatatgggaacaaattctcatacttcttcttcagagagatgggtattaaaatactctttgtaaattatgtaagagagcaccattatgtccttacccattttccatttcaagtatattcatacaatgtccagtccacagagttccttgaccacaggcatgggtgcagggacc

SEQ ID NO: 73531 - DNA, 535 bp, Glycine max
  Clone ID: jC-gmfl02220077d03d1
gatgataataagcaaacatttctctattattataaaatggtttacaaacgagtttatctgaaatttctcaagatctaaaatacatagagcacagttttttttttccaaactaaagaaaaacagcaaacttttgaatcactttcacgatgtgtagttgtacttgtacacaataataatttctaacaacataaataatgacgagtctttatgtgacaagagatatgccttgtagaattaatgcatcagctagaacttggttagcagcttgtgaaggatggacactgtcccaaaacacatactgtgtggcattagaacaagttcctggtgattttggattacacaacaaggatgttgtctctacagtcccggtaccacagcatcctctgtttgccttcacaaaaccagattttgaaggggatttgaacaggtcatagagaggcttgtaaatgtcgaaaaccgcaatcttaagaccaggaagttgcttttgaagactcgttgcagctgagttgagcttcttgttaaatccttgagcatc

SEQ ID NO: 73532 - DNA, 458 bp, Glycine max
  Clone ID: jC-gmfl02220077d05d1
aaaagagagtgtcttattgaattcaaaaacaggagttggttttagttacccttacaagatagaaaacagatgcaattattgaaccacgacttaaagagtaggactttattcaacaaactgatgataaacctaaaataagacacagtaatgatcctcttaaacatcatattggtttcctgattccattcttaagaaactgtacaaatgcagctacgtagtgatcctggtgcagcttcaagtttcctacaattgcagcagcttctcttgtattatttctgatcttgttgccttcctccaataccatggcttgtctaagggatgcggcattgtcatttctagtgaatgatccatcttcatttcttttcacttcaatggctaatctcttttgcaccaaaaaccttgcattaagaggttgctctattttaaaggggtataaaacaaggtgtattcccaaactg

SEQ ID NO: 73533 - DNA, 540 bp, Glycine max
  Clone ID: jC-gmfl02220077d08d1
caagcaatcaccgcgattcttcatttttcacatcgaaaaaatccgcataaaagaattcatactaaataacaaaatctatatgaaatataaatggctaaaatacgctatgctttccttaatttgtttggggaatcgaaccttgccaatgctaaaaagtcagtttgatagtatttcactatttataaagtggcaaggggcaactctaacaatatctagaaatgttacaatgtacagctgaaccaaaaaatgaaatgatgttaaaagtaaaaggaatcacgtaatgattgctttatgcttaaaccctttgggattaattggataatatacatttcattggaattctagaaggatggttcagcaatatggagcagtaataatatatactatattgtaacctgtgaggcgttagcttaatatgcatgcatggctggttatccacttgaggaagcgatgcctattgcgtagcacgagacctagacctcttcaatcgcctgagtggtttcaagaagtaacgagccaatggtgttttgggaactggaa

SEQ ID NO: 73534 - DNA, 410 bp, Glycine max
  Clone ID: jC-gmfl02220077d11d1
agaaagaacaacctagctttatgagtatgaatatcataagcattggcactgccatcataacagcactcacacgcatacataacataatttaacaccttgaacatgcccttttacccaactctaagctacttgcataggactacatatataatatccttattgaaattaaaaaaaaaacaaccgtaacatcggaagattaaaaaacatagcctcttaatcctcccatccccatgaacctgcaggggtctcggttcattgaaccagcccatttaaaggaaaagaccttaattattttttgcataatatattacagattttcttcctcgatcatagacaaggggaggaaaattcaagggtcctgaacatggtgcttgttggcaacattgcactggtttctgacctcacccttt

SEQ ID NO: 73535 - DNA, 538 bp, Glycine max
  Clone ID: jC-gmfl02220077d12d1
aatccagaacgataaaaagtcactctttcataggaattctacaatatttcgtttaattataggtgcaaatagcaaactactcgaaaagtggcagaatgtttgagaacagaataacaaagcagttagttgtaccaccatgctttgccagcttcagtaaaatgacaaacatcagatctattctctatactaatctgctcaagacaaggaaaaaaaacacttctcaactggatccatcatccaataccagatccaaatctacataatttgatttagaaaatcctatgttagccacatttgcttctgcacaacagtgcatcgaaatgacctgagccaggggagcttacctgttcgatacatgaaatgaccacaagtcaccgtatttcaactatccacgttaactaaaaatattgctcgatatccaaaatcccaggaatcatcaaaatagcatatgttagcatttgattcttccttttttattgaacttcctaaatacaatacaagacactaacatctaagaaattcaggtccttcaagcctg

SEQ ID NO: 73536 - DNA, 503 bp, Glycine max
  unsure (1)..(503): unsure at all n locations
  Clone ID: jC-gmfl02220077e02d1
gaattggaaatttttctatagcactgctgatgctagatcatttttcacaatgagaacaaatggatcagagctgcaatatgttaaaaagcacacaacccagttacaataaacacaaatcaggctaacaaaaatctaatcgtatgtaggttgttgtaactttccaaaaggccatgttgcagcagatctcaactttgtgcagcatagtaagctaatgtatctatgaaccattcattgcagtgtcagcatgatgtgcatggctatcttccagaatctttccatttgcttgagttctctgcctccaatctgcagggtcaacaccattcccattcaacaacttgtggttctcttctttggtcctgccatctttgttgtccttggtgcttaatggtagcagcagtgctgcagcagcatttgtccggtctggcaattcttctaatttcttctcaacgaanaataccaccaaattaaccgtataccangcaacaactacatcaaccgtgtaa

SEQ ID NO: 73537 - DNA, 409 bp, Glycine max
  Clone ID: jC-gmfl02220077e06d1
gtaaatacatggactaaagtgaagatttcataaaattaggaactaaaataatcagcatttacaatgtcagggactagaatggggtttactcaagaaaaatctaaaacttttcactcatgcccctcccatgtctgaccactgaaggttttcagtaaagatgttggttgcctcattattttcttcctcatttgagacgtctatgtattaacatacatgatgtattccttgaactattggagtgtgtgattctcgaataagctcctaaactaaatcatttttatccgagttcacaaactttcaagttatttattttcagtcttttcggcgtgatcatggctcccaagtcttaaatgggagccatttcctgcgtgggttttgctttctctcacttgtggcaatggcaaggtca

SEQ ID NO: 73538 - DNA, 485 bp, Glycine max
  unsure (1)..(485): unsure at all n locations
  Clone ID: jC-gmfl02220077f01d1
gagtacaaggtcaaggacctttcccaggccgacttcggccgcctcgagatcgagctggccgaggttgagatgccgggcctcatggcctgccggaccgagttcggcccatctcagcccttcaagggggcccgcatcaccggctcccttcacatgaccatccagaccgctgtcctcatcgagaccctcaccgctctcggcgccgaggttcgctggtgctcctgcaacatcttctccactcaggaccacgccgccgccgccatcgcccgtgacagcgccgccgtcttcgcctggaagggtgagaccctccaggagtactgggtggtgcaccgagcgcgccctcgactggggccccggcggcggccccgacctcatcgtcgacgacggaggcgacgccacccttctcatccacganggcgtcaaggccgaggagctctatgagaagaccggnggactncccgaccctaacttcactgacaacgccgagt

SEQ ID NO: 73539 - DNA, 412 bp, Glycine max
  Clone ID: jC-gmfl02220077f04d1
caaatatgttttttgataatattacaccagaggtgtgtcctaacagtcgagtatgatacagaatccaaacctacgatgtgcataggaggaagatacagatgttaaatctactatattgatacggatcggatacatatgctatatctacgactcaggccacactgaaacggtctttgatatacagaactacgcatctgaaaccatcttatattacagaactacacatgggaggatcagaagtcttcatatgctaactaatcgaggtagaagcgactcatatatccatgtcagcaaatatctcttcatcgtactcattggggtatatcatcaataagcaggtccgtcagcaatcaagttactaaaacaactgaatcgaaaagatacaatccgcttaagctttctattgtaaaac

SEQ ID NO: 73540 - DNA, 398 bp, Glycine max
  Clone ID: jC-gmfl02220077f05d1
gtaaatacatggactaaagtgaagatttcataaaattaggaactaaaataatcagcatttacaatgtcagggactagaatggggtttactcaagaaaaatctaaaactttcactcatgcccctcccatgtctgaccactgaaggttttcagtaaagatgttggttgcctcattattttcttcctcatttgagacgtctatgtattaacatacatgatgtattccttgaactattggagtgtgtgattctcgaataagctcctaaactaaatcatttttatccgagttcacaaactttcaagttatttattttcagtcttttcggcgtgatcatggctcccaagtcttaaatgggagccatttctgcgtggattttgctttctctcacttgtggcaatg

SEQ ID NO: 73541 - DNA, 513 bp, Glycine max
  unsure (1)..(513): unsure at all n locations
  Clone ID: jC-gmfl02220077f06d1
acatgaactaaattattaagtatatatgcaaaatataatgtgccatgctgcttccaatttggcgtctatgtctacgaaatatgttacatacatacatgtgtcatacaaatgtcttgataaatgcataaaataaaatatccctaacacgtataaactgcaactcaaagcacggcagttgaaaaaacgagtaaaattttgggtcagccaatcagctgttgcttatatcttttagctccagcctcttgcccttcactctcatctaatttcctcctcaaatttttcagatcatcttcactaaccaaaccatttaattctttattcaatgcatatgcctcgcccattttccttctgcactctttactcgcagaatcatgagaaaccactggcattgggtagtctttgccaattatgccaattgctttggtctgaatgcttntaggagcccgccagggttcataaatgtactccctgagcatatcttttaagactgggagaaaatgcctaatatagtcg

SEQ ID NO: 73542 - DNA, 481 bp, Glycine max
  Clone ID: jC-gmfl02220077f09d1
cttcttcttatgcaatgggttgtgtctgtctttttctaacttgagataatacttcaacttcctcattttttccctctcctgtctcctggactgtaaaatcctagagattcgctcttcccgttctcttctcaatctggtaaactctgcttggcggtgactaaccacccttgcttgatatatctccttattgcccatcatgcgaacaagcctctccttctccttgagatctccctcgtgcctctgtttgctcagttcaacctcttgctgctgctcacgatcatgaagaagtctctcttccactagacgctgttgatatgcagcttcaatcaggggagcagcctcttctctttttgctctttccaaatgatccatggtttttgctaacttctgcagtttcttttccatttcctgtctttcccggagttgttcagtcaaagtcaactccatcaatgtctgcttggtgattttgtccccctctatg

SEQ ID NO: 73543 - DNA, 372 bp, Glycine max
  Clone ID: jC-gmfl02220077f11d1
aacggggacaaatttatttataaaaaaccattcgacgctaaaaaggaaaaaccaaaacaagaaaaggcccaaacaccctaaaaaggggtaccccaaaaaagggaaaaaacccccaaaaaaaaaaaccaccgtctggaaaaccggccctaattacccaaggacacaacacggaccctaaaaaaaaccccccgttcaaaacaacctcattccaacacccaaaaatcgaactcaggaaaacccactacccaactatggaaaaatctcggcaaaccaaaacaccacccatcaaaagccctccagggcccctgtctttgcaaccggaaccctcaacatacaaaaaccccgtcggataaaacaaactggttgcaccat

SEQ ID NO: 73544 - DNA, 289 bp, Glycine max
  Clone ID: jC-gmfl02220077g01d1
ccaaaaaagaaaacaatgtttggggccaaaaaaagcaattaaacccggtttttggggaaaagggggcacaaaaaaagacccgatttgaaaaaaagggaccaaaaaaaacccgaaaaggggtctaaaaagggacgggccccaaaaaaaccccccctttaaaaggggggagaagggggggaccccccgcaagaagggggggcccaccctaaaaacacccaaggaaacaacccccacaaaagggggaaaaaaccccccacatggcccgagaaaaacccaggggcccccaaaa

SEQ ID NO: 73545 - DNA, 439 bp, Glycine max
  Clone ID: jC-gmfl02220077g02d1
agtgcaaaataaaactataaattgtgataataactttataaacagtcacacatcctccaaccccaccaaactcattttcatatacagtctatacagccctaggttaccaatatatactataacaacttattaaatctaggtacaaaatgggcatccactgagagtcactgtccatggtagtaaatagtaagccaaccattacatatatattaatgcgtatcaaaatgtgggagtgactcccttatttattagtttagtatagttatgtggacacactattgggcacccctctgcatgtaacgccaggttcagagctaggagcaagcaactcatatggcaacacccctgcaccacaacggttccttagagtccgatcaaggttcctgctatcaatgaccttctctatctgtcgaaccttggcggaaaaatcgtagaacgc

SEQ ID NO: 73546 - DNA, 355 bp, Glycine max
  Clone ID: jC-gmfl02220077g03d1
ggcatgattaaacaaagttttactagatccaataataaaaaaccagttcatgcaaaaaaaattggcatttttaggctaaaagccacaataaataaaatataaaactaaattttacattaaaaatgcatcgggtccaatgaagcttactctcttgaaatctatcatttcaagggtttaaaggtaaaggccaaattatatcgcaggggggcttttataaacaaacgctggtccatatatagaaaaggtaatgccatcaagaaatttagggaactctaaactttatccattatccatgccggtgacgtcatcaagagattagaagaatttgctacacccggtcttggtcttgatcaaa

SEQ ID NO: 73547 - DNA, 454 bp, Glycine max
  Clone ID: jC-gmfl02220077g04d1
agaaaaggaataactggtaccatctattacattaatataatcgatctacaaacgatcacaccgagaacttcattgaacagagagcatgaactacttattttccattacagtacacgagaggagtacgaagtttattttgagatacgatgtagctgtacttataaaggcatttagaaatggaaccgataactttatagtttgagatagagtattatactcttatggagttggaattggcttgtgaattggcaatggtggtagaagtggtttcttgaatttggggtgaagtggtagcttaggaataataggctttttgaagaaaggctttggttttagaaattcctccgactcaacagtcgggatgggctttttcacttaaatggttttgggataggcttaataatgggaattgggtttggcacaagtttaataattggaattggtttaacaacgg

SEQ ID NO: 73548 - DNA, 338 bp, Glycine max
  Clone ID: jC-gmfl02220077g05d1
gaacaaggaaatcccaaaaaaaaaaaatttaaggcaaccaaggggggcaaacaacccggggtaaaccccctggataggggcggccaaaatttaacaaaaaaaaacttcaaagggggaaaaaagggccccgggttcccaaagcggaaaaagccccccaattccaaacaaaagcctgccaaaggtaaacagccccatggggaaacggggggcccaaaccaaaaagccccagggggggaaagaaaaacatttgggggggccccaaatgggaaaaggggaaccccttttttaggcccaaacctcaaaaatcatatatcaaccaggggattttgcccaagggg

SEQ ID NO: 73549 - DNA, 342 bp, Glycine max
  Clone ID: jC-gmfl02220077g06d1
cattggggattttcttgatcatttaattcttgaccaactactcacaaaattaaaaaaattaaagaaaccaatgggagaaaatataccggatgggaccccactatattggaggggctaccatttagtccaataaatgcttaacgtcgatacccacgcacccaattccactttgataaaatggccccctgtccctaacaataagctcgtctagtttaatgacccagttgagaaaaatgggccccctaccaaaaatacagtctgtggaaaccaaaacattcggggaggccccaaatgggataataggaacgacttttttatgccccagggtccaaaacaacattc

SEQ ID NO: 73550 - DNA, 541 bp, Glycine max
  unsure (1)..(541): unsure at all n locations
  Clone ID: jC-gmfl02220077g07d1
gaaaacatcaacaatcacagcatatcacattaataatcgtacataattgtttccataaacaagggcatccaagatgctaaaatagtaaaacatccccatacactacatagtagttttatttcaattgtacatttattcatacaatacagatacagtgcatgtctggatacgctttctgaatgtacgtatcagcatattttcatgtcaaatttgtaaaggtgacgcaaaagctagttatattaactttgatctcctctgaatggcatccaaacacactatcaaacaccaaccaaatccctgaaaagcaaattaactttcagagctgtaacatgtctctccagcagacaagtcttcctgacgaagtcgcttcatctcctcataggcccattccagtccggggcagtaatgaagccgtgggttaaatctgctattcactgatatcaggtggcatgaaggctccattctctatcaagaatntcacagcattcctcctncttttcttggctgcaatgtggaacggcgtccagccacaagcaccctt

SEQ ID NO: 73551 - DNA, 559 bp, Glycine max
  Clone ID: jC-gmfl02220077g08d1
gtgacgctcttttattgcagaagtctaacttgaatacattgtttttgtgaagatcttttattgcagaagagacttgaaaaacattttacaaatttgaaaaactaaaaataatagactcgtaaatgttaaaactatatttgaatgaaatcatgtgaaagctggaaaatacatgcgacatgcaagcgtagttatcttgaacacggacagctacttaaccatattgatgccatcgaattctaatcccatttcacattgatcaatgacttcaatgctagagaagtaaacaatgatgcttggtgcgttttgtcccgtatgcaattattgttctcactgcatatattttttccttacacttgctcaccaattcatcagatccataatttagtttgccccttttacaaggttaggctaaatgatacttccctgcaagcttttgttacaaaacatggacctcaatctgtggctaacattcccatttggtccatgttattgacaccggttgaaaacagcacacaattcattaattttctgacactaagtccacatgttcaattttgaa

SEQ ID NO: 73552 - DNA, 567 bp, Glycine max
  unsure (1)..(567): unsure at all n locations
  Clone ID: jC-gmfl02220077g09d1
ctgtgataatatatgcattaaatgaatatataaggaaatattgaaaataacaaagcaatcagaataggaattgaacatacaagaggaagcaaagctatcttgctttggcttaatttataccatgaatgaatcactgtcaatgtgatcatatgaacatacaagaggaaacattagaaatgtaatacacagacttgaaagaatataatcacacttataaggtcactgtgatgtgcatgcaatacaccaaaacaaataagaaacaacttgagaaaaatactttgactgaagctgattttaattttctttctgtgtgaaacttgacactggtcttaggccatgtttgagtgctgctttccacacaagatcgattctgttaacatctatggccccaacttcgtgatgagaccaaccttaaggctatgtaccactcctnctgcatggcacgcgtgaaccactcccctatcatcgtgtactcacaacacccaagtccttccacgtcttctggaatctcatggcttgcaggtcaccataagtgcaatcttttctaaatgantaaaatggtgggac

SEQ ID NO: 73553 - DNA, 379 bp, Glycine max
  Clone ID: jC-gmfl02220077g10d1
ggttaattacggggttattattaatggtaattgaacatttcatttaggaatcttagctaacttgctttggctaatttataccaagattgaatcactgtcaatgggatcatatgaacgtacaagaggaaacatcacaaatggatacacagaactgaaagactataatcacacttataaggtcactgtgatgtgcatgcaatacaccaaaacaaatgtgatacaacttgacaaaaatactttgactgaagctgattaaaattggctttctgtgtgaaactcgacactggtcttaggccacgcctgagtgctgctttccacacaagatcgattctgttaacataaatggccaccacttcgcgatgagaccaaccttcaaggc

SEQ ID NO: 73554 - DNA, 378 bp, Glycine max
  Clone ID: jC-gmfl02220077h01d1
agccactaaacaaaaagttatccaagagaggaattgtgttacattgattttaattgcttgagataaaaaaaatgtagttaacactagagttaatttatgaaatgaaaataattaaagaattaagaagcacaatcattactttttaattaatttatattgcttgattttgcaactcattacttttattgccaattaagtattggctttttgggcctatggtgtttgggcacgccaggaaagcaaggaattccagtaacctcaatccaatcagttccatgaaaaaacttagatggtgagaaccaacgtgcagcttttgaattgaggttccaaatcccagcccatttcacacgcttggatttgtctgaaccggggccaatg

SEQ ID NO: 73555 - DNA, 524 bp, Glycine max
  Clone ID: jC-gmfl02220077h02d1
caaatgcatgggtgtctcacttggcatcattgatattatagccttaattaggcataccaatcaataagagacaagtcaagggttatgaaatcataacagacacgactcgtatttgtgggtctcacaaagcatagcctaatatgtatcatctatgtgacatggtctacatgatattattattacaggttgataaaaaaagaccacataaatatctaatcacaatttacataaaacacaatccatacactatatagttttgaaggatccaaagctaatgcagatcccttcctgatctgctatctggctacatcaactgactgatgggcgaggcaatcttttggcaatttcctttgttagaaaagatgcaatcttggaatttttgttcctattccaagatcatctttagcccctccataggtctatatgagtttgctacaactatcttcaggcagcaagaacatcatggggaaaagttgctagtagcatagtcaacaatgtcctcaaacagttcatttatattatct

SEQ ID NO: 73556 - DNA, 529 bp, Glycine max
  Clone ID: jC-gmfl02220077h03d1
ataaaaggattaactggtaccatctattacattaatataatctgatctacaaacgatcacaccgagaacttcattgaacagagagcatgaactacttattttccattacagtacacgagaggagtacgaagtttattttgagatacgatgtagctgtacttataaaggcatttagaaatggaaccgataactttatagtttgagatagagtattatactcttatggagttggaattggcttgtgaattggcaatggtggtagaagtggtttcttgaatttggggtgaagtggtagcttaggaataataggctttttgaagaaaggctttggttttagaaattcctccgactcaacagtcgggatgggctttttcactataaatggttttgggataggcttaataatgggaattggttttggcacaggtttaataattggaattggtttaacaacgggaattatctttggacaggcttaatacaggaattggcttaacacaggaattagtatggttaggcttataactgg

SEQ ID NO: 73557 - DNA, 141 bp, Glycine max
  Clone ID: jC-gmfl02220077h05d1
ggttgtgggatactaaacatgaacggcaaaaaaatcaatgccagctgagtgcaaaactctgaacagaactacacctcacacgagaaggtttaccaaattagaggccccattatgagaccgggagaaactcaagccaaataa

SEQ ID NO: 73558 - DNA, 561 bp, Glycine max
  Clone ID: jC-gmfl02220077h07d1
gaaaacatcaacaatcacagcatatcacattaataatcgtacataattgtttccataaacaagggcatccaagatgctaaaatagtaaaacatccccatacactacatagtagttttatttcaattgtacatttattcatacaatacagatacagtgcatgtctggatacgctttctgaatgtacgtatcagcatattttcatgtcaaatttgtaaaggtgacgcaaaagctagttatattaactttgatctcctctgaatggcatccaaacacactatcaaacaccaaccaaatccctgaaaagcaaattaactttcagagctgtaacatgtctctccagcagacaagtcttcctgacgaagtcgcttcatctcctcataggcccattccagtccggggcagtaatgaagcggtgggttaaatctgctatcactgatatcaggtggcatgaaggctccattctctatcaagaattttacagcatccctccttcttttcttggctgcaatgtggaacggcgtccagccacaagcacccttagttctggcatcaatgtcagc

SEQ ID NO: 73559 - DNA, 528 bp, Glycine max
  Clone ID: jC-gmfl02220077h09d1
attgaaaatactatctttcaagcaaaattcgcaaaataataatttgaaccaacaccgatgcaaaatcctattagagcaaaaatacatcgatgcaaggaccaaataacagcattacaacattcacgggcaaaaccacaaacaaaactaacagaaattaaatctaaagtagcattgttcacaagagaaaataaattcgactaagttcaaagtaaaataattcatgaaacaaatttaaagcttgtcttcaaactcggagagaggagtcatctgttccttcaagcccttcctcttgcgaatgtcagtgacaagctgtgcagcttgtgatccagcctccaatgggtcagaagacatcatgtcccagtgatcaaacacacattgtgggaaggcctggcctgatgttgcagccctcaatgtgctcgagaaaccaaaggactcgatgacagggaggtatgccttgatgttgtatagtggggtacctggcctctgcatttcctcgaacacgtgtccacgcttctggttaagaacact

SEQ ID NO: 73560 - DNA, 462 bp, Glycine max
  Clone ID: jC-gmfl02220077h10d1
aaattaatctcagatttataaatatatgtgatataaattgttcacggactcataattggaagtttacaatttacatgattaattaccaatgtgacttctaagacaacaaaagataactcctttctcaatcaatcaacagtatttatttaccttaccccattcaaatccaattaatcatgaaccaatcactccactccatcttcaaaactcccaaataaagcctaacctaagagaagaaaagtgtaattacccccatgaaactatgggtcgaagttacgaccatatcaaacaattctcaactcaaggtttggatatccagctcgagctttgtgtcgttcaaatagatcttgaagtgcttcaacaaattggctatgtattctggcaacctcctcaagagttggctcgtgatttttctcgagctcaattggtctacccaccaccacatgcatcggatgttaaagg

SEQ ID NO: 73561 - DNA, 382 bp, Glycine max
  Clone ID: jC-gmfl02220077h11d1
aaaaaaaaattttttttgaccaccccattcaattccacacaaaagaaatttttttttccactcgctaatgattttataaaccccaccaaaaaaatcttttcaaaaaaaggggcgcttaaccccctatttgtcaaaaaaattaatttttcccccccaaaaaaaaaagggggttccccctcgaaatgttccaaattttggggcccaaaaattttggaaccccccttttggggaaataaaaaaggccccccaacattataggtgggaaatttaaaggttcccaaaaaaaagggggttctcttgttaccaaaaataaaaattttcttccaaaaccccctttgaaaccccccccttgaaaaaatatggctccccccaaaaattaaag

SEQ ID NO: 73562 - DNA, 440 bp, Glycine max
  Clone ID: jC-gmfl02220077h12d1
aacaaaaatctgttaaaatttattcaaagggaatcaacaaggtacaaaatcgatacacagtaagagtttttttgcaactttacattgcataattcaaacaaaagaaggcgtagttcatatatacagcagcaaaagcatacataagaaaacatagtagtaagcattcatattcatatatgatatatatgataatcatcaacacgacggaacgacgccgtatccagccagagggtccgcatcagtgcgtttcgcgaaccttcctttgattcttggcctcgtttcggtatacgcttttctcgatgcgtaacgaatggtcttctcgaactttcggatcttcctcttctgcctgtacctcaacactgtagccttcctatccgccgccgagaactgcgccgtcaccgtcaccggtgccactttgctgtaactgcaagtcgatatct

SEQ ID NO: 73563 - DNA, 434 bp, Glycine max
  Clone ID: jC-gmfl02220078e08d1
aaccaccaaaattcctttgggtaaaagctaactttaggatacagctgttacctcattggcattttgccagcataagttaatgtaaaggcatagtaactaaaattaaaactcaacagaaacaagaacaacaaattgattattaaatggtcaaactaaagtaaacctcaaagcattgttgacctcaactactttctgtcatccgaacaggatttgaactacgtgtccaatctccgcattaagcactttattatgaggctattggtttactgtacccattgtcatttgtgaatgagatgggctgaaaataaaattgccttttgtaaacaaccaactgcggtaatgctgaatattctccagagttctcaatgcttaacgttgaaaagttcacagagcttttttaaatccaaagattccaaattgggggacaaggaaac

SEQ ID NO: 73564 - DNA, 541 bp, Glycine max
  Clone ID: jC-gmfl02220079a02d1
aacagataactgaatttattatttctcagagtcaagtcaagcattatgatacatcataccccaaaacaccaacaacagtactcaggtgagcagttattacatcgtactttcacatgaacgcgtcataaaggcagataaaagcaaatacatacaacacaggaccttaaggctcaagcacagcacaatactatgtgacttaaacggtgacacaattcagcaattattcttaaagcactacggatttgctgaatttgttcataattttagagccttgttagtgtagaatcacacattcttgtgaaccagctaccaccacagtagggtgttcgcttgtgctgactgcatcaacttctttgacactttcaacgttgacatcctccaattcaccacagccaatggcttcaaaataagatcattgacttcttgaaacctctcttgagagagggacacctctgcaagaagcctccaagcattgccttcagatgcctcatcataatccttcttcctctttaagaccatgtgcccactaatttcccacaca

SEQ ID NO: 73565 - DNA, 527 bp, Glycine max
  unsure (1)..(527): unsure at all n locations
  Clone ID: jC-gmfl02220079a03d1
aattgaaaattattgacttttgtaataattaatgattttcaaatgaattaacaatgaaaaatctttacaaagagtttatcaaaattaaactctatctttaatggcattggtctctaattgtcctgtgtactgattcacgatttaatttcaggtatttgatcccaaatagacatcctccttgatggtacctgaattttcacccgtatcaactgcaagtggctcggcaggtgtaactgttgacggggggctcaagtggctatcagcatctttagtgcaagaaatgactctgggaacctcattgacaccattttgatgtatttcacaatgcttcacatcctctgttgttgatgaaggggtatccacatccatagcacaatctctgccacctttatctgaaatattttcttcaatcttatcattaggcaaagcaccattttcagaagcggagatctcngtttctatagtagccaagcccctctctttngtttcttggaatgcatcacctgaaacggtatcatcaacagggt

SEQ ID NO: 73566 - DNA, 449 bp, Glycine max
  Clone ID: jC-gmfl02220079a05d1
gttaataaggagtttcaattgacttctcttaacagatgtgttattccatgtacatcgtgatcttttgacttctctcgacaaacaggcttccatacatgcaaatattcaagcattacaagaacttgaattcaattggttttgggtaaattaaactatcttttgccctaattaaagactaaactcttagagtattaagaacatatacttttctatacacatggaaatctaaattcattctttctccccctaaacttttactctaaaggaaaacaaataaacaaaaaatttaaccacccaaattatgtgttcaccttctccaagcataaaccaccaaagaaaacccaagaggaaccaccaactcattctcctccacactggaccattccataaccgaagaacttcccccaaagatccaccagaagtagaagacaccgacaaagacgaagaag

SEQ ID NO: 73567 - DNA, 441 bp, Glycine max
  Clone ID: jC-gmfl02220079a06d1
gatcaacataagttggtaattgggacaattgcttcaatcatacgtattaacttggaggaggcaaaaccatcatggaagaagttatctataggtcaaagggattcatggtttaatatatttgaagaaatcaaattacaatgtttgattaaaaatattcaattttttatattatttttaaaaatgtgtgtaatgtaataatttttttcccattttggtcaaaaccaacgtagtcaaagtttacatggccacctcagtataaggacatggtgcggcacaactttgagaaaaggggttcagctaaaatgactcaattaatgcaagatgttcgaaaaaatttaaatgaaaaaccaacttggatggaagatgatgtgtgggcacaattgaaggcacattgggaaatctcaagtttcaaaaataaatctgaaataaataaaagaaatc

SEQ ID NO: 73568 - DNA, 453 bp, Glycine max
  unsure (1)..(453): unsure at all n locations
  Clone ID: jC-gmfl02220079a07d1
gaatataaataaaattatataaatatactttgataaaaataaatagtattttttagatgtaacattttaaatctgagtttattagtagaccaaagatcctatggtggctctntctccctcactacacaaactatactatacagcaagttgcaaatattgtacaagaaagcagaagggactgcagatgaactgccgtatgaattgaaatttccatacacattggaggtcaggtggtggtaaaggagaaggaaattaacacatgtatgttcaatgcggctttaacacctcactttctctcaacagaaaagtggtagtgtaatttccacctccttgcttctagtctaattgctttagatatgaattacccagtctgaggtagctgcctccaattcagcatttggtgagactgaggatgcctttgcaagaaagatgaactgtttgttataccatttt

SEQ ID NO: 73569 - DNA, 482 bp, Glycine max
  Clone ID: jC-gmfl02220079a08d1
cagcaaactacaacttctttgttgaatgtttgacaacaatccaaagtaaattgacacgcataattctattttacattaactgacatatgcaatgcaaaagctacaataaattaaagataagatgatgctatcattcatatcagaagagaatatatatttgatgagtttgcacaatcattcttatatataggtgccaccactgcaacctaattcatgccctcaaagcttcctgcatataaggatgaacttagtcggctgtccaactctgctccacgatttccctcactcttcgattgtattcacgcttgttctcgctaaacattcgagctgcttcagagtttgcaggagaatttgggttgggatcacaaagcaatgactggatagatgtgagtatagcagccacatcatatataggactccactgattttgtagtatatccaaacaaatacttccatcagcataaatatttggatgaaacatg

SEQ ID NO: 73570 - DNA, 223 bp, Glycine max
  Clone ID: jC-gmfl02220079a09d1
ccattagcgtcccttctatggtcatggtcttattcattggaaatcagccgccattcattcatttttcacagtggcagtgccaatgtgaaacatcctgcgtgaacaaacagaatgcataagctgcacaacttgctaaatctaatggttgacgtgtatagaacctaacaagtatacataaagaactagctttggataagattcatttagacaagataagaccatt

SEQ ID NO: 73571 - DNA, 374 bp, Glycine max
  Clone ID: jC-gmfl02220079a11d1
aaaaaaaaaaataatagataagcatatatttctactagtaattgatagtgcaaaagaagacgagcctaaattaatttgacaagggcgacaacccaagattgctaattttgatggtatatacagtagtgatgcagggcgaaagaataaaagaaagaaaaggaagtggaaggttacgttgtggaggtaggtatgtaagtatgtatgtatgtaaataaattcagcggaatcctcttcctcttgattgatagagttcgagcctgctcttggcctctggtaagagtggttggatggaggggttcctcgatgagatgtgcctgcttggtgcaccattcgagaacaatgagcacctcttcttgcgccagagtctcgctttt

SEQ ID NO: 73572 - DNA, 478 bp, Glycine max
  Clone ID: jC-gmfl02220079b01d1
aaagaagaaaaaggaaaatatttttagtagtcatacggataatttgtgaagtacatgcccaaggaagaagagaaaaaaaattgttttttcttaattaagacagtgaagagtgagaggtttactctctaaattatacattttaatttatactatatataattaaatgttatagatttttgcaatgtgcaaaataataataaaaaaaacgatttcctcttatacaacgattaacaaacatactatagaacgtgcaacatgttccttgctgaaaagataagtttgggcagaaaatacaacctattcttcttcaccaaccgacatgttgcccatagtcgtgtcacctgaaccaaaaaaaccattgaaattcccatttgatgataggcaccgcacaatataaatgcaaagccagagtttgaacatcaatgcaagccttaaacttaaacaagatgatttgtggctacttgcattatcactaaca

SEQ ID NO: 73573 - DNA, 399 bp, Glycine max
  Clone ID: jC-gmfl02220079b02d1
aaaagcataaacatgtgcttagcagtttcctccttcataacattacatcgggcaaattatttacatacatactatactggggcccctaccacgtttaggcatccatccttatatttaatgggtagaaacatgtttagcagcgacagttgagaccatcgagtccaccccacatacattgggacctttgcagatcttggaatatcccttttttccccagctttccccccatgaattctttatgatccagtaagggttttccttaaaacgaattggagcataagcaccagaaccataccccaccaaaagaaccccgtgatccaaatgcttgccgcagatatatgggcatgagacgccaccaatatatgtctgcataaaaactgcattgataccaactgcaag

SEQ ID NO: 73574 - DNA, 525 bp, Glycine max
  unsure (1)..(525): unsure at all n locations
  Clone ID: jC-gmfl02220079b03d1
caatattattaccataacttatcacatgtatgggacattattcggtaataaccatataataaaatccacatttgaaatgggattttagcaagaaccggttccacagcttttaggggtgttactatcatacaaaacatataagaatgagataagatataaactatagattgaacgagtatgaaacaagggtgtacaaaaagattaagctgccattgtttcatctaagtaaacatcacttcatcaaatgcagcagatgatacaaattgcaacttgacaaagcgacccctatgcacaaatgtaaatgaaaataatgcagcggacttacaggatatggcacttgaaggaaccaaaaagggaaaaagtaagaaaacttttatagttaaaaaataagtcataaataaatccattcttttcttttctttntttcttcttaatttactactgtgccaaggtcaccttggaccagataactctactgcatgcagattttcggttgagtcgacgatccaatcagaattaggatga

SEQ ID NO: 73575 - DNA, 459 bp, Glycine max
  Clone ID: jC-gmfl02220079b04d1
aagggtgtattatggacaagttcaatattttagcaaagagcatagcacaagttcaaagacaacaagaagttcaatttcatccatttactcccaaagaaaatacctcactcgttttataaagcaaatgttgaacccaggagaccacatccccactccctcccctctttctctatcaaaatgtaaaactaaaacacaaataaaaaacttcaatgattgaagatttttattacaatcttttcaaacttttctttctggcatctatcttcttcttgtccgcctgagcttttgcttgtccaccttccttcttctggtggtgcagaagcagcagatatgactgtagcagcagaagaaccattaacagccgctgcctgttcctgattatttcctcttggttgtggtggttgcaagcactggcactggcaatgcagcactgccggtgtggttttgatgtcaccacta

SEQ ID NO: 73576 - DNA, 502 bp, Glycine max
  Clone ID: jC-gmfl02220079b06d1
agcgatcagtaacctgaattacgtgaggaaaaatattatgtgaaggtaaaattatagtacaataacagcttattttcaaaggactatctacaagacaccaacgcacacagatttggaaaatactccataattaatagaggatcaaacgccaagcaatatacactacctttacacggagccctgccaaaaaagtcaaaggcgaaaaggagcagaagattctatatgcctgacttgatacacaacaaatgacagttactcattcaattttttccagtatgtccaacctggttttcctcttccaacctttcatagtggcaacaaggttgaccagtccaacaatctggcttttactgtattccgggtgtgctcgtgcccagtgcacatattctgtctcgggaaggtagtaagccttgatgaaagtttcaaccatttgtagcttgggcttcacattcagcgccacaaaatgctgtaacccattgatcaaaacctgcagatctaatga

SEQ ID NO: 73577 - DNA, 456 bp, Glycine max
  unsure (1)..(456): unsure at all n locations
  Clone ID: jC-gmfl02220079b08d1
aaataaagaagacgtcctttgttattgaatagttgcgttgaagtatttatttacaagggaatacaattactagctagacatctcctcttttaatggggatggcttgctaactcaagaaaggaaaaaaccataagaacattgttaaaaaaatgggcattattgtagttgctcattctaggctgcacaagtaggagcttttcctgttattacgggcttgacgttagcacatttagctgttgttgcagctccattgaatgtggagatcaacatcagtcatctctacacccttcacatggtgcaacactactacaaataaaaatcactccttctttagttcctgaagtgcccttaatggtttttgaaggaaaccttgcttatcttgatttttgacggattctttttggagcactgngttccatgggacatactcttggtctatgatcacaggttcgaaac

SEQ ID NO: 73578 - DNA, 438 bp, Glycine max
  Clone ID: jC-gmfl02220079b11d1
cgaataataaaactccaacaattttattaatgaaaatactttacaatttcagcacatatacactgccatgaatataattttgcacgctataattatctttcgccacaaacaatggagtagtgctcaacaaagcacaaaccaacaataataacagttttagttgcattaatttacacaagaaagtaaattaacgtaataggcaacacatgtgtgtcacgttcatgaggatcattttataatgatatgcaacattgaattaaatattctcatgcaatggagcattctggaggaaggccttgagggaaacgtctgatatcagtgcaataattgtaaatcatgtaattcttttgcacccaacggatctttgcctgccccgtggcgtccagtgattggccagtggaggaagaaagtttgggaattgaagtttctgtatgaggc

SEQ ID NO: 73579 - DNA, 521 bp, Glycine max
  Clone ID: jC-gmfl02220079c06d1
gaagataaaaaaagataattgaaaagctaaataatattcaaagatccaatggccagatcatgattgcaccgtcatacgcttagcatcaaacagttgacgcctcttggaaacaagttcaatggatacaagcgcttatcatagacaatatactgataaacaacagttaaattatgttcattctggttggtaattttatgcctgccctcttcagaagttcaactgaagcctgttttgccttcaaaataacttcttcctcgtccacatatataatcttcttgttcttcattatccataatccattgcacatgacggaaaccacattttctgatcgcatacaatacactaagctagaaatgcagtcatgaacaggaaccatagaccaagacgaaggatccactacaacaatgtcagcctttttcccaacctcaagagaacctagttcatcatcccataatactgactttgcaccattgacagtaaccatcctaagaatagtttcagcaggcaatgcaagtggatct

SEQ ID NO: 73580 - DNA, 443 bp, Glycine max
  Clone ID: jC-gmfl02220079c07d1
agatcaaaatcgttattagccatgttgcatgtatattaatttgccagaatatgtcaatatctgcggatacacaaggaagatcctgtaaacttgtggtcagacagctcatttatttcctttgaccaatcaggcaacaaaattctacttttacagtttcagtgagacatatgataactaagattcagttgatgtggttgcggtatcatctttgtgcttgatcataccagaatccacgaggatgggaacctctgctgcaagccacggtgcaaggcctaggcaaagtgcatgtgcaattccaaatctggggcaatttttggcccagagaggcttgaagtgcacagtcaagcaagatctttccacccctatacatcttttggggttttgccatccaattgaggggagttcgagttcggggccgtggaaggttaagtgacggggacatc

SEQ ID NO: 73581 - DNA, 416 bp, Glycine max
  Clone ID: jC-gmfl02220079c09d1
gtccatatgttaatttttttaattggctaaagaccccccccattgaaagaaaaaggcacccatggttgcaaaaacattgggaaaaaaaaccaaaccaaaaccaagggggtaaaaattgcccccctaactaaaaacggttaccaaagcaaaaacaggaaccacgcggatacggcttataccccaaaccatcgggcaaaagctaaacccaaaagaaggggtccttgcaataagacatgaccgaaacacgtggatgtggcggggggaaacacaaccaaatgaggagaaattaagcctgggaaaaacttggattcacatccataaaaaaaagggcttgccaaaagggacccaaaactttgatgggaaaacccgctaaaaataattgacgggaaaatgcggcccccgggggtcacaaaaag

SEQ ID NO: 73582 - DNA, 496 bp, Glycine max
  Clone ID: jC-gmfl02220079c10d1
caccttaagcagcagttattattattacctcaaacaaaacaagaacataacaccatccgttacaaatacatgaacaagttccaaaactaacttcaatagctaatctgtaaccatagatctctacaaaatagcaacataaaagcctgcccttcacttggaaatgcattgttcactcttattctttgccatctgctgcaactgccgaacatcccttgcactagcagctttattctttgccatctgcagcacgtagcgagccaagttgaactggggcttgagtctgaaccactttggatgatccatagcctgataaatcaacaccttctgccttctctttctcaagctgctctttgatccaaaagtatgtaattctcagcccatccttcaacttcatagttggagcccagccaagtttctctttgattaatgtattgtctgaattacggccccgaacaccttctgggccaggaatatggtatattggtatattcttatc

SEQ ID NO: 73583 - DNA, 333 bp, Glycine max
  Clone ID: jC-gmfl02220079c11d1
aaccactgaatatttttagtatacactataaatcacacacattcagtttcgtaattaaatttggagggaattctaagattcatgaaattgcccacaattttttcagctataggggcaaattccaacgaattagcacaagaaaagactagagtgtacaacaagggttgaaacaggcaaagtccagtccaactagattggtgaaaaagacaagttcacatacttttcataacacttacaaattcttcaacatcggctaacttcatgtttgacaggcctttagcaggatttatagcagatagatccatttctgtgctggaaatccttttagttttt

SEQ ID NO: 73584 - DNA, 533 bp, Glycine max
  Clone ID: jC-gmfl02220079c12d1
aaaaattaaaaacatatttttatcttatttttaaccatagaggtgcactcacccaaagcactattttgttctgtgtttttaaagtgatatagtatattctacttaaacacggaaccaaaaagtcttacaaaattctatagcttatgcatacattgtactttcacagtacaggtaacacaggaatgggcatcatttcatgtcacccaccaaacttcacaatttttccccaattcccatatcaccctgacaccctcaattttgactacatgacagtgcaggcatttgggttctcatcgctgaacatctggggagggtaggaatggaaatacgcagggtgtgcaggatatgcatacacctccatgccataccttggtgggttatagaagtattcattaatcttaacctctggaacaaccttgttggtgtcttcagtagttgctggtgtttgatgcttcctctactgtggcttcttcttacttcttctctgtggtttcttctccttcacaccactcttcttctcttcctctttcttc

SEQ ID NO: 73585 - DNA, 336 bp, Glycine max
  Clone ID: jC-gmfl02220079d01d1
gaatataatttaatttaattttaaatacaatgatatataatattagatattatatgatgatacaatataaatacgtgcggagctcttgaccacggaggacattacggctggctgagcctgactacgcgtgctctgcgtatgcagacagaagcgattactgttcacgagaggccacggcgactgcatatgaactgctaactgaaccgaaagtcgcatacacattggtcgtgaagtggagcccagaggacattgcggtgtacacacgcatggcgcttgcagacgggacacctcacttcctctagaccgactaacccaagtgcaagtgccagctacatg

SEQ ID NO: 73586 - DNA, 486 bp, Glycine max
  unsure (1)..(486): unsure at all n locations
  Clone ID: jC-gmfl02220079d02d1
gttactgacccatgagccacaccaatgaattggcaaacatattgacaatcacgccgacatagcaacaacatcacccacgagcacaacaacacgcagcacatgtacctgaatcatcatcgagaacaactcctcgatggccatttcggtgcattactgcattcgccttttcaacaattcccctttctgggtaaaagacgacacaccccaaagggcaaaacatagcatagaagcaagcaaataactaaaatatttcagtcctgaaacaagaattaacaaaaacaactacaaaggaacgacaattggcatgggagtcttggttgtgcttcaagcgagtgtaggattctctgcaggagaagtcctccacacgatatctttaagagctggacgaagcttcttgctacaaaactggttatacctcaaggtgtcaccgctggccttcttaacctncaccgccaaaaacgacgggcgtacggcggacaagttcgc

SEQ ID NO: 73587 - DNA, 461 bp, Glycine max
  Clone ID: jC-gmfl02220079d04d1
agcttgtaaataaattccattcttaagggcagttttaatatgtaacatgcaggcagcgttggacctcattgttaagaaacaagaacatggtgttgtatcatggagcgtactacaacttaggtctcatctagtacagtaattaaatattaaaagaatttcagttgaattctcttcggcacgttttaagaacacgctacagtggctgagaaacctggtgaaacaacaattctgggggcagaaaaaagtccacctttgtccaaaactgatatcaggagatcatgccattatgacctcaactcttgggtttctttccataatgcttgagactattcttgaataaagggtgatcttgcatctagggagtgtcataattcagaatattacaacaaaaagacacaacctttacttaattacttcctgatattgaggagctcaaagttccgcagaggatcatcacgggc

SEQ ID NO: 73588 - DNA, 400 bp, Glycine max
  Clone ID: jC-gmfl02220079d05d1
ccattaaaaactttaggtccattgacaagtaaaacatactatgactatggtttaaacaaattaagtccatagtattagcaaattaaccgcattatccaggaagcgtttttggcaaggattcgggggctccgctggtaccattgagcacaatcacattaccatcagaatcaacatccactataacaaagtcgccctccttgatctttttggcaagcattttctaagccatgctgtcctccaaaagtcgcattatggcttttcttaaaggtctagctccataactagggttataaccttcctccaccactttggccctgaatctttctggcacttgaagttcaatatctttcaccttcagtctatcaaacacctttttgagcattatgtaagcaatttcctt

SEQ ID NO: 73589 - DNA, 446 bp, Glycine max
  Clone ID: jC-gmfl02220079d06d1
aattaactcaagcatgctcaaagccagggaagctatgcatcacgtagttttatacataagctaacatgcacttcaccaggcttcgtatccacctagcagataacagcttcacacttatattttcccaaggaaaacgaagcaggcataagtcaatcttaatttccttttattagtaaacctaattataccgaattgttcctaatataatagacgaaaaatagccaccacacacggctagattctactttctacagaacagattggaggatcatctcggctagctcctgtttcgcagaagcaacctttggttctccccattccttgaccttcttctaagcagttcaaagtcagccttaccagcctatatttgagccccaatttcagtgtcaaaactctgataacgcttacgaacaagctcagcaagagaaccatgctcaatcaacttg

SEQ ID NO: 73590 - DNA, 516 bp, Glycine max
  Clone ID: jC-gmfl02220079d07d1
caatagtatctatttgccattcatattataacattataaatcccatgtcatggaaatctactgtgtaattgataaaagtaacaagaccaaagagtataaacaccgataaaatatatgaatttgtacatcaaatgaaagatcgaatctctaattgagacataattattgttgttcccagtcaaattcatgcctcctcgtcaaccataccgacagcgtagtggccgaagtttctgccctcagataatatccgctgcttattaagtgattgcgtcctagccttgttcaaaaccgaatttggagacttaaacattctcttttcaccaccagacattctgtgttcgttggtattaagatactttctcttcggtgagaaaccaaagacttcatgtaagaactcattttcctgcatatgcttaatgaatcctcccccaagaaaatgcttgataaaattcaactgtatcatttcagaccatgatgatgcctgcagggaatcaccaccaatcttcattgaaatat

SEQ ID NO: 73591 - DNA, 304 bp, Glycine max
  Clone ID: jC-gmfl02220079d10d1
ggggaaaaaaaaaaattgggaatttaaaggaccacaccggacaaaaaaaaaaaaaaaagggggaaaaaaaaaaaaaaaaaaaccaatgcaaaaaaaaaaaaaacaaaaaaaacccccccataaaggataaaaaccctaaggcccaaaaaaacccttaaaaaggccccaaaaaacaaaaacccccaggggggaaaaaaaaaaggggccaaaaaggaaagcggggcaccctaaaaaaaatgcaacaaccccgccggggacggccacaaaagaatagaaaaatatgcccaacccggtattggaaatg

SEQ ID NO: 73592 - DNA, 358 bp, Glycine max
  Clone ID: jC-gmfl02220079d11d1
aaaaccaattttaaaaacgatgaaacttttcaaattcagcactgattcaatgttttgaacaccattttgttcgcatttactttcccatgcccattaaaagggcttgaatttaaccaaactttaacccaaaattaatgacttttaaccacgcattaactatcacaccgaggtttaattatttaaaccggggggggtttttaaactttaggagaagaaccttttggcatgaaatggaacatccaaaaagaaaattcttgcttcgaaacttttaggacgacggcttaaggggctaaatttgggaaaatttcaataccaggaaatcctgtccaaaatttttccaaagacaagggaatccggc

SEQ ID NO: 73593 - DNA, 361 bp, Glycine max
  Clone ID: jC-gmfl02220079d12d1
gctaaaaacaatttctgaattaaaaagtttataaaattaaaaggtacattcatgtttcaatgtttttaaaggatacccgtattgtaattggaaatcctgctatagaaaacagcctgacaaagaatttggcactatagctcatgctaggcaatccttcaagcttttctcaccttaagtggaataaacctcaaaatgcttggacttagatagaatccttagtacacaggtagaggtcttcctagcatttctcattgatcaaattatgtgcattagaccacagtgtaaaaattgacaatgataaccgcttcataacccccgatattgtaaaagggcaaatgaagcttctacttccatggacttg

SEQ ID NO: 73594 - DNA, 512 bp, Glycine max
  unsure (1)..(512): unsure at all n locations
  Clone ID: jC-gmfl02220079e01d1
gaatataaataaaattatataaatatactttgataaaaataaatagtattttttagatgtaacattttaaatctgagtttattagtagaccaaagatcctatggtggctctttctccctcactacacaaactatactatacagcaagttgcaaatattgtacaagaaagcagaagggactgcagatgaactgccgtatgaattgaaatttccatacacattggaggtcaggtggtggtaaaggagaaggaaattaacacatgtatgttcaatgcggcttcaacacctcactttctctcaacagaaaagtggtagtgtaatttccacctccttgcttctagtctaattgctttagatatgaattacccagtctgaggtagctgcctccaattcagcatttggtgagactgaggatgcctttgcaagaaagatgaactgtttgttataccattttcctctcctacaaattggtctgagtaactagaagctggnggagaccatactggaactaca

SEQ ID NO: 73595 - DNA, 525 bp, Glycine max
  unsure (1)..(525): unsure at all n locations
  Clone ID: jC-gmfl02220079e02d1
aggaaaaggaaggagactttcatatatatatttatgtgatattgatatagaaaatgaataggaaagggttgtacatcagtgaccacgcaagaaacatgagaaatgaactagagctaattaattaacccctcgtctcaatctcatgatggaacaattttggagctacgacgtggtggcactgatgatgatcgcagaagaaaaatctcttaactggagtaaggtggtggcttaggcatatccttgacgattccgcagacaagctgggtctctgggaggttgtactcatccctaagggacctgttgggagacaagacactcacgtacaattgctgtcccaggtaacgattctctgccatctncgacctcaagttccacatttcagcgttgtcaaaagtcaacatgattgcggcccaagactttgggaacacctggatggtgtgcctgctgacagcatcaagaatgttgtagcacttcctcttctctgggctccactgccccggctcaaccgcgacggcaaagaaagag

SEQ ID NO: 73596 - DNA, 440 bp, Glycine max
  Clone ID: jC-gmfl02220079e04d1
aagttatgtaattagttgcttcaattcccaacgaaggatcaaatacaacagttcagtacttagacatggacagtgagaacaacacaataatgatactagaagtttagcacttagaaaaactgtaatttgccctttattgattagtagcacagtgctgaaagtcacagcagagtggttagggattttgatcttgggttgatgatataatgagttcacttatgagattgagggtcacaaaccccaggctatatgaataagtgagataatctggaggccaaactctgttgtgctgcaggggaaacgccattctgacctatcattgactgcgacacagactctgagaggaggttatgctctataacagctctggtcacttctggaatggcatcatgactagagaaacttatcgttaatgatccattgggtgagacagtgaaaag

SEQ ID NO: 73597 - DNA, 345 bp, Glycine max
  Clone ID: jC-gmfl02220079e05d1
attaggcgaattatagatgtcctaattttattgaaggtagctcatcatgttttttttatgcttctcataacagactccattcactcactctatgaaccccaaccaaccaaccacatgatactgatattgaaaaggaaaggggaagggtttcgaaatgatatccttaacaccacaatcccctaaacgacgacacgagaaagaaaagaagagaaaaaaaaggcaaaaacgacaccgaaagaaataacacagattcagagattaaagccgcgggtcaacgtcgtctaagagagttgaccgcagttggcgatgacaacgggcttggaggtcctgcccgagctggatccg

SEQ ID NO: 73598 - DNA, 500 bp, Glycine max
  unsure (1)..(500): unsure at all n locations
  Clone ID: jC-gmfl02220079e06d1
gcaaattatatatgaaatttcaacactttctacactgtctaaatttcacaattaaaaaaataaactgatcaaataaatccaggaaaacaaaataatagaaaataagaaaatagtaaacaaaacagtcctggttgaaaaattacctctggtctaaacatccaagaaaacagcatcagccatctaatgatggccgactactagataatgatattggcatcagaggaggagaagcaatattctcagatatagatgatctatgagaggattctagtgttcttggcatatgtaatgctgccactcttgcgccactagaaggtatggagaaactacgagccatggcctgaggtggcattggcagtggagatgctgcacttgatgcaaccaaattatttgcagtcaccttttgacctctagacaccaatggaccagaatgaccccactaacctaaaagccttgaattggangggaaactgggttgaggcctaggagttcatgaagct

SEQ ID NO: 73599 - DNA, 524 bp, Glycine max
  unsure (1)..(524): unsure at all n locations
  Clone ID: jC-gmfl02220079e08d1
ccaaaatataatttttatttctcatatgcattggtaaaaaagacacaatgttcacatgtgaatggcatttataaatataattactaatttttcagtaaatgaaagcatctttttactagtagatctcataccttccattttcaacatttctagtaaaaaatcactccatatgtctattgcccctggtaagcaccaatgaacacaatcattatatagtgtcatgttctcatttggccaatacccatatctattggggtgaccatctggtctcaataacatagcttgcgtcgtgtctagtaacatgaacttcaatcctttctttatgccttctttctttgcaattttgaactcctccaattgaagtcatgtgtaattctaaattatggccttctaactttgnttcgttattcctaaatggcttagttctcacgcaatttccacctttattccataacccatttncaagtgagatggtgaaaatgttctaagaaatgttatacccttaaaattctctaactgatgat

SEQ ID NO: 73600 - DNA, 540 bp, Glycine max
  Clone ID: jC-gmfl02220079e09d1
aacaataaaacaaacatttattataacaataacatagtatccctcacagatgaaagggatctattaagttccaaggaaaataactacaacacactaattaagaaacaacaaatgacagatagagtatcccttggaggaacaaaccctagcagtagcacacacataatttagatttattcatcgtccacctcaggataaacacgctttatccttacgtccttaattgtaacaggcttgtccccatatatgggagccagtgtgacagaaatactatcatcgtcttttgttactcccaagtctttcaacttatacgttaatggcaatttgaaagaagctttggtgatgttgttatggttgacatgcggcgagtgaggcaaagtcacaaagcttcccgcaaactctgaatcctggggtccaatctcattgtcgcctgggtcgttgatgaacacatcaaacctcacaccatcagtgctatcgtactcaacatctatcactaacacctcttctacgccttcttcttcttcttattctcgttctgga

SEQ ID NO: 73601 - DNA, 334 bp, Glycine max
  Clone ID: jC-gmfl02220079e10d1
ggttaaggtaaaccatttcaaattttaaaacagacactattacaaccccgggaaacccaagatcaaaccttatgagtgaaagagacagtagctagccagctacaactcgggggggccacattccacaaacgcgaatccattcccaaacaaactttagaggaagaagaacaacaaaaaaccgaggcaaacttgaaaacaaggaatcagaaaactggagaccctggtgatcaaaggggccccccttggacagatcccagggctgctgatggaaagtgagccaaatgctggtttttgcaacaccccaggtggtgaagaccctagtggaggactattg

SEQ ID NO: 73602 - DNA, 378 bp, Glycine max
  unsure (1)..(378): unsure at all n locations
  Clone ID: jC-gmfl02220079e12d1
accatatatatatagagagagagaatacgaagcacactgatcacaggatgatgctctctttaagtagggaagcagatcttatcagtacacataggtaggttgaaattctagctctagcaatctagctagagaaggtagtacttgcacaacacacagcacatgataatttattttatacacaatctcattctcatggtgctcaagatgcatggactaattaagcaacaatgttggtctgatagggcagtgtccacagantaaattgggtacccataaaatggccttgcttccaaggaaatggcaacagggttagttccaggatcaactccataagttgatgaagcatttgatgattcattccagaagtatttgagtggc

SEQ ID NO: 73603 - DNA, 504 bp, Glycine max
  Clone ID: jC-gmfl02220079f01d1
gaagattgtgaacattgctcaaatcaatatgcaagactagccttattctacatggtgtcacgattccagtgtaggcatttacaagatgaaacaggctataaaaaccaactgccatagatgaagcatctagtttgagcagcacccaaatgtcttcaaaacggaggaatcgcctttcacatttattgactgacctttagatgggacagcataagaactggcattcttgccggtctcaacagttctcttgctcactattcacgatatctgagaaagaacctctgtaaatgcattttcaacatcggttgcttgtaatgccgaagtttccatgaagctgagagattccttgtccgtataagattttccatcttctgttgggacagcaacaaggtgtcgaagatccgacttatttccaataagcatgaccacacagctggggtctgtgtgagctgtcaactctttcaaccatgttgcagtattctcaaatgtagcacggcgtgtgacatt

SEQ ID NO: 73604 - DNA, 530 bp, Glycine max
  Clone ID: jC-gmfl02220079f02d1
gaggcaagaaatatatcttcattcaggtcaagtggatgtattcatccacattggatttatattcttgtgtctgtttcaacttgtaaccaatttcttcacagcgaagaaaaaaatttgtatattgaaaataatagaaaaacgtacaatggagaacactcattttcttttgtagaaaaaagcattatccttgcttacggtaaaatcatcgagggaacaagccctaatattggaatcccaactcatgcctcaccatttactagaaaccagtaataatctccaatcatagctcgaaaaagtcattctggaagatgcacaaaaattgtaaaactataatagtcctcccttccatataactgcattagttcagcttggaaaagttgagcatgtccaaagagcaagactccaatccttccttacacaatttcattgttggcagtggaccagcttggagaattcgggcagatacaagtcctagaacaatgaccaaaatataggaggcatcccttatgcataaaatgacgcaaaaatga

SEQ ID NO: 73605 - DNA, 391 bp, Glycine max
  unsure (1)..(391): unsure at all n locations
  Clone ID: jC-gmfl02220079f03d1
gatgaattgagattttnttttacatgaaacaccattaatgtgcacaaacgtcataattaaagttacatacgttacactggaatacataccatatcaacagcaatagatgatgacatttattatcaacaattcaagcaataacccaaaattgaataaagtatcatcactaaaatgcggccttcatgaaaataagtagaggggaactttggggtattggtaataaaaataggatatggaggcttatatcaaaccctatgtttgggtacgatttatggcccagaagtgattagacttacattttactgatagatccttggcattaatctcacggaattcaaattagaaatcacggtctttagcacactggggatagacttgcgggtagcgggtg

SEQ ID NO: 73606 - DNA, 450 bp, Glycine max
  Clone ID: jC-gmfl02220079f07d1
cccacaatagactcctcctttataataaaatcacaggacaacaaagaaaaccagaaaaatgtgataatagtttctgtcaccacatccataaaaaccattgttaagactagtctgactagaatctatacgccaggtcttgaacaaaccaatataaaaggcttacaaaaatatctttgcttaaatagaaaatagaaataacaagcaacaagcaccaaaagctagttctttggcccaatatccttgagggcacaaatctgttcctcacccatagcagacatgacagacacaacaagatccttgccctcagcaaatccatcctttatctgagtgagcagactctcatcagtgggaagcttgaggtcatccttagtgttaccattttcagtaagcagactcaaaaatccatcctcagcaatatcaatgagctggtaatcagtacgattcacatga

SEQ ID NO: 73607 - DNA, 507 bp, Glycine max
  Clone ID: jC-gmfl02220079f10d1
ccaacaattaatcactatttaatttcccccacattattgttttcccttttctatttccactgttacattatgtcatgacaacaacaatagtaataatgaaagcctagaaccaattaagattcctttgtccctaactagcccaaagcatgtttaatcattaatcacttgcacccaccagcaccaaacccaattctcccaccttcaacatcatacacaacctctattgttctctgttgtacgttcccatatatagtaacatcactatcgtcaccatttgcggcaaaagccaaacaaacctgcttggtactcgccacgaagagtataccctgtggaggcagcttcaccgtgacgccgccggcgaacgaaaattctatcgtgggaatggaaaacaccttgtaaccgctgagatcatacacgtgtcgaggatggagagttccccggcggagggtattttgacatgccttgacgaaggcggatcggaggcgccgtagccgttggggggaggcg

SEQ ID NO: 73608 - DNA, 452 bp, Glycine max
  Clone ID: jC-gmfl02220079f11d1
aatataaaatcaaatatttattaagaataaaatcatatttaagtctattaatcatgtatcccaaacatttatgccttttcatggtattcaacggtaatcgggaggatcacctactttattacaatttataaccaacaagtgcagggtaaaatgtcttcactcaaaagcagcagaggcaggggctggaggatcaacaagaaatatatcaagaagttcatcaatggatgtgtagttataatcaggatatagctgggaagcttcaagggcatcttctcctatctcgaacctcacgagggcccctctaacaaatacactatgaaggatagaaacgggaatattgtgtgagggggtaaaggtctgtgaatagggtgacaatctttttctcagcaacaaaatccttgcgaaaattttgccacttttttgctcccacaatgctatcaactcattttggg

SEQ ID NO: 73609 - DNA, 525 bp, Glycine max
  Clone ID: jC-gmfl02220079g01d1
gtgaaaaactgatcatcaacatcatcagttcatgaagtttgaagcagccgaagcttgtctacatatatataataaatcaactatctgattgttttatggtgaattcttaacaccacacctaagtactcattgaaatggattgcaccaactttccacacaatgtaagttgctgcaaacatcactgtgctgataaaaacaaatgagaagataatgaaaaagagatcagaacctccaggaaattggaaagtgaagcctgttgacaaccctcgtttgctatcatcaaacaaattaataggggcctctggaagtccagattttttcttccctgaccctttgtcactttgttttgaagcctccaacaccctgctgctcatgtctggcttagatgcttctgattgcgcgtatcggttgatggatcgagctgcctttaacctctctgttgcagtcatggaagctcgctggatgcagatcgtgacttacgagatgcttctgacctttgctattggctaattgaaccattggaaa

SEQ ID NO: 73610 - DNA, 428 bp, Glycine max
  Clone ID: jC-gmfl02220079g02d1
cttaatggaacaagagctcataattcatgaaagcctcgaaaagggaaaacacctttgttcagggcccctacatgactaagtaataatactcaggatcttatttcatagaaattaaggagcaacttaaaggcttgatttgagagcttaatcatagtccaagggattaggcagcttaaaagtcctagtccctttgttgcttcccaggaggtcactccattggtctccaacgtttccaatgattctgtatccctccttttccagcttttctttctcagctgatttggattcaaatgataacttaccagagtactcagatggatccctgagaattaacttctcccatgtgttgaatccaacctcctttaagttcttggctgttacatcccctaaactcaggggtctttctgataagaatacaatcttgatgc

SEQ ID NO: 73611 - DNA, 470 bp, Glycine max
  Clone ID: jC-gmfl02220079g04d1
agctaataaagcatatgcttaatggctaaagttcattgaatgcaaacaatcgtatcattttaacactgaaaaatgggaacatctggaattttatatttgtcaataaaaattaaaaagcttttgatgtttacagtggcatatataagatttcttcatcctatttagcaattagtatgaattttccgagtccaatgatcatatcatctgtgaattatcaacatactgaagaagttctgagccaagttcagagacccaattcactgcagtgccaaagaagagctcccagaaccacagatccaatgctaagactgatgaaaagatgagcaatgccaaggtctgatagcggttcaatggccagcctgaggccttagcaattgtcttcagaaatggaaatgaatcagtatttaggtcctttttcgttatggaccaagctgttatccactgtacattagacgggactaaatcaaaat

SEQ ID NO: 73612 - DNA, 537 bp, Glycine max
  unsure (1)..(537): unsure at all n locations
  Clone ID: jC-gmfl02220079g05d1
gtgggaactgttttgtcacggacaaagagaagactatggtatttggttcagagtgaaggcccccccttcgtgtctgtcttgtacagttgggttacattaaataattgaggaatcttcttcaacatcaagttgagtgtgaaattaaggtattatgtacatttttaactgcaagtgttgttttttaaaaaaagcaaataagaatttgtttatttttaattttagtatatactgggaataatgagatttgtcttctaggctgtgttcggtttgcaaaagatggaatgaattaccggtggacggaaatgaagtatgcgagtttggttgtgatgattttagagaaagtaaagttacaagttgtgagatccgtaacatcaattttctttctttccggttgtagtaaaattatttttttaggccacaaaataaatttgtaagaaattaattnttttaagaatttttttctttgattatctaattatcagattatatttaggcaacanaaattatttttttagaacaaaaatctagattctttct

SEQ ID NO: 73613 - DNA, 419 bp, Glycine max
  Clone ID: jC-gmfl02220079g06d1
atgcataaactgtcattatgcaatttctaatacagaattgttttctaataaatttgctattatagaactatttatattttataacatatactcctaaatagctgccagtaatccattaatggaactaacttagattttagttcccatcatacgaagttgtctagtcttcaataatattgtcttcaatgactctgattgggtggagctatggacaaaattatgcttattttcttcattgataactatactttcaccggctaagattgaattcaggaattcatcttcctttgtagtttcaaatggattccgcataacattgtcttcatttctaaaataggcattgttaaatgcatagtttggaaaggatgctccttcctgctcaatactagttcgagactgttgtattggagagaagcaat

SEQ ID NO: 73614 - DNA, 466 bp, Glycine max
  unsure (1)..(466): unsure at all n locations
  Clone ID: jC-gmfl02220079g08d1
aatctacttcccacaagtcacactttcattccataaattaaataacaaaacagagaaaccaacattagtcacagatcttatttaatctacttcccacaagtcacactttcattccataaattaaataacaaaacagagaaaccatgagctataattatctcgtagtgcccacttcattcattgagggatcttattgagcttacaataagcataatccttgtatttcttggttttgtattttggtggattgtcttggttaaccaactttgggtgaggaccaacttcttgttcctttttgggttctatgaacacgggccacgacattcttgtctcatctttgttcactgttgttctgtgaaaaactgccttatattttccattgctcagtatctccatttggtcgccaatgtgaataacgagggcattggggacatacttaacatcgacccatggccatncctacatg

SEQ ID NO: 73615 - DNA, 338 bp, Glycine max
  Clone ID: jC-gmfl02220079g09d1
actataattctcagctttaattgtatcaatcatcatgatgtaacaatttcatgttacaagatctagaagtaccagagcttggtaccatcctacaagttacaactactgatcaggcggtgattgggaattaacaataattagaatggccaaataattacaaccaaagataatacacctttccagtatcagaaattctgaaagtcaatatttagtcttcatagatgcatcatttacagttttatacttgagccttgaaaagtgactgcaccggtttcggagacaaatttgccacactcctgaacttctgctggttatatttttcgcgtatagaattcaga

SEQ ID NO: 73616 - DNA, 515 bp, Glycine max
  unsure (1)..(515): unsure at all n locations
  Clone ID: jC-gmfl02220079g10d1
cagagagagtgtcttattgaattcaaaaacaggagttggctttagttacccttacaagatagaaaacagatgcaattattgaaccacgacttaaagagtaggactttattcaacaaactgatgataaacctaaaataagacacagtaatgatcctcttcaacatcatattggtttcctgattccattcttaagaaactgtacaaatgcagctacgtagtgatcctggtgcagcttcaagtttcctacaattgcagcagcttctcttgtattatttctgatcttctttccttcctccaatacncatggcttgtctaagggatgcggcaatgtcatttctagtgaatgatccatcttcatttcttttcacttcaatggctaatctcttttccaccaaaaaccttgcattaagaggttgctctatataaagggtaataaacnaagtgtattcccaactggaaggttttaatgacagaaccccagncagagtgaaacaaagatccttcaatagatgaat

SEQ ID NO: 73617 - DNA, 496 bp, Glycine max
  unsure (1)..(496): unsure at all n locations
  Clone ID: jC-gmfl02220079g11d1
gcaaagaaatatccatgaactataattacaaacttcctagggtattatttacacgccccataggccataaatggctttatttgaattttatcttcccatatcttacagtttaaatactcactcaagaatctgttcactcccagacattcacaacaataaataacttgaataaaaagaacatatacgaacgaagttgtcgagcaggcagagacgagaattcacaatttcacaccatctggacccaaataccgtggcttggaacttcttgatggaccacaaacagcagatagaaacccggtggcgcaagaacagcggaagccggcgcggtaacttaacctcgtgcgttgattctccaaccccactaaatggtgcggcttcagcaccaacagcctctgattcatggagaacgagtgcgtgttaaatggcggncccagcatggtaacagacaccgaatccccaaccaaagtcgcgctcaccttaaaccgaagccttaacg

SEQ ID NO: 73618 - DNA, 524 bp, Glycine max
  Clone ID: jC-gmfl02220079h01d1
aaaattcaaataatatgttataacttaataaattatcgtgcctcaagaatggcatattgtagccaggtacctagcaaaccaatggcgtatgcttcaggtatcggtacaagactgcttacaatgatacaagtcagtgatcgagagcacttcgaattgaaagtgccgggtctagcactgtgcctctggaaataaggtcgtgatttaagaataaaacaataacggatatatcatcatgaaaatggcgtcgaaccttcttgtcaatcttacggaggtctgaatatcgcatttctcgttttcttgctgcttcgtgtagagcagccttgataagtctcttggcactacccgcatgtggattgctgtttacaatatccacggctttctcattactcaagtgctcccataaaccatcagatgcgaatataaggaaggaatcatttggttggagaggatgagaaagaatagtgggattagcactcaagatgggcatgttcattggttcacgaagtctgaattttgcattaagt

SEQ ID NO: 73619 - DNA, 522 bp, Glycine max
  Clone ID: jC-gmfl02220079h02d1
acttataaacgaaactggaggtatcatttatcattaatgattattatccgaacatatgtatgcaaggccaaccagaacaattgtcactagattgattctcatatcaatatacggggtccggccccatgtgtagaaaaataaaagatgggtaataaggatttttcttaagcaatatccaaggaaagaatcccgaccaaattgaaaattcaaaaggaaaaaaaaaataatactaacaagcgggctgccaccaaaagccttaaaatttgaagcaataaccaaccttgaagttagcccccaccggaagctaccccaagttgataagacattccaacgaaggaaaccttagagaaaacagggcatttgctcctattaagcggctcccttttgtttcaaagttatcttatccccaagactgagggcaattccctgagttttacttcttattctgatgtatccactcaacttaccatctgcttgcttttcaatgctcacattcaccaaagcatttttcccaaaaacact

SEQ ID NO: 73620 - DNA, 515 bp, Glycine max
  Clone ID: jC-gmfl02220079h03d1
gaagaaaactcccaagtatcattgtctgattgacaaattgtatctggaactgtttttatcaaacatttacatgctctgagtagaatgaacatcctatattttctcttttcacacctacggctctcatttatgctaatccagctattatggatggattaggttcgccatcccagtggctgagggagctgagatgggactcccagggcttaaatccaataagccttcttattgactgtgccaaatgtgttgcatctggaagcatcaagaatgcagatattggccttgagtacatatctcagatttcatctcctgatggtaatgcagtgcaaaggatggtcacttatttcagtgaagcacttggttacaggataataaaaaatttgcctggtgtatataaagtctctcaatccatcaaaaacatcattatcttctgaagatatccttgttcagaaatacttctatgaactgtgtccatttttgaagttctcatacctgatcacaaaccatgccattgc

SEQ ID NO: 73621 - DNA, 522 bp, Glycine max
  unsure (1)..(522): unsure at all n locations
  Clone ID: jC-gmfl02220079h04d1
acaataaaaaatatattattaagaataaagaagttcaattcgagtttgaataaagttgagctagtgtaaaaactgtattaaacaattctgctatgtcaaaggagcattacaattgactagcatatcatgtctgtcattttatgcatccttccatagatctagctatggctgagtatttggtctacgaaggaatggaataaaccccctgttcagttttaaattatctaagccaataacacattctgcttcaggagaatttacgatcattctcgaaggtgcttggtcacggtcacaacagcttgccttcttgggtgtccttttccttataatagaaggaacattctcataggtcattgctaagtttcttagcaaagtttctgggttgatgtcgcctgtgtcattcttgagtatagacgttggnggagtacaaccgttattgtatgcacatgccaatgcatgtgtgtttttggacttagacattcactgaattcatctacactatgtggcatagtgttgtttgag

SEQ ID NO: 73622 - DNA, 492 bp, Glycine max
  unsure (1)..(492): unsure at all n locations
  Clone ID: jC-gmfl02220079h05d1
gtcaaacatcggaatttcatgattatctttcgtactcctcaatttacatcattaaaatgaaaacatcctccattcaacctaatggaattctgcattacttttgcaattcaagctacaaaagatttcaaaatccgaactaataactaacaaagaaaacagagataaaactacttaaaacttcaaaattagaaattataaggcaaaaatggaggacagatcatctccatttctcttgtagatctttcctctgggataatacccaagtgacaaatattgcagctacaagtgcaacaattgttagaagaagcaaagcatagctgaaatcttcagttagtgaatcgtaagtcctagaaggagcaatctgagtaaaaaatagatcaactccataggcaaagacgagagatgtagactccagcttggcaggcacagttacaatgcctcgaagaccttncactttagggaatgcgtaatgtangactgagaaataatggg

SEQ ID NO: 73623 - DNA, 473 bp, Glycine max
  Clone ID: jC-gmfl02220079h07d1
gatcaaaccaaatcctccttagcacaaccacattcattatattacagagagttggcatgcacaattgcaccataagtgcaagaggctgtctaatgccatacatacagagagaggcaatgtatctgtgcctgtgcctccccagagttttaattattattattattattaaattgggccaggagtatgtatcttagcaggagaatacataaagcttaaggtttctcccaatcatgagatatacattataatacaagattaagctggaacagcttccggcactttgccattgcttgagagtactaagctatcatagtattcaaccagtaccttccaaccaccagggcacataaatccatcaggagggctttctttggtccttgccagtgtgcgcatctttgtgcctgatatgaacgggaagtcctgaggccttgaagggtcaaagaatgccattttaccctgagtcttgtcatatg

SEQ ID NO: 73624 - DNA, 386 bp, Glycine max
  Clone ID: jC-gmfl02220079h10d1
caagtaaaaatcctgctatgcaccagtaaataaatattatcatctgatgacctgtaaatttaaacatgaaaaataccattttatccagctaaatcaaagataaggttaagttttccctagcacattatctacatatgttaatagtctgcattgcatgtaaactatcagctacagcttctgctcgcaatgtagtatggatcttcccaaccattcagtttgacattcacaactgattccggggcctggttatcttaatttccacgacacatcagctaatgttctggggacaactgtcgttggtctggtggctgtggccacatttgtggtgccatgtaggggtgagactgctgagcatacatgtttgggtccatcacaggcttacccat

SEQ ID NO: 73625 - DNA, 375 bp, Glycine max
  Clone ID: jC-gmfl02220079h11d1
gttattacaagcaggtccaaaggtgacaaaaccgacagcatcaataaatacgggtgacatcaaaaaaacaaagctcagaacaaaaggagaaaaaaaaaaaataaggacaaaacaaaacattacacaaggaacgaaaatattagaaaccaaaaccatatcaaccttaccacaataaattgggggagaaaaatacaccctgcccggaagccttctgccccctataaatttgccttgttcaaaccaattctaccattctcaatccagggacccaacccattaaaccctggcgcatcagcaccacctaaacctaccttgggggcccagaaaggaaaatccctgccccggaaattaaaactagcacactttaataaccca

SEQ ID NO: 73626 - DNA, 427 bp, Glycine max
  Clone ID: jC-gmfl02220079h12d1
agctaaattgttcgtttcttactaagcaatttgctttgtgttcaagataacaaagaaacagttacccatctttagatgatgggaatggggaaaggcataattactacccatgttcaaagtgacatactagtaatattagaactacagaatggtagattccaacccatgcagttaagaaaacatttgggtgtggatctcatcaataagcctaaattacacaaacaattacataaactgcaatgtaagttaccatgcacctttaaaaatataaggtaattagcttctgctgctgctcctcagtcctcagcatctccaagtagaaactgagatgagttctttcttctgccagcatagaacaagtgatgaaggctttctcttcacatgaaatcccctacaggtgccctctgaactagacacttagcttgag

SEQ ID NO: 73627 - DNA, 522 bp, Glycine max
  Clone ID: jC-gmfl02220080a01a1
agggaagagaaaattaaatgatagtagaataaagagggaattcaaaaaagcagtgtattcaataataatgctctaggtaaatataaaacagctcaggatctaaacacacaaacatggcatcttttagcacacatataagatgaattgcaagactatcatatctttcaggatgttcccagttccctgttcaagtagtcaatgaacattctttttgcactatctgcatcagaaggaggtggtggcccacttaaacttgtttgccctgtcaattttatgaaggtacggcgcatcctacgaagctctggaagcccaactgaccttgaaatgttaattacaggcaagtctttccctatggaaactccattaagtggtcctccaagagcttgagattgtgcttctactatagcatttgtgacctcttgtgttgctttgtccaactcatagagagaatttgcatcagaaaaacgcgaggtttgagttgcaatagttggttgtagtatcttaacatccctggttttggag

SEQ ID NO: 73628 - DNA, 516 bp, Glycine max
  Clone ID: jC-gmfl02220080a02a1
cacaaaactgtagaatatatcacaaatacctttggaagaacctatagtttctcggtacataaacctcaacacgacacaactctcactcacccctccaagccagtgcgaaagcgcaccaaacaaaatttcataatatgggaggaaaggaaaattaatatcctttaaaaactaaagaataacacaagaaataattaattaaaaaatggggggaaagtgtctcccaaaaaaaaaaacgagaaggcactcagcatcctggtaaaggcaatggacttctggccgacccaaacagctccacttaaaactgtgtaacaggacatttcttcaaaaacatacttgataagtaaaacaagtaaaataattgcataaaattttcaatttgctcattgtttgcacgatcaactccgttgagcaaatgcagataatgcatttgcatgtgcaggtgggagattgctcagaagaggttgaatttgttgcccatataatgaacatagatgagaaaaagctctgcctactaca

SEQ ID NO: 73629 - DNA, 477 bp, Glycine max
  Clone ID: jC-gmfl02220080a02d1
ggaatcaaaactataataatcattttcaatatttaaaatgattttttactacaacaagtgtgaaaaaattaatatttatattatatccattacaatacaataatacatcattttaaaattagtctaatatcatccatgtaacgacgaacatctgatccaggaaaaatttgtctctcaagccatagccttaaaatctgcgttctagttgtggttgctacaagtatttaagtgtccaattcctgctgttgcatagtacgcacaagtagtgcaaaaatataagcaacaatacgcattcacctacgtagtcacacatgattgacaagtgagtatatgtgcgttacaagacttgccttaattgatgaaaatacttttttccaaatctttgacaaatgccttagcatgaacatcctgatttgtagcacccatttcaattaaggaagatgtcattgaggcataatcttcaatagcagtggtcct

SEQ ID NO: 73630 - DNA, 443 bp, Glycine max
  Clone ID: jC-gmfl02220080a03a1
aaacccgcagggtttttatagacaccaagttcaaaaaatatcccgtttaagttaacggggggcgaccatttgcatgttaattgaaatttagagacaaaaaacctggtggtgcgaaagcaattttacaggggaaaaatcaggttgaacccactattgattttgatgaaggctgttggcattcaacttaagaacggttttgccgttctctcttaaatttttaaggggctgaaagcttgtttcaagttggctactttcttgaatatacatattttgcattggaaaaaagagagacttcctctggggcccaagggacaattctaacttcaatgaatcctcactttggggctggtcatgcctgaatgtattctctaatccaaaaaacttttgagcgaacatttttgcttctttcagactcttctttatagcacttaatctacctttgg

SEQ ID NO: 73631 - DNA, 514 bp, Glycine max
  Clone ID: jC-gmfl02220080a03d1
gtaaacatcacatgtaagtatccaatcaccattacatatccttactctgtggctcaatgcgcaaacaaatcccgatttagttacaggatttacaattaattatacatcaataaggtatagcgtgcttgtaaactcttgagaagtaagaaaatacaattcagacataaaaatcatatataactattaatttcttaaaattacatccaaacatgttgtataaatgtgaaaccaatcacgataatagtgacttactatttgatggacataaaatgtaagcaataaaagcctatgagagaatggatcatctgggagactttaaagattcaatttgagatttgcctcgaggtcctctcattctaatgaagagtctgtattcatcgcaggtcattgctgggtagagtgagggccttttcggtgttacaagctcttttattggttctatgggtatgtcactcttggggttgcagaaaaacgcaagagagactctctctttatctgaaattactatcactct

SEQ ID NO: 73632 - DNA, 490 bp, Glycine max
  unsure (1)..(490): unsure at all n locations
  Clone ID: jC-gmfl02220080a04d1
gaaaggaaacatcgaaaacaacatttcgataaatattgcagacattttatgtcccctcaataattgactgctgtcaaattgatgcgtcttaatagttacataaactactacgaataanaatggtctaaaaaccctctactgtcacgagagttacttgcgcagcagaacatgaaagaagactgcaactgcttcagtcaatcatcaactacaaggttcttcattttggattcgagttcatctgcaccaccttcttcatcagattcttcatcattgtctattccatcagggtcattttcgtctaatggaccgagcatgtctggagattttttaaatatatccttcaactcatcaatgccttcatcagaaatgaagttcccattaatgttcagaagtttgaaatcagccttttgcaccacagtcacagccagttgttgagccccagccctgcttatttggttggcacttagatcaatttcctttaattggacat

SEQ ID NO: 73633 - DNA, 486 bp, Glycine max
  Clone ID: jC-gmfl02220080a08d1
aataactgagattttggatataaacattgcataaagcgtgacaaaacttgcagcaatatgttatatacaagatttgtccaaagatgtacctcgcactgaactccaacaaaccatacaagtgagaatgctcgtatgtcacatcatatccaagtttcaccaaatcaaccaacaaattacactcatttttcacgtaaatagcaataaaagaacactgcacaatacaccaattttaacgatccatggggaaaaatcaaaatctcatcgtaggagtgttactaaaattcagttgttgctcccacatttgactagggaattgaagagttaatcccacacttgcgtacttgaaatgcatctccatggccttgcacgcgttcccttgtccaggagcatcagcaagccgacactctcaagcggtagcccgaacatatacttgctttggtgagctctctttctccagaaaacaattgatgagatccacttaacaat

SEQ ID NO: 73634 - DNA, 473 bp, Glycine max
  Clone ID: jC-gmfl02220080a09d1
gaaaaaaacctcccattagcgtaccatctattaacatgatcttattcagcggaaagcagccgccattttttcattttttacagtggcagtgccaatggcaataataatgcatgaacaaacagaaggcagaagctgcacaatttgctaaatctagtggttgacgtgtagagaacctcacaagtatacataaagaactagctagggagaagattcatctgtgcaagagaagaccataaataaagattacttctgtcccatttccatggcttccaaggttgggctatggtaagagtaaggggtaaaggtatcaccatttctccttggttcttgattcgtaacccgttcctccatggcctgcccaacaggtgattcccgattaatgattggattggttcgtgattcctccattgcccggaaatatgcatatggaccccatccttcatcatatagggcggagggaagaactgcatata

SEQ ID NO: 73635 - DNA, 501 bp, Glycine max
  Clone ID: jC-gmfl02220080a10d1
aattaaggtcatgaaatattatgaataaaagttcaaggaaatatacactctaagttttgtacgatctaggttttgtttttaccctatcaaacattagagcagactctcccaactcaacatgctccagttttagctaagcacgatatcttccatgaacaaaaaaagttcctgatatcttccaacaaaaatacgtgcatgatatcttccatgcatgcacatcttgattcttcattggtttgcttcagaatgccacactatgtcttgcaaccctgatgatgatgaaaagcttttgtagaacttgtgaaactctagtgtgtcacccccggtctttcgcagttccaccatgtgcaaggagggagccacttcaaaaacctctgtagcaactgaaaggtgacccttccttccgctcttatcaccttgcagcttcatcttataatttcgcttgtgaacattaaatcccagaggcttcgcagcttcctcaatttttgacatgatttcatt

SEQ ID NO: 73636 - DNA, 465 bp, Glycine max
  Clone ID: jC-gmfl02220080a12d1
gtacttgcatgatgtaagctctggaattaataagtcagtgaattcccgataaaagcaatgcccataatcctgttacaaatttagctgtacataaactaatgtttaaaaacattttagaataagcatgcatcttccaggatagcaagtagctaatctgcatctcattaaccacctgcactcaaggactttcaaaggcaccaggaggacattggtcatcgtgcaatgtatcttttccatggacacaagaaaatttgagtttgacgaccttaaccaatttcctagtctccttattcaaagctagaatatttggaggcattcagtggctggaatttctgatgatacttttgacgtacaaactattactcccccgatattgattaatcttcaaagtgcaaaccaatttggaaatcctgtactaacatagctcctggttgacagctctttcaatctaataacgacacgcgt

SEQ ID NO: 73637 - DNA, 531 bp, Glycine max
  Clone ID: jC-gmfl02220080b01a1
gaaactcaatccattttttatattagaaaatgcatggttcaattttcaagctttaatttggtatgtttgcccccaccaatagactacaatttttgtaacatagtatgacttgcaaaccaattgctacacaatgcgtgtgttcttgctatacttccatcagttgtctaagtcaataaaattgatcttaaaatctatgcaaaacttctaccaatcagtaccactgtcatggaaagtttttccagaacctcaagtttaggtccatagggaagaaaaaaaagtcaccaactccataattcaagtgctcactagcaatcttacaaacctggcaggaagtatttgcatgtcccaaaatgacaggtactttgaagttcatcagtggacccaaatttgctgcttcaacttgagagatggaaagaatgtgatgtgatctatgcaattgcatttgacaaacaagtgggccatttctccatctgaaaggcagcaaaactatcttggaccttgaccatattcaagtcagacaaaagatgtcat

SEQ ID NO: 73638 - DNA, 488 bp, Glycine max
  Clone ID: jC-gmfl02220080b02d1
gcgaacaattctaattcaggtacatccatttgttttggttttctttgcccatgttccgatgattttcaggaacaaaaatctctagtctttggttttcatataccatccaaatatttgtggcaacaatgttcccttgctcaatcagtaagcccccaaaacaaagaaaacattatgttctgttaatgaatagtaatattttacaaagaattaatgtacaacaacccccaaaaaatcatgattttgaaaaaagctggatcctattgacgtagcaagaagacgcaggatcctggaggcaattgcaaaatgcatcctcatccttgggaaatgatattggtagaggatggtcaggaatgacaccaaccttggcaatatctgtatgtgccggtgtctcgtagcgagcaacagtaacaaccaatccagagccgtcagagagctcaaaaactgattggatcttcccttttccaaatgttggctcttcaaacaatacg

SEQ ID NO: 73639 - DNA, 446 bp, Glycine max
  Clone ID: jC-gmfl02220080b04d1
gaatcggataacatttgcatcatatttctttgaaaaacagattctcttgtaagaatcattaaacatgatatgataaaattataataaacattctcataaacataaatgagcaaaaaatgaaggaatgggctttgagcaagaacccataactttatgtgtgtttatgggaaggtaaacaattgatgagtacaaattgccaccccaagatgttttccgatcctttgtgactacaagtcttttatatccaatttaattatttattttaattcttctgatcagggtggaatgggcgtataaatgcagaattcatttgccaaacattgagtgaggctgtcacagtggcctcagtagcattgttgaacaagaacaacctagcagctccatagattgcctttgttggataaacccgagatgtcacaaccgtgcttccaccttgagcaaagctt

SEQ ID NO: 73640 - DNA, 394 bp, Glycine max
  Clone ID: jC-gmfl02220080b06d1
gaaagcacaaaatcaaatatcacagccattgcactaatcaagtttcatactcatacaccaattttttttggaatgattgttactcttccatagcatctccttcaatcacttccaccttctccttcaacggtgtaatctttgttaagaggacctctgtctttttggggaaatcaaagccttttggattgacataggtaccaggatttggtagaaggtggttcctgagatattccttatgtcccttgggtatcacacaaacatcaacattacttccacttcctaggtcattaaatataccagcacatatggcctcaacaactagcttaatgccttcatccctactcaaactttccttgtacttagactcaaatacagacattgcggcacgggaacc

SEQ ID NO: 73641 - DNA, 292 bp, Glycine max
  Clone ID: jC-gmfl02220080b08d1
gatcgagaaatgtatgatttaacataagcctgttccatgaggaccacaatggacccctttagagacttgcttctctagctaaaatttcacaattccaacagccatggctatccttatgaccaaaaagcagaggtacacactcaataggcctgcccccaaggatttatcaagcctcatattcttcttaggcaaaatcacaagtgcccaaagcacccctcccatcaagaacaaaagggtctcatagagtgaagcgttcttaggagtgacatacgggtctggatgctcagaccta

SEQ ID NO: 73642 - DNA, 486 bp, Glycine max
  Clone ID: jC-gmfl02220080b09d1
aattaaggtcatgaaatattatgaataaaagttcaaggaaatatacactctaagttttgtacgatctatgttttggtaataccctatcaaacattagagcagactctcccaactgaacatgctccagattagctaagcacgatatcttgcatgaacaaaaaaagttcctgatatcttccaacaaaaatacgtgcatgataacttccatgcatgcacatcttgattcttcattagatatgcttcagaatgccacactatgtctagcaaccctgatgatgatgaaaagcttttgtagaactcgcgaaactctagtgtgtcacccccggtctttcgcagttccaccatgtgcaaggagggagccacttcaaaaacctctgtagcaactgaaaggtgaccctttcttccgctcttatcaccgtgcagcttcatcttataatttcgcttgtgaacattaaatcccagaggcttcgcagcttcctcaatttt

SEQ ID NO: 73643 - DNA, 490 bp, Glycine max
  Clone ID: jC-gmfl02220080b10d1
aaactgattgatcatcatgctctcattaacaatataaaaactaaacaattaaaaacaaaaatagaaaagaaaagaaattaaaaacagctgattaattaaccttgtagcatcatcatcatcatcataatcatcattaacctatctaatacattattattttcttcccccttagatcaagaactagaagatccattagcaccaacaacgttcaccccatcatagtgattactactcggatcttcagcgcgatcttcaccaccatcattgttagggttttcaaaaaccttgacatcactcccatttgcatcattatcagtagaaatattatttttagtagtaatattaatatcattactagtaacaatattattgttatcctttttggcaaaggtgtttttgttgttatgcatccaaaccttgagaacgcttctatcaacgccaacttcgttgcaaatttcgtgaatcaaatcctcgtcgcgcttctgaatct

SEQ ID NO: 73644 - DNA, 482 bp, Glycine max
  Clone ID: jC-gmfl02220080b11d1
ggagtgcttacatctttatttaataatcttcgttggaagagtacaatcattaattattttattttatttttttcagcagtagttacgacttttggattttacatatagcacttggccacaacacacagaggattcttcttatgctgtgtaactcctggcaacacttcagtatcaatgtcttcctttttcattccttgtggcaattcccagtcaaaggaataaagaagattagcaagtataagatccaatgcagcaaatgccatattcataccagggcacaatctacgaccagcaccgaatggaataaactcaaaatcttgtccataaagatctatgtcgcaatttaaaaacctctcaggtataaactcttctggatctttccaagccttaggatctctatgaattgcccaagcattcacatataataatgtcttggctggaatttcgtagccatctaacatgcattttttatttgtttctct

SEQ ID NO: 73645 - DNA, 441 bp, Glycine max
  Clone ID: jC-gmfl02220080b12d1
agcaaaaacttatatcattgttcaagtaaaaacggggaaaagtacattaaaaaaaaaagagaaaaataaaatcgcaataaaaacctattggcacgctggtatctaaacttcaaaaggggttttgacaaaatcaagaacaacccatgagaatcttctggttaatcgacttcctcaattttggggccagcaccgtttccactgccagctgcaggaccatcctcatccatgggtccacccgcattaccaccagcaccctgggacatttttgctatgaagggattacaaatgctttccaactccttcatcttatccccaaattcggcagccttagcaagttgggttccatctagcccttggatagcctgctcaaacgcattttcaaatttcttcttatcatcagaagacagtttggaagcaattttggcatccctgattggggtc

SEQ ID NO: 73646 - DNA, 342 bp, Glycine max
  Clone ID: jC-gmfl02220080c03d1
gccttcgtccttttttttttttttttttgaaaggaatgttttcttgaaaaagccaaacggcgttgtatacataaaccttcggacgtggtcaaaacgtcatagcctattaaaactcagggggccttgcattttttttcattggtacaccatgaaacggtgccgtcctacccccatcccttgttgtttcttgtgccaccttttgtttaaatcgtgcgcacttaggtgacacctacaggatgaccaattgtcccggcctatggttcggcgggaattccaaggctaagtgtttggacatacaaaacacattggcggagaaccgtggggaccttctaaaaaaacatt

SEQ ID NO: 73647 - DNA, 373 bp, Glycine max
  Clone ID: jC-gmfl02220080c08d1
gaaaatgaaaacatatggataaaacaaggggagagatctgcaacctttgtggcagaccccaccctgcattattacacctttctttgtctttccttacagatctacattacattacattacatacactgccttgctgcttttgctttctgtttgtttccctgacattcatatatgcatatatatccctcatctatatatacccgatatttatattatgtataactgctacaccaacatgcatttggatccatggacacggaccaccacacttattaagaaaaaataatagtaatacttgacgagacaacaagaaaaatgttccaaggtaggcatccgaatattccgttttgctttgttccttgaaaaaacaaaa

SEQ ID NO: 73648 - DNA, 481 bp, Glycine max
  Clone ID: jC-gmfl02220080c09d1
cgctggaaagatggaatttgactatatgtgtctcacatactagtaggaaaccaattgaaccataacaaacaggctagcatatagaaagataatcctaacagtaagttttacatataatacacgtgataatgagaattgagaagaactgatttcaatattttactaaaactatgctaaccaaactacatttacattacttttttgccctaaattacactcttaaatataataatagtaaagccatgagcaacagcattgatcatagccctcccaaaaattcagcacggagctatagagaagcccataaaatgttgactccgtttatcaaaatgttgacactacaatcttcttcaccttgtccaacaaaagtagttaagataacacaaagctggagctgctatcagaatcagattcgccttgttgtggtgatttaggtgccaaggtgagccatggcttggattcagctagcttattaagggct

SEQ ID NO: 73649 - DNA, 416 bp, Glycine max
  Clone ID: jC-gmfl02220080c11d1
aataaaaaagtgatatgataaatatagttgggagggacagccaacaggaacggaggaagagatccgggatctggctgatagaaaaaagaaccttttatactaaaaaaagacggaaggcaaggcattgaaaagagtttaccgcccagattctaattctacacggggggaatatgaaaccgcagcccccttttaaaagtttttttttttttttttataaaaaggaaacgggcttttttggtcgatcgaaacaaattttcccaataatgttcccccatggggctccagctaaaaatcacgttcgtaccgattcgatttttgacctttttcccctaacaatcccacagaatcggtaatcattatcctaagattcatgcactccatgggttcttcattttgaaattaactaaaccgatggt

SEQ ID NO: 73650 - DNA, 480 bp, Glycine max
  Clone ID: jC-gmfl02220080c12d1
agattaaacaccaaatcagatttattgaagcttgcaacgcaaattcactcaacaagcagtctttaaccataaatggggaggcacgcaaactctaaattcaaagatcagtaatttgtatagcataatcccaaagaaaacaaaaataataataattcaattagcttaggcaaatgattcaactaaacatcttctctatggaactgcataagtcggacaatagaaggcatagctaaaagagaccacttcatcttaaggtcagaccgtctgagttaacctaattgcatgaagttttccctagatatccatggctcagaattttataatagcttttagtctttgccaaaatcagcactgtagtgagcactggattcgagtttctttgcatcattcagttttctaacagccttcataaaatcttcatggatcacataatcacgttctgcacgaattgctgccattccagcttccgtgcacacattt

SEQ ID NO: 73651 - DNA, 392 bp, Glycine max
  Clone ID: jC-gmfl02220080d01a1
acatatataatcacagtcttcatgcaataaactcgatcagcgcctgagtatgaaaggtgcttcatgcttggaataagcttttacaactatagtccatataataacaatacatcaccatataggactctctttctatgaaattccctatatttaggggcacaattaattagcgtgggtaaacaaaaaacagaaattacataaacagtgaaccaaaataagttaaaataactgtagagagagatagaaatagctagtataggcaacgatatctacaccgtctctgcctcttttcgcacgttttactaattttacacgtaaaatatagagagatagagattgaggcaacaacactgatcttccaattccatcaaacttcgcaactcaccctctcc

SEQ ID NO: 73652 - DNA, 446 bp, Glycine max
  Clone ID: jC-gmfl02220080d03d1
aaacaacaaattcttgtctttcaatcctttataaagatatacaccataatctggtagttgagccgttacagtgtgacctcacatttccaaaattgagctacaaaaagcttttcccacaacataaattatgaaatatgttcttactcatgtgcacagctccccaattaattgttcttaaacaaagggcttggttatggaaataataacaatgtgaagaatgaagaccccccccataatgtatggcactctctagctagtaacgcgtgaactgaatgaactatactcagaaacatgcctgccctatttgaacagggggatcagagagggatccatagagaattcttttagcaacccattgatttgctgcttgagagaagtgtatgccatcccaactaacatgttgggaaggatttttgcatggatttccatatactggtccatttact

SEQ ID NO: 73653 - DNA, 433 bp, Glycine max
  Clone ID: jC-gmfl02220080d07d1
gtaaaaccagacatatagggaaaagaaacagagagcatagtgcatgaagcataagaccccacacgggatattaacaactttcttgcgcgttacatagaaagcaccaacagcatgacagcacgtgcacttccttgccagctaggaaagatgactggtttcgtgcacaggatatacgcggtataaatcgcgtagccaaccatacacgcttgtcgaaccatggagaacacctgcactaaaacgccgagtgagtgattggacagagaccacctcacctatttagaaccgatgtgcgaatgcagacaccatttgcctacaaaaacgagcggcggcacctgtggccaaagattccccttctaaggcaaacgacctatcaagaacatggcctgctgagttgggaaactcctgctaggtctcccgagctctttgattgggc

SEQ ID NO: 73654 - DNA, 488 bp, Glycine max
  unsure (1)..(488): unsure at all n locations
  Clone ID: jC-gmfl02220080d09d1
atagcataaaagcaaagttgtgaataatctatatttgtttcgcaccatttattcaaagtacatgaaaggagttatagaaacacgccaccgtatatatactatacgtctatagatgatacttgntatacacacttatttttttcatatttaaatgaaatcaaactcgttacctctcaagcctctaaagaaaaaaaatagaaaataagaagcattcttaattattctcctaactatatataaaatcaaaggcttagaacccatatatataatactttgattcattagcctcacaccctagcaagcccaaattccctcatcatggtttacgcaggctcaccaacttgacatcatcaatcacaggcccacagagtgaagaaaagtcatcacttctcatggtgtagaatgtgctaaggaacatgattcttgttctaggggtaacagccacaaacttgagtgctgcacgtttgaaccctcctttgcctttggac

SEQ ID NO: 73655 - DNA, 347 bp, Glycine max
  Clone ID: jC-gmfl02220080d10d1
atattataaaaacaaagttgggaaatatgtatattagttacgaaccatttatcccgaggacattaacggaggcgttgacacatgccacgagatatatactagacggctgtacatgatactcagtatacacagtgattcgttggatatctacatgaacacaaactcgtgaccttgcaagcctatcaagataaacgctaggtataagaactcaatcttagtcattgtagctaacgatatatgaagctccaaggctcagaacccatgtataggatacttggatacattgacctcagaccctagcaagcccaaaacatgttatcatgggttacccaagctcaccgacttga

SEQ ID NO: 73656 - DNA, 387 bp, Glycine max
  Clone ID: jC-gmfl02220080e01a1
aaaataacttaataaaaaactacgtatactgaatttctgaaatacataaaaactgtagatacagtataaatataaaataaaaacacgattttttaatgtgtgcgctgaaccacgtctaaacttgctgtattacaaaacgcgtgaggtcatcctcaatggcagataacagaaaacttatcaattgaattgcaaattgaactcgaaccacaagtgaaaccttgaaaataggaaaggtcaaatagaaaatattggggttggctgtttgctggggttctcaacaagaatttccagcgagggaaaaactagcttctaaaaatccctttggaataatggtaaactgataaattatggttaacggaattaatgccaaaggggattgcttaaaaa

SEQ ID NO: 73657 - DNA, 437 bp, Glycine max
  Clone ID: jC-gmfl02220080e01d1
ccaaatcaaataaggacgtttgactattggcagtttttccatgtaatcttcaggacagcatgatttacaataggtaaaatccagagctaccccaatgttcatggtattcactcttcatagccatcttgacaagttgctcattaccttattaccacttagtacactaagcagacagatctttgagagcatgtttatgatacataagctggtagttgttggaaatagtagtctcctgagaaagaaacatcactacacacagtaatccatgggggagcatacaatatacgagcattcttaatggaaaaaccattaaaaattggcaggggaattcctctcaataactgcgagtttaggtatggtatgaggacagtcttgaggacggttgatgtcactgactgaatcaaattcatgtgcaggttccctattttactccattt

SEQ ID NO: 73658 - DNA, 568 bp, Glycine max
  unsure (1)..(568): unsure at all n locations
  Clone ID: jC-gmfl02220080e02d1
gtcaaactgcacaatcaacattaactttacataaccctgacaaataaaatcactggacaaacataaagttttagtttagagacccaaagtaactcctagacgctactgctaccagcaaataaacaaactaggttaatcactgtgaatgggcaaagaaaaaaattatttaggttaccccacaaacagatgtatgatgaacacaagaccacattcatgcaggccccaagttgatccataatgctcacataacaatcccttcctcggaacacgaggcacacgcttaaactgcatggatggcactgccattcatatcaccacatgttggtgttgcatgaaaagctgattgtctagagggtccttcttcaataagttttcgagacagggtggagggacccgagtcaccaatagactcccctaaactcagttttgatatgccaaccagttcatcaacattgatagggcttttagaatgtactgcagttggtttcagcacttcatgtgtttcctccttcttggtgggctctggactgtattctgaccaatanggcagaggaaacgggaacactgg

SEQ ID NO: 73659 - DNA, 431 bp, Glycine max
  Clone ID: jC-gmfl02220080e03d1
gccgttcgtcttttttttttttttttgttttttttttttttttgattggttttcttttttggtttttgtattctgtgttcattgttttttttactattttttttctatttcaattatgcaaaaaaaaaacccgtgggcgggcgctctcaccttctggaggggaaaaagaccagagcacacgggactgggggggggggccccaacccaatgaagaattgggggcaaacggggtttccggcaactcgcagaaccggggaggggaccaaaccccccggggttgttacccctccgggtcccgaaggggggggccaaaccggggggcccccccagaattgcgcccactgcaaagagcggcccggacggcaggaaggaaaagaagccgaggctcgattgaacctctttacgggcacgcaagggggatatacccccaa

SEQ ID NO: 73660 - DNA, 401 bp, Glycine max
  Clone ID: jC-gmfl02220080e05d1
attggccaaaaaattgacacctattaacacatataaaaccctggacacaacatgtctcctggacgtgtccaatctagacagcatttataaagatttgagaaattcttaaccatattcatggtagatgactgcttcccatgtattgtattttaaaaccaacggggcgagacatatattgagttaaatataaataactttttaaattttgcacccctactattaggatttaacatcggtgtcctaaaaaggaggcatgatttactttgtttccccagcatgttaaaaaatggtcaaaacaaggttgaacatcctgggaatcctgttaccaaaagggtttggatgatcaagggtggacccaaaagtacggagagccgtctcaaagagttggagaacgaactcct

SEQ ID NO: 73661 - DNA, 409 bp, Glycine max
  Clone ID: jC-gmfl02220080e06d1
gtgaggaaaaatgaaaaatagtccatccgaatgtattgccgaagtcacaccctttctaaatttctaataagaatacattgcttcttagaacaggggtggtacacttgcacctatattgggcgactacgaatctttgataagaggcacagtccttcacaagaggaccaccaagcgccctgttaaacaaaagaccaccctttcaaagatttcaggcacaggaacctccaaaaactaaaggacgaatacatagcgggattctacctacgatcgcagaagactcacacttctggaggaaaaatgtgaacgcatgctaggccttgggagatgctattgggggacgatcgccacggatgtcacccatcctgtgaatatccggaagtgcccgcgtctaagaaagggcttcaaaaac

SEQ ID NO: 73662 - DNA, 376 bp, Glycine max
  Clone ID: jC-gmfl02220080e07d1
agggaagagaaaattaaatgatagtagaataaagagggaattcaaaaaagcagtgtattcaataataatgctctaggtaaatataaaacagctcaggatctaaacacacaaacttgggcatcttttatcacacgtataacatgaattgcaagactatcatatctttcaggatgttcccagttccctgttcaagtaggcaatgaacattctttctgcactatctgcatcaaaaggaggtggtggcccacttaaacttgtttgccctggcaaccatatgaagggacggggcatcctactaagctctggaagcccaactgaccttgaaatgtttattacaggcaagactttccctatggaaactccattaagtggtcct

SEQ ID NO: 73663 - DNA, 474 bp, Glycine max
  Clone ID: jC-gmfl02220080e10d1
cattcgaattcattttatttatatattaatattatattcaaatgaaataaaaagatattaaaagatactaattataagaatttgaaagtgaaattataaagttattaaatgattaatcaatttttttctacctgttcctgtagtaaaaagagttccatctgttcttgaatagcttccttcaaaaggacttctgcttccccagtgaatgtcttggtagaagatatgatttctttgaattgaggtttattcgtgtttaagtaagcacgtaactcaacaagaaatttccttacctgtccaatttctaatgaatcaagataaccattcgttccagtataaatagttattatctgttctttcacggtaagaggagctgattgggattgtttaagcaactcgcgcaatcgttgacctcttgctaattgattttgagtagctttatcgagatcagaagcgaattgggcaaaagcttctaat

SEQ ID NO: 73664 - DNA, 399 bp, Glycine max
  Clone ID: jC-gmfl02220080f01a1
aaaaaaaaaatttccctttttttggctcaaaaaatttctgcaatacattggctcgttacaaatttggaaaaactcttccctcgcgaattttaactggggaagcccaaattatgggttattgggttgccatttctcaaaccaatcaacggggggtgctaaaaaaatactccctcaaatgttcccgatttgatgaaaccaggaattttttgaacaaaacattgcgagttattcaatcagacggtccaagctttttttcagggaccccaagcttgtcaaaatcttcagagctgggccctccgagtttcaatgcagcttccttaagagtacccccctttttgggggctgttttggcaactggtggtgccttgtcataaccaatttttgggtttaagggtggga

SEQ ID NO: 73665 - DNA, 457 bp, Glycine max
  Clone ID: jC-gmfl02220080f01d1
gtcaaactgcacactcaacattaacttgacataaccctgacaaataaaatcactggacaaacatagagttttagttcagagacccaaagtaactcctagacgcttctgctaccaccaaaaaaaacaaactaggctaatcactgcgaatgggcgcagaaaaaaattatttaggcttccccacaaacagatgtatgatgaacacaagaccacattcatgcaggcccgcacgttgatccataatgctgacataacactcccttcctcggaacacgaggcacacgcttaaactgcatggatggcactgccattcatattaccacatgtacggggttgcatgaaaagctgattgcctacagggctcttatgtaataagctttcgagacacggaggagggacccgagtcaccaatagactcccctaaactcagttgtgatatgccaaccagttcatcaacatt

SEQ ID NO: 73666 - DNA, 384 bp, Glycine max
  Clone ID: jC-gmfl02220080f02d1
gtcaacctgtacccgcaacattggcttgacataacgcagacagcttgactaaccgggcagacatagggtttttgaacaaagacccaaagcaactcctagccgctgctgctaccaccccatacacgagctagggttctcactgcgcatgggctccgagtttaaccatttaagccacccaacaaccctttgtttgaaggccactagacctcattgatgcctgcccgcacgcaggtccataatggtgacatggggaaacgttaactctgtgcacgaggcacgcgctctaactgtaaggaggggactgccacttttactagggcatggaggggttgcatgaacagctgtttgcctagagggcccttccgtgggatgtttccgagacac

SEQ ID NO: 73667 - DNA, 398 bp, Glycine max
  Clone ID: jC-gmfl02220080f04d1
agacttaatatgctgtgcacttttttatttaaaaagacgactatcacatgttttaaacaaaggttttttgttcatcgtaatcataaggccgagtttttcacaagaaatatttgttttttctgttctggttaatataacgccttcatgacgagggaacttatgtacacctgcaaatgggggcatatgacctttcaatagcataaataccagggggatttgtggttaatctcgccatcagaaaccaccatttgctggttaaattggaatgagcaatccattgccttttaactgcatgcagtgatcttaaacatcgggttggtggcagaagatcacgactgacaatccattgccgtgtgcttctcgcatgatattaactgtattaacaagggtcattccaa

SEQ ID NO: 73668 - DNA, 523 bp, Glycine max
  Clone ID: jC-gmfl02220080f05d1
ggcaaattaagtagtttccattaaatagccaaaagcaaaattcccattgcttctcccatcatcagtctatggtatatgcatactgaagacagagatgaaggggttggttccaaaaaggcttaaatcataaatatgaaaagcttattgaatgattacaaattagctcctcagacaatgggggggctatgtgtgactgccttgaaattaggtaatcgagttcctgcttatagttttattaatttaggtaggctaaaaaagagattataacactcaagatgctggtttgcctcggatccttaagctttggggaagcttgcatcgaaaggaacgccagcagcaggcaaccaagtgctagcttggagccaaggctcaacagggaattgtgcagcctcctgcttgctaatgagacctttgccaaacttggctcttgcttgagcaacggaacctggtccagagttggcaaactcagcgaaggagcaatcctgtgtgtttggttcaattgggttccatggaatatgaccat

SEQ ID NO: 73669 - DNA, 337 bp, Glycine max
  Clone ID: jC-gmfl02220080f06d1
gggcaaaaaaagtagtttccattaaatagccaaaagcaaaattcccattggttttcccatcatcagtctatggtatacgcctactgaagacagagatgaagggggcgattcaccagggcataaatcataaatatgaaaagcttattggaggattacaaagcaactcctcagacaatggagtggctatgtgtgactgcatagaaactaggtgaacgatgtcctgctaatagctttattaatttaggtagggtaaaaaagcgattataacactcaacatgctggtttgacccggattcctaaactttggtgaggggatcatagaagggatcgtcgacaa

SEQ ID NO: 73670 - DNA, 279 bp, Glycine max
  Clone ID: jC-gmfl02220080f07d1
gaaaggaatgtgaactttcatatgactttggcctttctatagtcagtttattgtgtatggttcttatgccaaaagcaacatacaacacagttgtacttgaaaatctgatatctgctaaagaatgaaaccgtgccaactaacctgcaaaacttatgttacaagttcaacactcctcccaaaatgaaagtattcaaattacaacaaaaggctcaccaaaggcccaataaaatcgcactcaggaaaaacaaaggctcaatccagaaacatacaaaacacaat

SEQ ID NO: 73671 - DNA, 279 bp, Glycine max
  Clone ID: jC-gmfl02220080f08d1
gaaaggaatgtgaactttcatatgactttggcctttctatagtcagattattgtgtatggttcttatgccaaaagcaacatacaacacagttgtacttgaaaatctgatatcttctaaaggaatgaaaccgtgccaactaacctgcaaaacttgtgttacaagtccaacacttctcccaaaacgaaagtattcaaattacaacaaaaggctcaccaaaggcccaataaaatggcactccggaaaaacaaaggctcaatggagagacatacaaaacacag

SEQ ID NO: 73672 - DNA, 474 bp, Glycine max
  Clone ID: jC-gmfl02220080f09d1
acagcatgaagttttcattctctggtattttgtgataaaattaataaccaagaatgacatactctgaaatttactcctctcagccagttaatatacatgagttcctgacccaactgttcgaaacaacacacaacctctctagattcactctaagaagatctggcggtagttgaatggctggtctaaagggaaatgcttatatttacactttgagtacatactacataaggctagaaaaagtgcttaattcacttattctatatacaattgctggtttttctatattcagaaaaactaggcatggaagtcgattcaattggttcaaaatgttgaaaacctttccccctactcctgtatatatatgctacatgtgttcctgatttggtttgattgtccaaaacattactgtcccttccctctttattgccagagctgcaaaatgcttgaaatttcaagtacttataggcaagctgc

SEQ ID NO: 73673 - DNA, 483 bp, Glycine max
  Clone ID: jC-gmfl02220080f10d1
acaacatgaagttttcattctctggtattttgtgataaaattaataaccaagaatgacatactctgaaatttactcctctcagccagttaatatacatgagttcctgacccaactgtttgaaacaacacacaacctctctagattcactctaagaagatctggcggcagttgaatggctggtataaagggaaatgtttatatttacactttgagtacatactacataaggctagaaaaagtacttaattcacttattgtatatacaatttctggtttttctatattcagaaaaactaggcatggaagttgattcaattggttcaaattgttgaaaacctttccccctactcctgtatatatatgctacatgttgtcctcatttggattgattgtccaaaacattactttcccttccctctttattgccagagctgcaaaatgcttgaaatttcaagtacttataggccagctgctggtctttg

SEQ ID NO: 73674 - DNA, 489 bp, Glycine max
  Clone ID: jC-gmfl02220080f11d1
agaataaacaaggaaaagggatcctcatattatgcttacaaaataacctgtcctcaatctcatcccatgcactgatgcaagggtagtataataataactaattgttatatacatgattatcatagattacaaatttacaaccattaggctgcttgcatgctcacagttgaatcacggctcataaccacggcggattcagcacctacttcctcctcagcaggtagatcatctgaatgcagttccggttgcttaaggctccggacaaactcagtgaacaaaggaaaatgctctggagagaagaatgatgctcccattctatgatatgtgaacaagtccaatacattatctccagataaattcttcttaatttgttcaaacccccctggaacaccagattcagacgaattttgacctgaaacctgaacctcatgctttttgcaagcttccataatttgtgcaagtagcaactcagggctagaatggttttcc

SEQ ID NO: 73675 - DNA, 529 bp, Glycine max
  Clone ID: jC-gmfl02220080g01d1
cccaagacatgcttgagattttattaacttcagataaatatacatatttctttaatagaggaaaaagacataatattcttggcatctaggaaatttgatccaacttggttggaacatcaatttaacttgaattgatttaagacttattaattgatcattctgcaggcctttctaacctcctgtccaccattgatgctactcattctgatcatggacttcgcaaaagcctcataaaaagccttttttgaggtggcaaactttgtaaccagatttttagtgtctgggttgtcaagcaaaacttgatcagaagaaaacaagcctttctgttggaggatcaacctgtaatatgtattatcaaaagttgttgttgaagggtccatagaggtgcctgcattttttgcctgattttttagtggacaaattgagatcagttttgctgccaatgatggatttaatgaagggtcaacatcatgtgttgcattgaagtagtggattctgttctttgaagaagagcagtgagagaaaccca

SEQ ID NO: 73676 - DNA, 511 bp, Glycine max
  Clone ID: jC-gmfl02220080g02a1
cgaattgcgaagtgaatttgacagatgagagaagcggggaaaaacaaaatcctaaatctcttcttgagttattgagatttatgaatcatcacacatatatacatatttattcttacggagatataatttaccatgaattcgagtatacacctaaattgatattcatgatagtagaccgaataaaactagcgaggcttgtttgatgactcttgagactctccaaacttcgtgctgtacacgatgccacgattctgcagtatgtacatttttggccattttaacagcatcatcgattccagggaaagattgagagccgtagtcattatgttttgatggtccataaatcaaatgcttataccatgacattccaaagaggccatctctgtcagtgaatgcacgctcagccatcatcaatctatcattcagctctctcactctcaagtggtccttcttacctgttatccaacctttaccagcttctattacctttctctggctatctatcttgatt

SEQ ID NO: 73677 - DNA, 539 bp, Glycine max
  Clone ID: jC-gmfl02220080g03d1
aattgagattatatctcaaccatattctgaagtaaagataatattggtaaccggagaaaaacaaagatgttgaaatatccatgtaacaagtaaataaccaaaacgaacgttttaaaaaataaataaaaggccttagtgcctcggtcttcaacataaaaatgaattctacagtaaagcagtaactaactttgtcccaaaacttaaaaacagattcgcatctgaaaacactaaaaagcttaacctaataacgtccaatagcccaaactctgaccacaccatcggtatagccactaaacaaagtgcttccatgcgcactccagttcaaacttgtgcaataaataaccttcttcttgttggcgttaccaccaccggaggtggcatcagcctcagtcttgaggtcaaccttcaaattctcaacgatactcttgctctccaaatcccagatcttgatgctctgctcggaggcggcgcagagccaatacctgttggggctgaagcaaagtgcatggatgattgagccagcatcgagagagtaaaga

SEQ ID NO: 73678 - DNA, 438 bp, Glycine max
  Clone ID: jC-gmfl02220080g06d1
gcatgttcctctatttgactctcattcctcattcttatatacttttcttatacaaaaccagagcattcatattcaaacacaaccatgttacccccatcctcggtattggaacttctaaaattgctttatagaaacaacactatcacatatggacctttacactgatgttcaaattacataaaagcttttaaattacaggcattacctacatttctaggttccctgaagatgaacacaagtgcaagacttgtaacagatcggtgaagcaaacacatcatttgctttgtgtagctgcaacagttcgctgaacagttgaaacaccatccacaaattttgtccggaaaagaacatttgcattattgaacatgccttccttcaaggaaaccacaataaactgagagtgcggaaagtgagcctttatcattctccctatgtttt

SEQ ID NO: 73679 - DNA, 492 bp, Glycine max
  Clone ID: jC-gmfl02220080g08d1
aaaccttgaattttaaacattgtaattggaggtcgatataatatacaaccatgacagtactctcagtagtgctaggaaagttgggtcaagggataatgcagcaacaccatgcatgaagttactaacaaaatctgagccaacaaacaaaacagaaaacaaaacactctatgactcaagctgagcataccagatgccctggatcttgacatcctttggagcctttgctcccaaatcagtgtcagatggttgaacactctcgaacacaccgataacctcacccgtctcatgcttggtcttggtgacacttaaagtgattttgccccttgaataataaggacttttaattggtttccttggcaagttcttcctcatctcctcttgcaccagcaggcaaagcaactgcattgacataacctgtggaagcacctcttcctttgaggtccaagaaagagctttcacggtaggatgggactagaaactccccactaaagc

SEQ ID NO: 73680 - DNA, 490 bp, Glycine max
  Clone ID: jC-gmfl02220080g12d1
gcacactactagctgcaaacagctagttttattctgaatcatccaatccaaattatattacattcgcataccatagcttcaagtttcctcaaattgtccatcaaaatacctcttctacggtgtaaaaacagatctagatcatctgaagtgcatgtgcacttgagaattgtcaaaaaaacaaaaacatttctttataaccaaaatagtagctattttactttctaaaacgtaccatccatagatggtaggtagatacgcatgattgtttgtataccattacattatcaactagtactagagcttgaggaagacgaactcttcaatggcagacacggctccaatattgtcaagagcctccttgtttggttcttcatcgacaccaatagccataatagccttgttcctacgcgatgtccttcccacactcataaagctcacattcacgttttgttcacccagtatgtttccaacacgaccaatcatgccgggc

SEQ ID NO: 73681 - DNA, 508 bp, Glycine max
  Clone ID: jC-gmfl02220080h01a1
ataaaataagatgccactagtttccattgagagatatatagcatatacatatttggaataagaaacagtgagtcttctgtatgtgacccacaatcacaccctcctacatcactccaactaattactttgcctactttttcaacaaaaaatagaatcgagagatttgaccatgatgcttttatgtggtagataattaattctacacacacagtcattagtcagtctaattatagttctcctaactagttagggaacttcctagtttgtgttcttggtttggatcttggcaaattccagggtctttttaccttgtaacttgtttgttacatagtgtttactgtactctccatgattgtatattttatacttgcatgggtggttttcatccacaaactcaggcattggaccaagctccacttcatagctaggagcaaaaaatgtcacaattgagagtctagctttctcctcatgagccacagctctatgctccacactcctgtatttccca

SEQ ID NO: 73682 - DNA, 396 bp, Glycine max
  Clone ID: jC-gmfl02220080h01d1
ggggaaaaaaaaaaaccgcggacaaaaaaaatccccccccccccttttaaaaaaaaaagggaggggggggaaaaaaaccttgtccctggggttttgtgaattttgaaaaaaaccccccccccggagaagggggggcttttttctaacccccccccccatggtggtcctgaccctaaaaaaaaacccccggggggaaaaaaaacaaaaaaaaggggggaaaaatttgtggggaacccccaaggggggacatttgggaaggggggccttcaagggggggggggggaaaaaaagggggggggggcaaaacgctggaaaagggcccccgggggggaaaactctttccccctttaaaaaaagggggccccaagtttaaggggggtacaccggtgggggggg

SEQ ID NO: 73683 - DNA, 506 bp, Glycine max
  Clone ID: jC-gmfl02220080h02d1
cacacacaaattaacttctttatatgaagcacttaaatatatcaaatacaattaattcctagcttgcaaccagttcaatgaaaacaaaataagggggataaaatacaacagatgaatattcgtagcttcaacatctacgtgtcatagaatataaatgatcacaccataatctgaactttgaccataattcacccctcattgaacagtgaacacattcctcaactgttacaccatggtggtcattattttcacaatcaacaaatttcataaacatccacaaagcagtcacatgaaaaatatgattaaacttttaaaacacgccacaaaagaaaagaaaagaaatcaaagggacaatagagaaaattaaaactccttggctttttgctcctcaggggccacctccactcttgaatctctctaacactcttcaccctcaactccatgtcttcttcatctacaccactctctctgtgaaacacaaattcttaaaacaccctcttacatgt

SEQ ID NO: 73684 - DNA, 531 bp, Glycine max
  Clone ID: jC-gmfl02220080h03d1
aagttgaatcaaagacttttaattacacgtacattttggtgccattttacaacaaataattatttttttgtacaaacaaacaattatttaaagctatacaggatattcttcgcgtcctaaaaaaaagaaagaaagtagaggatatccaatcaatattccttcgatcctatctaccatctatcatcgaatcatcgatcggatccagctccttcgaagttggatccctggacaaaaggaatgcagacagtggacaaaggaagaggaaagtacagcaacttgtgtaccctctgttcaaggaaacacccaacatgacaatttaatttcgctatcttttatcaacaacctgttatcccgttttggaaacaaccaagaaaccacaattcctccccacacattcgtttgagacaccttctttctttagagtattcataaaccttcatcaaagggcacgccactccccggaatccacgatcccccagccaagaaattttcaacggtgaatttcacagcctcagtactggagatcactcg

SEQ ID NO: 73685 - DNA, 423 bp, Glycine max
  Clone ID: jC-gmfl02220080h05d1
ctcaaatgaaataaggaccctgggtattatggacgtttcttatgcgaaaccccaggattcatatataaacacaacgatgtttcccaaattccccctatggtgaatgttatgaactctttatagacacatcgccaagacgtatggacccttacacccacttttaaaattcatcaaacctttttttgtgcacgggtttacgacacttatagggtccctggggatgaacacaagtgcccgagtagagaaacatcggtgaacccaacacatcatggggtaggtttcactgtaccagctttctgaagggtaaaaccaccataaacggggggtgggcggccaataaaattcggataattgagcatgggtttgtggaccgaaaccacgacggactgtgagtgcggctagataaacttcatgagcctccct

SEQ ID NO: 73686 - DNA, 333 bp, Glycine max
  Clone ID: jC-gmfl02220080h08d1
gggcaaagttgtgtccttcttaatggcatgtttttatgggaggttcaaatacccccataacaagaaaaaatgggcgaaccaggactaaaaggccatttgccaaaaacattctagcaattgtaccaaatcaattttaaagggttggaattcagcataaacgtcccccaccatattttaagtggcctaatcatgttcggacactttaaatttatgggcccacatgattcattcattatccaatgggcccgaaacctttctatttggaaaatgcttacccttctatgctgggatggcttcaaaaagggcatcgaaactgtcatgggtagcaaaaat

SEQ ID NO: 73687 - DNA, 488 bp, Glycine max
  Clone ID: jC-gmfl02220081a01d1
aacaaaccgttgttgtgacacattcaaccaaaaaagggtaggaagatataaatatgtggcaaaatagtaagaacaagcagaaagtccacctctcatacaaatattattcagcaattcctaattccatattgggtttaacaatgggggcaacatattaaaggggcaaagatccgtaataaactacatcggctgagcctgtcatataaacatgattatcttcctccctccattcaatctgaagaggtcctccaggtagatcaaccgtgcaattcctcccagcacgaccctcaagaactgctgcaacaacagtagcacaagctccagttccacaggctagggttgctcctgctccccgctcccagacacacattttcaagtgagaattagacaacacttgtacaaactctgtgttagttcgtgcagggaacacctcatgatgttcaaattttgggccaatttctgctagcttcaattcatcaacaagcaaa

SEQ ID NO: 73688 - DNA, 470 bp, Glycine max
  Clone ID: jC-gmfl02220081a03d1
ccaaaagaaaagggagtgggaggaccaagatttgttcaatccaaacgccattacacagttcacggctgcaacgaatgaagatatatctctctcttctcacctctaattgaccttcaactaccaaaagttcaaaaccttgctagtcatatattgctaagattaaaactaaaaaatattaaacggcttggttgcgcggaactgagatatcaataacaaaaggccttcataaaagtctatttttcatgaacaagagggcaatactcagggtaccacatattgcctcggacatactccacggtttcttcttttgacatgtttgctagctctttgaaccctacatcaccatgtccttcagcctgcttttctgcaaccgctgcatgtacaacagcagccccaacctctgctgtaacatctcgtatacagtcaatggatgggtacaagattcccttttgacatcctcatctgtcatg

SEQ ID NO: 73689 - DNA, 487 bp, Glycine max
  Clone ID: jC-gmfl02220081a05d1
aatcatgtcaatcgattggtcccctctccaacttattaataagaatataaagatagattataaaacaggtaattcttgggttgataatgataattgccatcacttttaaaccccgtttaggattgcctagactcttaatccgattgctaattgatttccagaaataaacttaactattcaatgccaaatttaatctgacttattccaaggctcattgatagatggaccaatacagcaaggatgaatgttggacttctacaacagccacttgagctccttcaaaggttctgaaaatctttttaatttgctttagaactaatcttcctctttgcaaatgacggcaaacagaaagctgctgtatgaatctcagagttgtaaaatttcagtggtcttactgacttctgactctcattttcatctatgggattaactggatgcttgaaatcaacaggtggtccctcagttgagcaaagcataaaaccaatca

SEQ ID NO: 73690 - DNA, 457 bp, Glycine max
  Clone ID: jC-gmfl02220081a07d1
aaaaataacaaagcaatcagaataggaattgaacatacaagaggaagcaaagctatcttgctttggcttaatttataccatgaatgaatcactgtcaatgtgatcatatgaacatacaagaggaaacattagaaatgttatacacagacttgaaagaatataatcacacttataaggtcactgtgatgtgcatgcaatacaccaaaacaaataagaaacaacttgagaaaaatactttgactgaagctgattttaattttctttctgtgtgaaacttgacactggtcttaggccatgtttgagtgctgcttcccacacaagatcgattctgttaacatctatggccccaacttcgggatgagaccaaccttcaaggctatgtaccactcctcctgcatggcacgcgtgaaccactcccctatccatcgtgtactcacaacacccaagtccttccacg

SEQ ID NO: 73691 - DNA, 490 bp, Glycine max
  unsure (1)..(490): unsure at all n locations
  Clone ID: jC-gmfl02220081b04d1
ggcgagaaacaactaaacaataatttatttctatacacactgaaaatacacaacgaccacactgaaaatacatcaatgcaatggcgtcactcattctaatccaaaaactgacttatagaaaggaaagaaatgccatgaagtaaaaaggaaaaccaaatgaaacggacaaacatattccagactcaataatttttctacctcctcaccacatggtaccaatttgaacatcattgacctcactcacatgacaatctccggcttcagaatatttgacttgatctccttgtgcggcaaaacaacaccaccattgctgtaaatttcatcacatacatggacatcttctccaaggatggtcattattatccactcgagcccattgcccaacagttgaatgccacccaacaatactgctggatacacaagcatgcttcttaactcggactccacgcattatngtgcagcttttgagtctaacaccttgctcaataac

SEQ ID NO: 73692 - DNA, 418 bp, Glycine max
  Clone ID: jC-gmfl02220081b06d1
acgacgaactcaatgcattttatgatacatgaggaaacgagtattttaaacacaagcaaacaaaagggttagcgtctaatcatcctccccgtcatctgaccccaatatgccagtttcaggatacagagcagcaatgaataaaaggagaacgttgaacaacactatgggctagatttcattgattggtaccccctggtaaatgtaaaaatggggtaaagctcccttcccaggaatcatttcttccatcgccgacaaaacaaaacccaattgagccggtctccccacaatatagatcgtacgctttcacgaatccgaataaaggacctgttccgagcccaagggcttccctgaaccctcttcctgatggaataacaacttcaatactatgtacgacatggacaaatattacatggttacc

SEQ ID NO: 73693 - DNA, 401 bp, Glycine max
  Clone ID: jC-gmfl02220081b07d1
aaaaaaacacattacacaatgccattccaactagtaaaaacttgggctccaaaactcacaccccccattaatttaaaccttgaaattttaagcattgtaattggaggtcgttaatgtacaaccatttgacagttcttttattgggctaggaaagttgggtcaagggatgataatgcagcaacagcatggggttacaagaaaacaaagggttgaaaaaaaaaaaaacaaaaaaaaaccctttttgacttaaggtgagcataccaaatcccctggattttgacattttttggggcctttgctcccaaattaatgtcggacgggtgaaaactttggaacacaccgataacctcgccggtttaagggttggtcttggggacactgaaggggattttccccttgga

SEQ ID NO: 73694 - DNA, 492 bp, Glycine max
  Clone ID: jC-gmfl02220081b08d1
atatatgactctggggttatttttgattttgcaaattaaattacacaatcacagccgtacatcacacatgagttgggcctcttccaacttaaaagcagaggataacattggcccatgacgcgacacatgcaccacctagtaatcataattttacatctttacatacaaaatacaaagactttaaattttaaaaagaagaaaagagataaacagatcatcttaatgaaatgaaaccaaaacccacaaacattggcttgatttttgttgttgttgttgttcccaacttgattaagcatgaaccgtttgattgaatcacttggacttgaagggaatggccctgattacaacctggtggtagagtgctgcaagagctgcaccgatgaatggtcccacccagaagatccagtgttcatcccaaccaaggtccttgttgaagatgatagcagcaccaagactacgagcagggttgataccagttccggtgatggggat

SEQ ID NO: 73695 - DNA, 480 bp, Glycine max
  Clone ID: jC-gmfl02220081b12d1
aggataaaaatatacattaacataaataatttgaataacaagattcctcttggatcctacatatttatacatttgtacatcaatgagatgagattagcaagtaagtgaaaataacagacacgatagagttaattaagtaacatagcacatgataataataatagtaattcgtaataacaacaatagtaagctaactgtacaaaaggcttcggatactttcaatttcccaaatcaatagagcgatgttgatgaatttccaagacaaactccccaaaaaagagatccttcacttcttctcttcagtctttacccaaataccataccataacataccacgagatagaataaaaaatatttacacagactcgcatcttccaaaataaatctgcattgttaaatattaataataatatcagttaaccagctccgagacccacccaacatccggagcaccacttccttgacccgaacccgtacccg

SEQ ID NO: 73696 - DNA, 306 bp, Glycine max
  Clone ID: jC-gmfl02220081c04d1
gggaggaaagggcatccagatttagttgggtccagaagctttcattggttgaatcaagagaaccgcgctacaagaaaaatgacctttttttattgacagaaagccgtcgctttatattaaaaatccggaggtaaatgtatgatagacttcgccttacggatatttcttccggccactttgggggacatataataacggatgattgggtgccactataagctttacctgctgtgtatagaggggagggaaaaggcattaaactgtgctgacctcttctaactgaaggtaaaagtctttaatatgtgg

SEQ ID NO: 73697 - DNA, 410 bp, Glycine max
  Clone ID: jC-gmfl02220081c05d1
gacaaaaagtaactgagaccagatcatgatttcacgatgttaattgttcgtgtaaaactaacttgaaatttgtttgctttgatgacaataaacttcccatgttccctaaagcgcaaagcaataggaaagacacgatatcttttggaaaatcaaatgctacttatttccttttaagcaacattttgatagtctactgaaaccaatcacaggccctaaaacctaaacaaacaaatttcttgacactactcttgactgctgaaaacaatgaccaactaaaatcgaaatgtagatatttcaaaactaccattgagggcctaattaacctaaatcagagttagtccttgacaccggactctacatcgaatgattgggagaaggctgcatattactggggccattgaccatcggat

SEQ ID NO: 73698 - DNA, 500 bp, Glycine max
  Clone ID: jC-gmfl02220081c07d1
cacgttctctccgggagaggtagagagaaaaattattatatactccaaataactccgtgtgttcatgtagggatctcagtcaaatagaaatataaaaattgattatgaaatgattggggggagtatatgcataatatattactgttataccaaccttgcaaattgacaagaagttcatgtccgttacactgtctccaagtcccaaatcaggcaagttggttccaaactccttcaatatcacctcctttttgtgaacaccaacaagcacaccaggctccttagcgagccccgtaaccctccccgacgccgtcaccaccagctttgtcccgagcaccgtatccgcgccgagaaacgttttcgcgaacggctccaccatcacccgggggctcgccgtgacaatgcaccgcctccccccgaacgcgttgaacacgcgccacgtggtggggtgcacgtcctcggcgtagaacctcggcagcacggagcgggacacgagctcgacg

SEQ ID NO: 73699 - DNA, 506 bp, Glycine max
  Clone ID: jC-gmfl02220081c08d1
caaagagaaatagatataattattgagacgtacaagcatgcgtcttcagaattgcacaagtacttgcctaggaaaatattaaaagcataagttaatacaggtggaccccctagtccgcaactgaagtttaatcacaataattcagtactttccaacccaaggacgtaaactaagagtaattcaacatactactatcagcttagcttgcaatttgcatcaaactgcttcttatggacaccactaattgtattcgtggctacgttgcttcttgtggcaggttcatccgtgcaattgaaaaccaggtttgaccccatcatttgatcatttgatcagaatgcatcgaattggtgatgcctcagagtgaaccaacctaagaggcaagcaattcagtgaatatattcctgctgggacatcatcaagctttaggccttccacaagaatgatttccttgcttttcaggaaaacaagatgagatggaatggagtgatcataagcagcaacagata

SEQ ID NO: 73700 - DNA, 434 bp, Glycine max
  Clone ID: jC-gmfl02220081c12d1
agcatctcaaaagttaatagataacagaattatttattgtaagtatatcaatacaatctcaaatgagaaagagagaggttatatacgtaattaacaaacataatgaacataatgagcaagaggtcggactcggagctaaacaaatcgacaaaacttaaattcctaatatagttcttatctgattaggtggatgccttgccaacgacctggggtccggataaccattcttgggatccataatagccttataaataaggtcataagcttcggccagtgacctggccacgccaatagtagcttcagaacgcaaccttggaacctgcatctgctcaaattccggcagggaactttcacttcccaagataaggccaaacagagctttcaaacactccgaaagaacagctggactagtgtcctccatctcagccaatggg

SEQ ID NO: 73701 - DNA, 400 bp, Glycine max
  Clone ID: jC-gmfl02220081d03d1
acgaaaagggatacccttttcaattaaaacaactttagaccggaaaattcaaaatccaaaaggggctagttttttggttcaccaaaagcctcatacaaaatcttaacaaatgaaagcagggggctgctccccacaatggttaggcaaatgttacaaaaaaaaaaaaaaaaaccgttttttaagatttgtgaaaaacagggaacccatcctgataaatgcttttgattgaagtttgcctcccatggagatatgaagagggttaacgagaccttttttgccccatttaaaaaatttgccaaaaacagcaaaagaattccctgtaatggggggatcatttcacaggcaagatcttgatgacagaagcggggcccacacgatgaagtgccacaaccgaatcccc

SEQ ID NO: 73702 - DNA, 504 bp, Glycine max
  Clone ID: jC-gmfl02220081d08d1
atcaaaaaaagaattaccttccgctttcgctttcactaatcattcaaaagtttatgaacatggtacatttgaatttgatgactgccttaacgtctacacttgtacagggagaacttgcacattcaaaactttaaccaacccaaaaattttggataaaataaatggggaaacattcaagaggattgcttctaaaatgaattgcactatcaactgcaactacacattcctttatacacaaaaaaataggccattcaagataataacatggcccaagttactaggttagtggatggatccggtttaaactcctggttcccgttggcctgcgtttgctatttgcatttactattccagtgcgtgttccgaaagcagacagtatataaagtattttgcgatgaaaaatattttcatttagtaaccttatttgcactcttaaacacctgcccttgttagtacgagaagccgtcaaagtaagccgcaaatttcatttctgcttcataatat

SEQ ID NO: 73703 - DNA, 392 bp, Glycine max
  Clone ID: jC-gmfl02220081e02d1
cataacaacaccacactattattattatcaacctcgaatctcattccatccaagtttgatgccccgccatcatggaagctattttcttcgaggtccatgtcccataagaacccatatccattatcatcacatttgggactaatttgagtaacggtgctagagttgttggtgtttgtttccctagagaactgaaggagactcatcaaggagttgttgttttggctttggtttggaatatgatgatgatgatgatgatgggttgccattgaggaagagaatggggcaagtaattggttatacccaattgatggtgtggtgttttggttggttggagatgacgaagccaaagttagggatggaactgtgctctcgtacatgatgagtttggcact

SEQ ID NO: 73704 - DNA, 413 bp, Glycine max
  Clone ID: jC-gmfl02220081e03d1
aaaagggggccccccccctggaaaaaggagccccctttggtttgcaaaaactttaaaaaatttttttttcctacgggaaaaaaggccccggggggcccctttattgaaaaatttggcaaaaacacatgttacaatgccaaaaattggtggcacattagggggggcacttgcaaacttaggacaaaaacatgggggcgggggtaaaaaccaaacaaaactggggggggcaaaaaaaaccggttaaaaccccccttcccccgttttatttttaaacaaacgggtttattttttaattttttaaaaaaactttcacgagattaaaggccctttttttcttttggaacaaaaagaatttttcttggttcttcccaccccttttaaaaaaaaataattaaaatttccggtcttgagaa

SEQ ID NO: 73705 - DNA, 502 bp, Glycine max
  Clone ID: jC-gmfl02220081e05d1
aaaatgtcaaaggaatgatcacttttgtaacatagagaatcaacaatagcagtatcgagaaaattaactattgcctactgaaattcaactatacattaaggcatacatgatacactattgatataaaagacaacacataagcggagttttacaatctgagactaagcaaatattcttcagccatgagaaattgtgaaatatttaatgttaaatactagataggtaaatgaggagacataggatcatccacactactgaaagcgtaaagtggggatcagcaaagcctcagtgtatcttcaagctccttgtcatcagcacaattgtatcccagcgaataagctcgcgcaaaacggccagatcccataaatggctcggccttatgagtcacaccaccttgctgctgctcagtatcaggctccatttgcgaaggtgacaataatctatcaaaacagtgccgccatattgtacagaccaaaagctcgtttgtgggatccataactac

SEQ ID NO: 73706 - DNA, 341 bp, Glycine max
  Clone ID: jC-gmfl02220081e07d1
ggaaagaatagttatgcctatgctatttcaaaccttttcattttaaccctgtccctgattggccaataaaaccctttgttatcccgggaacccatgaaatacccttgttaccctttccttacattggagggaaaacaaaattttttaacggagtggggggggcaaagtaacaaaattacaaatctatggggaaattaattatgctgctttcgaggttctcgactagaactctttttggggggcatcattgttggggtccataaaacggtccttgcaatgggatcttttggtgggagcaccctccccataaggggtgtccatataacccacaggtttctttt

SEQ ID NO: 73707 - DNA, 393 bp, Glycine max
  Clone ID: jC-gmfl02220081e08d1
gacacaaaaaacctcagaactttttggttataggccttctactttaccataacattacaagtttacttgccctggaacggattctgggacccccctaatacagcccaaagacttagggtatagtaaccggcttctaagcttcaaacactttgtagcacaaaacgcaatgcgagattttgcatgctctcaagaaaattacactgtaatataagacttactgtgctgttcattgaccaagctggtcccaatgccaatgcaatatgcactggtgcaaaaccttcttgagatgttaaagaccggtgccaatgctataattgccgtggctatcatgtaccatgatgcctcgccctgcatgaataggtggctcaacaagacaatgataaagggcgcacc

SEQ ID NO: 73708 - DNA, 457 bp, Glycine max
  Clone ID: jC-gmfl02220081e11d1
aataaaacattttacacagggcctttccaactagttaaaatttgggcttcaaaactcacccccccccttaatttaaaccttgaaatttttagccttgttatgggggggtttttttggacaaccttttgacattttttttattgggctaagaaagttggggcaagggatgattatgcaactgcagcttggggttaccaaaaaacgaaggcttgaaaaaaaaaaaaactcaaaaaaagccttttttgactcatggtgaacctaccaaatcccctggattttgacattctttggggccttttctcccaaataaatgtcggacgggtgaaaactttggaacccaccgattacctcggcggtcttaaggttgggcttggagacactgaaggggattttccccttgggtgatgagggccttttgttgttttccttggaaaggtccttcttattttttctttcc

SEQ ID NO: 73709 - DNA, 312 bp, Glycine max
  Clone ID: jC-gmfl02220081f01d1
catagcagacaccaaacttttattattaacaacctaaaatatcattccatgcaagacagatgccccgacaccatggaagctatttttttcgcggtccatgtcccataataacccagatccattataatcacatttgggactacataggctaacgatgctaaagatgatggggaacgatcccctaccaaaccgaaggagactcacaaacgggttgctgttctggcttggggatggaatatgatgaagacgacaacgaggggttgacaatggggaagataatggcgcatgcaattgagaataccaaatggccgg

SEQ ID NO: 73710 - DNA, 369 bp, Glycine max
  Clone ID: jC-gmfl02220081f02d1
acaaaaatatgttttttttttattttaaggtccccgccctttttcaccctatttttttttttaaaaaaaaaaaaaacaagaaggcgtgcaaaaaaaaaaagcccgcggcccccccccctagaaaaaagaaagaaaaacccccccccccccctgttctgcaaaaaaaaaaaaaaaggggaaaaacccggggggtttaaagaccatgagggggggcccccaaaaagcaaaaacacctacccggggggcaaaaaaaacaccggggggcccgcccccgacatggtcaaaaaaaaaaaaaaaacacaacccggcccccgggggaaattgggccccaaccccccggggggggaggagaaatttttggcggggggg

SEQ ID NO: 73711 - DNA, 250 bp, Glycine max
  Clone ID: jC-gmfl02220081f04d1
gtaccccccacccaaaaagaaggtttaattttttttgaaaaaatggggggatagactaaagggggcacaaacattttttggactaaagcaaaaggatggtccctaaccgggggaaaacataaaaaggtttgtgacgggcgaagggccataactggtacctcttccaagaaaaccattcccttaaaaaccgcacccaccaaaatggtgaacactgaaagggtccttcaacggtgttggggatcatctgaaa

SEQ ID NO: 73712 - DNA, 370 bp, Glycine max
  Clone ID: jC-gmfl02220081f05d1
gggaaaaaacaaaaaggggaaaaacccccggggccaccccggttacaagaaggggccggccccttaaaggggtctttaaagcaaaaatccctccccccccaagacccaaatttgggggcccacggttttgcttttggttaaaccccccaaggggccccggggggcccttcccgcaagcaaaaaaaagggttaattggtgggggatggccccaaggaattttgcccccttttttttgggggaaaaaaaaaaggacctttattgccccccctcccccttttttagaaacaacaaaattttggggccccctaacgggggcaaccccaaaacaaaatggccccgaagggaaagtcggggaggggaccttttttt

SEQ ID NO: 73713 - DNA, 439 bp, Glycine max
  Clone ID: jC-gmfl02220081f08d1
agtaatacaaataatttaaaaaggggattttacaaggggggaaagtaactttgtagctagctcagggacagccctttaatttatgaactacacacgcatcctgattttcatggatctattcattctattgttacatgtattgagtactgggggagccatgtattttacatatagcaaatggggtgatgtgctgcttcctccattgtaacacagcattgcaaaccgatacccttctgtccccaaagatgggagcattcctcttacagcgcctttggataatcagcccagaaatgagctatccatttatacgaacgtgccatcttctatggttgccttctccattatgatggtgattcctgatcgaatgtctaatccatcttctggtctatctgcttctagaaccccatctttgtttgcgatgatgacatctttgccgatc

SEQ ID NO: 73714 - DNA, 415 bp, Glycine max
  Clone ID: jC-gmfl02220081g01d1
aggcgaataatagaggtcctaatttttattgaagggagctcatcatatttttttatgtggctcataacagactccattcactctatgaacgaaccacatgatcccgatattttagaacggaacggaaggatccaaaggggaagggtttccaaatgatatccataacaccgcaagcccctaaacgacatgggaaagagaaaaaaaagggaaaaacgaccccgaaagaaacggctcattgagagccaccgacacaaagataaaagcctagggtcaacgtcgtctatctaagagagatgaccacagacggcgacgactacaggcttggcggacctgccggaactggatccgaccttctatatctccttgacgacatccatcccctcgacgacctgttccgacactaagtgctttccgt

SEQ ID NO: 73715 - DNA, 391 bp, Glycine max
  Clone ID: jC-gmfl02220081g02d1
aactcaaaaacactttttacaaaatgtattttttatcagagattacatacaaccttactccaatttaaaaagacccaacaatttcctcaaatgcattacatttgttggggacctctcatttgaggacacgcttcgtaaccctttaaggaccacttgatggcctgaaaacagtataaccattgacaccacatgctttatttgagtaatcgggggaggatccataactataattctgtggggttgtcatacctaaaggcaacagatcagaacccgccacctgccattggtttggaatcaacccatcgacctggccattgacgccaggcacaccactaaccggtggaatataatccctcagggaatgataatgcccaccagacaagccataccc

SEQ ID NO: 73716 - DNA, 472 bp, Glycine max
  Clone ID: jC-gmfl02220081g07d1
aagataaaacaaataacttagaatacttgtaactgagtgtaacaatttcttaaaactaagaacactacaagatatggaacatgtctttgacaacaaacattgcacacaagaaaaactaggcactcagctactatgaagaacttctacagtgtataacttttcacgcacacagggaccttaatatcattagcagccaaaactggagcaggctggatgtattcttcttcctactttggagaatggattgggacaagatcagggaggggagttctaggaccctgttttcccttaggatcccaatcacgcatgaatttcatcttaatggctagaacaccctgttttacgagcacatgtctcactgcagagacaatggcatcgttgactggttgtccagaagaaatcatgtcaccatccttaaacttcatagattcgggtatctgggctttgacctgaacacttacaatgaccttgc

SEQ ID NO: 73717 - DNA, 519 bp, Glycine max
  Clone ID: jC-gmfl02220081g08d1
gaagctcaatccattttttatattagaaaatgcatggttcaatattaaagctgtaatttggaatgttagcccccaccaatagactacaatttttgtgacatagtatgacttgcaaaccaattgctacacaatgcgtgtgttcttgctatacattcatcagttgtctaaggcaatacaattgatcttaaaatctatgcaaaacttctaccattcagtaccactgttatggaaagtttttgcagaacctcaagtttaggtccatagggaagaaaaaaaagtcaccagctacataattcaagtgctcactagcaatcttacaaacctggcatgaagactttgcatgtcccaaaatgacaggtactttgaagtttatcagtggacccaaattggctgcttcaacttgagagatggaaagaatgtgatgtgatctatgcaattgcatttgacaaacaagtgggccatatctccatctgaaaggcaccaaaactatgttggaccttgaccatattcaagtcagac

SEQ ID NO: 73718 - DNA, 416 bp, Glycine max
  unsure (1)..(416): unsure at all n locations
  Clone ID: jC-gmfl02220081h02d1
aaggggcaatgattaaatgcatcaaataatattaaatgaaaactttcttttttgggaacaatattaaataagaactttactttaagcagttgaggattgacgagtgtttgaatgcttgtagcaagcaaatatttaaggaagtagtaaaaaagattacaatgtttttttagcagaataccaacaatgcatgcagttggcaagaacagaacaaattgattaaaaaaaaaaaaaattgcccaaatacaatcccgggagctatagcaacaaggcaatctaacaacaacatgatgatgatgatgatgatgatgatgatgatggccanctccttttgttcttgctgcccagtaacaatgacaaatagaagaggaacctaaagaagaatccccaagccaccgtgatccagaagcagttccact

SEQ ID NO: 73719 - DNA, 410 bp, Glycine max
  Clone ID: jC-gmfl02220081h03d1
cgaacaacggcgacaaatcgaacccctccgagagcgaaatgatgtgaaaagcattcatcgtagtaaaaacctcctgctcatgctgtttaatcttctcctccagatccaattcctctcttttctttcccatcaagttcttcggcacgggtttcttgaaccacgacgagtccatgatttttgaaattgtgattcgcgtgttcgggttggggtcgaggagcttggtgatgaccctccgcgcctcggaggagaaccacggcggacacttgaagtcaccgcggtaaatttttttgtacaaggccaccaggttgtcatcctggaagggtaaaaaaccagcaagaagtccgtagaggattacgccacaagaccaaatatcggccttggcgccgtcgtagcctcttttcccaatcacc

SEQ ID NO: 73720 - DNA, 60 bp, Glycine max
  Clone ID: jC-gmfl02220081h05d1
aaaaacgatggaacaatcccccagctttttgaattgaaggatctgggaacagaaaaatcc

SEQ ID NO: 73721 - DNA, 465 bp, Glycine max
  Clone ID: jC-gmfl02220081h11d1
atacaaagtttacagttaatatttttgtgtaaaagctaacttgggatgtattgttttacctagtccacagtcaagtgtaacaatattccgtaatccagtataagcctttattattttttgttctatgggaaagtagcacattactggggctccacagcctgcacatttgtgtaagaataagagtagctttcagtgttggggttgccctctctgaacttcgtacaggaaaccctccacgttttaagcaaactttgcctctcaggttcaacactcctcttagcaggcatgattgttaagaagacaggaaccattgctgcaaccagatgcttaagtgtgtgaccactgacaatatgtcgcgtccattcggagatcacatcatcagtagcctctagcaccttagctagaagataagaccctgctgcccagagccaatatgttgaatgtgagtacattggacgcaacaaa

SEQ ID NO: 73722 - DNA, 417 bp, Glycine max
  Clone ID: jC-gmfl02220081h12d1
gacaaacaacgaagcttagcttttatagatcattgcaaaagccaaatacgaaagattagtaactcctatacattattcaactgaaacaatttaacccaaatccaagctagcctgggaaattctaatgtattatggacatctatatattattggggctcaacttcgccgcccttgagcaaggaagcttattccttttacacagtatggtgtgtatttatataaaagaaaacatggatcactacctaaagattgaattaattgtttttgcgtgcagaactttcttttgtcaacattgaatgctagcttccatcgtacactctttggatccggatcttatgtagtgagccatctgtcgatttggcaagttcgtacaggactttccattcaaccaggccatcaatccttactttgaaaatt

SEQ ID NO: 73723 - DNA, 132 bp, Glycine max
  Clone ID: jC-gmfl02220082a01d1
acattatattttttatattttaattgtcaggaacagaggaaaacataacattcgaagggataagcaagccactaaggacaggaacgaaaactgcgctttaactgtggaagtcagaggtacggcagatgtact

SEQ ID NO: 73724 - DNA, 367 bp, Glycine max
  Clone ID: jC-gmfl02220082a03d1
gccaataagtcactattcatatgaggtatcgatcattcattaacaagtgacatgtgtgttaaacaatacaccttaatgctagcagccaggctagcgccgatccactgtcatgcacaccacacactcaaaccgagatgctgtacggaacccccttatctgggcaccctgctccgatgaaggcttgaagaagtcatagggcacaataccgggaccgatccagctcctactggccctatccgaattcctggcgtcaataatgactatgcgctcaatgaactaccctctaaactcgtcaaacgcggacttaacaaggggtttctgctggcacgccgggtacacagtcctcctgagatacttctggtccggc

SEQ ID NO: 73725 - DNA, 127 bp, Glycine max
  Clone ID: jC-gmfl02220082a04d1
aaatgatatttgattttattaatttgaggaacagaggaaaagataacgtacaacgcaagagatatacgaggaaatatacggatagaaacaggaaactcactgtacatgtcaaaggaacgctaaattg

SEQ ID NO: 73726 - DNA, 528 bp, Glycine max
  Clone ID: jC-gmfl02220082a07d1
aataaagacagtgccacttattttcatttataatagaggcaaatataaggtatacatagatgagccagctagctaataagacataggcaactgaacacaacacatgatatccccacaaaggataaatcataagacgtacaaaagcacaaaggtaaggactattattaattcatggcccttaaaaaatactaaaaacaccaagggggcatgcaaatgatacatatgtaattattattaattaagcaagaatctccttcaaaggcttggcctcaagttttgccttctgatcaagttcttgcaaatgcttttcattctcaaggtcctgcaaatgcttttccttagccagcttcttcatccttgcaatctcaatgtccttgctcatcttcctcctgtacatttcagcaaaagtgattggttcctccatcacaggcttctctacttctcttatcttcagagggtaaacaagtgcatttggtgctgggttttgaaaagtggctatggacaaacggctatggtttgagttcacca

SEQ ID NO: 73727 - DNA, 486 bp, Glycine max
  Clone ID: jC-gmfl02220082a08d1
gataggaataatatacgtctctgtattagcaactaattccatacaaagaaggatcaacaaatcccatattcttcacttacaaattgctttcaccaaaaagaaaaaataaaccaacacttcaacataaaacatattcctaacagagacacctagatcgaagcgaaggggcataatagtcagttcaagagctagtgaacttggtgacagccttggtaccctcagagacggcgtgcttggccaattcaccgggcagcacaagcctgaccgcggtctgaatttcccttgaagtgatggtgggcttcttgttgtaacgggcaagtctagaagattcctgggcatgcttctcgaagatgccgctgatgaagctgttcatgattcccatggccttgcttgagataccaatgtcagggtggacctgcttcagaaccttgaagatgtagatcttgtatgtctccacgctcttcctgattctcttcatcttcttcc

SEQ ID NO: 73728 - DNA, 408 bp, Glycine max
  Clone ID: jC-gmfl02220082a09d1
gaatgcttcagtttcataagggtctaccaaagataagaaaatacgtactgaaatgtgacaagtacttaatgaaccagagacattcatgtcattttcttatattgacattgtaccatacatgcactctggtatgcgagaggatgatccctgaactctcatttgggttgcatcgtctgatgcggacgagacttatgtccggaaatatccaggagcgagggtatatgggtaagactcataccaaattctgccctagccacgctacttttggcgacctctggcaaatcgctgtagaccagaacggaattaacactgactgccaattcctacatagcatcaccagaggctatgatcaatctgaacactctgaacccagtttgcattgagcttgaccagctcaaggctctgact

SEQ ID NO: 73729 - DNA, 272 bp, Glycine max
  Clone ID: jC-gmfl02220082a10d1
aataattcatattcatacaatgctaaaaatgattcccccatggggactcgaaaaggacttccgctacagagcattaaaactataaccccatgtccacggcccccatctgcctgagacaaggccccgaatagctcacaacgtgataacagtcacttggctcaatgaaacatgtgataaagtgaaggggctgcgtgcctgaatgtgtataaatactgcggaactaggccatatcataagagggtctttgctagccgatcacatttcctttaacc

SEQ ID NO: 73730 - DNA, 543 bp, Glycine max
  Clone ID: jC-gmfl02220082a11d1
aatcaagttgataatcaattgttaaaggtctttgcagtatacaaagtgaagatttcatcttaaaatgttatgtacattagagtatcataaagaaagctaggccaataaattcaagttgttaaagcagacgtggataaatcaaagactgaaaccaacacaactagtaatcaacatttggagttcattttgtcgttttggatggggttgtccgactccaaaaatttgccccagatggggtgtttctgccaaaccatactcatttcctcaagtgggatgccctttgtctcaggcaataacttgtagatgaataaggtcatgatcaccacaaagcacccaaagaagatgaacaaaccaaacttcatgtgacagagcattgatgtgaagaattgagctatgaagaaagtgctgatcatgttgacaccaactgtgatactctgagcagcaggtctaatctcaaggggaaagatttcactaggtatcaaccagcctagaggaccccatgaccaagcaaaacctgaaacatacacacagatgatccccaca

SEQ ID NO: 73731 - DNA, 416 bp, Glycine max
  Clone ID: jC-gmfl02220082a12d1
acagaaaagaatcattttattgattattactgtatttccatttttgtaaaattacttactgaatcgggcacagatttcactgccatcttattacataaaaccttctcatcccaccaacacaacctcctaactgaatctaaattgcactatatattgatttcactagacttgagaaacttttgttctcaagtccaagacccaaatccacaagaagaaaaatcgagaaggagaaagaaaaaaagaccatcacaaaaacgtgggaaaaccaaatccatagcagctgctgctattaacccatttcaagtaacctggccttcatattccgttgactttttacatctttggaatttcctgtgcagggttttcgttcataactagtcttgctagcatccagataagagctcttcattgacaag

SEQ ID NO: 73732 - DNA, 222 bp, Glycine max
  Clone ID: jC-gmfl02220082b03d1
attaatagccggaattggggaaaaaataatgtgcaactaaggatagctaccaggatagaaatttaacaaggcagaactctaaccgtgcatgtcataagagagatctgtaaaggtaattcaaggaaaacgtcacatatgagagtcagttgaaacctaacgaactgattgagagacatgccaataggcgtcagtaggatgaggtggaaagtcaaagcaccaact

SEQ ID NO: 73733 - DNA, 177 bp, Glycine max
  Clone ID: jC-gmfl02220082b08d1
aaattatatttgattttaatattatgagaaaaagaggaaaagaaaacatacaacgaaagagataaacgaggaaagaaaaagaaagaaacagggaaataacaatgcaagtaaaaagtacggtaaatgcacgtaagacgaaaaggtcctatagacaagcaaaagactgacaaattgagg

SEQ ID NO: 73734 - DNA, 291 bp, Glycine max
  Clone ID: jC-gmfl02220082b09d1
aagagaataacaaagacaacaacatacgtaatggaaacttacaacaacttaagaaaaccaagacaataacgacatcaaaccaaaatgaaactgtacaaaacaagcgcacgaaaattcgacatgaccatacatgaacactcgctgagccaaacatctactatacgacacgaaaaattgacctgaaatatccaagaccgagggtatctccgtcaactcattccataatcgcacgacaccacactcatgtccactatctctggaagatcgctctagacagagcctattcaacat

SEQ ID NO: 73735 - DNA, 203 bp, Glycine max
  Clone ID: jC-gmfl02220082b11a1
atataccgaaaccacggccaatgaatcagccaacagtgtcacaaacccagactgatttaacattggaagaacgcttgaaccttgctagtgcactgtaagcacaatgcctaggtcgcatcatgctgttcagcttaccaagaaaaccatgggctcaaatgttatactgagacagttcactggggtcaatctgctgcatacaggaa

SEQ ID NO: 73736 - DNA, 398 bp, Glycine max
  Clone ID: jC-gmfl02220082b11d1
ggttaaactttcaccttgaatattaaatcaagactgaacacacgcattccttgatagaaactgatgagttatctcatcccataattgggagagggattctccctcaaaataggggaacctagtactagctaggagagaaaacttcagtcaagtgcacgttatcgaaactattgcccctttagggcattaacacggatactgagctgtaacaaacaatccataatagctatctctgtgataaaatctgattctgaattaaacggggaatattaatgttaacttgcaccaacgtgcaatgtatgccgaaggcaatgcaacacctttacagcaaaggccacgtcactacagctactgaaatctggtataggaatggctatccgccttgatgtctccaagac

SEQ ID NO: 73737 - DNA, 471 bp, Glycine max
  Clone ID: jC-gmfl02220082b12a1
aactataatgctaatgcgtggttaacctctccaaaacttgtagctgaggatcttattactcagccaaaattcatggaagttccaatcaagtatccggcataactcacccttagggtggttcttacttgtatcatggcggccaccggtgggttgattactggctatgaccatgcagtttcaggtggagcgacctccatggactgcttcctgaagaagcacttcccatctgtatatgaaaaggaggctaccgtgaagccttcttcaaaccagtactgcaaattcaacagtcagatactgacactgcttacatcttcccttgatctaagtgctcttgctgcggatcttggggcatccagcataacccgaacgccgggaagacgtgcaactatgattatggctggaatattctgtgaggcaggtgcattactccatggattagctgtaagcatctggactgctattgctggcagg

SEQ ID NO: 73738 - DNA, 306 bp, Glycine max
  Clone ID: jC-gmfl02220082c01d1
aggtacagatgatcagaagacgtcaaacacacagcaaatgtccatgctataaaaggatagataatgcaaggtcactctgcatgcaaggactactggagatgcatgcagcgggacagtagccgggacaaggacaaaatcctagacctgcaaggttacccagaggacccatgccgcaggcgcttgcacgaggctgtattctagacatgtatagcctgctctatcaaaagggcttgaggtacgtcaatggatgctaagcagaagccaaaggatcttgctatagggccataggaccgaaccagccatcgg

SEQ ID NO: 73739 - DNA, 170 bp, Glycine max
  unsure (1)..(170): unsure at all n locations
  Clone ID: jC-gmfl02220082c06d1
ctcaaatatatatntatatataaatatactatacttactctctaatattactattacttatctacatctcctcgatgtcatatatacctatctcaatctaaatctattaatatcataactgtatactgatattataatgtagtcttggtatctagctaactattttgaat

SEQ ID NO: 73740 - DNA, 108 bp, Glycine max
  Clone ID: jC-gmfl02220082c08d1
aaaattatgaaaaaaaaaagaaaaggtaatatttaaagaaaaaaacccaagaagacctaaaaaaatggaaactgaacactaacaatgcaagaagaacgtacgaaaaat

SEQ ID NO: 73741 - DNA, 112 bp, Glycine max
  Clone ID: jC-gmfl02220082c09d1
ataaaatatattttatttaataattatgaaaaaaaaaagaaaagggaatattaaaaaaaaaaaacccgagaaggccgaaaaaaatggaaaatgagaaataacagtggaaaag

SEQ ID NO: 73742 - DNA, 155 bp, Glycine max
  Clone ID: jC-gmfl02220082c10d1
aattattatgttaaacaaaggaaacggaaacttaaaaaaacataataaagccaagatacaaacaaactcataaaggaatttgactatgcaagtaaagggctcggcaaattcaagcccagactcaaatggggcacgcaaatccagccatgaactgg

SEQ ID NO: 73743 - DNA, 293 bp, Glycine max
  Clone ID: jC-gmfl02220082c11d1
aactcgaccctttatgaactaattgaaccggaacatacgcaaggcttgacatacacaggagcaataacgcaacacagcgtggggacagggtctgggacgccgacttgggaagcctagatgtcacccgggtacgactcaccagtcagcataaccgcatcctaactaatgcctcctacgggcaccaaaacgcgtactgagctgcatctaatagtccttgaaaccagactctgcggacacactaggattgccattagcacagcatattgatccatatcttgtgccaacccgcaaag

SEQ ID NO: 73744 - DNA, 397 bp, Glycine max
  Clone ID: jC-gmfl02220082c12a1
attctatcaatttctgatttattcatatcccaaaaccactgacatggaatcagcgttcagtgtcacgtacacaaactggttcaacattggtacaacgctttaaccttgcaaatgaaccatcatcacattgtctatgtcagattgcaatgctcagcttactgagagtgccaccggctcaactgttatgctggtccagtgctctggtgcccatctgctgtctaccataacaaccacgtgcaagctgtacacatgtgtagatatcggagactggatccaaaagatgctggggactagagcctctagtatgacaaccaaggcaccggctggagctcgaagtggaacgataacgctgtcatcataagaaagtgatggacgaacttatttgtcaccctgttga

SEQ ID NO: 73745 - DNA, 384 bp, Glycine max
  Clone ID: jC-gmfl02220082c12d1
ccaaaaattaaatttccgtaaaaaaataaagccggaacaaaacccaaggggaccaaaatttttttaaacatgccaaaaccccatgctataccccgaaccgggggggggccctcatccctgggggggcgttccctggaaaaaaaaaaggaacaagaggtggcaccccccactaacagcgggggggttggggcccctttgggggggcaaccccagttccaaaacccggaaatggggccccatgggaacccccgggggcattaacaaaaaaaaaagcccggtgattggtctaagggggccgcccccgtttaaacacgccccccccggtttggggatggggggccttaaaaaaacccggacaggggcctggaagggccaagaaggggg

SEQ ID NO: 73746 - DNA, 518 bp, Glycine max
  Clone ID: jC-gmfl02220082d01d1
acattaaattttttattttatcattttataatacacatgatagtgatagatctcaccaaactcatcaatcgaacataggaaatgttatttagttctttgacactgagtatcacgtgaccaaggcagtggcactaggcccagtacgttgatgatgacagggtcagcaaggtgatcggcgaggttgtccaatggaccctttccggtgacaatggcctgaacaaagaagccaaacatagagaacatggccaatcgtccgttcttgagttccttcaccttaagctcagcaaaagcctctgggtcatcagcaaggcccaatgggtcgaagctgccacctgggtagattgggtcagtgacctcaccgagggggccaccagcaatacggtaaccttcaacggcacccattatgataacttgtgtggcccagatggcgaggatgctctgggcgtggatcatgcttgggttgcccaagtagtcgagcccacccttgctgaagatctgggacccgggactggaccaca

SEQ ID NO: 73747 - DNA, 517 bp, Glycine max
  Clone ID: jC-gmfl02220082d02d1
acaggaccacaaaacaaaagacagaataaattccagaatcaacaaccaatttataagggggggattccaacggcagcacagctatgatttcagctgtatgccaccaggattggcaatcaacaactcagcagatgacgattacaatgtagtaatgcaacacctctcattcacaggcaggtttagtgtcaaagctgctcaagcagatggcgaaggcttggaaagtagagagtggataacagtaatccatggtaaatatgtcttttccaatctttccaaactgcaagattaccttttcttgctcctcggcagaaatattatgagatggatcaacagcagctacaagttgaaagttcttaacagaagccactgaaacgcgacccttgaagtttagacaccagcactgtagctgctcatgccatctgggagccttgtttttcagtgctaattgctcggttgagccttggctcaatactggtggctctgataagcttgcaaagtttaaatctgagacttgagc

SEQ ID NO: 73748 - DNA, 536 bp, Glycine max
  Clone ID: jC-gmfl02220082d06d1
accaatctgaatagtaagaaccctctaatttttctcaaaaccaaaaccataactagaccctaataagatccaagatagaagtagtatcaattgaccctcccctaaatacattctcattcctcaaaatcacacaaaagaactcacttattctgcggtttctctttgcttcaatggagaagaaggcacatgtcattattcgaaggagcggaaaaacatatataattcttcactttctggacattccaatacggaaatatcacacaaataaattaacaaacgctgcttttctgtaactgtagtgtatggaagatgtatgattagtatttcttggaatccaaggccaaaatagtgctgagattcattgggtgcatgtactttgaggttcctgacataatctgctgaacgatcaacctgttggctttttccgatggatggaatggatcccaaaacgcgaattcgtgacggtttggacataagttggacactaccgtgcatagtccaagaccattaaagggtccttgaccgcaacatgctac

SEQ ID NO: 73749 - DNA, 242 bp, Glycine max
  Clone ID: jC-gmfl02220082d07d1
aatatatgataatataattttcaaataaataattttgccattatatttacacattaaaaatattttttaacactgaaattgaaatgttggataaatcaacacaatttgaaaatagtctcagtaatgctagcgttaatttactctagattttaaattaaggtaatctgcaagacatcatttatacgctcctgaagactctttcttaaagttatgcactacagacttgaatcgtttgattcaag

SEQ ID NO: 73750 - DNA, 100 bp, Glycine max
  Clone ID: jC-gmfl02220082d08d1
actaagggtaaggtaacgttaaacgtaagatttttaccaggatatttagacattgatacagcgctttgaccatggatgttagacgctcgataaagtctat

SEQ ID NO: 73751 - DNA, 92 bp, Glycine max
  Clone ID: jC-gmfl02220082d09d1
attattatcaaaaacagaagaaaagggaacgtacaacgaaaaaacaaaaccaaaaactacacaaacgcatactgaacactaccaatgcatgt

SEQ ID NO: 73752 - DNA, 333 bp, Glycine max
  Clone ID: jC-gmfl02220082d10d1
ataaattaaatttgctaaaaatatttagatacaccgcggaaaaggaaagataaaaagagaaaaacaaaccagaacagcaacacaaacatagagtaaaataacgatgcaagttataccatcggcacacatacacaactactacttccctcatggctgagcaaacatccacgaccatataccagctcacaggccaagctccgagtgacgctcataaaaccgtagactgctcatatcaactgatgcacatctatacgtgacgcgaaaagatcggggctcgctcatgcccaattgaagctacactcgaactgcctgacaggggactgaagattgtct

SEQ ID NO: 73753 - DNA, 289 bp, Glycine max
  Clone ID: jC-gmfl02220082d12a1
accgagaataactatgtttgttgtttttacaaaacgacccggggcacaaaaaccaagacctctaggaaagaacaacaccccaaaaattgaggggagacacccccacaatcagcaatgtatgacaaacagaaggccgcccaacaaacaaacagggggccaacaaggcaggacaaaaagaccagaccatgaatcggcatcgcgaaccatactgtgctgacagaaacgagccgccaagcgcgggggggggcccaaaacaaagctcacatggcgaggaaaaagctggcaacaa

SEQ ID NO: 73754 - DNA, 204 bp, Glycine max
  Clone ID: jC-gmfl02220082d12d1
aagagtataacaaagagaacaacataggaactggaaacttacaagaacttaagaaaaccaagacaataacgacatcaaaccaaaatgaaactgtacgaaacaagcgcacgaaaattcgacatgacaatgcaagaacactcagtgagccaaacatctactatacgagactaaaaatagacctgaaatatccaagaccaagggtat

SEQ ID NO: 73755 - DNA, 94 bp, Glycine max
  Clone ID: jC-gmfl02220082e08d1
gttaaacagaggaaaaggtaacggaaaaagaaagaagcaagcgaggcaaaaaaaagaaggaaacagagctatgacagtggaagtaaagcgcacg

SEQ ID NO: 73756 - DNA, 137 bp, Glycine max
  Clone ID: jC-gmfl02220082e09d1
gaataacaacagataaggtaacattcaacgaaagaagcaaaccagtctaataacagatacaaacagcgctttaactatgcaagtaaaacgcacggaaaaattacgtacaactaaagagaactattcaaagccaaaga

SEQ ID NO: 73757 - DNA, 96 bp, Glycine max
  Clone ID: jC-gmfl02220082e10d1
aaacaaaggaaaaggtaatattaaacggaataataaaaacagacaaaaaaaaaattcatacagtactataacaatgcaagcaaagagctcggaaaa

SEQ ID NO: 73758 - DNA, 207 bp, Glycine max
  Clone ID: jC-gmfl02220082f02d1
aattgtaaagcttttttatgcttaattagaccgatatcactgacgacgtatgcactgttaaatgccacagccccaacctcatttactttatgtaccacattttaaaggaacagtccaacatgacttacggggactcgatcacaaagcatactgcaggtactcttaagagggacgatgaccattattcaagatagccattatactact

SEQ ID NO: 73759 - DNA, 437 bp, Glycine max
  Clone ID: jC-gmfl02220082f06d1
aagtgacaagacattgtttagatgggaactggcaatattacattaatacctgacacgagtgttaagtgctatcacacaatgaacagttacaggattaactagtaggaatagggcgaagatgacacccagacacggggaatatgtcacgaaccacacgatacgctggaacaagaaaagctttgtggaagctgatatagacctggagacataactgggaaaattgagatcatattgggccagttgaccatcctgatgacaactacgattatgcattatcagaacgatgctattggcacggctttggaagcacatcagagagccatctcagatggatcagatgcttgcatgtcaatccgaatcccatcaagctcgctatggagctatccttggggccggcgtagatcacacggctgctaaccctatatgcatcaggggac

SEQ ID NO: 73760 - DNA, 114 bp, Glycine max
  Clone ID: jC-gmfl02220082f07d1
caaaaacaaaggaaaaggtaatgtcaaacgtaataaacaaaccaggctagaaacaaaaagcaacagcgcaatccccgtgcatgtaaaaggctcggaaaatgcagatccctctaa

SEQ ID NO: 73761 - DNA, 462 bp, Glycine max
  Clone ID: jC-gmfl02220082f09d1
ctatgttacatttagtacatagcgggtaatgtcacatgagactcgaaagggaagcgaaacatagtgaggctatggaagctagcacggctgattgggatcctctgtttgagccttatcccttttttgaatcatacaagaattatctacagatagatataacagcagagaatgcagatgaccttagacaatggaaaggttgggttgagtctcgtcttcgccagttgacattgacgattgagaggcacactgatggtatgcttcaacgtcatccacatcctggtgaattctcagaccattctagaccctatcaccactgagactttatgggtctgcagcgtaagcaaggagttccagtgaatgaaggtgaacagcttgatataacgctcactgctgaagaatttaaacattctgtcagtgcttacactctatggaaaccttgaatgaatatccatgtgtcccatg

SEQ ID NO: 73762 - DNA, 165 bp, Glycine max
  Clone ID: jC-gmfl02220082f11d1
aatattatgatgtgaaaaagaggaaactaaaagggtcaaagaaaaaacaaagacagaagaacaacagtcagaaagagaaatgtgacgatggaagcagcgcccaaggcaaggtcagggactagggagaactggtatttaggctgcacagacgtacaaattcagcac

SEQ ID NO: 73763 - DNA, 174 bp, Glycine max
  Clone ID: jC-gmfl02220082f12d1
atcattatgttaagaaatggtaactaaaatgataaaagacaaaataaagacagaagaccaacaaactgaaaaagaaatgtcacgatgggagcagcgtcctcggaaagtctacataatagggaatcctgatattcagcggcacagacgtacaaactcagtacctgcaatggacgc

SEQ ID NO: 73764 - DNA, 191 bp, Glycine max
  Clone ID: jC-gmfl02220082g01d1
aataatattagaattaataaataacaggaaaagaggaaaacaaaacggacaacaaaagcaagaacccagagaacaaccaacagcaaacagtgcacaaaacgtgcaagaacaccgagagcccagcaggtggacctcaaaaacaagcacagccgagacagtcagcgacaactgaacccgcaaaagagcgacaa

SEQ ID NO: 73765 - DNA, 524 bp, Glycine max
  Clone ID: jC-gmfl02220082g05d1
catagaattcactaaacttcatttaatttaattttacaggaccacaaaacaaaagacagaataaattccagaatcaacaaccaatttataagggggggattccaacggcagcacagctatgatttcagctgtatgccaccaggattggcaatcaacaactcagcagatgacgattacaatgtagtaatgcaacacctctcattcacaggcaggtttagtgtcaaagctgctcaagcagatggcgaaggcttggaaagtagagagtggataacagtaatccatggtaaatatgtcttttccaatctttccaaactgcaagattaccttttcttgctcctcggcagaaatattatgagatggatcaacagcagctacaagttgaaagttcttaacagaagccactgaaacgcgacccttgaagtttagacaccagcactgtagctgctcatgccatctgggagccttgtttttcagtgctaattgctcggttgagccttggctcaatactggtggctctgataagc

SEQ ID NO: 73766 - DNA, 228 bp, Glycine max
  Clone ID: jC-gmfl02220082g07d1
aataagaaaggcaaaggacaggccaaaccgaataaagaacccaggcccattaactagcgagaccgcgtactacctatgcgagtagaacgcacgcgaaaacggctgaaacactgatgggctttccgaagacccagaaacctttgcctaaaaccttgaactcagatagatccactgcaggcgggccatgctcggagcactgggctgctgcaagccggagtcagctgtcct

SEQ ID NO: 73767 - DNA, 240 bp, Glycine max
  Clone ID: jC-gmfl02220082g09d1
attaataatttttgattttattattatgaaaaacagaggacaaggtaacataaaacgaaaaaagcaagccaaacaagaaacgctctgaaagagagctaggacgatggaagcaaaccgtacgggcaataaacctaataggaagaggccctaaataaacccagagacgaacaaccgcacatctacgatgacgaccatcgacaagggatcagttgccgagcaccatagcatcgacatgcaagc

SEQ ID NO: 73768 - DNA, 479 bp, Glycine max
  Clone ID: jC-gmfl02220082g12a1
atattaaatttgtttttattaataagaggaaccagaggcttaactaagaccctactgtagagccaagacagaagtagtatcaattgaccctaccctaaatacattctcattcctcagaatgacacagaagaactcacttattctgcggcttctctttgcttcaatggagaagaaggcacatgtcattattcgaaggagcggaaaaacatatataatgcttcactttctggacattccaatacggcaatatcacactagtaaagtaacaaacggtggtttcatgcaactgtagagcatggaagatgcatgagtagaaattgttggaatgcaaggccaaaatagtgctgagattcattgggtgcatgtactttgaggtaccttgacataagctgatgaacgatcaacctgatggctttgttcgacggattgaatgggtcccaaatcgcgtaattgcgacggtttggacataagttgaacac

SEQ ID NO: 73769 - DNA, 507 bp, Glycine max
  Clone ID: jC-gmfl02220082h01d1
gaatagtaagaacctctctaataattctagggccaaaaccataactagaccctaatagatccaagatcgaagctagtaacaattgacccttccctaaatacctgtatcagtcctcaagatcacacagtagaactcacttaatatgcggtttctatatgcttcaagggagaacaaggcccatgacattattccaaggagcggaaaaacatatataattcttcactttctggacattccaattcggaaatatcacactagtaaattaacaaacgctgcttttatgcaactgtagcgtatggaagatgtatgactagtatttcttggaatccaaggccaaaatagtgctgagattcattgggtgcatgtactttgaggttcctgacataatctgctgaacgatcaacctgttggctttttccgatggatggaatggatcccaaaacgcgaattcgtgacggtttggacataagttggacactaccgtgcatagtccaagaccattaaagg

SEQ ID NO: 73770 - DNA, 571 bp, Glycine max
  unsure (1)..(571): unsure at all n locations
  Clone ID: jC-gmfl02220082h02d1
ctaactcgtctccagccgccctttttttttttttttttttttaacaaaaacaccttaaaaaaatatccaaggaatcaaaaacactacaaaaggatttataacaattgatatattctgctcaatcaactgaaatataattaattaactgaactacaattaaaagaaatccacaaaacatacaacattttctcttaaaacatgatgctactttgctatccagtcaaaatgaaattcatagaatactccgtaatttgcagacaggaattaatttctctttaacatcaattctttcagaaccagtattaccaaagttcaccttcactgacttctgtcactctcgtaaattctagattttagctattaaaaagaataaaaaatttcatgttatagtttcatatcttagatcgaagattactgctatatgtgatgaacattagtgacactagcattacagcacgcgttaatctttttgcagagataatccatgcaaagatattgcatcattcggtagcgatgacaccaaacaacaatttcaccaaaacagtatttcattgcaaaattntacattact

SEQ ID NO: 73771 - DNA, 332 bp, Glycine max
  Clone ID: jC-gmfl02220082h05d1
atgaacattggttcacacataagaacacattatcataacaagacactcactcgcatatgtacgtactataacttgataaccaattcatggaccctcactttccacagacgattgatgagaatgaggcccaaaacttggtggtgacaggataccatccgcgacctgctatgtgctccaatggacactatcctatgccgctggcacatggatggattccggacatgctgagcctggtcaatcaaacgagctggaggcacttcaccggaagctaagcaaatgccaaagtatcatcagatactgccattgaacctatgcatccttcggggctgaaa

SEQ ID NO: 73772 - DNA, 332 bp, Glycine max
  Clone ID: jC-gmfl02220082h06d1
atgaataacagaggcaaagataacgttcaactaaataagcaagcgaggcaataaaatgtaggaaactgaactctaaccatgcaagtcaaacgtacgataaatgaacagacgttgaaaaggtcctaggcaaagccaaagactaactcatgggcatctaaaattacgacgaacaccaaggggtcatgcatatgccacattagtaactgcttgcaagcaatccagaactagcttgaacggcttgaccataggctcatggccccgatggagagcctgcagattgctggcactaacaaggacctgcacatgcgcatcctgaaccatgacattgatcc

SEQ ID NO: 73773 - DNA, 239 bp, Glycine max
  Clone ID: jC-gmfl02220082h08d1
atatataatattataataaattaatagcaaaaacaaaaggtaaggcaatagcgaacggcagaacagagccaaagtatgaacacatacaaagagcacttgaacagtggaagccaaacgttcggcaaatgcacgtaccactaaaaaaacctaaaccaagccaaagacggactagctcacatttagcatggagccaatcaccaagaggccatacaaagtgaagagtactcactacttgaaag

SEQ ID NO: 73774 - DNA, 165 bp, Glycine max
  Clone ID: jC-gmfl02220082h09d1
attatgttaaacagaggaaacgggaagatagaaagggataatagggacagaatagaaacaatcggaaacaggaatgtaactatggaagctaaacgtccgggaaattgacatgatactcaaagaaggtattcggagccaaaggcggacaagtgcagcacctgaaag

SEQ ID NO: 73775 - DNA, 548 bp, Glycine max
  Clone ID: jC-gmfl02220082h10a1
ctcatctaggttggaggccgccctttttttttttttttcttttttttttactttttttggtgattattgtcataggaaccatccaattaacaatggtttatgtagcatcatatcatcaccagacgaaaaatatcgatctgattttacttgaggagttggatacttttgaggtggcagtcactggtggttgctatcaccaagactttgaattaacgcggggtggtgagcgtgccaaaatatacgagaatggtaacctgatcacactcttccttgacagatcctatggctctggctatcagtgcaaaagcgagtacttgtgcagaaaaattgacatgcaactcaagctagtgcctggtaactctgctggaacagtatactgcctatgatgcatcttctctggagcctactcatgacgaagtagactttgagtttgtgggtaacttgagtggtgatccttacagtctgcacacgtacgtatgcagcctacggatagggaacagagaacaacagttccatctatggttcgaccgcaccaaggactttcacac

SEQ ID NO: 73776 - DNA, 268 bp, Glycine max
  Clone ID: jC-gmfl02220082h10d1
gttgttaattttttattgttttttttatgatgttaatacgaggaaacgggaaggtaaaaaggcaaaaaaaagacggcagaaaaacagacggaaggaggaccgtaataatgggagcaaagcatacggcaagtatacctgagacgcacagctggcataggaccgtaagaggcacacaagagagcgactgaacggacgactaggcataagtgatccactgataacgaggaacagtatcgaaatgcaagcaacactgactaagcatggctcg

SEQ ID NO: 73777 - DNA, 388 bp, Glycine max
  Clone ID: jC-gmfl02220082h11a1
gtgttaattgtcataggaaccaaccatttaacaaaggtaaatataacatcatatcatggccagacgattaatgtagatatgaactgacttgaggaggaggatacttgagaggtggaagtcacagctggttgctgttaccaagaccttgaactaacgcgtggaggtgtgcgtgccagaatatatgcgaatggtcacctagttgcactattcctaagacagatcctatgactccagttatcactgcaaaagctagaccatgcgaacaaaaattggcttgcaacccatgccagtgacgggttactgatggagctcaacatgggcatactgtagatcgtccctgatgcctgcacatgacgaatgatagtctgacgtcgtggggtacctgact

SEQ ID NO: 73778 - DNA, 551 bp, Glycine max
  unsure (1)..(551): unsure at all n locations
  Clone ID: jC-gmfl02220082h11d1
aataaaactccaacaattttattaatgaaaatactttacaatttcagcacatatacactgccatgaatataattttgcacgctataattatctttcgccacaaacaatggagtagtgctcaacaaagcacaaaccaacaataataacagttttagttgcattaatttacacaagaaagtaaattaacgtaataggcaacacatgtgtgtcacgttcatgaggatcattttataatgatatgcaacattgaattaaatattctcatgcaatggagcattctggaggaaggccttgagggaaacgtctgatatcagtgcaataattgtaaatcatgtaattcttttgcacccaacggatctttgcctgccccgtggcgtccagtgattggccagtggaggaagaagtttgggaattgaagtttctgtatgaggctgtgaatggtgccttgctccaatccgttttcacaagcccaccccttgtggcccaatcctcagngttccaaagactagagtatattctcatgggttggctctctgggaatgggaaccctt

SEQ ID NO: 73779 - DNA, 332 bp, Glycine max
  Clone ID: jC-gmfl02220082h12d1
ggctagggaaccaggggtaattttggatggaaatgagaaaatattaccgattccaattaagggacattggcatatcttttggtacataccttaaactggggttcattccattttaactggaattgatgatggcctaaattattaaccattcaagcaataaccccaaattgaattttggatcaacacttaggggcggcctttatgaaattaaatggatgggaactttatgggaatgggaataaaaattggagatggcagctcatattaaattatatgtcccgggagggtctatggcttaaaagggataatacccaataaaactggttgaaact

SEQ ID NO: 73780 - DNA, 296 bp, Glycine max
  Clone ID: jC-gmfl02220083a10d1
ctaatcaataggggtacttaaagcagcaccgaccagaactataattcaagttccaaaaaaaagtttgatttttctaaccaagagtggtgcttagagcagcaccgaccagaatggttagggaatacactccaaaccgggacggggttatagacgacgcaccgtttagtctggctggcgtcgtttcgttcgacgacgacggcgtttgagatgatcccgacgacgacgacggcgagggggttgttgccgccgcaaacggtaatggcggcgatgttgccggggtgagggaggaaaagggt

SEQ ID NO: 73781 - DNA, 540 bp, Glycine max
  Clone ID: jC-gmfl02220083a11d1
aataaaactccaacaattttattaatgaaaatactttacaatttcagcacatatacactgccatgaatataattttgcacgctataattatctttcgccacaaacaatggagtagtgctcaacaaagcacaaaccaacaataataacagttttagttgcattaatttacacaagaaagtaaattaacgtaataggcaacacatgtgtgtcacgttcatgaggatcattttataatgatatgcaacattgaattaaatattctcatgcaatggagcattctggaggaaggccttgagggaaacgtctgatatcagtgcaataattgtaaatcatgtaattcttttgcacccaacggatctttgcctgccccgtggcgtccagtgattggccagtggaggaagaagtttgggaattgaagtttctgtatgaggctgtgaatggggccttgctccaatccgttttcacaagcccaccccttgtggcccaatccctagcgttccaaagactagagtatattctcatgggttgctctttgggatg

SEQ ID NO: 73782 - DNA, 438 bp, Glycine max
  Clone ID: jC-gmfl02220083b10d1
cctcgtatatataaatgtagttgtacaaaatttcagaacataaagatggcaagcagacagtgcgcccctccaaaattgaagctaacttcagcttggcctcttcactggcataactcgtttcttcatttaatcaaactcgcttcaagtacgttaatatgcctaagccagcaacaagtgcagcaccagcagcggcggcactatatgctgaagcccatgcatctgaataagcataacttcctgaacgagaacctttcacattatcacgtggtcctgcgtagtccaaatgcaatttcaaccccttcaaaccagctgtccttgcatgatccacagctgctgcaagatcactgtctgaagccaatacaactttatcatgatcttcgtcttcatacagaatttggggtatgttgttaggatcgatatcatcaccaagtctctgaa

SEQ ID NO: 73783 - DNA, 545 bp, Glycine max
  Clone ID: jC-gmfl02220083b11d1
aataaaactccaacaattttattaatgaaaatactttacgatatcagcacatatacactgccatgaatataattttgcacgctataattatctttcgccacaaacaatggagtagtgctcaacaaagcacaaaccaacaataataacagttttagttgcattaatttacacaagaaagtaaattaacgtaataggcaacacatgtgtgtcacgttcatgaggatcattttataatgatatgcaacattgaattaaatattctcatgcaatggagcattctggaggaaggccttgagggaaacgtctgatatcagtgcaataattgtaaatcatgtaattcttttgcacccaacggatctttgcctgccccgtggcgtccagtgattggccagtggaagaagaagttcgggaattgaagtttctgtatgaggctgtgaatggggccttgctccaatccgttttcacaagcccaccccttgtggcccaatccctagcgttccaaagactagagtatattctcatgggtctgctctttgggaatggaa

SEQ ID NO: 73784 - DNA, 453 bp, Glycine max
  Clone ID: jC-gmfl02220083c10d1
atggaacaagggcagaagatttattaaagccgcgtaagagacaacaagtaggtacgtggagtgtcttaggtgacttacccacataacataaagtgacattaacaaacatagctaatgctcctatttgaatagtgcatatcagcataccttattacatatagataggagcaaactctagctagattgttgagagaggtgaaggtactactcaatgtagtacatgggattaggaagcttaaaggtcctgctttcgcctctgtggtctccaagcaaatcgctccattggtctccaatgattccaacaattctgtatccctgccttaacagattctctctcattgctgatttgtatgaaagtgcatttggagtgatacgatgtggatccttgagaattaactggtaccatgtgtggaagccaaccttctttaggcttgcttctgatacgggcatttt

SEQ ID NO: 73785 - DNA, 526 bp, Glycine max
  Clone ID: jC-gmfl02220083c12d1
aaaaaaatatattatatatatcactcaaatggcaacacattaatccgaacacacaggtacatacaccaatatattacataaggtaatatgtagattctaaattaatttattctagtaactagtaacaactcagaaataaacaaccaacggcagaatatgatgttctctgggcagttaagctcatcataactagtcatctggctaccagatgttggcttattggggtcttccttctgaaatcttaacaattagaaatccttggtcacaaccaaatgcaagctgagatgatcctttcttgtatccaatactccatactctcttgagaccaaagttcaacgtggtttgaagcctgtaagtgacagcatcccatattttaacagtagaatcctctgaagctgttattattataggaagctcaggatgagcacatattgctgtaacattgttttcatgtccttcaagcgtctgtacacagtttctagaatgataatcccataccttggcagtgtatcatcagaaccactta

SEQ ID NO: 73786 - DNA, 426 bp, Glycine max
  Clone ID: jC-gmfl02220083f10d1
catccttaatcaatctgtttctagagatcactttgaacacaatggttaatagtcactctttggcaccacatgattgactaatgggggcaccctcacacccgaaagagcatcagggatcggctaggatgaatgagactgatatctacactcatgaattcctgaactagctattattttaaccaacgagcatatgctacccttgacagcaatttacatactcaatggcatccattctaggaggatgtgccccaatatcttcatcccatagcgatgaactgatcccatagtcttgatcctggatccgactgtgatgtattaggtgctactgcttgagactttagcgctatttggacctggtctgaccatgagccgagggataaaggctgcaatggtacattacataaccggttctaccacctgatccaa

SEQ ID NO: 73787 - DNA, 448 bp, Glycine max
  Clone ID: jC-gmfl02220083g09d1
catcaaatatacaaaggcacgccttatcaataaagtttatataggaacatttaactatgaagccaatcttttaaaataattagagtatcaaagaagcacaacaggctcattaacgctaccataaaaattaatcttgcagcattcaggaaaatggaaaccagcctcatctaggccagcctttgtaatatgcgggcatgacctcacatccaagtattgcagagacgtgcatttacccacaatgatgcctatacctgccactgtgatctttggacaattactaatcttcaaaatcttcaaactcaatccaggctcctcattgcttaatagctgaaaagcagcatcagtcaactcttcacagcaaccaatgtccagtgcctcaaggtttctgcattgacttaaaacacagctcactgaagaatcagaaatgtttaaacaccaatccatcctc

SEQ ID NO: 73788 - DNA, 516 bp, Glycine max
  Clone ID: jC-gmfl02220083g10d1
aacaagagaagatgagtacttaattatgaagagtaaaatgagaaatgactaaggatgcacaagacagaaaaggaacactcaaggaatacatacatggaaattaaaaaaaagaaaaagaaaaagaaaagacacaaaagggatacaaaatacacccttggacacaagcatgcttatctacaattcgatgcatgcccccatggttttggccttctcttccaaacacccccaacaactgtagctgatgagaggaaaagacgaaaaagcctaaattagggaactgcatagacagatcactagcactcctcaacatagaaattattattcttcgggggaaacaccatgcatagcccttgttggcaaattaatcaaggtagctagcttaattgattaattaattaagcgttgctcctgaaggatccaagagccttgatagctgctgctctaaggatgtattggtggtaaaatgcagccactgctgctccaacaattggtccaacccagaatatccactgatca

SEQ ID NO: 73789 - DNA, 385 bp, Glycine max
  Clone ID: jC-gmfl02220083g12d1
caaccttattttttttttaaagggggaaacctaaattgggggaaaacaaacccctaactttgaaaagacgagcccaaggggaccctttaaaagcccaccaaaattaagacccggtcaaaaaattcgccccccccccacgcggtgtcacaaaaatgggaggccccctgacccaatatcaactttaaaaaacccaaccaaagaccccccccccccccctttaaaagaaaacccccccccgggggggggaacaacccccatctgatttcgggacaaaaaccccttttaagagggcccccctctaggcttcgggggctccaaaaaagggtcttgcctcttgctcccaaaggccctaaaaacattggccccaccaatacaaggatgcccc

SEQ ID NO: 73790 - DNA, 516 bp, Glycine max
  Clone ID: jC-gmfl02220083h09d1
aacaagagaagatgagtacttaattatgaagagtaaaatgagaaatgactaaggatgcacaagacagaaaaggaacactcaaggaatacatacatggaaattaaaaaaaagaaaaagaaaaagataagacacaaaagggatacaaaatacacccttggacacaagcatgcttatctacaatttgatgcatgcccccatggttttggccttctcttccaaacacccccaacaactgtagctgatgagaggaaaagacgaaaaagcctaaattagggaactgcatagacagatcactagcactcctcaacatagaaattattattcttcgggggaaacaccatgcatagcccttgttggcaaattaatcaaggtagctagcttaattgattaattaattaagcgttgctcctgaaggatccaagagccttgatagctgctgctctaaggatgtattggtggtaaaatgcagccactgctgctccaacaattggtccaacccagaatatccactgatca

SEQ ID NO: 73791 - DNA, 510 bp, Glycine max
  Clone ID: jC-gmfl02220083h11d1
gcaaacttcaagaagagcaacaattaggacaccgaatcaagccattctcattgcactccaaacacctcttcaacaaaaccacacctaaacttgtgcacatcctatatatgcaaaaataaccaccacaaaaacctacacacagttcctcacatgctttcaatgtcattctccaatcaaaattgaagtttcactctgacaacctgcgttgatcttcaatgcaaacctctattacatactggaaccaattctgattagataacagaaccgaatacacacaagaccgaagcttcacaacaataatccatgttgatcttcaatgcaaaccttcaccccacacgtgaaactccaattctgattagataacaacaccaaaaacacacgaaattggagcttcactatgtaatccatgttgatcttcaatgcatagttgcaaaccttcaccccacacgttaaactccaattctgactggacatcaacaccagaaccaaaaggaatcgcatctaagttca

SEQ ID NO: 73792 - DNA, 526 bp, Glycine max
  Clone ID: jC-gmfl02220083h12d1
ataacacaagaacaccaatatataaattgaattatattgaggcactaactgggcatcagctgttataaaataatagatacatcaactgggtatacgtttacagcataaattttaaatagtaaatggcctcttaacagttttcaataataaactgcatcacttgacgaccatgtttcctcggttcacgagatgaccattttaatgcattactttcgatttctaccacccagccaactggcactccatagtataaataatgaaccatgttacagtcttatcaagggaacttccaatatatgaaccaccaatgcagaagtacccaaggccactaactcccaataacgaactgatcggcatgctgcaatgttactaaaaaaacaagcagttgaacttgtttgatccacgaatccctgcttcagtggtcactccattttgaacatagtaaaaccaggggcaaaatgacagttatttgctcattttttaagcctttcatcaatttaagacatctaatcgcatcaataatgat

SEQ ID NO: 73793 - DNA, 357 bp, Glycine max
  Clone ID: jC-gmfl02220084a01d1
gggaaaattgatgatcatgccatttaaaatttcaagacagaataattcctacgaacaaaggggaaaacaatgaggtttcccatctaatgaaataaagccaatgaccttatgcggaaagcaacggtcattttacacgggcaaaacaattagtatcccatccaacaaaaatcataaaaggtaaaattcaataaaaaagcctcaaataaggtttaaaccgataaaggggtgaaagcaactccccatttaggccacttccccaatcttggggcccggaccacttccaccagaaggagcaggataatcatcctcgggtggcccaaaaccaggaccacccatgtgaggaccaggaccaccttg

SEQ ID NO: 73794 - DNA, 356 bp, Glycine max
  Clone ID: jC-gmfl02220084a02d1
ggctaaataattgttcctgccatttaaaatatttagaccgaataattcctacggacaaggggggaaacaatgggtaccctcacgtaatgaaatgccgcaattggcttaatgcgcaaagccacgttcatttttcacgggcaaaaccatttgtatcccatccaacaaaaatcttaaaaggtaaaaccctattaaaaagcttcacataagggttaaaccgacaaaggggtgaaaggaacccccccttgagtgcgcttccttaatcttggggccctgaccagttccaccagaaggggcagcataattatgctggggtgccccaagcccagcaccacccctggcaagacccgccccacctt

SEQ ID NO: 73795 - DNA, 587 bp, Glycine max
  Clone ID: jC-gmfl02220084a04d1
aaagaaacacccgcacggagagaacataattcaatcctcttgtgaataagttttcaatggtaaaagttttcttcaacctatttaaagacagaatgaaaaatctatattatatacgcaagcattatacaaagatatgtcataaatagaagaaaaaaaggtaaaagaaggggacgggaaagagggaggggaagaagtaaaacacatccaagccaaatttgttcactctatttttatatgttaaggggctcttccctagattgtccattgttgtatccatcataggttttggtggacttgtaaaactttctcttcaacacaacaatccatgtgatcacttccaagaacaaggcaactgcaccaagtgcaataagaactgcagtgtaagttgatttccatttctgatcaggatgcaagatgctaaagcccctgaagatgttgatgattcccaggataactatgctgtatccgacgctgtggtgatatatgttccagatgtacctatacttgtgatccttcactggcctcaggaacaatgcaaaaatctgagtgttgcaaacaaaagaggcaattccatatagcgatgactc

SEQ ID NO: 73796 - DNA, 593 bp, Glycine max
  unsure (1)..(593): unsure at all n locations
  Clone ID: jC-gmfl02220084a05d1
agagaccataaatatattaaacattatgtgcaggtatatagtaatatacaacttcaaacgcatcgacacgaaccatgcatatatatagaaaccttgcacaattcatctccatttttcaatacacttgaaacatcccaaacagagacaagctatcatttttagacttttaacctcaccatatataaaccctattgagaaaggcatgttatgcaaactatgtaattaatgtgcatggttttcattacaatcacccgctgtacaccctgagacgactagtgatcctctctcggcacatgggacaattagttaatttgtgtccacactctctgcaagtcatgtgcccacatccaaaggccaaatctcttgcattggtcaaacaaactgggcaggccgtttggttttggtcatctccggaggatgctgctgtattaatgctgggtgcaggcctagaataaggaacaggaggaggttttggaactattctctttgctcttcctgttacacgtccgagtattccgaattccatggttgctctatattggaaggcgatctncatgagagcagccagagcataagctggctttttttccgac

SEQ ID NO: 73797 - DNA, 434 bp, Glycine max
  Clone ID: jC-gmfl02220084a06d1
aacagtgtataatgcccatgggccatgatttatttatttagaaagaacaacctagctttatgagtatgaatatcataagcattgtcactgccatcataacagcactcacacgcatacataacataattaacaccatgaacatgcccttctacccaactctaagctacttgcatagtactacatatataatatccttattgaaattaaaaaaaaaacaacagtaacatcggaagattaaaaaacatagcctcttaatcctcccatccccatgaacctgcagtggtctcggttcattgaaccagcccatttaaaggaaaagaccttaattattttttgcataatatattacagattttcttcctcgatcatagacaaggggaggaaaattcaagggtcctgatcatggtgcttgttggcaacattgcactgctttc

SEQ ID NO: 73798 - DNA, 532 bp, Glycine max
  Clone ID: jC-gmfl02220084a07d1
attaaatagatttggcaccccattctttcataaatatcaatgaatctcttctcttttcttttctgctctccccatcgatcaactaatgcacgcccgagttatcgtcaagagtcataagtgtaggaatttggccatggttaacaaaatcaattttattcaatcttaagcagcacaacacttcctctggaagttcctcttgcttttgtgcctggatagttaggccaacatcaagtattccatgctttacacggtctcgaagtgaatcaagtcctttccttgatatatagctaaagcgatgtatatccagatctatttcaaagtagttaggtcccttatagaactcgtgttgaggacgtgacaaaactggcttgccattgtaggcatttataagcttcttctcggcagaatacagattaaggtcctctggattaactactccagccaaaatttttagtctctccctatagggaaccaggctttcctttgtataccctttcaccttttctggctcgtcatctggatcatccccata

SEQ ID NO: 73799 - DNA, 503 bp, Glycine max
  Clone ID: jC-gmfl02220084a08d1
aaacatgaaaataaccctcttttcttcatgttggaatagaaaaagaaaaaatgaatactttacaagattacatttttagcataatgtccgcgttgcaatcttgtcacactccacattcacaatggtctgaaataaaagaggtgtacgccaagtttgagtgcaaacttgtggcagccaaactaataatagtgactaaaaaaaaaaattagtttatatcactttatagcataatatcaatcatagcagaacatgatatagacatgagccgcactaaaatgctttgcattcctaggaatgattttcagtccgaacaagaaggctttgagcatcagggttcttgccccaagctctctccttccataacagctccacttcatcaaatgtcaatcccttggtttcaggaacatagacaaccacaaacataaacgcaagcacggctataatagcaataattaagaaagtagggccagtgcctacagctgcagcaaccgacagaaatgact

SEQ ID NO: 73800 - DNA, 408 bp, Glycine max
  Clone ID: jC-gmfl02220084a10d1
actaatacattttatgaaagaacatgttttataggttcatattgtacaatatatgtgtgctgactgaacccattcgagcacactaacaaaagggggaaattcatgggagtattctgactattataaacagagctgacctacagggatggacccttagagcctattttagctatcctattgcaagaagccataacttaggcacaagtggcttgcccatagtgcagcaaccccttgaaattaaggaggctcattcatcccctggagtggcttcaccgctggacatgtgaagctaagtgcatgcctgacaaaactgccatattcgaacccttgtacaaacgcgacatttccagccctgttgagactaaggatgctggctattatgccagggctggccacaaaattctactt

SEQ ID NO: 73801 - DNA, 393 bp, Glycine max
  Clone ID: jC-gmfl02220084a11d1
cagatagtacaaacagttatttgacactactgctttgctcactttaaaatacaggatctttaaacattgacaattcaaaaaataaaaaatcatagacaaatgagcataacattgataacctagatttctgccaacatagcggctgagttacaaaggcatattagctatccatctactgaacatggcaaaaccttcctcaggcttgtactctggagctgtatgtcctgaacccttcacagttgcaaatgtcatttgattcgagtaaatccttgtgtatcctgcaacttggtcttctagaagccatggcctccaatcttccacaatggagtagtttagagccctaatccatgcttgggttgacatgaaaggaacaactgcatcatgatcttcact

SEQ ID NO: 73802 - DNA, 443 bp, Glycine max
  unsure (1)..(443): unsure at all n locations
  Clone ID: jC-gmfl02220084b02d1
tcgcgatctagaacctcgagccgctcgtgccggcattgcatcaatagctttgagcccatggtcctgaggttgaatggagaatttgcaccatttgggaagctgcttatggcctgattcctacaagttcctcagctgttgatcttccggaaattatagttgcaaccccactacagcctcccgtgctgtcatggaatttgtacatacccctattgaaggtcctggaatatcttcctcgaggaagcccatcagaggcatgtcttatgaaaatatttgctgctacagaggaagctattcttcagaggacatttccacctgagtccactagagaacaaaacagaaaatcaaaatacctagctggcataggctntggctctgcctcaaaaaacctggccgaggcagaacttcgtacaatggttcattcactcttcttagaatcatgtgca

SEQ ID NO: 73803 - DNA, 405 bp, Glycine max
  unsure (1)..(405): unsure at all n locations
  Clone ID: jC-gmfl02220084b03d1
aatagcacaaatgaagcataaacaatcaaatagaattcgtaacaacccatgcaaggagactggctacattaaaacaggctaatttgataggaaatgagctcaagcaaaaataatcccgttttccttaatagtatcaagaacgatccctagtctgccttcaatcctttcatcctttctaggttcataggctactgcatatacatcagcttccattgatcgttgagcaataaggtttccaacaactctacaagcgttatgatctatcaaggatggaagggagtttcgaagatcctaggcgttagagagagcaacacatatcactttgctggttcctcggagtaccacttttgcatgaataaatctttaggagaagaaaacattnaataagaatggtctcatgtacat

SEQ ID NO: 73804 - DNA, 521 bp, Glycine max
  Clone ID: jC-gmfl02220084b04d1
cccttcttcttcttgaccaggttctttcttcttctttttttctatctgtgacttaaaacctaccacactaaaaaagaaaaagaaaaaaaaaacccttcccgaataaaaaggaaacaaaacaaaatttattaatttacaggtttgccgtgattgtagccgtaataggaaagataccacttgacgaacttcttcaacccggtttgcaaatcggtcgtgggcttgtacccgagctctctccgggccgaactaatattcgcgtgagtaaaaggaacgtcaccgtttccaggcatgtccacaatattcctcttcgccttcaccttcaaatgccgctccaatatactcacaagagtaggaacagtaaccggcgaagtattccccaggttaaatattctatacggagcgggtccacgcttcttcccacccgacccggtactcttagccgaagtatccaacgacccgacgcaacccttcacaatatcatcaatgaggtgaaatccctagccaggtcgacatgggtttta

SEQ ID NO: 73805 - DNA, 304 bp, Glycine max
  Clone ID: jC-gmfl02220084b05d1
aaacaccgtatattgcccatggaccatgagcaagtatttaggaatgaacaacttaactcgctgagtctcaatccatgcatctttgtagatgccatgatcactgcatttacattcatacatacccttgttacctccctgaccgtgacctgctaccaaactttgacttactagcttagcatatcttatccctaatgctaaaggcatgttatgcaaactctgcagttacagcgcatggttaacattcctatcacccgatgtccaccatgcgactgatcctgaaccggtctcggcacatgggaccatt

SEQ ID NO: 73806 - DNA, 332 bp, Glycine max
  Clone ID: jC-gmfl02220084b06d1
agggggggaaaaaaagcattttttccctaaacaaaaattcaacattttttgggaaacaaaggaattcaaccccctttttttcttcttcctccattttcaccccttaaatatcaagggcattctttattcaactttgggcccccccagggttgggaacatcatcagcatggggaacaatctttgaccaaaacccaggggacccccaaactgggtgcctttcttcaagggggaaggtctttggcccaggcaacaacatggcaatgaaaagggcccttatgaggcccaatgccccaaaaaaaaaaaaagggcccaacttcaaggggcaaagcatg

SEQ ID NO: 73807 - DNA, 419 bp, Glycine max
  Clone ID: jC-gmfl02220084b07d1
aaaataaaataaaaatttcaggaatcttataatcaaccaacttttacaaacttcagcataacatattctaaaacaaaaagggccacaagcttcccctaaaactcaggtttagataaccagcacgacggttacccaaccattataactgaaacatgctaaacgtacttgagttgcaaatcataaacccccaaaatgattggaaaaacccgaatgttgcaaggggcggcaactacttttttcctattactacgtaattaaaaacccttcaattccatatgatcacaaaccctgtgagccgttccttggatcttgcagcccccaaaatttgaaatccaaattgttattcaatgtgagccttatttttgaaaggtgccagtagcttgccaaaatgctgatgaatctcacatccaagttcaacc

SEQ ID NO: 73808 - DNA, 524 bp, Glycine max
  Clone ID: jC-gmfl02220084b08d1
gataggaataatatacgtctctgtattagcaactaattccatacaaagaaggatcaacaaatcccatattcttcacttacaaattgctttcaccaaaaagaaaaaataaaccaacacttcaacataaaacatattcctaacagagacacctagatcgaagcgaaggggcataatagtcagttcaagagctagtgaacttggtgacagccttggtaccctcagagacggcgtgcttggccaattcaccgggcagcacaagcctgaccgcggtctgaatttcccttgaagtgatggtgggcttcttgatgtaacgggcaagtctagaagattcctgggcaagcttctcgaagatgtcgttgatgaagctgatcatgattcccatggccttgctagagataccaatgtcagggtggacctgcttcagaaccttgaagatgtagatcttgcatgtctgcacgctcttcgtggatctcttcttcttcatcccttgtacgccggcgcctccctccttcggaagctttttt

SEQ ID NO: 73809 - DNA, 448 bp, Glycine max
  Clone ID: jC-gmfl02220084b10d1
aaaaataaccaaagctgaaatataataatatacaacactcaagtcaggtgggtccacataggacattgaaaagttcacaaagtactgggccattacaaacaaactcgaatgtgaaccaaactcatgggcactggctatcaactaaaagcttatattggggtcaaaaattcagtgcatttagcttccactacaaatagccaaaccagatttatcatgagccttagcaacagagtgcagatcagtccatgaatatgatctccaagggggatttcgtccagttgaagaaggttgaggcagcgatgaccgattaatagcacgggatgaagaggaggaagagggcatggaggcgatattgaagtggagctactaccctcttcactacagttcaaagtgagacaagatgctcctccacctatgttactgggtcgctttgatattccaccaatgt

SEQ ID NO: 73810 - DNA, 445 bp, Glycine max
  Clone ID: jC-gmfl02220084c01d1
attcaacaaacctttaattaataacaagaacaagtttacattattttttttcatcttacatatgtacaattgcaagcaatcgcacagcttgagagtcatacatatttcacctcctccattcttttacaacattatattatatgttttccaacaattaatcactatttaatttcccccacattattggtttcccttttctatttccactgttacattatgtcatgacaacaacaatagtaataatgaaagcctagaaccaattaagattcctttgtccctaactagcccaaagcatgtttaatcattaatcacttgcacccaccagcaccaaacccaattctcccacctccaacatcatacacaacctctattgttctctgtagtacgttcccatatatagtaacatcactatcgtcaccatttgcggcaaaagccaaacaaacct

SEQ ID NO: 73811 - DNA, 424 bp, Glycine max
  Clone ID: jC-gmfl02220084c02d1
gtgaattcagttatttataaacattggcttcaacataagaacttcattacatcacaagacactcgcttgtatttgtacgtataaaaacttcatcaccaattcaagcacctgcagtagccacagctccttgatgagaatgaggcgagaaactttgaggttcatagataccatcctcgtcttcctctgagtcccaaaggaaactagcatatgctgcttgtacatggctgtcttcaggagaggctaggactgctctttcaaaatagctggaggcacgttctaggttgagaagtagttcccaaactaacttcccatactgggatagaacctctccatcattagggtctgcaagtatggcacgggaataatactcctctgctccttcacgggcttggttgcactgatacaaaaaataggcataattcct

SEQ ID NO: 73812 - DNA, 573 bp, Glycine max
  Clone ID: jC-gmfl02220084c03d1
ccagctgtcggcctttcgtttttttttttaagatataatacattgattaaactgaccacgttaaactcaaccacataaagtataagatagtcaaatgcatcaatatacttgatacgtataatggaaaggaggggttcgaactcatccaaaataaaagtagtacgttttgaagacttttatgataattttttttccacttttatatacatcctctggtcagctcaataatttcaaagataagcgagcaggagagaagcagaattctccacgtaatagtggttacaattcttcattgaagccatgcacaaaaaaaagcctgcaaaattctgctcaaagtgccatctcagcctgcaaagctgccaattcatcttcttccggagttcgctttgcgggaactgggcgagtaggttgctgcccagctgggacctgcactggggccgcaagagctgtagttgctggctgaagaagctgttcttccaactcagcacccttcagttcttcaagttctgcttccaattcatgctcgtcaaaatcagcagccgcaccaattggagcagacaatgcatactgaat

SEQ ID NO: 73813 - DNA, 541 bp, Glycine max
  Clone ID: jC-gmfl02220084c04d1
aagcaaaaaatttaaagcactatcttcaaaacatagtctttgcagttgggaaatacaaggacaaatacatgctcccacttttaaatgtcatcaaaataactatagcacccatatgagggcaagtgttgaatctgcaccctctaactgcagattctgatctgttatttgtttcatgaaccacagcaagccgatttttgagcagctagacccccggtggctgcctggtcgggttggttaatcttgatagtctgaggttcagccttagaatctgtgtctgcaagcctttgcttgatatctcttgctattgaaaagaaaacctcctccacattcatgtttgtcttcgcactggtttcaaaaaacttgataccatactcatcagcaagggcttgacctttggaggtaggcacagcccttttactttcatccatatcagccttgttacccacaagtatcttgtttacattgtcagaagcatgttgttcaatgttgcgaatccaattcctaatattgttgaaagatgcttcatcagtaacatcataaa

SEQ ID NO: 73814 - DNA, 403 bp, Glycine max
  Clone ID: jC-gmfl02220084c05d1
acaaaaagccttttcaagtccaaatccgatttagtaaaaaaaaaaaaaccaatttaatggggaggggtggtatttctcccccgggggagtccccacaacttttttatcaggtttccccagaatttgggattggtccggaaacataggggattgcggtttgatacaaccgagaagcttatttacctctgaatctttaaaggaaataaattaggggattaactttgaccgatcattattttggtcatttgcgctaacggggctttatatatagaacggcccaaaagcttattgaacccatgggtggacccaataacctttttttttgacccttatcaggggcgggctttaaacctccaaaaagtggttctcctcaaaaaagagaaaaaattggggttcaaccttt

SEQ ID NO: 73815 - DNA, 270 bp, Glycine max
  Clone ID: jC-gmfl02220084c06d1
agccaatcattttcttttatgaatgaaaatgatacacactgaaatactatctcactactagcgtgtaaaccaccgacggaaaggagacccacacgattgctcacacttactcacacgaggcgaggcaaaacatcagtgacaaggacaaccttaataggcgatgaacactgtgagtgactccgcgtcaacaatgcgggtaagtacgcgtgtaaattgtcccgatctacattcccctgtaaatgatacttctacctgtcatcgagacatact

SEQ ID NO: 73816 - DNA, 402 bp, Glycine max
  Clone ID: jC-gmfl02220084c07d1
gccaggaattttcttctatgattgataagcatccaaactgatacactgtaggattacgagctgccataccatcgactgacagatggccttcaccattacgcatacttactcacacgctgtgacgtaaaacatcttcctcacagagacacttagttcgcgacgaacggtcatagttactaggcctaaagattgtgagcaagtacacggccttattacccttatatacggtgcgcttgtccaggtaatcgtacctgacatgcctgcccgctaggtgaatttcgctgaccgcgatggggggctgacagtcgccacgggcatgcctagaagacatctgggcatgctagctgtcaagatccctgatgcaactgtccaggatgccaatggccctgctagtgattccag

SEQ ID NO: 73817 - DNA, 522 bp, Glycine max
  Clone ID: jC-gmfl02220084c08d1
aatccaaatcgaaatcggattggatatgcatggctactaactgtagctacaaaccaatttgcactgccatcccaacgtgtcgaacatgatttcaataattacacatacatatgtacatgttatgctgcaaaattagatatattaaagaaagttaaggttgcgatacgcacagttgcctcatgggtgtaagcattcttgcaaaacgcaggggcacatgtgccttgatatatgttccttgctctgtatattcagttttctcaaccattccaacctggtgtatggtgctgagaaggtccccattttcaaatgggaccagagcttccacccaaaccatggagtcctttagcttgtcttgaactgcattacaaaattcttgcaagccattaccacttaaagcagatatgcatacaacatcatctcttttttcagcttctagcctgagtttctggggatcactaactttgtcaaccttgttccagacaatcaattctggaattggcgatacatctagttctgacagga

SEQ ID NO: 73818 - DNA, 508 bp, Glycine max
  Clone ID: jC-gmfl02220084c10d1
gccttatcaatggctttaaactatctctcttacagtaacttcaggtttcccggatcgaaattgaaatggcttctcatgcctggttgcaaaatgaacatagatctgagccattacatatatcattctaagaataccaccagggatgaaacgcattattgctggaagtctaccaatggggtaacaaatacaaagccatatgccaacattgacaatactgaaacggagattttaacaggcctgtgatcactggacggcatggtaacatgactctgacctaccaggcgggctacagtgaggcacttaaggcacaggactcacaaacgagacttttcaggctattaatacacttcatatgacatttcctccacatgtgtgcaatcttcaattcaacttaactacctgaataagccttactttcactgtacggagaaagggcactggcatcatggctagtgcaactgctgtcctcattgaatctcataacggaaaatggtatggttgaatcaaa

SEQ ID NO: 73819 - DNA, 533 bp, Glycine max
  Clone ID: jC-gmfl02220084c11d1
cacaatgaatgctagtgctcacaaacaaggccttgcaatgacttatactaatgttacaagtttccacactcgttacaaacacattatcaattctaacaatttacaagaaaacaacagacatgcttcatcaaggacaaccaaatcagtgcggtcaaagtgaaaatacattgccttatatacagttgcagccaaggccatacaaatgtagctatgaactattcagaactatgaagaagtggagatctgtgactatcagacctttcagaatatttcactcgcatcagagctggatcattgtatgcattggccaacttgtcataaaattcagacatattatgctcgttttggtctgctctgtccttcttaatcaaacactcagcagaataattcttgaatatagggaagaaccgtttctggcaatactcattgaatagaagtgtgagaattggaagaggaagaatcaatatggatgctagaggaagcttctttaaaccaaaaagaccaatggctattatatgcatcagtatcaatga

SEQ ID NO: 73820 - DNA, 477 bp, Glycine max
  Clone ID: jC-gmfl02220084c12d1
ggtcttgaatataaatcttttaaaaatactctataaatgtagtgtgccgtcctaagacacagacaaggaagaactcgaggaaagaatcatgattgggtaaagttaagcaaaacgaaagccaatgccactgtaaattgaaataaccctaatgtgtgttctctgcccatcttcgcaggacaatgtgcaccacaaacatgaaatgagaatcacttccacaacttccgcaatgacatgtttttttcagtctcctttttcatcaccttcgccacggccatctcaaaatcctcctgagtcacgtgtaccctccgctccctcaaagcaaacattccagcttcagtgcaaacagccttaagttcagcaccagatgctccattcatcttctcggcaatcttcttcaaatcaatgccacgcattaaattcattcttctagaatggattttcaaaatatccagccgagactctttattagggtttgga

SEQ ID NO: 73821 - DNA, 293 bp, Glycine max
  Clone ID: jC-gmfl02220084d03d1
aacgggacttaattcgcttttatggaaaaaaaaagggcatactggttatctataaagtttcaggccctatatagacccacaatcttgatacaaattttattaaagtcaggtaccgagagatccagagcgctacctgcagaggctcgtcaaggaggtccacatttccctagctccgacttaatcagggccatattttgccaaaactacgttgggggaagttaacccagctattaggcattaaaaggtgcttatccttcccgctttattaacaccaggctaaccactggcggatg

SEQ ID NO: 73822 - DNA, 458 bp, Glycine max
  Clone ID: jC-gmfl02220084d05d1
attgccattcattttcttttaaaaatgaaaataatgcacactgaaatactatcttactactagcgtgtaaaccaccgacggaaaggagaaccaaacgattgctgtgacttactcatacgaagtggggcaaaagatcattgacaaggacaaccttaataggggatgaacattgtgagtgactccgcgtcagcaatgcgggtaactacgcgtgtaaatgggcccgatctacattcccctgtaaagggtacttctacctgacgtcgggacatactagatcacatctggtgaccacaaaatgctggagacgatgaccaaagcattgcatatgtcgcattgtaaaatatgagctgtcaagattcctaaaaccacgaatccgactagctattacgggatagggttgcgaacagcttcagggttaccagtgggaccgcgcagctcaggcccgttcagagccagtg

SEQ ID NO: 73823 - DNA, 312 bp, Glycine max
  Clone ID: jC-gmfl02220084d06d1
aaaagccaatcattttcttttaagaataacaataatgcacactgagatactatctcactactagcgggtaagccaccgacggaaaggagacccacacgattgctctctcttactcatacggggtggggcaaaacatcatcgacaaggagaacctaaagaggcgatgaacgctctgagtgactccgccgtaacaatgcgggtaagtacgcgtgtaaatagtcccgatctacattggcctgttaagcgtacttctacctgtcatagggacatactaggtcacttccggtgaccacaaaatgatggggacgatga

SEQ ID NO: 73824 - DNA, 357 bp, Glycine max
  Clone ID: jC-gmfl02220084d07d1
aaaagccaatcattttcttttataaataagaataatgcacactgatttactatcttactactaccgggtaatccaccgacggagatgagaccgtcacgattgctctctcttactcatacgtggtgagggaatacatcatcaacaaggagaacctaagtaggccatgaacattctgagtgactacgcctcaacaatgtgggtaactacgcgtgtaaatggtctttatctacattcccgtctaatagctacttctacctgtcatagggacattctagatcatttccagtgacctcaaaatgctgtggacgttgaccagagcaatgcagattccacattttaaaatatgatctgtcaaga

SEQ ID NO: 73825 - DNA, 356 bp, Glycine max
  Clone ID: jC-gmfl02220084d08d1
aatagcaaatcattttcttttatgaataacaataatgcacactgaaaaactatgtcactacatgcgaataaaccaccgacggaaatgagacctacacaattgctctcacttacgcacacgtgctgaggtaaaacatcatagacaaggacaaactaaacaggcgatgaacgctgtgagttaattggcgtcaacaatgcagctaactacgcgtggaaatactcttgatctacattcccctgtacagggtacttatacctgtcatagagacataccaggtcacttctagcgaccacgaaatgattgagacaatcaccaaacccgtgcagacgacgcattgtaaaatatgagctgtcaag

SEQ ID NO: 73826 - DNA, 481 bp, Glycine max
  Clone ID: jC-gmfl02220084d09d1
ctgccttatcaatggctttcactctctttcttacagtagctccaggtttcctggatcgaagttgaaatcgcttctcatgcctggaagcaaaatgcacataaatatgatcaaatacatatatcattctaataatatttccagggataaaatgcattattgctggaagtcaaccaatgtggtaacaaatacagattcaaatgtcaacactgacaatactgaaacggagattttaacaggcatgtgatcactggacggcatggtaacatgactcggacaaaacaggcgggctaaagtgaggcacttagcacacagaactcacaattgagactttttctgttctctgtctacacttgatatgacatttcctccacatgtgtgcaatcttcaattcaacttaactacctgaataagccttcctttcactgcagggagaaagggcactggcatcatggctagtgcaactgctttcctcactgaatct

SEQ ID NO: 73827 - DNA, 292 bp, Glycine max
  Clone ID: jC-gmfl02220084d11d1
ggcaaagtacgtagtttctattaaataacaaaaagaatttttctattgcttcttctcacatcatcagtctattttacatgcacactgatcaagtggttgatacaaaaagagaccaatcataaaatgaaaagctattcaacgattacaaatcacatcctcaaaccagttgcagggatcgattagctatgtcactgcattgaaattaggtagcagtttaattcccggctcttgagtccatattaacgtaggctaaaaggagattttaccgctcaacatgcccatgcaaattaac

SEQ ID NO: 73828 - DNA, 370 bp, Glycine max
  Clone ID: jC-gmfl02220084e03d1
aaaacattaaacccaatttcaatttggcgaatttattaaaaaaaaccaattaacttttaggacaccgggggacttaaatacccgggaaaatttaatccactaccaaatttcccatacccatttaattcctcccccctatagattccaaatatcaaggaaacagccaaatattagggggcaatctttacaaactccaaaaaagggccctttcactggaatttgccacgaaaaattcaatggcgccctggggcttaaaccttcttttgaaatgttctggaagaacctgaaaagcccattaacaggcctgttctgcaaaaatggggaaaattggatctaacaaattcttggaaaagggatcaaagccccttgg

SEQ ID NO: 73829 - DNA, 120 bp, Glycine max
  Clone ID: jC-gmfl02220084e06d1
aatagcaaatcaatttcttttaagaataaaaataatgcacactgaacaactatctcactacatgcgagtaaaccaccgacggaaaggagacccacactattgctgtcacttacccacacg

SEQ ID NO: 73830 - DNA, 256 bp, Glycine max
  Clone ID: jC-gmfl02220084e09d1
attggtaattaattttcttttaggattaacaatgatgcatactgaaatttaatgttactacgtgcgcataaacaaccgtcggacatgagacctagacgattgctgttacttacgcacacgtactgacgacaatggacatagacaaggataaattaaataggctatggacgctgagagttaattggcgtcagaaatgcagctaattacgcgtgcaaatactctagatctacattcgcctgtacagggtacttatacc

SEQ ID NO: 73831 - DNA, 482 bp, Glycine max
  Clone ID: jC-gmfl02220084e10d1
ggcaaaaatcaaataatttgcataaaatttatatgtaccattctatataaacaaataccacatttgttctttaatggtacatggtaagaagtttatctggcatgcatcattccaactacagtgcatagtcctccgaagagaatacaaatgcctgtgacaaacaactaaaaagaatccagcctatgctaacttataataaatattaaaataccatgagactttgacaatgtcacatgccaataaacactgcattgacataggacctaaaactttattaccaccaaccatcatatgtatatattccacacttctcaaaaagtaactgacgcatgaataaatccaatgaatgtattaagtttgcaagggagaaaaaaaaagggttggtttgaacaaacctattctcaataccccaactatataattgctctcttttaaaaattcttcattccagctttgcctcctgtctgttcaaaaagaaaaag

SEQ ID NO: 73832 - DNA, 563 bp, Glycine max
  Clone ID: jC-gmfl02220084e11d1
aaacagttaacaaaacttccttataaattaaatgcaaatttaagacatccctcctcagcagcaaaggaaatggactaaaaccctatggctgcttgtgaatttgaaaatctcagacttttaccatcaaaacaaaaaacagtactcatcaaaaacaaacagcaacgaaaatgttaccgccgatcaagaacccagttttgaaggctacggctacatgaaatcggcggacacttcaaaatataactggtaaaacaaacacctaagactctgcaaagataaactactgtaaaggaacaagtttttttgaaaccacgttgatgatcacatgtgctagcaaaattgccaaaatgcaatcacttcttcttggcggcagcctttgtgaccttggctccggtggggtctttcttctcaacactcttgatgactccaacagctacggtctgacgcatgtccctcacagcaaaacgaccaaggggaggatactcagagaaagtttcaaccaccatgggcttggctggaaccatcttaaccataccagcatcaccattcttcaaaaattgggctct

SEQ ID NO: 73833 - DNA, 478 bp, Glycine max
  Clone ID: jC-gmfl02220084e12d1
gaagaaatccgttgaaattatggcgaccaatttggtttagcaaacaaaacaaagcacaccagaaaaacatgtcctgctaatgctatacttgataaactacgggtctaacacattgatcattacaaccggtgagtttcaagaactgaaatcagagcaaaatcttcaaaggaaactaattaaactagtaaaagaaacccagcactttcccaccaacattctttctcctagcttcttcatgatccatgatgccagctgaggtagtcaacacaatatacccaaactgtcttgaggggagcagcctatcagtccaaccttcaatctctttgacaccaacatcaaaacgcggactaataaccccacatttgttcagtctaccattcaattcaacaacaatttttccagctctgtgatcatcaacgtactgaaactctccaatgtacccatgcttttgcatcaccaaaaggaattttataatcac

SEQ ID NO: 73834 - DNA, 426 bp, Glycine max
  Clone ID: jC-gmfl02220084f01d1
aaacgaatcaaaggtacagaagcaacttaaacattttggtatccttttgggtatggcactaccacatccataagaaccaacattgacagtggcacgtatattagtttaattatgcaataactgagacataatcagtggcaagtattcccctgttgcagtttgaaacaaccccaccccgccaatctccatagagagttgcttatcttgcaccatttttaggaccacacatttccttggatttcccacttgtatatgtcaagcatacatacagaaattacatactacataaacaacatggtcttagcagtttcctgatcctatacggagataattttaccagtaccaaatgataaagttcacaacataaatatttatacaaactccccttagtccagtatcacatcacaaccacaatcaggcatatct

SEQ ID NO: 73835 - DNA, 247 bp, Glycine max
  Clone ID: jC-gmfl02220084f02d1
aaataaactctttttgctttatttcttcagggatttattttcaatcctactttaagggttttccatccttttacttggatgatcaactgtccacacccttggccacaggtaactctgcatttaagctgctgctttctaccttagggggacccgaatggggccttggcctggcaggggaagctgggaaagaaagccggttcttcggactcccaaaggaacctttctctggttttccattttctggggc

SEQ ID NO: 73836 - DNA, 357 bp, Glycine max
  Clone ID: jC-gmfl02220084f05d1
aaaaggaaataattttctattaagaattaaaataatgcacacagaacagctatctgactacttgctcataaaccaccgacggaaaggagacccaaactattgctgtctcttactcacacgtagtgaggcaatttatcaccgccacggagaacatttacaggggataaacactgcgacttactcagcgtcagggatgcggctaattacgcttggaaataggccctgtctacaatggcctgttatgggtacttatacctgtcgtcgagacagaccagatcacttctggtgaccagaacatgctttggacgatcaccctatcagtgcagataacgtatgtaaacacatgagctgtcaaga

SEQ ID NO: 73837 - DNA, 401 bp, Glycine max
  Clone ID: jC-gmfl02220084f06d1
aatagcaattcattttcttttaagaatattaataatgcacactgaacaactatctcactacatgcgcgtaaaccaccgtcggaaaggagacctactctattgctgtctcttactcacacgtgctggggaaaatgatcacagtcaaggacaacctaaacaggggatgaacgctgagactgactcagcgtcagcaatgcgcctaagtacgcgtggaaatagtcccgatctacattcgcctcttcaaggtacttatacctgacatagagacataccaggtcacttctagcgaccacaatatgctggagacgatcacccatacagtgcagatgacgcatggtaaaacatgagctgtcaagagtctcaacaccactgggcgactaacaataagggctagccttgcg

SEQ ID NO: 73838 - DNA, 259 bp, Glycine max
  Clone ID: jC-gmfl02220084f08d1
attagtaaataaattactattaagaataaaacttatgcacactgaaaaattatctgactacatgcacataaacaaccgtcgcaaaggagacccagactatttctgtcacttactcacacgtacgaaggcaaatggtcaatgacaaggatataattggaatgctataaacgctgcgacttaatcagcgccaacaatgcgcctatttacgcgtgcaaatactccagatctacatgctcctgttagagaatacttaaacctc

SEQ ID NO: 73839 - DNA, 282 bp, Glycine max
  Clone ID: jC-gmfl02220084f09d1
agaggaattaattttcttttaagaattatacttgtgcacactgaaaagtaatctaattacatgtacataagcaaccgtcgcacatgagacccctactatttctggcacttacgcatacgtacggacgaaaattgccagtggcacggataaaattaaaatgctacaatcgctgcgacttaatcagcgtcaagaatgcgcctatcgacgggtgcaaatactccagatctacaatcgccagttataggtacttatacctgacctctatacagaccagacaatttc

SEQ ID NO: 73840 - DNA, 408 bp, Glycine max
  Clone ID: jC-gmfl02220084f10d1
gcatgataacatacatggtaacattccaaaattgaaagcaacactattgatggaattcacttatttaggtgggtcacatatgacatgtatcaaaagtcaaaaacaactataacaaatagtgcttactaatttaattcttacttctatggtgacatttaaggtcaaagctggctaaattctcccattaggaggagcaggtggcatttgagtacataaatatgatcaaaatggatatacatatcatgtttaaaaaaatataaaagggttcttctcccacatattcagaatgaaaatgctcattactagctataaataatggaagtgcccttacagattaagggagatattgtatattagattactggtcttgtccataacgggatttaactttttccacatctaaaagcc

SEQ ID NO: 73841 - DNA, 493 bp, Glycine max
  Clone ID: jC-gmfl02220084f12d1
atcaccaattctaattacatatggacaaactgtatacaaaggaatagttcccaataatagaagtaaataatggtaattacgaaaagcctaatggaccataacatgattaccctactacgtacttgaacattataccacacaaacttgtaagaactaatcccaatatctatcatgtgacttgcctcacataacgaaacaccataaatgcaccacaaataaacgaatcttgatggcataatttacgagatatgaaccacatatatgtgtatatatgtacacacataacacatctttaattatagcaataccatattattgttattattatcaacctcgaatcttattgcgtccaagtttgaagccacgccatcctctaggctattttcggttagatccatgtcccataagaaaccatatccgtcatcacctttggcaccaatttgagtaagaaaggtattgttggtgttggtttcgcgagagaagtggaggagat

SEQ ID NO: 73842 - DNA, 432 bp, Glycine max
  Clone ID: jC-gmfl02220084g01d1
agaaagaacagttcaaaaccatgatatctcaagcacagctttacctcaaaacaagaaacaaggatggcaaaattataacaagtcagaccatttcaaaaatctaaaatgtctaccaacacagataatataaaaaaaataacaaccgcaaggcctaaatatcagtagccattaataatttaatcttcgtcctcctcatctccatctccaccagcagccttcttagcagcagccctttggttctttctcttcacacgtcctggacgaccaccaccaagaggactggtcagtgagaagtcaatgtgcttctgcgaatcaaccctaaccatgaatgatgggatgttcaccacctgtctcccaaccctgatgagcctctgcctgatgaggactctggcgtggaggatggacttggccatgccagactagaaaacgagg

SEQ ID NO: 73843 - DNA, 443 bp, Glycine max
  Clone ID: jC-gmfl02220084g03d1
gcagtaatcatactaatcgaaaagatgagtgacaaaatttctatatcaagaatcttttttctcacaaagggtatatggaagcacaatatacatcatgtaactatcttacatacaagtccaatactatgagtactgcatcatggacctgtcttacatacagtcggattctagcagtagtgggagggcgaatgtcacgactgttgcaaaaggatctcataaatgtcagttctcaaattcagttccttatcacgcatgacttcctgtagatcagatagctcttttgcagtaaggacagagttcagcttgagaaagccatccaaccatagcctttttgaccaggggcaggaatggatagcccggaagaaagcacgtcgagctgcaaaaggatcatgtgcaatttccatctcaaacataatatagcaacgccacagcaaaactgagct

SEQ ID NO: 73844 - DNA, 471 bp, Glycine max
  Clone ID: jC-gmfl02220084g04d1
aacacaatcaacttaataaagcctacgattactcaaccagtagcaaatgaaacaatccagtttccgtcagaaaagaaatgaacaacctacaaattggacatctctgaatctaacaaaggacgaaataattctaagtagactacagttgctaacttattcgtcaataaatgctctatatatcttttctctacagaaacagctaaacgaaacaaccatcaaaacccagcgagtagggaagtaaactctttcttggcttgaaattatatatacatattacacaacagttgttgaaacacccagttgggacttggtaggttcttcgttttctgtcacacttggtcgtttcccttgagaatattgtacttgcagagaggacaagttgcattcatcttcagccatttcacaatgcacgacgaatggaaatgatggttgcagggaagagcatgcagctctgctccatcctcgtatgaa

SEQ ID NO: 73845 - DNA, 485 bp, Glycine max
  Clone ID: jC-gmfl02220084g05d1
aaaaattaattctttattatacaatgaaattctctgcacaactgccaaacccattgtctagttttatgaggggcgaaaacaagatgaaactgtctatgctgaacaactaacgtatttgcttaactatgattcgatcctataaagcccacttatttctcaaagagttgaccagatgcaactaactcgacactatactgatgaacccacataatcgcagggttcacatgcaatctaaatttgcagttactgcaagtatgatatcctttgagaattcattcctgcatgatacaccttgaggtggattattgccctggagaccaattcctttatatgcggaggaagaactgctctgtttgctccctttagaactgtcaacacccttgcttgttccacggactcactgttgccggcatgcagcgtcaggttgcattgaagcgttatcccgcgatgcatttgtgtaacttcattacttcttagcagtctca

SEQ ID NO: 73846 - DNA, 465 bp, Glycine max
  Clone ID: jC-gmfl02220084g06d1
aataggacataatttgctattaagaattataattatgcacactgaaaagtaatctgactacttgtgcataaaccaccgtcggacttgagacccacactatgtctgtcacttactcatacgtgcggacgcaaatggccagtgccagggacaacattaataggggatgaacagctgcgactgaatcagcgtcagcaatgtgcctatctacgggtggaaataatgccagatctacattcgcctctgaaaggtacttatacctgacatcgatacagaccaggtaacttctggcgactacgagatgcgtgagacgatcacccttacagtgcatctgtcgtattgtaaaacatagtctgtcaagagtctgagaaccacttgtgagactaaaataacgggctacccttgcgaagtgctctacggtgattagtgtactctcttagcttagggcattccagagtcagcgacact

SEQ ID NO: 73847 - DNA, 275 bp, Glycine max
  Clone ID: jC-gmfl02220084g07d1
aatgggacataatttgctattaagatttataattatgcacactgaacagtaatctgactacatgtacataaaccaccgtcggacttgagacccacacaattactgtcacttactcatacgtacggacgaaaatggccagtgccagggacaaaagtaaaagggtacagatagctgcaactgaatcagcgtcagcaatgtgcctaactacgggtggaaataatcccgatctacaattcgctgtgaaaggtacttatacctgacctttagacagacca

SEQ ID NO: 73848 - DNA, 237 bp, Glycine max
  Clone ID: jC-gmfl02220084g10d1
agaagtcctcagtccatataactttttatacatgcacacactgctaggtacacgaatcactggtacaggagctactcaaacattttggaccccttcgggatatggcacttacacattcatgtgaaccaccttagacagtggcacggatatcatttaaatgatgcagtaacggaaacttacccagggcaaggattaccccggtttaggatggaacaagtccagcaagccgatttccct

SEQ ID NO: 73849 - DNA, 275 bp, Glycine max
  Clone ID: jC-gmfl02220084g11d1
ccaaggaacaaagcaaaatgccttaataatatctcagtgatatgtattgtacattaagattggagaaaaacatgaagatgaatgatttagagagttggagctctctcagcagacccggcaatgacagtgagcaagttgttgccaaaagggtcactgagatgttttgctaggttctcaacaggaccttctccggtgacatatgcttggaagtagaaaccaagcatggcaaacatagcaagtctgccattcttaattcccttcacctttagcagtgc

SEQ ID NO: 73850 - DNA, 416 bp, Glycine max
  Clone ID: jC-gmfl02220084g12d1
ccaaggaacaaagcaaaatgccttaataatatctcagggatatgtattgtacattaagattggagaaaaacatgaagatgaatgatttagagagttggagctctctcagcagacccggcaatgacagtgagcaagttgttgccaaaagggtcactgagatgttttgctaggttctcaacaggaccttctccggtgacatatgcttggaagtagaaaccaagcatggcaaacatagcaggtctgccattcttaatttccttcacctttagcagtgcagcttggtctggatcatttgcaagccccaatgggtcaaatggaccacctggatgaagattgtcttcgaagttcaggccattaataattgtgtagtcctctgcacctcccacaagaacaatctcagcaatgacagccacaat

SEQ ID NO: 73851 - DNA, 602 bp, Glycine max
  Clone ID: jC-gmfl02220084h03d1
gcacatcttaagcatatatcttcatcatttgcacctttatcaaacacaaaactctacatttgttcagcactcatgatagaaacacacctccaattcaattataatattagcttacaaccacctaagatcacatgaatatacaataacaatacataagctaaggacttgagggaagcacaactgcacaaacagcaaatttttctatatgctaggtcataacttagcaatcaaaagcttttggaaagaaaaatgtttcctttgtcaaaccaccagaaggctagcacagaaatcagtgggacaaacattgctactgaaagaaatgtcaagtttctccaatttgcaggcttatctgctgaaatagatgatgttactcgagttacggagcttgcaccttcttcatccacctgaaatgtcttattaaagtgatctattccttcttcatctgatgatttagcagagttatcattgctcgagtcattgctggaagctcgatcttcatttctgttatttagtccattgttggatgcatctaaagaggcatcaattttagtattctttaacttttctaccaaatgtttaatttcctggtttaaagcatgtaa

SEQ ID NO: 73852 - DNA, 395 bp, Glycine max
  Clone ID: jC-gmfl02220084h04d1
gggggaacccaaaataattttatttagggtacttgcaaaaactattgaaaaccggggggaaaatttggagctaaactaacttgcataaaaaattaccgcataaaagcctaaacaagggcttaacaggttccccccccataaaattttaccacagggaaattatttacatacaccctatactggggcccctaccctggttaggcatccctccctaaatttaaagggtaaaaacaagttttggcgctcccgttgaaaccattggggcccccccaaaaacattgggacccctggaaaaattggaaaaacctttttttgcccaagatttcccccaagaattttttaagaaccaaaaagggttttccttaaaaccaaatggggcataaggcccaaatcca

SEQ ID NO: 73853 - DNA, 346 bp, Glycine max
  Clone ID: jC-gmfl02220084h06d1
acttacgcacactgaaatgtaatcttactacgggttcataatccaccgacggatttaagacccaatggaggacaagaaaaaacacatacgtaagggggaaaaaggccagaggcagggacaatattagcagggaaaaaaactgagactgacccagcgcagggacatgcaaagacgagggagaaaaaccccaagaatccaggaaaaaaaaaaaggtgctcctagctaacagggggccagaccagataaaaaattggaattagaaaatgattatgggaggcaccgatacagtgcctatatacgtacagagagaacaagggctgacaagggcagaaaacctctgcgggga

SEQ ID NO: 73854 - DNA, 462 bp, Glycine max
  Clone ID: jC-gmfl02220084h07d1
gccgccgccctttttttttttttttttttttttttttttgttttttttattttttttacttgcgcactcggaaaaaaagaatccctggattttccaaagcgactggcacccttgggacacgctctgaatcccccctttgcacatgcatgcgaacgatcaattcctaccccacgtataaaaatcccggccccgggaaatcaacctgcctgggggaatcaccgagccccccaccggaattgcaaaggccacccagcctatgaacttggacaggaaatgatagccaactgcccagcctaccaagcggcttatgggaccatgggcccagtatcagcgatccacccttgcacaagtaacctctacatatgaaccaccggccctcgaatccgcctttttgaaatgcggggtgacggatttttccaagctgacaaccttcacccgagtgccaagcgtactcacgcgggc

SEQ ID NO: 73855 - DNA, 293 bp, Glycine max
  Clone ID: jC-gmfl02220084h11d1
catagaataatatttttattaccttaaacactttactaatgaacttaacaaacgaagagccgcgcgcaattgactgggttcacactttggggctgttttacccaaatgtgccctgtctgaaagcgctgtgttatcacacaaacaaggggaactgtgctacactgacctagagtgaacattcccctataaaaagggggattttgaaaaatctcggggaggattatttccacggtgcacctttttaaatgccccctgagaaaaagacctcggaatgttccatctactatgggctt

SEQ ID NO: 73856 - DNA, 251 bp, Glycine max
  Clone ID: jC-gmfl02220084h12d1
aattgtatatgtttttcttaccttaaacagtcgattgcgagtccatgtaaacgctgtgaaacgcgctaatgactgggttcacactttggactgggttcacccaatgcgaccggaacggcatgaaatgcattttcaaccggatcactggattcatgatggctgggcaataactcacctgtccctttactacaggtctgaacttactatccaaacaaaaacgcttttcagagcatagactttaataggcaacc

SEQ ID NO: 73857 - DNA, 529 bp, Glycine max
  Clone ID: jC-gmfl02220085a04d1
ggagaaattaaatgatggatgattaaataaacatgatgctacattattcacctgtttgacgatcaaatcaatacttatacggctagtgtgatacaaaatactctttaaaaataaaaataaaagaaaaggaaacattaatctataactgacattagaacaccttggggcgtcaccatggagccagggggtgtgaagaaaaaccatctggaaatttagggcaaacagacagacaaaacaccgttcttcatattacagatattggttgaaaaacaatctgctaaaatttctgatcttttcctgaaaactaccttcattaacagcttttaataacagtcgatgtgaaagctgcagacacagcaagaaaattgtagaagcacatagaatcaaaaaccctgcacctgaaatctagagatggcagtagtctgtgtacattgatacgaggaccagcaatcactactgcaagatgctaatcacacgaaaattttccaaaatcagcaaaaagaaatctgtagcttttttaacctagtct

SEQ ID NO: 73858 - DNA, 453 bp, Glycine max
  Clone ID: jC-gmfl02220085a05d1
agaaaattgaccacgcggaagagatggtaaacatcatcgtcatcatacaaggaaaattttcgcaacagactcagcctaatcaagttgtcttaaaactacatgagacaaaatatactttgtttcaaggtgggggaggaaaaggtttcaaaaacaatggaattgacatgacagatgagttaaagactaacacaaaaacgagaaggcattggtaaagggacggcttttccttgttctgtcgttgtagaaaaatgatggacgatactctttttctatcaaatcctttagatcttgaagagtaggccaccatgtgtagcaaagaagggagcaaacacaagagactcaaccgccatgagcttaataaggatgttaagtgaaggtccagatgtatcctttagagggtctccaatggtgtcaccaataacagctgccttgtgacaatctgacccttttgga

SEQ ID NO: 73859 - DNA, 547 bp, Glycine max
  Clone ID: jC-gmfl02220085a07d1
ccaaaatattaatcaaataataataataaaaaaaagtgcctctgatctgtgacttaatttacaagaccacagaaaatatacagaacaaacaacaacaataaggtaacatctggcatcatgttatttacagcaacataggatagggccagattaatagatcttatagcatggttgatccattgtagactacaattgcttcacgaaggcacctaatcaatgctttcaaagaccatcatagtaaccaccaacgcttatgtgagctctgctcataggaacacctcttgctgctgaaattgcatcattcaatttggtcgcatgctgcaccacttgcttaatcctcttgtcatcagtatagatctggaaccgaatcttctgatcctgctttagtttgttcctctgctggcttccaaagaagagaacacaaatagtagcagcagcaacaccaaaagaacagatagctccaacacctgtcaaactccacttccacaagttgaaaccactggtgttgtcttcctcccaagtggactcctcttctttgtcacacaca

SEQ ID NO: 73860 - DNA, 481 bp, Glycine max
  Clone ID: jC-gmfl02220085a08d1
ccaaaatattaatcaaataataataataaaaaaaagtgcctctgatctgtgacttaatttacaagaccacagaaaatatacagaacaaacaacaacaataaggtaacatctggcatcatgttatttacagcaacataggatagggccagattaatagatcttatagcatggttgatccattgtagactacaattgcttcacgaaggcacctaatcaatgctttcaaagaccatcatagtaaccaccaacgcttatgtgagctctgctcataggaacacctcttgctgctgaaattgcatcattcaatttggtcgcatgctgcaccacttgcttaatcctcttgtcatcagtatagatctggaaccgaatcttctgatcctgctttagtttgttcctctgctggcttccaaagaagagaacacaaatagtagcagcagcaacaccaaaagaacagatagctccaacacctgtcaaactccac

SEQ ID NO: 73861 - DNA, 383 bp, Glycine max
  Clone ID: jC-gmfl02220085a10d1
aaataatatacatgattcttgaaattgattttcatttcaaaatcctctcactcactcactgtttcgagagattacttctccaaacttgaggaagagttgagcatctgaagtgctcattgaggggcatattactaagtgtggggttttgaggatcgcatactcatccacgttgcatggtactttggcagatggattagaagcaggtggttggccagctaggtgctttggtgggatgcttgatggcacgtgactttcgcgtacacgtgtcagttcgagcattgctggcctatcagatggctgccgctatgtgcataatagagcaggctgagtaaccctggttacagctcctaggaccttgcatgtggcagttacgttgggatcaa

SEQ ID NO: 73862 - DNA, 513 bp, Glycine max
  Clone ID: jC-gmfl02220085a11d1
ctaatagattttacttccaatatatcaaaaaaaagctcatcaattctaacaaggaaatacaaaggaaagtgcttcgaagtactaaagggtctttactatttaccaaaggcttacttttcttgaaagaacctttaatctgcagaggatcaaagcacaaacagcaccatattattattattattgttgcaatatcaactttttttgcctccaattatcttttttttaccatttccactaaccccccatgaagaggaaattgactcaaatagtggggttgctcctgaatgatccaagagccttagcagcacttgctctcaatatgaattgatggtagaaggctgcaattgctgctccaataaagggtccaacccaaaagatccaatggtcatcccaagccttctgatggttgtacatgacagcagctcctagactcctagcagggttaatgccagtgcctgatactgggatggctgccaagtgaaccatgaacacagcatagccaattggaagtgg

SEQ ID NO: 73863 - DNA, 412 bp, Glycine max
  Clone ID: jC-gmfl02220085a12d1
aatattgtaagcagagattcataattcagattagccgaactttatacagaagcgaccaattaccaaacattaaaaaaaaaaaaaaaagaagcaaccatgagcttaacacagccattacaaggccaaaacacttgaacttggtgaaaggcaaaacatgaccactttattctaagggtggtggtttaacacaaaacaccagagggcccgaaaaccattacaggcataatacataaggttttagctacacattaaaaggtgatcattattcctaaataaggggtatctttggttgaagcttggttttccaacaccttacttgcaagggcaggggttgcaggagcagtttgggccacatttggagccatcgttttaagcggggacacccattttagcacccttaaattgagcctta

SEQ ID NO: 73864 - DNA, 501 bp, Glycine max
  Clone ID: jC-gmfl02220085b04d1
gtatgaaaagatagggatattaataaccatatgtaacaacatttttcagaataatgacaggaacaaaactactatgactataaagttcatatcatataaattcaagacataataagtaaaagcaaactagatttcccaattgtgaatggtgtcactctatcttccatttggttcagtgagccttgatctgcaccctacctgttctagaaacttagtaaggcgcaagtgttttgcagcccattgttcagccaacttctgctccttgctttctgcatctcttctcaaccctgccaactgctccctatattctgcttcaattctatccaatgcagctgtttgctcctctctcagagctttgatcttcgcttcaatttcctccatcttctccctccttcggccggcctctcggactccaactgcagctccaccctacttaaccgccatgccgcctctttctatgttcggcaaagcatgatgcacttcattcactccttgagcact

SEQ ID NO: 73865 - DNA, 539 bp, Glycine max
  unsure (1)..(539): unsure at all n locations
  Clone ID: jC-gmfl02220085b12d1
aaaaaaagatggacctagattaatatttaaagtaaagaccagataattacggagtatgtttgtaatagaatagtcactctcgtacttttgtaaaatttattttgtttatacttctcctaaaagtatgatttgctacctgaggtgtatagcaaataccgaaatagcatggatacacatactcaacttgcaacgaacaatgaagactgacgtattttctttcatttttcaattgccgaatcctcttcgaagttggtatgtcggagacaccagagcagcaaatatatttacaaattctctggcaaaatagaaggaaactgtccaagattctgaactgctttcctaattaaggaattgcttcaacagatatgttccatcagaaacaagtttagtaattttccttgtggaaaacaaatctagttgtggttttggtggaaaatttggtgcacaacttcttcaattctcttgctaatttagatggtccacantagaaaaccccaatcttagcttctccatgcttgcgagccantctagaaaatatg

SEQ ID NO: 73866 - DNA, 493 bp, Glycine max
  Clone ID: jC-gmfl02220085c01d1
gggacttcatagcttatagccaaacaataataaaaactacccaggctttgttcaattcctgcacataaaaccgttcctgttgctgtaaaagtgcaaactcaaaatgatgttaaaagaattatgtcaaggggtaatgccatgcagctgtgcaaatgataccttatagggcaaaagagttacgtgagacatatagctaattactagccagttcttgaaccaacaaataaaagtgaaaaccgttgtgagacatatcgatgtatctaggccattgcattggcatttttcacttactccaaattactctttacattttcattactaagaagcacaccttaagtcagcaattgggtctgtatttgctacttccatattttaccctcaatgtgcaagcctctctatacttgctaatcacagtaactatctacgtatgtgttccccatgcgaatgacagcagaattccaaaaatcatcacatgcctaatatacatgcaaca

SEQ ID NO: 73867 - DNA, 527 bp, Glycine max
  Clone ID: jC-gmfl02220085c02d1
gatcataattgattcagatcctcgaattcacatccaaaaatgtcaacactacaacccccaacagcacatacggtagcatacaaataccaacactcaggaagacagtccacaaacactcaagccctctactcaaaagattcatcatcatcgtcaggaaggggctgactagcagctgcaagaagctcagcctcgtgctgttgctgtgcagctaaatcaatttgaacttctggtggagccaatgcaggagattctacgaagtgcaagttaggatcacctgcaagtttcctggccaaatataagaatggcttttcaaagttgtagttgctcttagctgaaatctcatagtactgcaaattcttcttcctgtggaatgtaacctgctttgccttaacttgcctgttcttgacatcaaccttgttaccgcaaagaacaattgggatgttctcacagaccctgcaaagatcacggtgccaggtgggaacatttttgtatgttagccgggcagtaacatcaaacatgataatagc

SEQ ID NO: 73868 - DNA, 432 bp, Glycine max
  Clone ID: jC-gmfl02220085c11d1
gaataataaaactccaacaattttattaatgaaaatactttacaatttcagcacatatacactgccatgaatataattttgcacgctataattatctttcgccacaaacaatggagtagtgctcaacaaagcacaaaccaacaataataacagttttagttgcattaatttacacaagaaagtaaattaacgtaataggcaacacatgtgtgtcacgttcatgaggatcattttataatgatatgcaacattgaattaaatattctcatgcaatggagcattctggaggaaggccttgagggaaacgtctgatatcagtgcaataattgtaaatcatgtaattcttttgcacccaacggatctttgcctgccccgtggcgtccagtgattggccagtggaggaagaagtttgggaatcgaagtctctgtatg

SEQ ID NO: 73869 - DNA, 265 bp, Glycine max
  Clone ID: jC-gmfl02220085c12d1
ggggggggaaaaatattaaaaaatttttagggaaaaaattcaccaaaaaaatggggggggaacaaggggggggccctttaaaaaagaagtaaaaaaaagatagggggccaaaaaccccaaaaaaaaccttccaaaaaaagggggggaaaaaaaacggggaaacgagaaggaaacgggatttccaaaaaatccccaaagggaggggggggaagttgggcccctaaggcaatggggtgaaaaaaccccgtcttgggaacaacccaaa

SEQ ID NO: 73870 - DNA, 497 bp, Glycine max
  Clone ID: jC-gmfl02220085d01d1
gagatataaacttgatgaagtaaccaggccccaaaattgtttacaacaatcaaaacttctcttacaatgaccgagttaacattttgtcaactataccttggaagcaaagacaacagtagccatgccacatgatactggaccttcgttaatcgttaagaaaataccgagttaacaaacccaaatctggactgctagtagcaactgttgatgcaatctgagtatcttctgtgattttatagccattgaaagaaaagtaaaatctaccacagtcagatccagaggtcacgcttagattacatcactagcaggcttgctccactgatatttagcacaatcacatggaccttactcagagaccacatattccagtcccagctgaagaatggggataatatttgttctgaaagaacttccctaattgaacgagatcatattcagtatgttgattcattctttatttagacaaaaactccttctcaaccagactgaatgtcagc

SEQ ID NO: 73871 - DNA, 340 bp, Glycine max
  Clone ID: jC-gmfl02220085d02d1
gagatataaacttgatgaagttaccaggccggactaaatggctcatcacccaacacttatataaccttgaccgggtttgcataatgcctgcaaaacaaagcgagcctggagatgagaaagcgcgcccccagaaagtggaccaaagaaaattgtcaagaggatacggcatgcacatacccaaatgatacctgataggggcaaatggtgacgcgagacaaatatctaatgagatgccagagcctgagccagaaaagtaaagtgtaccccggtgagagacatagggcaggctttaagcccatgactagcaagtttgcaccaacgacaaataacacattaccat

SEQ ID NO: 73872 - DNA, 378 bp, Glycine max
  Clone ID: jC-gmfl02220085d04d1
tctttatctataactagtagtcgaagtattatttcatcgattctctgccttctctttctctctgcgacaccagatgatggagacgacggcgaagcgaaacgctgtcgttgcgccaatcgcggcgttgttgatggtggtgctattctcggcgagtgtggtggtggaggctcatgagaactcggacgtgaagacgctggtgaagcacatgcgcgggaagaagttctgcgacacaggatgggaatgtaagggctggtcaatttactgttgtaacctcactattactgattatttcctgacctaccagttcgagaatttcttctccaagcggaactcgccggtggcgcacgccgtgggattttgggactaccacatcgttca

SEQ ID NO: 73873 - DNA, 362 bp, Glycine max
  Clone ID: jC-gmfl02220085d09d1
aaacaaaaaaagcccggggtcaatttttttcctaaagggaaccccttctaaaccccattttttccccccagaaaaccccccccccttgggggctttaagggccccagggggaaaaaccctaaaataaaattcccaaaggcaaaattttgggttttggtcaccaaaaatatggttttccaacaaaaaaatttgccaaaaaaacaattcttctttaaaccaagccccagctttccgggcttcggagatgggatccccaaaaaccccattttttccaaaaagcttcctgtaacccccaaaaaagggccccccctctgcccccggggtggggccctccctggggccccaaaaaccctctttttttt

SEQ ID NO: 73874 - DNA, 385 bp, Glycine max
  Clone ID: jC-gmfl02220085d11d1
gattaatatcaaatctcaacctcaatcattatttaatggggaagtaaaatgcgagaacaaatctatctatttgctatatgcctatcccatcaatattgcaaacaatttaaactacttatcctcactcttatcccccaactccatcccaaaagatagggactgggaaacaatccttaaatttgcaaaacttatcacacattgtcagtgattacatattggtcacatatatgatgctgcatatcataccttcaggcgttatcaatatattaactgatatactaagacttaacctcaatgaatgcatgttgggaatcgcaccctacatttcccaaaaggctttctgaaatctgaagcccaatcacgtgaaggatggcatcaatccatt

SEQ ID NO: 73875 - DNA, 529 bp, Glycine max
  Clone ID: jC-gmfl02220085f01d1
gaaactaaaattaattaactcaagcatgctcaaagccagggaagctatgcatcacgtagttttatacataagctaacatgcacttcaccaggcttcgtatccacctagcagataacagcttcacacttatattttcccaaggaaaacgaagcaggcataagtcaatcttaatttccttttattagtaaacctaattataccgaattgttcctaatataatagacgaaaaatagccaccacacacggctagattctactttctacagaacagattggaggatcatctcggctagctcctgtttcgcagaagcaacctttggttctccccattccttgaccttcttctcaagcagttcaaagtcagccttaccagcctctatttgagccccaatttcagtgtcaaaactctgataacgcttacgaacaagctcagcaagagaaccatcctcaatcaacttggcagcattcctcaggccacgggccagggtatccattccaacaatgtgggctatgaacaagtcttcaacat

SEQ ID NO: 73876 - DNA, 440 bp, Glycine max
  Clone ID: jC-gmfl02220085f02d1
aaagcaaagccctttttacatttcaaggcctaattacaagctttccaataattgggcaagcaaatacaaacttgaaaaaaaaaccgggttttccttacgtacatgtggcccaaattcatgaataaaccccgaccccctcccagttggggaacgatttctgggctaattcacaagaggcccatgtaattgttttgaaataaaccgaaaaaaaaatttttttttaaaagggggatttgatttatgataaaaaaccccatttgactgacaaatgagagaaatttgggggacggcttcggggagcaaataaagaagggttatgagaacccatctatttttttttttcataaaaaaagcaattatctttttggttttgaacaattctccatcctagagcttaacgatcccaggaatatcgaccgggtaacgaacaatgcaatcag

SEQ ID NO: 73877 - DNA, 455 bp, Glycine max
  Clone ID: jC-gmfl02220085g02d1
agtaaactcagcacgaagttgcacacctaaatgaaaataattgtttctacataggtggtgggttacaacataaaaattctttcaccaaaaaagaatagaaaatttcataaaaatataaaataagcaacgctatttgtaccaaaaaaaacatatcatccaagttgcgctcctccaagtaagagattcttgccgaacccaccagattgtaacctctgaacctgatctgaattttgcataacaagctgtgatcataattttattccataccccagaaaagggagaataaaaattcaatgcccaattaagagatgtgagatctaataaattgacaagatgttgataattaattaatagtctctcaaaagggtggaaaagagagaaactttgattgatgaacatcaatcttttcaaaaatccaaatcaaccatgagtgttaaaagcttcccacaacaaat

SEQ ID NO: 73878 - DNA, 343 bp, Glycine max
  Clone ID: jC-gmfl02220085g03d1
acacaacatatataattttattatagaggctctgctctgtattcaaacctcactcatcaattacacagctcaaacaatacaatgataataaataatggtaggaataaagtatatggtaaatgatgaatcaataatacaataagaaacttatggtagcaaccataaacatagtactacatgtgaatttaaatgtcacggtttcttctacattcaagtggaagctgagggtagcggcttctgtcagtgcactagtctgagatggtgtatttcctgcgcacccacctgagccatctccgttgagaagcatcaagatcatgaaactgtgcttgatcccaccacctct

SEQ ID NO: 73879 - DNA, 403 bp, Glycine max
  Clone ID: jC-gmfl02220085g04d1
cccagaaaatggtccggccattggaacgggggttggaccttccccaaccttggtttattggtatgccaatggaattatggtaattaaaagaattccaccacttttttcggcctgggttaagggaacctataggcccctttggaaaccggcttattaagcctaccaccaaacccaaaagggcctgggccttaccggtatttggcttccaagggaccggggtttaaccaccacccttaccggagccggcggttccaaccccggtaaactggacctttcttatttgggcaggccttagggattggggccctgggggtggagaaatgggttggttgatttttatggaccccaaccccccaaaaatggggagggtggccacccaggaggcccatttcccaaggattct

SEQ ID NO: 73880 - DNA, 476 bp, Glycine max
  Clone ID: jC-gmfl02220085g06d1
agaacttctagtgcagtaaaccatcttaagcaccacgaagtgccttaaaaaactattaaaatacatcaaggcttccgttccagacatgaactaccagcagagacataagaaatccttagcagctaattaaacataaccagataccgctatttagttgctatatataatataatccaactcttcacttgaaacattaaggtgaatcctactacagccatatgttgaccacctcattctttgccatctgcagctcgaagtgagcctagttgaactggggcttgagtctgcaccactttggaagacccatacacagatatatcaataccttgagccttctccttctcgatctgctccttaatccagaagtatgtgattctcaacccatccttcaacctcatagttggagcccaaccaagtttttcttttatcagtgtattgtctgaattacgacctcgaacaccctcagggccaggaat

SEQ ID NO: 73881 - DNA, 507 bp, Glycine max
  Clone ID: jC-gmfl02220085g07d1
acacaacatatataattttattatagaggctctgctctgtattcaaacctcactcatcaattacacagctcaaacaatacaatgataataaataatggtaggaataaagtatatggtaaatgatgaatcaataatacaataagaaacttatggtagcaaccataaacatagtactacatgtgaatttaaatgtcacggtttcttctacattcaggtggaagctgagggtagcggcttctgtcagtgcagtagttgtagatggtgtatttcctgcgcacccacctgagccatctccattgagaagcatcaagatcatgatactgtgcttgatcccaccacctcttgccttgtgtagcacagaactttgcattcactgaagcttcacacccatcaacgtggaaccctttgtattctgctatgaagggtgctttggaccaatctgttttctccaaccaccccttgtggcccagtcatcagcattccacaagctgttgtacaccttcatgg

SEQ ID NO: 73882 - DNA, 409 bp, Glycine max
  Clone ID: jC-gmfl02220085g09d1
gaacaaatgtaactgaaagtcagcgacattaattttccattcaatagattcatgttacaaattctaatctgaaacaaaaacctggtattttccaaaagtttattgaatctttcaataatctacacgtttgttccttaccaatcccaatgcttactctgtcttcacaacaagtgactcaaatccatcgttattggtgcccttttggtggagattatttccaaaagccattcctccatacccatattgttgaacaactagcaaagatgaacgcgaaccaaaattgtttgaggccaaaatatcccctataactccaagttctaagcattcacaccattctagcaaatttgagaagactttagagctcctacaattcccttgtcccactacgtacaaatcacaaccatttttt

SEQ ID NO: 73883 - DNA, 375 bp, Glycine max
  Clone ID: jC-gmfl02220085g10d1
gaaaggaggattcgctgagaaattaacttttgaaatcacacgggttacaacgtacaaataatttgaaagagtttgacgatttttgttgggggagggggggttgatatgggcctggcactcacactgcagcttcatttggatgctcttctgtgcatggagctaaccttctaggttatgctaatggcacagcccgaggaatggctccaggtgcaaggattgcagcctacaaagcgtgttgggttggtggttgcttcagctcacatattgtgtcagctattgattaagctgcggctgatggaccgaatgtgctttccatctctctgggtggtggagactcctcttattacacagattgtttatcagtgtcagcatttg

SEQ ID NO: 73884 - DNA, 409 bp, Glycine max
  Clone ID: jC-gmfl02220085g12d1
aaagaatgctaacaccaaagttatttataagtattggtactactgcctgcaaaattactatcttatcaggctttcaataaacaaaccattagagattgcaaaattacacaacataaatgggaggggggagcctttgacatgaacaaaaaaccaaaattccttaaaatactaatcaagatagaagaagcttttgttcattccgacatgttatcctcttgatcttcgtgctcactcaaatcaagatcagccagcaactcctccaatggaacagaagagtcatcaccatcagaaggcttggactctttatttcggtacaaagatatgttgaacctcatttcagggatttcttccagatcttgaatgaattggtcatattctgagaccattttatcttgatcaactattccct

SEQ ID NO: 73885 - DNA, 445 bp, Glycine max
  Clone ID: jC-gmfl02220085h02d1
ataaaatcttcgttataaattaaatgcaacttaaaacatccctcagcagcaaaggaaatggactaaaaccctatagctgcttgtgaaattcgaaatatctcagactcttcttaccatcaaaacaaaaaacagtactcatcaaaaacaaacagcaatgaaaattgaccaccgccgatcaagaacctagttttgaaagttacggctacatgaaatcggcagaaacttaaaaatataacttaaacaaaacacctaagactctgcaaggataaaactactataaaggagtaaccacgatgatgatcacatgtgctagcaaaattgcccaaatgcaatcacttcttcttggcagcggccttggtgaccttggctccggtggggtctttcttctcaacactcttgatgactccgacagccacagtttgacgcatgtccctcacagcaaaac

SEQ ID NO: 73886 - DNA, 373 bp, Glycine max
  Clone ID: jC-gmfl02220085h03d1
cccatgaaaaggtccggctattggaacggcgattggcccttccccaaccttggtttattggtttggcaatggaatttttgtaattaaaagaattccaccacctttttccgcctgggttaagggaaccttaggtcccctttggaaaccggcttatttaacctaccagcaaacccaaaagggccctggccttaccagtattttgcttccaagggaccggggcttaaccaccacccttaccagaggcggcggttccaaccccggtaaaccggacctttcttatttgggcaggccttagggaatggggcccttggggtggaaaaaggggttggctgatttttatggaccccaaccccccaaaaatggggagggtggc

SEQ ID NO: 73887 - DNA, 492 bp, Glycine max
  Clone ID: jC-gmfl02220085h04d1
gaggcagcaaccacgcgtctgtaaattgctattcaagcattgaacattaaagtagaaatttcattgttttatctaacttcatttaccataccagttcccctaataaaacatgaacacataaactgaaattaatgcctacttttgtggcgaaccaatataccaacaaggtgcttaatatttgttttttctgctgctatgctcatcaagccaagatataatatcaccaagcacgtgaaatatagtttcatcaggttcaccttcaagtagagtatggaaagcatccttatagaggcagagtttcttgtccttcactttagctttctcatacaaagccttactagctgatggatcagtaattatatcagcctctccatgcatgatcaacaatggcagagaaacttcttccaaacgctgttctagctcctgtgtggctttcaacagctccaatgcagttcccagtcttggtttatccttgtagagtaacacgttata

SEQ ID NO: 73888 - DNA, 511 bp, Glycine max
  Clone ID: jC-gmfl02220085h06d1
aaaagtaaatcctatcaaccacgttatttggtatggaatagaagagtaaaccattcagattttgactgacaaaaggaccttcatcctaatctaaagacggattaacttaggtcttcattacatttgttgttcttgttcttggataagcaccaaagtgtgttctgcttgaaggttgtccaaattccttaaactgtataatgctgttggattgtatcaatgtcaagtcccttcagcttcactactgattcaacatgtcctttcagagtatgaagctccctgagccttgcaacctcggcacgtctcttagcttgctcagcaatctctgaaagctccctgtaactgttcttgtcattgaaaaggttggttgtttcaggtggctgaagaccatgaagagtcctctgagcagttgcccactgtgcttctctctcttctttgccatagtctttctttgtagtgaaggcagtcttggtctccaaaagattatcccaagccttcccactcaggacgtagc

SEQ ID NO: 73889 - DNA, 311 bp, Glycine max
  Clone ID: jC-gmfl02220085h08d1
gggtgcaatgggggaaatatgcttctttgtattctcaaactggtatgatcgatcttacacttcacatagggcaagaaaaacgcaggggcatagccaatggaagaaaagcgccaattaaaaaaaaaactcaatcacagatggaggtaaactaagaacactgaaaaaagcctacaaaaaaacaagctcttaaaacaagattgtactgaaaaaaagatgcgcacgactcccagggggatcaccataggaacttttggcccgggaggctcgcaatagggatattcgaccttccttgtcgagggagatttcttcaa

SEQ ID NO: 73890 - DNA, 432 bp, Glycine max
  Clone ID: jC-gmfl02220085h11d1
gaaggcaaaactgcatataactcacaaattgataagagtaaacattgtacagctcctaacttcaagggatcattctaagtaatttttaggcgaaaagtttaaggagctttaaaacaggaaccttaaagagataaacacacaactgttagcagttgcacctaagaagaaaatcccccataacgtacaaaaagatcaagagtgcttcagtctgtacatgagccactgagacagggattgtggctatgctaaatagcctattctccccttaaactaggcactcaactcacattggatgcaacctcgtgaacttcttcatatgcgctagtctcctcattatatgagtaccattgccctgatgctgctgagcaataaagccctgtatttggatcataataatagcccaaagtgctgctgtaatagtacccagaagat

SEQ ID NO: 73891 - DNA, 442 bp, Glycine max
  Clone ID: jC-gmfl02220085h12d1
aacacatgaaaatatttggacatttatccattttgtgatcaattaaaatgcataaagactattttttttacataaacgacttaacaacccaaactaaaagcctctaaagaaagccacaatgaaagcattcgtaagcaaagaaagttgaatgcataccggaggaacatcaaaagcttggactccatgatccacacttaaactcttttttcgcaagagaatctgcgacctgattaaattctttcagcacatgatcacaagcccaaagatcaattccctctgccatgtctacaacctcattggataaatgttgccacttgtggaagcaaatcctggccacaatgatactttgcactcatcacttggacccataacttgcctttttcaatacacaacttccaacattttttcattaagataaggaattcagattcctagcaccccg

SEQ ID NO: 73892 - DNA, 396 bp, Glycine max
  Clone ID: jC-gmfl02220086a04d1
aacccaaaatcaactaatctagataagcactaactgataccgagtttaagacagccttggcagatactaatacaaatacaaatacaacatattcctttgaactcatcatacatgatgtgcagaggacacaagttctagcaaaacaggtaaaacctgattccctcacttatagttacattagcagatgcattaaagtcataaggacaagcaaatcccaaatattagtattattcttgggtgaaccattcaccccaccctctccttttttcccaacaaaaaattaaacggaggttgggtgaaatttccttgcaaaaacatactagaaataactttatacatggcctcagtgaggtgaacaccatcccaattgatgtactgagaagggcttgagcacac

SEQ ID NO: 73893 - DNA, 453 bp, Glycine max
  Clone ID: jC-gmfl02220086a06d1
gagagaacatttttttttgtttcatcatataaaatatatatgttctgaaagaacacatacaagtacacaaaaaaaagggggaaattcataaaaaaatacagaaaaaaaaaaacagaattgagtaagagggaaggaaacatagagaaaattttagcaatcagataataagaagccagtagtagtgcaaaagtcccttgccaagagtgttggaaccccttttagttaagcaggtaccttctcccccttgagtggcttcaccacttcccatgtgaagtcagggtcatctctgccaaagtgtccatatgcagcagtcttcaagaacctgccatttccacccctcttgagatcaaggttgatggagatcatgccaggcctgaagtcaaaactctccttcacaatgctgaggatttccttgtcagggatcttcccagtgccataagtgtcaacaaacac

SEQ ID NO: 73894 - DNA, 348 bp, Glycine max
  Clone ID: jC-gmfl02220086a08a1
cctcccagaaaaaggcttaaaaaaaaaagggggggtgtcaaaatcaaaaatggccgattttgatacgaggggccccaatcccgaaaccttaaaaaaaaaaaaaaagggggcccggggggtttaacccccccaccaaaaggccaaaaccctggaacttggggaaggggagaacaaacccccttcatttagggggggggggagaaaaaaaaaaaacccgggggcgcaaaacccccccacggccaaagccgagggtttttaccaccccaaaaaaggggaagcgaatttcccaaaaagggggttattttgtaagaacctggttcccccaaaccctatctttaaaagaccggg

SEQ ID NO: 73895 - DNA, 500 bp, Glycine max
  Clone ID: jC-gmfl02220086a08d1
gctccaaccatgttgaataaaattcatttgtgtagtgtaacaaagttttaagcccttactctaattttctatgcatcagatattaggaatatacaactagaatatttcagaggatggatacaaaaatattcaagaaagccttcattttgcaaccatagcagtgactatagtaaaatgcatctgtggaagtacggaaatcaaacaagtcctagaaacaggtgtaaaagcaccatctggccaggaaaactccctaaaaaaaccttctccaaatcatgatcatcaatgtggtatcattctttttcattcatctgaatcactattgaagttaatatcttcagttttctccgtatcctgctcctttgtctcatcgcctgcttcagaaaactcttcatcttctttgatatatggctcaaccaatttccagaaccaagttgaattgcttcccagaataccaatccaaaaaacccttcctttcctcttgactttgcaatccatggaca

SEQ ID NO: 73896 - DNA, 365 bp, Glycine max
  Clone ID: jC-gmfl02220086a09d1
ggggaaaaaaaatttatttatttattattattcttaaaccgggggggaaaattattgggaaaaataaagggcccccctttttttttttccccgccccaaggggttaacccccttaactttaaaccccgacaaacaaaccccctggtcccaagaaatttggggaatagggcccaacaaattttgtttttaaggtcgggggcaaagggcgttttaccggtaacttggcccccaggcctttaaaattaaccgcaaaataagggcaagggttacttttcccgggccccctggttgggttcaaaggcccacaaaggctttaagggcaaaaaaaacaacggtggggggccaacaaatattccggggggacc

SEQ ID NO: 73897 - DNA, 383 bp, Glycine max
  Clone ID: jC-gmfl02220086a11d1
cccaaaaaaagaataaaacccttccccatgggaaaagaaaattggtcccggaaccattgtttggttggtttttaagagaaaaaaaaatttttggcaagaaaggggacttataagttataagcttaaaaaagggggggggaattgttatttccgcccccgggaagcaacttggttggggctccatggtctttccggggccataaatttttttagaaatcaaaaaatttggcggttacaaaaaaagaaaaaaaccctggccaagtttgaaatggtcccattggtgccaaaaagaaaggggtggaccccttttttttttcctatggggggggaaaacaatggaagaataagccattaaggttggcttggtcacaaactccattttt

SEQ ID NO: 73898 - DNA, 481 bp, Glycine max
  Clone ID: jC-gmfl02220086a12d1
ggcaaattaagtagtttccattaaatagccaaaagcaaaattcccattgcttctcccatcatcagtctatgttatatgcatactgaagacagagatgaagtggttgatacaaaaaggcataaatcataaatatgaaaagcttattgaatgattacaaatcagctcctcagacaatggagtggctatgtgtgactgcattgaaattaggtaatcgatttcctgtttatagttttattaatttaggtaggctaaaaaagagattataacactcaagatgctggtttgtctcggatccttaagctttggtgaagctagcatcgaaaggaacgccagcagcaggcaaccaagtgctagcttggagccaaggctcagcagtgaattgtgcagcctcctgcttgctaatgagacctttgccaaacttggctcttgcttgagcaacggaacctggtccagtgttgccaaactcaagcgagtagcaatc

SEQ ID NO: 73899 - DNA, 439 bp, Glycine max
  Clone ID: jC-gmfl02220086b02d1
cgaaacatagaaagaatattcaatcagatcaaagaacgaatcccatcggcagactaacatcatcataaacaagcgttttcgcaataattaacatctcctcatccgtgataattaacagcattgtttatcttaattaattctctcgtcatttagagagcgagcatcacgagggaagcgatggcggaagcagcaccaaagagtgccatgttgacgcgggaagcatcgatgctgggacctggtgccaaagcagaaggtgactgtgcaatgttatcaccggcaccgtcggcggcgggtgttgcaagtggcaccgtagcacatgtcgctgctgctgccgcagattcaacgccaggtgcaacgataggcttgctaacctgaagaaccgaaacggggttgggttggctcgtcacggaccttacaagcacaaccttgaaaggtgcat

SEQ ID NO: 73900 - DNA, 440 bp, Glycine max
  Clone ID: jC-gmfl02220086b04d1
aaatattaaggacgcttgatattaaagtaatagtttttaaaagaatcccacatattgtgtggcaaaaatacaaagcaacatgtcaaagaatgagcatgcatgcatgttcatcatcatcatcacaagtggcacaattaagcagaggttgataagtttagttatcgcgaataaacacttgatcctccactgctgcttgtttggtcaaaagggtgaccactatcctcatcagacccaatgctggttgcacggtctaaaatattcatgctctcatcctctgtccttctgctgccataggggtccgagcgataacttccttgtgatagcctcatgctgctacgctctgaccgaaccccttcatcctctgatcccacactgctgctacgacaacttgaggaaatgcttccatcctcagatgcaacgttgctcttgtggctcaaaac

SEQ ID NO: 73901 - DNA, 424 bp, Glycine max
  Clone ID: jC-gmfl02220086b05d1
gagagaacatttttttttgtttcatcatataaaatatatatgttctgaaagaacacatacaagtacacaaaaaaaagggggaaattcataaaaaaatacagaaaaaaaaaaacagaattgagtaagagggaaggaaacatagagaaaattttagcaatcagataataagaagccagtagtagtgcaaaagtcccttgccaagagtgttggaaccccttttagttaagcaggtaccttctcccccttgagtggcttcaccacttcccatgtgaagtcagggtcatctctgccaaagtgtccatatgcagcagtcttcaagaacctgccatttccacccctcttgagatcaaggttgatggagatcatgccaggcctgaagtcaaaactctccttcacaatgctgaggatttccttgtcagggatc

SEQ ID NO: 73902 - DNA, 329 bp, Glycine max
  Clone ID: jC-gmfl02220086b06a1
accgggcccccccacctgtatcgataagctggctcgagatagtggtggaagcttccttttttgcaataatatatttgatttgatgtttcaatcctggggtattctttaatctaccaagaattaaatgccagcttgttcttgtgcatgacctcatgcaatctccgtcttttaatttggaaaaatggatccagggtctcttgcttcctggattacagattggcacaagtttgaaaaaagtggtgcttgactcttatgaatgctgacctgcttgttactctttcctcctagtgtaaggctttttcgagaaagcaaaatggcgctacaattca
